United States Patent Application Publication US 2006/0134663 A1 - sequence listing, part 130

SEQ ID NO: 435902 - DNA, 2575 bp, Homo Sapiens
tttttttcagctttgaaacaactttattagaaggctgctttaaatgacaacttctaacgtccaattctttcttaatttgctttttgacgactccagttatatgttcatatataacaatttttgcattgatctttgcatcctattgaagatttcctcatcaggtcattctggtggaatggaagtgcaaccgtgaggtcgccagttggccggcattgttaagcaagggcagcagaaggctgggagggacggagccagccccccaccctctcctccagcccccgcccaccacaaattcacagtgagaggcacctcactgccttgacattcagaaaagagtgaaataaagaaaccctcgcagcgcaggaaataactggattccaccttcaaggttattgaggttcctccctctctctccacgcccccagtcaaaccctgaaatcctaaggctgggggcaagcccttccccaacctgccaaaggaaaggagccagggctgctgccttctggccgcttttctgcctccagtcccaaaaggaatttctctggacagatgtgactgcagcggcccaaggccccccttctcctcctcctcccatcccactgggcgggcttgggaaggtacaatcaaccatgaaccataaatatgaataaaaaatgaacttgaaaatgacaagctattaattaaacaaatctataaaaatagttaggacataactctgttcaaataaatacaaaataaataggttccaagcagtgacacaagtggaatgtggggctggtcccgctgcgcccctgctggggttggacaggaacccccagggcgtcagaacagactctgagcagtcagccaagctcctgctccctcgtcttcctctggaagcacagaagtcgctcatttgtccggcttgtccttctggacaaaacccttttcccaacagtccataattaaggcctccaacaccttttccttccctccccagaacacacaaacgctgtgcccttcgccctcaaacatggtgctccactgccctcatgccacagtggggacagtgagtttggttctgaggtggggcccatcctgacagggtccaggccagctcagagcaccatgagccccagcacttgccttctgtgcagccaggccaggcagcccgagccccctgcactcccaagcatgcccgagagccccagccatcagcagggctcagatgccagtgaccacaaggccagatcctttcctcttccttcacagccaagttggcgtcaatgctgtaggttgggaagtcaggcctgggaggccacgtgacctcacctttcatcatggattatgggattggacgagggggtgggatgtgggctgtagccctcctcccaccttacctcagcagacaggcaggcagcaagagggcacagggagatgcacggcagaccagagggcaggggccgtggccaacagctggctgcaagggtgaaatggaagaactaagccggcctccaggctccaagctcactattggcaggcactgcagaaaatgtcctgtccttacacatgtgagcccggagcctgctgaccctggaccctaaggaatgcctgtggtcttcgctggaaccaacaggagggtctgctggggtcagcaggacaagccctgggcctgccagctctccccacccctctgcgggtgcgtctagggttttcacagcttggctcgagacagcttagtgttggcacattcacagaatgagatggctgcacaccccaggctgcggcccaggatcagcgagtccactgccgggcggccctccccccgtcaccgcgactgcacgcccagggtgatcttcaggttctcgtagaccacgtagctgatgctcacagctgggatgaccttcatgaagttgggggccagccccctgtacagcccgaaggccccctcggtccgcaggatatgtttgaagaggctgctcatggtcacctccggagcgccctcaatagaggcttgcgcctgcatccgggtcctgactagggccagggggtagctggccagctggccacaggtactggacatggtgccacaggccaggagcacaaacacgccggggtccgcgctgttcactgcatagtgctgcagccaggcattcttgagcgtctcgtagactgcaaggtcgatgccggcataggggatgatgcccagcatgttggggacatagcctttgtagaaggcggccaccccctctctggccaggatcctcctggcgcagtccagcattcctgagtactggcctgtcttccgcagcgccatccgggtcttcaggacctccattgggtagatgctgctctgggcgatggcccctgccaaggaccctgccacaagcctctcgtgaatcctcagagtctcctggtcactaccaaacaaggcgcttgatctgctcataggccatgaatttgatggctgattcgggggcaattttgaggacgttgatgccattgccccgccagagtgacctggcccctccttctcgaatcatctgagtgaagccaccaacgatgcccatgttgttgctgcgggaggcatggacct

SEQ ID NO: 435903 - DNA, 1963 bp, Homo Sapiens
cttatataatattcctcctcaaactgttgtttttcttggtgcctatagctatgacacattatggtatgatattgaatatggttgtggtctcaaaagtaaaaaatagttcaataacccaaacctaatcaagaataaaaaaatatactattaatcccgtgtatctttggattccatctaattttaaatatagacagtagttcagggaacgacaacctagagagttcacaaaattattaaaagctttatttacgattggaatcattcaacaaaaaagcaaaagcaaatgagcctgaaaaaggaactaagctgttgtctagaatgtcctcagaacattcgctacctcagtagctaagctgcctttgcacctggctggcatgacaacagtggctcaacatacacagcagttgcactaacagcagcacaaattttccccttcaaacttgcccagaataaagcaagaaaacaaggggagggtataaactctgccaaagtaaatgtatttaaatactgcatggaattgttaacagcctgaaccttttcccctcatttttgatagttgcagattgatgtagtaactgtcatttagcaaatgccgaatgcatgacgaagaaatcaggtggccttaaaaatccaaacacgaatgatactgatgaatgttcttggtatatcttcaaggacttctttcatgacttgacttttctttgtctaaggatagctccagcattaccgagcacctgaagcaaaggtaaagcagctagcaatgttccaaatattcaatcactctagagatagatttctggccagttgttccaacagcacaagtgagattcataaaactcaaaaattttttgagcatctctgtcattattgaaaagtctccttctggcagatattcccgcacagtggttacattgattggactttcctggcagagacacccaagaagtagtgccgtgtaggaggccacaatgcaatcctccatgtgtttgccggcatgctgaagggctttattgaggtcaagttcttcatcctcctcctccttcttatgtttctcttctgtaccatcagtcttttcagttgacacccactgtatttctccacttgtttcttgccactctccactcttatcatgctgagtggtgggagcatctttgatcaactcatctgttttactttctgctagctgggctgcccgctctcgctcaaggaatagctgcactaaagcctggacagcatgaacttgtccacctatccttaaactatcatccccttctccactacagatggaggaatcaaaagagcacgatgtttccatgttgacaagacagtgccgattccgagcactatactccactagatttatcagcagacctaagcccagcactcgaatatcaaatctctgctcctgaggtaggtactttggaacctgaagcacacagttcagcgctgtgcctatgagaccgtcctgctctcctgttttggtgctgccccactcattatcattagttaaattaagcaacaccccgatgatggccctcatgcagtcctccactgctttgcctacatggttagttacattctggtgaggcagaggcttactgtcagctaagcatatgctgtcctcagcacggttgtactgctgaatcagttcttcacaatgctgtaatgctttagctgatgaaacaataagttgggaatctttatatgctatcaagtagctttgattttcgggattatgcacagttacactttctaaaactcgtaaacatctctctgctccccatagtgaggctaccagtttctcttcatcctcatctctacttaaatgatccacacattcttttactttatctacaatatgatccagaccacccaaaagccggagttcttctttaaaccagtctcctgctcgtttagaagtaagggataataatgtctccatagctaaatgcccagtcgttcc

SEQ ID NO: 435904 - DNA, 322 bp, Homo Sapiens
acaaattccaaaagtaaaggtgtcagtccctgtggccttccttggggcttctctgaccacatgtgcccaacttcaataagagaaccaagggaccctcattttctgaggtgcttggctctgattcagggctttgcaaggggttagaagctgactgtaaaaatgggaagaggcaacggaagacatttatttctcctttggattttggggagaaccaagccctggtagggaagaggtaagggggatgattcacctccatatttcctaagcaggttgtatagggagccggtggcaggaggaaggctgttttcacaaatgaacttgt

SEQ ID NO: 435905 - DNA, 815 bp, Homo Sapiens
  misc_feature (31)..(31): n is a, c, g, or t
tatctgcattattttctctacgttgcaggtnttttatggctttggctaaagcaagtgaagcagcggaggtactaaggtgctaaactgaggcctcttggtctctgtgtacaaaacaaaaggaggggggcaggggacagccatcaagccctcttgagcctccagctgagtggaagcaaatggaagatcttcagggcaggggggaggctgggggatagggtttagcagcctcctccccccataccctctgcagccctgcactcccacacatctgtccctgctgatagtgtctattggaagggaggcagttaatctcccctacactctgttgttaatccctgacagcagctggaacagagatggcagaaaggacctatgtcaaccccatgaggcttctcctttggggcagataaacagccaggagcctggggaaacagggatgagaagggcattggtttagtactttcccaaactcaatcctaaacctcagcatcttccacaacctaagtcaacccaagacaccaatccagctccaaccctagcctaaatccaactcggcccccaaaacctgcaccatccccaaatacaggccttgcacccaacctcagccagtgctagcaccatcaccagctccatgtccagccttagcatcagtcaggggcaccagctcctgcttggatccctgccacaaaacccagccccagccacaaaccccagccctagccacaaaccccaccccttggccagctccaaagtccagccttaagcctggcaaaaccttaatcctagtatcggtcaccagtatacacttatccgct

SEQ ID NO: 435906 - DNA, 1360 bp, Homo Sapiens
  misc_feature (425)..(425): n is a, c, g, or t
  misc_feature (467)..(467): n is a, c, g, or t
  misc_feature (473)..(473): n is a, c, g, or t
  misc_feature (486)..(486): n is a, c, g, or t
  misc_feature (514)..(514): n is a, c, g, or t
  misc_feature (516)..(516): n is a, c, g, or t
  misc_feature (518)..(518): n is a, c, g, or t
  misc_feature (520)..(520): n is a, c, g, or t
  misc_feature (543)..(543): n is a, c, g, or t
  misc_feature (545)..(546): n is a, c, g, or t
  misc_feature (548)..(550): n is a, c, g, or t
  misc_feature (559)..(559): n is a, c, g, or t
  misc_feature (561)..(562): n is a, c, g, or t
  misc_feature (564)..(564): n is a, c, g, or t
  misc_feature (566)..(566): n is a, c, g, or t
  misc_feature (568)..(568): n is a, c, g, or t
  misc_feature (651)..(651): n is a, c, g, or t
  misc_feature (658)..(658): n is a, c, g, or t
  misc_feature (670)..(670): n is a, c, g, or t
  misc_feature (946)..(961): n is a, c, g, or t
  misc_feature (1128)..(1172): n is a, c, g, or t
  misc_feature (1175)..(1175): n is a, c, g, or t
  misc_feature (1182)..(1182): n is a, c, g, or t
  misc_feature (1229)..(1229): n is a, c, g, or t
  misc_feature (1240)..(1240): n is a, c, g, or t
  misc_feature (1259)..(1259): n is a, c, g, or t
  misc_feature (1267)..(1267): n is a, c, g, or t
  misc_feature (1269)..(1269): n is a, c, g, or t
  misc_feature (1275)..(1275): n is a, c, g, or t
  misc_feature (1279)..(1279): n is a, c, g, or t
  misc_feature (1287)..(1287): n is a, c, g, or t
  misc_feature (1302)..(1303): n is a, c, g, or t
  misc_feature (1310)..(1310): n is a, c, g, or t
  misc_feature (1320)..(1320): n is a, c, g, or t
  misc_feature (1329)..(1329): n is a, c, g, or t
  misc_feature (1347)..(1347): n is a, c, g, or t
  misc_feature (1355)..(1355): n is a, c, g, or t
gctcttccactctgctttattggaacggctccgcgtctgagagcacagcaggctcaaccctgcttcagagtggaggccggaccaggctggtgggtgaccagcaggactcacgacacttccaacacaggaaaggcaaactacagactgtgggcacagcacagcacaggacagcacagccaattgagcttttcttttatatataaacaaataatttaaaaattcgaataatatatagagtttctctagagagacactttgcaacaaaaaatatatataaagaatatgacctcctgggtaaatgaagcagcatctctgagcggaggaaagagggttcctcatgcactggagggggcgaagcctttgggcaggcacaaaggccattgcatatcttggaaaaggttggaggagtagagggctggctagtnagggtatctgcattattttctctacgttgcaggttttttatngctttngctaaagcaagtnaagcagcggaggtactaaggtgctaaantnangnctcttggtctctgtgtacaaaananntnnnggggggcangnnanancnatcaagccctcttgagcctccagctgagtggaagcaaatggaagatcttcagggcaggggggaggctgggggatagggtttancagcctnctcccaaaaaancctctgcagccctgcactcccacacatctgtccctgctgatagtgtctattggaagggaggcagttaatctcccctacactctgttgttaatccctgacagcagctggaacagagatggcagaaaggacctatgtcaaccccatgaggcttctcctttggggcagataaacagccaggagcctggggaaacagggatgagaagggcattggtttaggcagtgaggctcggccactcccttgggtcccatctgtagctctgcccaccaaacttgatnnnnnnnnnnnnnnnnaatatcctctggatgagcagagccagctaagaggagccaaatgtccctgataggatgggggagaggcaggactggggggaatgtcaggagctggaattggtcccagaagcccttctgactcattcagacctggactcctccaggatctggggtaggttctgatcccnnnnnnnnnnnnnnnnnnnnnnnnnnnnnnnnnnnnnnnnnnnnngangctggancttggttgggagctgctgtaggggtggggacttgggcaggcctgaantgggtaagggnagtttgctgcaagatggantcgttggnancttggntcanttgtatgnaagagccttataacnngattttnaataaaaagncaaattccncagcccacagaaaaggcncaaaaacnaaaaa

SEQ ID NO: 435907 - DNA, 892 bp, Homo Sapiens
  misc_feature (675)..(690): n is a, c, g, or t
aacagtggagacccgccgaatagtacaagggcgcaggccgccttgggcgcaaacagagaaaaggtgtgggccgccaaattagagacccccgggtagcccatccggggaaagggtcccaccggaggcacctggccgcccagcctgcaaccggaaagtgagaaagggctgctaccaggatcccatagtttctgcacgccagcttgttatgcttggctagccagggaacacggagtacaaaggtccaaactgagcctctggtctcgtgtacaaacaaaaggaggggggcaggggacaccatcaagccctcccgagcctccagcctgagcggaagcaaatggaagatcttcagggcagggcggaggctgggggatagggtttagcagcctcctccccccataccctctgcagccctgcactcccacacatctgtccctgctgatagtgtctattggaagggaggcagttaatctcccctacactctgttgttaatccctgacagcagctggaacagagatggcagaaaggacctatgtcaaccccatgaggcttctcctttggggcagataaacagccaggagcctggggaaacagggatgagaagggcattggtttaggcagtgaggctcggccactcccttgggtcccatctgtagctctgcccaccaaacttgatnnnnnnnnnnnnnnnnaatatcctctggatgagcagagccagctaagaggagccaaatgtccctgataggatgggggagaggcaggactgggggaatgtcaggagctggaattggtcccagaagcccttctgactcattcagacctggactcctccaggatctggggtaggttctgatcccgggggccagggccggacgcgtgggtcgacgatatccc

SEQ ID NO: 435908 - DNA, 880 bp, Homo Sapiens
  misc_feature (800)..(800): n is a, c, g, or t
tgataccctgccaggcttcccacagatcccctttctcattcatttagtgggcacccttttacctccaggcaccaggagaggacagccacatctgcagtgtccctgcaggacgccaaagctgaggcaggggagggagccacagaaagcagagtgggactcgggctgggggggcgggcagggccgagctggtctcttccctgcagcttccaagggctgcatcaagtgcgaagcgccctgcccggaggactggctgctctacggaaggaagtgctacttcttttccgaggaacccagagactggaacacaggcaggcagtactgccacacccacgaggcggtgctggctgtgattcagagccagaaggagctggaatttatgttcaagttcacgcggagggagccctggattggactacgcagagttggggacgaattccactgggtcaacggtgacccgtttgatccggacacgttcaccatcgcaggtccaggggagtgtgtcttcgtggagcccaccaggctggtgtcgacggagtgtctgatgacccggccctgggtgtgcatcaagatggcctatacttgaggtgggtggtgccagaggtggcctcgtccctatgcctgtgggaggtgtctggtgtctgctcaagacctgcttccaacacaaccatctaccctctacaaggccatacattggctacattaccttcaccccatacccctctcccaaaccctaacactcttaatccgtatttctaacctactctatcttcatacacatcatagtacctcaacatgtacantctcatatactacatactttaaccatctagctactacacacacacacattcatacttacactcactcacatactctatct

SEQ ID NO: 435909 - DNA, 728 bp, Homo Sapiens
ttttagagtcagagataactttgaaatttcataagtttgatattcagtggatacaaatagaacatgaattctaagttttgggtaatgttaactcagaacacttaatcaaattgagctatgtgccataaggtaatcagaccagagtccaagttgtatgcaaaaaatctataatttgattctcataaacatattaataaagtataagtgatgttttatatgatttttaaaaaaaattctcaagtgcaatgtgttttaaaataagcttgcaaatgacagcagagacatttacttctgcagttagttaactttataggagttgtgatttttttgatgaattaatgctgtagatttaatttatttttatatggaattgcataatgtgtgccttttaaaacaataacaaaaaccagagatgtgcctatacaatttgtgttcattaatgtgcctcactttttttctcagtctgaatcttctgttcagaatcttacagtgatcaagcatttttataagatatttgcaatttttgtaaatatttttggcctgcaactgggaaggggattcagagtcataaagcctaacttaagaatcctggctcacttctttggtgatacactgtagccactagaaagagaaataaacccaatggcatgtgtttacaggaagaaagattaccttcagatacttgacattaacctcatcaaaagtgtgtgaattttaaaacaaattct

SEQ ID NO: 435910 - DNA, 1123 bp, Homo Sapiens
atgaaaaagctttataaaaataagctttaagaaacctcatttcttctatttaaaaaaaagcctctttcagtgcaagtggggtgccaaggatgtagaataaataagagggggccaggatcagtgcacagggaggaagcgctcacggacgctccgctccagcccgggcatcctggccacgcgcagcgcctgcagcagccgcaccagcagcgccccgtcctgcgcccccaggagctccgtgagccgccgacgcagcttcagctgcaaggccgcgcggcccgcccttggtgtcggaccccagccctccggggcctcgagggcctgcagcagccgctgcagcctcttgatggagatgtcctggaaagccacaaagtcgatgacggcacgctcacactcctcagctcctggtaccctggtgctgagggggaagccagtgcagctggtgcacagggtgtcatgggaggaagagcctggcacattgagggccaggcccagggccgtgcagttgcggtggggctggcactgctctgagctggagctgctggctgagaaggtgcctggggggcacggctggcactgcgtgttctggctgggggtgcccggggcaatcacgccggcaccaggtggacacgatgcgtgctccaagcagaaaccagcgtgcgcgaagaagccggtgcggcagcggcaggcgcggttgtgggtggcgtggcaagcccgtgcctcctcctcacgctccccgcagaggacgttgcagtagcggcagcgctccaggtagttccagaactgcgtgtagtggcgcggtggacacgggccacacgtcgtggggctgtctcggcggcacggccgctgcacaaaggtgcctggggggcactgggcacacaccagccgctcccctgtctctgcgtcccgccaggggtaggtgggtgtttctgccactccgcgtacagccggcaccggcagcagggcaggcagcgccaacaccaggcacagcagcgacaggcctggcccctccagcgccctcatggtccttgctggagcagggagagcgcggctcagcgcggacacaggaccctgctgtgcctgaccgacatgccacctcctttgcccccggtccgcctgcggaggg

SEQ ID NO: 435911 - DNA, 2041 bp, Homo Sapiens
  misc_feature (53)..(53): n is a, c, g, or t
  misc_feature (89)..(89): n is a, c, g, or t
cgcgagaacaccttatattgtgtcacgtcccccgcagagcagcgtcagaggtncctggtagtagttgttgaagttgatgcgcagcaganaagtcctccaggtggggctggtagccgcggttcaccagcttggtcaccactttgaagagaaagtgggagtagtacttgaaggtgttgtaggactgctgcatgagtgcaaagttggggtgctctgcaccccgggggcccccagggggcccccagggcctggggagatgagctggctgcggaacttgagcacgaggctgaagatgctgtggatgacgttcatgacggggcgccgctttctccgtgagcaggcccctggggggaagcagtgctgctgggtgggctgagccgtgaccacagggacgcagccgctgcccaggcctcacctgaagacggccttgtgcaggtactctgcgtgcgcacgctggatctcctccaggtcgcccacggtggccaacctggccctgaactcgcaccaggtgacgtgcaggatctggttggcgatgtagccctggatgaccttcacgaaatgctgcatctcgtgcttgaacagctgcagctgacggaactgcacagagccggccatgtggctcagcagggctgtgcgcttgaggtggaagcagacgtccttgagcgcccacatcatgagcttcagctgcagcaggaaggagaagacgccgctgtacttgctcaggcagccctcggtgatgacaatgttgaagaggccagtcccaccttgtacctgaagctcccaggccagctcagcacatccggggcgttgggggcaaacacctcgggcaggtacttgagagcgagggagaggttggaggcgtgcggggtgtccccatgcaggctgcactgcagggccctggtcagcacagagttcagcaccagcgggttgagcagctctccgggcgtttgcccagctccaagcttctcaaagagcaggtcgctgagggactgggcgaactcgccgtcctccatcagcaggaagtgccgcagtgcctcatagtgcgcctccaggtgcagctccacgaagaagtagtcgacagcggccttgttcaccaaggagatgtgggcggccagcggtgccgtgatggagcgcttcatgagcacgggcagcgtcagcaactcgctcagctgcacagcagtctcatcagcggcagactggacctgggggtccacggggaaggcgaaggcccggggaagcacggggcgcaaaagatgagcaatgggcggctcggacatggactcgtaactgtccgggtaccgctccaagtggtactgccctgccaggcctgccaggtaggcctgctccccaccctgagcctccgccgccgatgcctccgcctcctcaccacggcctgggctgctctgggcagctgtgtcttcctgtgagttgagaggccaatttggagagaggtcctcagtgtccccgctcctcccagggcctagttcttcagagacactgtctcccggggtgttgggccaccatggttgggtgggagccacgtctgacacgttctcccccacgctgatgctcccctccccgcagcccgagctgggggaggacagagatggccccacttctacaggcagccgtggcccacagtccagcacagtgctctgtgctcccaggctgagcgctgactgggacgtgtggccaggggggctctgttggggcctgggtgtgttgggctcagcttctggtgagagagcccccagcaccatgtggggcggagggatgggtacatgggtgttccaccgtggccgggtggaaaccacatccgacacaggctcccccaagctgatgctggcgtcggacacgtgtccatgggtgttgcaccgtgaccggatgggagccacgtccgatacgttctccccaagcctgatgctggtgtcagacacatgtccgtggtgttccaccgtggccgggtgggagccatgtctgacacagactcccccaagctgatgctggcatcagacacgtgtccatggtgttccaccgtggccgg

SEQ ID NO: 435912 - DNA, 740 bp, Homo Sapiens
  misc_feature (83)..(91): n is a, c, g, or t
  misc_feature (329)..(329): n is a, c, g, or t
  misc_feature (543)..(557): n is a, c, g, or t
catatattattattatgaccattacaaatgcgagttatcttccttagatttatgcctgtacctccttgggacactgatcatgnnnnnnnnnctgtttctataaagaggaacaatattctccttcacaaaccgtacctttcagcagtttctctttaactctcaaaacttgatgatttctaacaaaatgatcacaatagctccaaggcacagaagatgctgacaagaccaccttcttccctggaaatgtcggaatcaacatttcacacagactggccaaagtagcacacagcctgggccaaaaagaccactgtgcaggcagatgtccaggntttggagcagccacgggcacagaaacccctcttctagctctgtgggtagaaatttgtttatggttatcaccttccacagagtttcccagatttgctttcttttaattaacccaaatcaatctccaattagccatatgaagtaaggaacaaagagctgtgcattgtatcaccgttaaatttctcttgttcctttgttggtttactctctgtctannnnnnnnnnnnnnnattaaaaggtaaactccattaaaatctgttagaagtaagtttttccagatgatgaattccttgtgaaaagagatgaactgtgagtttgtagctcacagtttgtaactgcgagcctcctttcctccttattttgcctattaaagtcattactgaattataaattagggtggccagatgggataa

SEQ ID NO: 435913 - DNA, 537 bp, Homo Sapiens
agatcccctgcctgacccatcccttttcagttcgacggagactctctgtcactcagaagtttaatagttgtgcctgaaacacattttctttcatgataaacatttgagtgacagagagtccagaaatgggttgtgaagagagcacaaagtgtgtgcttttattgtttgcttggcagaggttccgccatggagaacaacatcataaaatttacatttgttattgatctttttgcctgagccccaccctaatacctccattagaatctgttagaagtaagtttttccagatgatgaattccttgtgaaaagagatgaactgtgagtttgtagctcacagtttgtaactgcgagcctcctttcctccttattttgcctattaaagtcattactgaattataaattagggtggccagatgggataatcaaagctggtttcaacccatctataatccgttgatccatagataagacagaaagcttgtctcagaagatggtacttgtgtacatctcaagagaatggagagtctccgtcgaact

SEQ ID NO: 435914 - DNA, 2262 bp, Homo Sapiens
  misc_feature (1684)..(1873): n is a, c, g, or t
  misc_feature (1880)..(1904): n is a, c, g, or t
  misc_feature (2007)..(2015): n is a, c, g, or t
  misc_feature (2241)..(2241): n is a, c, g, or t
caacaacatttatacatctttttaattagattagctttacaagcaacttgagagctctttcataatgaaacactgcttttcaaattacatgactttatagtctatctgtatatgaatcctgaaaatctttgcctactcttgataaaggtctgtgttttacagctggttaatgtgttgaataaaaacagcattatgaagctttatctttaaccaggattaaacacatataggccacaaacagttttaaattttgtttgaaatagagtcctgcttggtgacaagttaatagtcccactaacatgaaatgaatggatattaaataaatggccatcctgatttcttgatcttttcacaatgattcctaagagagtatataaacttttccaaaaaatatacaatttaagacctgtctggcaagcacaacccacagatagtagaatctaatactttttacaactgtagaggtacacatttgaatgacaacaggggctcccaaattaaaaggctgtggctgtacattttgacaatcaaacaaacctcccatcaacataaaacaatttctactaaccctaaaaaagataatgcttttgagttgtggcctaacgccgcgcactgtactatagaccagatggcaaagacaacttgcgctccctgggttgggctggcagaggcacttactgtagagatgtgatgttatcatctggaaggaaggggaggaagtagaacaaaactgaatatgggcgaggaaaaaacaataaactatcactttctcctgcaaattctcctaagtgagatcactatactgaacattcaatcccatcctaagtccactgttggcttcactacacaattttttttccatgttttacatgaatagcaatggcaatcttttaataaaaattactgagcttcccatagaaaaggtctcaaattgaatacaaactatacagatgctaaaaatgtcttaagttgaaatatacagaaaatttctgtatactcacattttggcaaagaagatcaaggacagagatagaaaacctaagtgggcaaggtcttacacccataattcacgcaaaatatggataccaccctttaggttttgctaaaaagcctaggaaagtgaagtctaagacatccgtcccaattcattctttaaataacatgtatgtgaggccttgtgtgattttctaatattccttccttgtttaaaaagtaaataagaaaacccatgaaacaaaataaaattatctgattttgcatctgttttgtttttttctaagctaagcatctttcagtacaggtaagaaggctggcatcacatctgggaaatgccttaacagatatctgaggagttactgcacattccgtcagtaacaccacacttcagtttcaatgtgtacataatctccccttgatgctcttcaacagagacaaggttcttgtctgcagatcagatagatcacagtattaggaaaaaaacataacagcaaatttggaagtacaatcaatttaaggagaagcaaaaggaaaagacttagaaatgggacattattgtctacatctagaggatacatacacctgaaagcttaagaaagcccttatcttaggaacttgaagctgaggataatctcaagttcacttagtgccagtcactttagttttttaaaaaatttaacttaaaccnnnnnnnnnnnnnnnnnnnnnnnnnnnnnnnnnnnnnnnnnnnnnnnnnnnnnnnnnnnnnnnnnnnnnnnnnnnnnnnnnnnnnnnnnnnnnnnnnnnnnnnnnnnnnnnnnnnnnnnnnnnnnnnnnnnnnnnnnnnnnnnnnnnnnnnnnnnnnnnnnnnnnnnnnnnnnnnnnnnnnnnnnnnnnntgtctcnnnnnnnnnnnnnnnnnnnnnnnnntttaaactcttcttgtgtctttttccttgtaaaacattaactaaaagttattggtagtaaatggtgactgttttacaattaggtttcgttattgacaatgtcnnnnnnnnngcagcaatctttaacagttcaaattagtgtaaggaaggactacaaaacaatctgatttttcagttgtaattaaagtgctccttttcttattttaagtaaaataaaattaatcatcagttactggcaacaatcattattaagaggtcttttagggcaaaatttaatagtatgaacaggtttacaaaaatagattgatgttattttgaggaataatactgtaattttntctcaattcagtttagataaa

SEQ ID NO: 435915 - DNA, 438 bp, Homo Sapiens
aatgtttcaacaacatttatacatctttttaattagattagctttacaagcaacttgagagctctttcataatgaaacactgcttttcaaattacatgactttatagtctatctgtatatgaatcctgaaaatctttgcctactcttgataaaggtctgtgttttacagctggttaatgtgttgaataaaaacaggcattatggaagctttatctttaaccagggattaaacacatatagggccacaaacagttttaaattttgtttggaaatagagtcctgcttgggtgacaagttaataggtcccacttaacatggaaatggaatggggatatttaaattaaatggggcccatcctggattttcttggatcctttttcacaatggattcctagggggggttttattaaactttttcccaaaaaatatggcaatttt

SEQ ID NO: 435916 - DNA, 612 bp, Homo Sapiens
  misc_feature (553)..(553): n is a, c, g, or t
aaaaaatagtggcacggcactttttattttctttaatcagaaaaataagccctgcgcttctgggatggaggccccaggtgagcaccggaggaaggggcccgggtgggtggggagcgagggggcccggaggccaaagcagatgctgcaccagaggctggtcaggacccgggagggcctgcgggggtggggtcctcatgagcaagtgcggggtgctggaggtcagcagctgcctggcctgggagccagggacacccatccccttcctgacacctgaggcggcccagctgggcaagaccaggcctgcaggaccagagcctcctgtcacgtggcgcaggggtccaggtggtcaacgctgctctctggaggaccactggttagagcctgcccagctcccctgaggtctggagacagtcaaagcccccccaaacaccccctcccttttgggcgagtggcgtgccttggactccagaagactcgagtggggctgccttgagaccaggtcctgagggggtggcaacacctgaccacaggtgggggccgtggaaggggcagngatgggcccaggggtagccttgtagtgtgaggtgtgcccgaccacatgtaggtcaacag

SEQ ID NO: 435917 - DNA, 1175 bp, Homo Sapiens
  misc_feature (669)..(669): n is a, c, g, or t
  misc_feature (1069)..(1069): n is a, c, g, or t
  misc_feature (1099)..(1099): n is a, c, g, or t
  misc_feature (1140)..(1140): n is a, c, g, or t
ttgagtttcaaaacgagaacatttattatttgttttttcctcattaaagtttcacaaataaagcacagcaagacttgtctgcagacacacaggaggcacacggacagcccgtcaaccagagatggagacgaaggccagcgtggctctcacagggcagcgcttctcagaacccctggcccccctcgtgccaaggctggcctgtgtcaggcttcgcccacgccgccttatgacaaatagaggccggtgccaaggaggtggctacagagcaggggcaaggaagttatcctcatgttctgataatgaccctgcaaatcccaccccaccctcaggcacctccgtctaaggtgtccggttactccaggtaaggaggttcccaggagggccgtgttttccctagggctgatgaaacttgctccgacaagccaggccactgggaggcacctcaggatggaaaagatgctggaggctttgctggctttcaggatgccgggagccccacgggggcaaaaggggaggaaggaaagcgattctaaagacagattgctgctggtctgtcccgacccagggtcacagtgtcagcaaagagaacagcatgattctgacagggttggattttgtttcaccctcggaatgagcagacctcaaacacttgcattttcacggaaatcnacaagagagacagctagcaggacacgaggctcctgccagttctgtgtggaaaggcaccagatggtttgttatgaaacacattttggtcagaaaatagctggggttttttggttcctgggaggacaacaaagctagaagaaaaggaggtgtgagttgcgtgaggaggaggcagagaagaaagcagctttggcatcagacctgggttctactcttcactctacccctccacgcttgaggcctcagtttcctcatctgtaaagtggtcatagaatatttccaaataaatctaggtgtcaggtttcacacatcatcccaggaagtatggggaggcggggcgcagacactcaaacggacacacagaaaccagaggaagagcacagccttgcgtggaggggagaangcaggcaggggcccgacggagggcggttanagagatgatccccgtgtcagtccctgggagcagggagcagncagttacactggttccaagcacaggtggagaccat

SEQ ID NO: 435918 - DNA, 556 bp, Homo Sapiens
  misc_feature (527)..(527): n is a, c, g, or t
  misc_feature (534)..(534): n is a, c, g, or t
cctaacacagttgtattcttagctcctattatagataatgggcatttacataaaatatcctagatggcttgatggcagaataaacctttcccctcctacctgagtcatgagaaggatggagacgtcctctgccataacatgggccataaagcaaattcgacatgggatgttctgtttcagtatgacctcaaccagttccatgaactgagtgaaggaccttcattttcaaagttatttaataagtagcttaattaagcctttctacccattctcccaagatctattggcattattgaaaagcaaagtttatcaaatatctaactaaggatgtagttaaccttattaaatattgattaggaattgttctgtaatattactgaatttgtaagatctttaggcaaaggtttttgaggcaatttattaaatgtaggggcaaatgtttctgtttactgcactttttgttaaccgaaggtgattaatttctcaggcctggattattgggcttcctggcactgcatatttatccncattctngacatttccctttttgtggggg

SEQ ID NO: 435919 - DNA, 964 bp, Homo Sapiens
ccgaaaacatcggatttattaggattagctgtagtgtacactgattcctttagctctaaatggatacatatgtgccccgcagacagtatacacgcagggatgtgactgagccacagtgacatagcaaacccaacagctggcttgtgaagccatcgtgatcccaacaaggtctatgttagcaattggtgaaagaagaagagagtgagatgggacccaggtgggcctggaggtgggatcctgtgggttttcagagcacccaccagtgctccctcggtgagcccagcaccacctggaagtggagggaagctgggtcgctgctggaagggagagaggctgactctctacccctcacctctgcaaggaactgaggcctgtagggttgcggctgtcactggctacaggcggcatctttctgtaaaaagcttttcaggcatgaaacccatttctgtatggactgggctgtgttgacggtggtgcttgggccttgtgtgccaggcctctctgggtcccctccctggcctttgccttcctctcaccttctcgaggccaagctgtgcgagacctggcattccttccaaacctcagttcctccacgcccctgcgctggtgtgactccagagctcagaatgtcagcacggagccgtcagtatcgagaaggaactcaacgcaaggcttcacagctttccaaggacagggaccggctctggagtggccgtgcgtgagatgtcaggcacgctcacacgcagggtcctgtgttggctcctgacccagcagggggacatggtgggcggatgtaccagcccttctggataacatgacagtcccaatttcaggaaagtttttattttaaatattggtgattctttaaccaggaatgcaaatgctactgaagtgctgtgtgtgtctctgtgagagccttcatataaataaattcatgcatctaaagagtcctggtcagccgcat

SEQ ID NO: 435920 - DNA, 341 bp, Homo Sapiens
  misc_feature (122)..(122): n is a, c, g, or t
aaattctgggtacatgcccagtccgaagagtacctatacagagggtgccctatgtggccatcctcccaataaaaattctgatcactgagtgtctagttgaagcttccttggtagacaacacntcaaacatgttgtcatagctggttgctggaggaattaagcatatcctacgtaactccactgggagagaactcagaagtttgtacctgatttcccccaatatgctttttccctttgctgattttgctttatttcccttcactgtaataaatcatagctgtaagtacactatattctgagtcctgtgagccctcccagtgaagcactgaccttcaacacac

SEQ ID NO: 435921 - DNA, 547 bp, Homo Sapiens
aaacccgggttaatgtaaactaatgaaatatttattgatattttcataatgaagactctaaacatttacacatcgatatatagtacaaaaattatacaaattaaagaaagggggtaaagtcggtaaagtagtaatagatctattttgcttcctgtaaatattttttacgaacctatacggtgtcctttctaaaaagataaactctaattagctagcaagtttgtgctaataaaataggattatacctcttgaagcatccaacactgcactatttcacaagccagctaattctttattactcgatttcttttacatccacactcaaacacatttccatgcacaccatggagaatgaagaaatgtgcatcttccttttcacaacttataaaaacccaaagcaccaacacttgggagacaccatcggaaagacatattatttgcctcctcctggccttccagttttgcatactcttcaaagtaccattagcagtatattgatttggtatttttagccagttttcagtattgcattgaagtgggaaatgag

SEQ ID NO: 435922 - DNA, 435 bp, Homo Sapiens
  misc_feature (331)..(331): n is a, c, g, or t
aaatgtaaactaatgaaatatttattgatattttcataatgaagactctaaacatttacacatcgatatatagtacaaaaattatacaaattaaagaaagggggtaaagtcggtaaagtagtaatagatctattttgcttcctgtaaatattttttacgaacctatacggtgtcctttctaaaaagataaactctaattaggctaggcaagtttgtgctaataaaatagggttatacctcttgaaggcatccaacactggcactatttcacaaggccaggctaattctttattactcgatttctttttacatccacacttcaaacacattntccatggcacaccatggggggaatgtaggaaatgtggcatctttccttttgcacaactttattaaaaacccaaggcacccacccttgggggggacaccttcggg

SEQ ID NO: 435923 - DNA, 798 bp, Homo Sapiens
  misc_feature (234)..(234): n is a, c, g, or t
ccctggccttgaagcacatgggccacttctcagatggaggaagacagggacatatgaagtaaggttactgacggaactctggggatgctgccacctagtgatccaacttttcttttccctgtgggaaaaaggaggaatgatggcaggaagacataaagacttctaaagctcctagccgggaggtttgttgctggggttctttggcacgtagtgggtttaggccacatagaagcnacagagatacgcatgtgtggaatctccttaggccgcctcttccacgggttgtggtttaggctgatgctgagctgggcaaatcctatcagtttaccatcatcaggaatatctgagccttcgacaccagatgccagtttgaaagtgacagatcgatttgactgaggttcttccacaattttctgcaaattagctgccactattactaaatcccttccgtcgaccaggccagcagaaatgagttcctgagagacaccctctgctgtatctctcccaggagtaaattcaaatcgaatatcatttagttcttttttggaattccttaatcttagtactagactgattgggatcttggtttcttgtgaacctgatcctgaagacaagcctgagctgtttttgctggctctgcggtgggtgggagagagacttgagttggctgtgtagctatctgcccagctggctgaggtagatgagcagagatctgttctggaacttggagcaagttacccacaggatcagttgttggaaagagctcagaatttgatattgattctttcactcgggagc

SEQ ID NO: 435924 - DNA, 644 bp, Homo Sapiens
  misc_feature (154)..(162): n is a, c, g, or t
tttttttagtgattatgcttttatttatttccaacttcttataggtaacataattttcagacaatgttagctgtttttaatccatcagtaaactgcattaagattcttaataaacaaacactgaaggcctctttcatatttgtatcatctgcannnnnnnnnatatgcttgtcatgtggctttactttcagcctcactcttttcttcttccaaatggattatccttaaaccttttacctttaaagagcctgagatttatatttaactcgaacaacagtttgcctctgttgcccctgtgttcatgttttcctaagccagagtttcccacgcctcctgttcctggcagcccaaagtgccttcgctgggctactcccacctggcccttgcttttcattccttagggcagtcacttagcaccttccaaagtgcctgcacatgtttcttatttcatttcttaaacattcatattaccactatttagattgaaggaacagaattggtttgggcttgaagagaatacaaagagatctgtcttcaattatctgatagtagtaaagtttcacgggagaaagaaagatttcggttccacataaggaaaaacttggaaagttttgaatggaaagttcatagagagattcagtaac

SEQ ID NO: 435925 - DNA, 263 bp, Homo Sapiens
  misc_feature (29)..(29): n is a, c, g, or t
  misc_feature (37)..(37): n is a, c, g, or t
  misc_feature (47)..(47): n is a, c, g, or t
  misc_feature (85)..(85): n is a, c, g, or t
  misc_feature (143)..(143): n is a, c, g, or t
  misc_feature (195)..(195): n is a, c, g, or t
cttgaaataaatctatcgatacagatgantatatgantacaggtttntcaacttcagatccatgatgtacgtagccaggtcattntttgtcatgggtactgtcctgtgccctgtaggatgtttagcaacattccttacctctntccattagatgccagtaacaccccccgccccaccccacaacacctgcaaatntggcaagccataaagtctccagatattcccaaatgccttatggggtacaaaattgctcccagttaaga

SEQ ID NO: 435926 - DNA, 2076 bp, Homo Sapiens
  misc_feature (1090)..(1090): n is a, c, g, or t
  misc_feature (1250)..(1250): n is a, c, g, or t
  misc_feature (1477)..(1499): n is a, c, g, or t
attactggactctgtgccaaaggtatgggttcttgttaatccaagttagtatcaccgatggtatcgtgaacgaggatcaagttttacatcacatgataaccttgctttgatgatggttggccaaggatccaagatgccctgcattttcctcagtgcaggcacgacaaaagagattgcaggtgaccacagccgatacaggattcccaggtagtgcaaagattatttttcttacaccatcaatatccaaagttgcaaatgttgttggcaagcctggtttcataaaaaccctgccaaaatggatctgagcatgaagatcaatgtccagcacctgcttgagatagtccttttcccccatggatacaccccctgatgtgatgatgacatcagcacgactgataccctcattcaaggcattgagtaagtcatctgggttgtctcctacaatacccaagttgatcgtggggtaaccatgttcctgaattgttgctagaagagttgaacgattgctgtctcgaatcttccctggtaagaggtcatcttcaggatttagcagctcattccctgttgacatgactgcaaccactggaaacttattaacttcaacctctgtgacacctacagttgccagaagaccaatctctgaggggcccatgtgggttcctttggccaaaacacattcccctcttttaatgtcatggccgatgggtctgatatcttggcctggccgagcttgcaccagaattcgcacttcaagttcttcagtgccatcatctgattccctgataagttcggtatcttccacttgtactactgcatcagcaccgcagggtattggagcacctgttgtaacccgcatgacttgtcctggcattactgtctgagttggctgttcaccagcttgggattccccaatgatgaaacgatctcctgggccatcagcagctcggacagcatagccatcttttactgatgctgggaaggggggtaaattgtcttttgcatatacatcttgagcaaggactcgccccattccatctcggtaattgatgatttctgtcccaagcaccggagtcatctccaggactgtganaaaggctttgtccatagatgtcagaggaaaaggagacatgcgatgtcttctagccaccttggtgatatcgacagcactgtgactggctctgagaatgttctccttgctgctgcacctggactggactttgagggatccaactctactagcaactcctttngctttcatccggccgtctaatttgttttggtgttgggcaggaagctgtagagaggcgagatgtagcctgagcacgaggcgattctgaaggagtagtgctgagggaggctgtgtctcgtgggagcacctgaacaccacgagaaatgatggagtctggaatcttggcagcaatggctgctgcagttatatgtgatgaggaactatcttctgttgaagcaacaccactgnnnnnnnnnnnnnnnnnnnnnnnctcacattgaactcctttgtcttctgtctgtttatgggggctggtagtaggaggaggggaaagagggggaggtggggaaggcaaatcttcaagttcatcatgcacctcctttacttttacaatggcatcacgtaaaaggtcaatggcatgaggtagagctggcagtatgaattgaaagcattcctgagatcctttcttgctacctggcaggttaattatgagcgttttccctctgattccacatacaggcctagagagcatgcccagaggtgtaacattaagtgatcccatcagcattgccagggccatccctggtgcttcccgttctattacttcttttgtggcctctggagtgacatctcgtggtgcaaatcctgttcctccagttgttaatatcaaattaagttccttttcatcacaccaatctatcagggtttccttgatttcttctatttcatctggtactatcttgtatgctgatatagtcccacccaacaaagaaggatcttgtacgagatctttgagatttatcccactgcggtcttctgcaagattcctgaagcaactatcactcact

SEQ ID NO: 435927 - DNA, 366 bp, Homo Sapiens
aagaaatactcagtgggtcatttgaggtggtattttgacagatatccaagaaaaggtcgaggtacatctgcttctattgttggaattctttagatgtcaagtctggattgtctaggactttatcgataatggctacttccccttctctggcctttaaagtgcttttgagaattctcagccggtgtagtttttcattcattacaggatcattacatctttttataaatgatagcttgtattccatcttggttgaaatacgatgttctcctagtggtgacagactggcctgctccagtgccctgtataaatcttgcaatgagtctcctaacttttcttctctgctttcacttttttctcctatgtttt

SEQ ID NO: 435928 - DNA, 980 bp, Homo Sapiens
  misc_feature (35)..(35): n is a, c, g, or t
  misc_feature (70)..(70): n is a, c, g, or t
aacggtgttctcatcgacccactggaaaaagccanactgctgctctctcggcttggcacatgtgtggaantggcgccccttgttgggtccatctttttgcacagtccgtgtgacggaggggctggctgcaaaggcaggatgtgccactaccactgccatcaccagggttgccaaacccacctaggtggatccctgggcctggtgggcatcccagggaggcgcccaggggtctatatgccaaggcaggaggccctcctgctcccggattggggctgtctgcccacaggaagaagttgcagctacctccgttgcacttaaagaactgccggccccggttggggccctccttacggacagtgagcagcacagcctcctggccacagttgcaggtcacagaattgctttcaccagcagccgtgggtggtgggagggtctgggccagagcctttgaggacccagtctgtctgctgtcagcaggctgggggtgctggctgttgtccatcctgttcagggactggttagcctgcaggcggccagagggctggctagccctgggggggccccctgaaaatctcaggtccaggatctccctcagggtgtcgtcgcatccgccgatgcagcaaacaaactccagaggcatggtcgggggaaggctaccgcgcttaaactttaactttaacctgtacacagggtgtggctgacaaactggacacacactgctgtccctggtggcctccagcaccgagtcaggaagccacacagctgagcgacactctgggaaacccatgcagctgaggtagaacccgccattcttcttggtcttaaggaccatgtccttgttgcactgtgggcacttcctgatgggctctggcatggctgggtagatatcttcttgctgggccaactctgtcccattcccaaagtactgggccaaggcctcgtccaatttcttcctcgtgccgaattcgccacccaggcct

SEQ ID NO: 435929 - DNA, 1040 bp, Homo Sapiens
  misc_feature (910)..(910): n is a, c, g, or t
  misc_feature (997)..(997): n is a, c, g, or t
ggggtacgcgggcttcctggcgctggccgtgggctgcgtcttcctgctggagccagagctgccaggctcggcgctgcgctctctctggagctcgctgtgtctggggcccgcgcctgcgcccccgggacccgtctcccccgagggccggttggcggcagcctgggacgcgcttatcgtgcggccagtccggcgctggcgccgcgtggcagtggggttcttctttgcggtccagttggtccaaagctacatgagcttcttgatgacaatgtctttgttccaccagagtcattgcaggaagtggatgagttccacctcattttagagtatcaagcaggggaggagtggggccagttaaaagctccccatgccaaccgattcatcttctctcacgacctctccaacggggccatgaatatgctggaggtgtttgtgtctagcctggaggagtttcagccagacctggtggtcctctctggattgcacatgatggagggacaaagcaaggagctccagaggaagagactcttggaggttgtaacctccatttcttgacatccccactggtattccagtttcacctagagctgggccagtatgactaacagggagctcatgagcagcattgtccatcagcaggtctttcccgcggtgacttcccttgggctgaatgaacaggagctgttatttctcacccagtcagcctctggacctcactcttctctctcttcctggaacggtgttcctgatgtgggcatggtcagtgacatcctcttctggatcttgaaagaacatgggaggagtaaaagcagagcctcggatctcaccaggttccatttccacacgctggtctaccacatcctggcaactgtggatggacactgggccaaccagctggcagccgtggctcagngaagctcgtgtggctggggacacaggcctgcgccacagaaaccataggacaccagccgagtgtctctgagggcaccccaggattgtnttaaacccaaacaagccagtagtagaatggcacagagagggga

SEQ ID NO: 435930 - DNA, 1128 bp, Homo Sapiens
  misc_feature (98)..(156): n is a, c, g, or t
gatgcggagccaaatggcggggctcccaaggaacccgccccccgggtttgggtccgctccggggcccaagttttttaggggggacatctcgggaatannnnnnnnnnnnnnnnnnnnnnnnnnnnnnnnnnnnnnnnnnnnnnnnnnnnnnnnnnntctcgttccctagggggaggcccctggcgttttggttcccctcccattgatggtgcccatcccaggaggagggacccccccagggtccgggctgaaaacctccctcccagggtttggcccgcaaacccccctcccagcataattcaatgcccccctttgaagaaggtcgggaagagaaggatgaatccgttggccatgggggagcttttaactgggcccccactccttcccctggtggatactctaaaatgaggtggaactcatccacttcctgcaatgactctggtggaacaaagccattgtcatcaagaagctcatgtagctttggaccaactggcccgcaaagaagaccctttaaaatctgagttgggctgcaaatttctgtccaattaaagctgcatttcctcctacatagtgctgggctcctgggaactctgacgcaacctgggcaatgtcgtgaaaagtttccttatcactgaagaagcgctcagcagctgctcccttccccatgaagtgaatgaaggcttcttccagatcattccttgaatgcagaatgctgtgatctttcccattcccaggactaaggccaagtgcctgcaagagcttcacccctgagagcaccacatcaacacatgcattgactcccactgccacgcggcgccagcgccggactggccgcacgataagcgcgtcccaggctgccgccaaccggccctcgggggagacgggtcccgggggcgcaggcgcgggccccagacacagcgagctccagagagagcgcagcgccgagcctggcagctctggctccagcaggaagacgcagcccacggccagcgccaggaagcccgcgtacgcggagccgcgccacagcgccatggggacccaggcgccgcacctgcgcgaaccaactcctttcctagcccgcgcatcccgagaattccggaccggcccagcctgggatgtacggggtgc

SEQ ID NO: 435931 - DNA, 913 bp, Homo Sapiens
  misc_feature (828)..(864): n is a, c, g, or t
attaggagcgttctgcgtggaaggctgcagagtagataatgaagattctaaaaggcaaatctgagaggagttgcagtaccgtcgtgtggtttctagactacacggcgtttcgaaagtgggtaaaggccgacatcacgcgtcttcaagaagttcagaagaaagaggaagagtgttgtcatagtgggtaaggtcaagtatctttgattgcaaaaccacagtcgccagaagagaaggggctaaaagttgggacgaggaagaaggctcggagaaaggtgtcagaccaagcgggatttgccagaagctgttagggctggtcctaccgggatgagagaaaggcgcagaggccagccgagtggaaagagcagcggtgacgaaccgggttccactcagacgtccgacacttctcgccaaggggccagcgcggacagcagcgcctcccggggacctctgagaagccctgtttctgcgcggctccgcccgacctccaaggccgacctcggaggctcagagacccaggccccgttggcactcaccccactgccacgcggcgccagcgccggactggccgcacgataagcgcgtcccaggctgccgccaaccggccctcgggggagacgggtcccgggggcgcaggcgcgggccccagacacagcgagctccagagagagcgcagcgccgagcctggcagctctggctccagcaggaagacgcagcccacggccagcgccaggaagcccgcgtacgcggagccgcgccacagcgccatggggacccaggcgccgcccctccgctctcgacgaattcgagctcggccgatttggcctgatnnnnnnnnnnnnnnnnnnnnnnnnnnnnnnnnnnnnncgccgccaccgcgtagagcctccagtcgccctatatgagtctatacatt

SEQ ID NO: 435932 - DNA, 1011 bp, Homo Sapiens
  misc_feature (131)..(131): n is a, c, g, or t
  misc_feature (932)..(953): n is a, c, g, or t
ctgaggaggcattgcaaacacaacattctgcagggactgctagggtgggaaaacttctttgggggttcaaggcttgggcctgcatccttttcatcctgggagctcacatgaggcctggctacactagaganacagacttcggcccccaagggactgaggagggtgggattttgcccctgcagaaggacgggagaggctggctccttgccagatatgggatccaagctgcctgcccactcactggtgacctctatctgggcttctgtcccggcctcccccagggactcagtcaccccagctatcaccctattcatgtgcaaagagctggtgtccttgcccatccctttctcaggatccccaatgaactgaccctctgtacccagaaccacagggccgtcacatcctgagccctctgcccatgggagccacacatctcccatcgtggctaccacagaacgggccccggagaggatttctggaggcgattccttggggctgtccccttctgggctggagggtgtgacagagagcccctcttcaccctccccttcatcatcagggtcttcggtgtccttgatgagctccacgccacgccccagccgggcatagtgcagcgtgatctcctcagccagggcgctgttcagggcccgctcagggccaggccacttcaagatcaggtcgcggtccgtcagtatgcccaggggatggctgggggacatccctccatctgtggagccctccccaccaccccctgccccacccgcagccacagcagcccgtaggcggctcaggtgagacaggtagagctgctccagctcctggtcgatggtgtcctcaccgagcagctcctatgacccacacacagcctccagcccccctccattctcaatcccgggaattccggaccggtaccagcgtgttgtgtggatgtnnnnnnnnnnnnnnnnnnnnnnaaataagggtggataaggagtacggcccgcggcccgcggcgtgtgaagagtcatgtaa

SEQ ID NO: 435933 - DNA, 959 bp, Homo Sapiens
  misc_feature (439)..(456): n is a, c, g, or t
aataagtatatttagctcatagttcctattccccccatacctggcacttcctgcctgttagtcatcgtttccattctattttcagtttccctcatttgatttcctccactcccatccccacagctccacctcctcccaagtccctgactcctcctgtccaggccttcactttaaggacgatccctgccctggctaagggcatcagaggtgtctgaatgcgtgcaccccatctgtcatctgctccactctgaaaggcaatgactggagcatctgttacagaaaacagaggagggccagggcagcaaggacacagaggggcagatgggctggcagccacaggggagagggcaaattggctgcaagttacagaaactgggccgacgaagacagggccagaaatagattcactaggtgatatcacagtgacgtctgggtgacnnnnnnnnnnnnnnnnnnaaacgaaactaggtcatctggaacctctgggagcagggaatgatccttgcctcctacctggcccggctactgcaggcggggcggggtggggagattcaagtccatgtcacctttgactcatgctcactgcctctcccaggaggccttaaccacaggctccaagtgttgggggacctgcacataggacagcagtgagctactggcacaggactggagcctggccaggcttgggacagacacatcctgatagggcctgactgcgcaggccatggtacggctcctgtggtctctggggtggctgcctctcgtctggctggggaggggcccttccccaggcttgggctcgtggggccacctaaggctggctatcccatcttgctgggccctgggaggtcagcgagccccgcttgggtctcctttgcaattttgagggtccagggactcttgggcacccctgctggaaggggggggtctagaaccttctaggaggagggaatatttaa

SEQ ID NO: 435934 - DNA, 541 bp, Homo Sapiens
  misc_feature (519)..(519): n is a, c, g, or t
cgggcacgagattggggcggctcagcgcttagcccccttccccagccctcttttctccccgatttccagttgcctctggccctgcagggtcgcccaccgcccgcatttcttcatgtacatggttcctcctagactactagggccgccttagcttgctacccttttaggaccctggagctgtgccagggtcccctctgtccccgcgctcctgacaccccctcctcttgcagggccacctcctccccagcccctcctgcagcgtctctgctccggacctcgcctcctcctgctctccctgggcctcagcctcctgctgcttgtggttgtctgtgtgatcggatcccaaaactcccagctgcaggaggagctgcggggcctgagagagacgttcagcaacttcacagcgagcacggaggcccagggtcaagggctttgagcacccaggggagggcaatttggggaagaaagatggaagttcgtttagagttcccagtttggagaaaacagcagaaagggacntgagttgaaagattcaatttcc

SEQ ID NO: 435935 - DNA, 634 bp, Homo Sapiens
  misc_feature (484)..(484): n is a, c, g, or t
  misc_feature (528)..(528): n is a, c, g, or t
tgaagatatggcggcgtctgcgtctgcagctgcaggggaggaggactgggtccttccctctggaagttgaagtattggagtccatctatctagatgaactacaggtgattaaaggaaatggcaggtatgtattcaaccagtggtgggcaggagtccccctagtaatgaggagaggttctatgctgaatttgggtcttaagacattgtgagccttgattcagagataatatttctcttgtgtagacaaaagctattcctttaatcctaccccaaaagaaagagtccaatgtgtacttcctttgcccacttcactgtctcagccccatcctccccagcccccaagcccctacccagtcacatctagcgtgtccacttgatccatcctgcagaacttacaccatgggagatctacatcactttgcatcctgccactgcagaggaccaggattcacagtatgtctgcttcactctggtgcttcaggtnccagcagaggtgaagcccctactgtgtggcagcaaagggagganggggagagtccctggggtggatcacttcagcagtaacttgttatttgcccccactagtatccccatgaggtgccacagatctctatccgaaatccccgaggacttt

SEQ ID NO: 435936 - DNA, 1535 bp, Homo Sapiens
tgaaggccaaatatctttattgcctccctcccatccccaattccctgttccccccaccaagtcctgctaggaaccatccttagattccaggcccagggactccctccgagtaccaggccggtatgctccctggccccgaggcaggcgagggtaggaagaaccgggtgtccggcctttagagcgctcccagcgaacacagtcccgagtcctgcggggtgggggcccctgccagctgccaggccccttctcttgtggaggaccttcaactccttggctatggggttctggctttaggtccatgggctccttgaggggcccctcaggaggtggcagttcctgggtgtcacgggtacctttaggggcgtggcactcccctccctttgggtgcctccgttcgggctgtcgccagggacctcgactgggcttggggggatctagcatagctttctgggtttcgcccaacctttgctgatttgacctggtccctggaatcttttcacatatgtgctgggtcgccacaggcagaggaggtggcaaagtggattggacggctggtgaggtggatagttctgctgcaagggtgctgggtggttgggatcctttggagacatctacagctgactcaggttccgcaggggcaggagcctgctgaaggctgatgaagtatcggtttcgctcagcctcaaggtcaatgattccccccccgctcctgctgcctctggtagagccgcttgcgttcttcttgctggcgcaagctctctgcactgggctggtacagctccatgggctgttggggttcaggggctgctttcagtgaggcaagatcatacacgaggggctctctgcacactggacactgcacaccgactgccttctgtttggttgtagcatgctgccgttcctgttcctgctcctgtccttgtgccttcagctcttgctccatgtgctggatgtaccgagcaaggcagtggcagtggaagtagtggtaacagggtgttttggtaaaggcctccttctcctggaaaccatagaggcagatgacacactggccatgagggatgttgttatctgtgagaatttccttccctttctcaatgagttcatacagcatggcagtgcccagcccagccttggccacgtggcccagcacctgtaagatcgtgtggatctgttcatctgaaagtcctcggggatttcggatagagatctgtggcacctcatggggatactctgctgggacctgaagcaccagagtgaagcagacatactgtgaatcctggtcctctgcagtggcaggatgcaaagtgatgtagatctcccatggtgaagttctgccatttcctttaatcacctgtagttcatctagatagatggactccaatacttcaacttcagagggaaggacccagtcctcctcccctgcagctgcagacgcagacgccgccatatcttcaccggcccgcagccggaaccggaaatgcccttagggaagtcggaggcggaaaactaagaggggtgggcagctagcgtcgttt

SEQ ID NO: 435937 - DNA, 409 bp, Homo Sapiens
  misc_feature (51)..(51): n is a, c, g, or t
ttataggaaataccagagcaacagctagctgtacaccctgcctagagggcntcaagtacaaattggataaaggagcactaaggactcctgcagggataactctaacaaggattattcaatatgttttaatatattgagacccttatgcttttagaagatttgggaatgaatcactgatgggtttacccagaaaattttttgaaacactgttaatgccaaagacaataaaagttacataagtaaatttaatcatagcatactacatagctcagctgtgagtattagttatgtagacttttgatctaatctataattgtgacaaaactataccgagagaatgaagaagtggaaatatatgtggaacagagccttcctccatggtatgaaatagatttctttaaaaaataaa

SEQ ID NO: 435938 - DNA, 712 bp, Homo Sapiens
  misc_feature (235)..(235): n is a, c, g, or t
gtttcaaaagattgtttgattaaaagccagccaaaaaaaagccttcaggctgaggctgaagaacacaaatagagttgtctgtggattacatgattgtttccccagtgcaaggttcctgaccacaggcagcagatatccaaacacgccatgggagataagctgtttaaccctctggaacctagacaaaacaggaagaatggagaagtgcagaggcatacgtgaaaacagggctcancacatttccagggtggagaaatatttaataaaatcagagtcgagagaaagtcacttgcacaattcatctcctacattcactgctggccaggccaggggcacctgggttgaaatcaggctgacctccggacagccgtactagcgcactgtgtctcggggggaatctcagggtgacgctgaggccgagtccccaaaagccaaggaagccagccccacaggctggggagccctgaaggccgggggagctgtggctgcactgcctctatcctgctgagtgtgctctgcccaggcctcactccttcaggagcttgtgcttgactgtggtgctctcggagcagagatggatgaagagggtgccggcggcggtgcgggcccgcagctcctgcagctcatagtcatgggcccactcaatgttgccccacttctggatcttttctcagcccattcgatgattggatcccactcattcctttgaagt

SEQ ID NO: 435939 - DNA, 1321 bp, Homo Sapiens
tttttccgggtggagaaatatttaataaaatcagagtcgagagaaagtcacttgcacaattcatctcctacattcactgctggccaggccaggggcacctgggttgaaatcaggctgacctccggacagccgtactagcgcactgtgtctcggggggaatctcagggtgacgctgaggccgagtccccaaaagccaaggaagccagccccacaggctggggagccctgaaggccgggggagctgtggctgcactgcctctatcctgctgagtgtgctctgcccaggcctcactccttcaggagcttgtgcttgactgtggtgctctcggagcagagatggatgaagagggtgccggcggcggtgcgggcccgcagctcctgcagctcatagtcatgggcccactcaatgttgccccacttctggatctggtactcctcctccaggcgtgacagcagcacggcctgctccactgtcaggcgcaggtcaatcaggcccaaggttagcaccatggacttgagctgggcagctacaaactcaatcccttgtaaagcccatgtgttgtaagatgccaggtggctgacgagcacctcccgagttttggcagggatgctgggtcccattatgctggtggaggagctgatctccacgccgtatcttttctcagccccattcgatgattggatcccactcattcctttgaagttccactaatgtctcgggctcctccaaccctgtagcagatggtgtcggtgtccagaaacttcacggctgcccggatcagctgatccttgtttctctgggttgggttgtccaatgatgtgttgcacaatgtggtcaggtgcatggtgtagtacttgatggtatcctgctgggaatcccactcagtagccactgcaatggccagggcctcgctggggacggtaaagagcttggcttggggagttttcagcttcctgtggtccaggtttatctcaaagccaccttcaccctgtgtgatgctgacattctgataaaacctcttcctttctgtcggcggggcgtaagcccgggctggagacgggatggttggccccggactcatagaagcgctggggccacccgccggccgattcaggagacggcgtcccccgtcccgcagccggaggcagctcctccacatcgcgcccgagggtctgggaagatgcgagacgcgaaacctggagcaggaaacacagagcgatgggatccccaaagccgcacggtcgggctgtacggaaacctctcaacgcctcctcagagccctcaacctcccttggacgccgatccggagaattccggacc

SEQ ID NO: 435940 - DNA, 470 bp, Homo Sapiens
  misc_feature (85)..(85): n is a, c, g, or t
  misc_feature (87)..(87): n is a, c, g, or t
  misc_feature (434)..(434): n is a, c, g, or t
  misc_feature (457)..(457): n is a, c, g, or t
atcctctgtgtttcctgctccaggtttcgcgtctcgatcttcccagaccctcgggcgcgatgtggaggagctgcctccgctgcgngnacgggggacgccgtctcctgaatcggccggcgggtggccccagcgcttctatgagtccggggccaaccatcccgtctccagcccgggcttacgcccgccgacagaaaggaagaggttttatcagaatgtcagcatcacacagggtgaagaccacattgtgcaacacatcattggacaacccaacccagagaaacaaggatcagctgatccggggcagccgtggaagttttctgggacaccgacaccatcttgcttacagggtgggagggagcccgaggacatttagttgggaatttcaaagggaattgagtggggttcccattcattcggattgggggtttgagganaaaggggtttgattttgttaggntgcccagtttcaa

SEQ ID NO: 435941 - DNA, 1718 bp, Homo Sapiens
  misc_feature (15)..(15): n is a, c, g, or t
  misc_feature (30)..(30): n is a, c, g, or t
  misc_feature (113)..(113): n is a, c, g, or t
  misc_feature (115)..(115): n is a, c, g, or t
  misc_feature (117)..(117): n is a, c, g, or t
  misc_feature (126)..(128): n is a, c, g, or t
  misc_feature (130)..(130): n is a, c, g, or t
  misc_feature (137)..(137): n is a, c, g, or t
  misc_feature (139)..(141): n is a, c, g, or t
  misc_feature (534)..(534): n is a, c, g, or t
  misc_feature (540)..(541): n is a, c, g, or t
  misc_feature (606)..(606): n is a, c, g, or t
  misc_feature (629)..(629): n is a, c, g, or t
  misc_feature (643)..(643): n is a, c, g, or t
  misc_feature (655)..(655): n is a, c, g, or t
  misc_feature (661)..(661): n is a, c, g, or t
  misc_feature (668)..(668): n is a, c, g, or t
  misc_feature (676)..(676): n is a, c, g, or t
  misc_feature (704)..(704): n is a, c, g, or t
  misc_feature (725)..(725): n is a, c, g, or t
  misc_feature (756)..(756): n is a, c, g, or t
  misc_feature (765)..(765): n is a, c, g, or t
  misc_feature (833)..(833): n is a, c, g, or t
  misc_feature (855)..(855): n is a, c, g, or t
  misc_feature (921)..(921): n is a, c, g, or t
  misc_feature (923)..(923): n is a, c, g, or t
  misc_feature (1204)..(1214): n is a, c, g, or t
tcgggcgaacaggtntttatttggagcagngctaattcacaatttcatggaacttgcctgacacccccacccccttgtattaaaaaatgattatttatatgatgatttcaganananctgcatctnnnangtttggnannngggagacctacatctgctgctcttggggagcgtgggggtgggagaggagtgctggagggggctccagggctgggcccggttgtgggggaacaggggcccctaggctggaagggagaaggcagttctcgggagtgcttctgcgtgtgtgatatgcctctgcacacatgtcttgtgcatgtgggagtgtcacatgctgcacgaggctcacctgtctgcccatctgtgctgtgggtttggttttgtgtacacttccaagtgattcacatgtgggcacatgagtgtgtgcaggcagatgtgtgggcacacattcaagactgtgcacaagtgtgtgtgtgaatatagtgtgcgttaaagggtgatgtgagccggcctgactaggtgtaaaagaagcanatagannttatgatggggcggggggttaatctgtctcccccagcgccacgaggggcaaaatcttgggagtgngttgtatgcccagtgccccatgngaaagtgtactccnaagatccgtgcntgggangaggggnatcaaagngtgcggggttcaatggcccactccctgngcactagttcctagggccccnactggggttgtcccacagtgcctaagcctcnactttgcangccccgcctacaccctgcaaaagctggcagggaacttccagagaccttgggcccctccagccatcaancactgaccctcggggtctattnatcccctctccttttcctccccctctgttcccctcgctggccctctcccccagtggaaggcaagtntncagatccccacaccatgttcctctgaaattaaaaacatttgttagctctggacagcaggaagagtaaaaaaggaaagtaggggggtttcctctgagcagatcgccagcctgagctcccggcggcccaagtcttccaggggaactcgggagcttattttggtattgcgggagctgcccagcggccaggcgcctgtgctgggcagctgccagcccctctccaccgcgtccagcagacccgtctgcagttatttgctgtaacaactgttttgaaacagtattgnnnnnnnnnnngcccactagaatttgcttcaagtgaacactgggggaggaggaggcagaagtggggaggaaggaggagggcagggagcttccgcactggcctggaaggcgcactcgacgcctcggggcctttgcccacgcgagcaggcttttttcgggacccaagggacccacacttgggggatttgaaggcagggcttcttccaggaatctggtgaagctgaccccaaaagggctaaacccgctttgaggagaaggggcccacgcccccgggagctaccctttggccttccaaggtccttggcagggggcattttcaaaagggggattgagaactgggattggggggggcaagccaagggcccttatttaggcttcaggacccttaaaaaatttgccacaggggaggggaggcctgcttaagggccctttaggggcttagcaagggatgtctttccacacttttagggaaaccgactcccaggcttggggcctccgttccccaggcggtagagg

SEQ ID NO: 435942 - DNA, 1391 bp, Homo Sapiens
  misc_feature (116)..(130): n is a, c, g, or t
  misc_feature (144)..(165): n is a, c, g, or t
  misc_feature (746)..(754): n is a, c, g, or t
tcattttccaccatttactcttgttatcaaaaatagttcaacttttcttgcaaaacaaaaacaaaatagtacatactggacacatacatcacatttttcttcctatggctttaggnnnnnnnnnnnnnnnaccaaaagagaccnnnnnnnnnnnnnnnnnnnnnngcccaacaacaacaacaaaaacaactctacctgaccacattcacagaaaatgacaccaggatacactacaaaacagaaggaggtgtcatctgctctgtgtccaaaggtttcttctccatgtcttgtactaggcgagtaaccatcattgaacatgctgtgtgccaaatcaaaacataacttcagcatatgtcagatcttactagagatggtgaacgtagtagaaattggaaattttccagcagtatttttctttaaataagcactgtcaaagctgcagctcttcttttaaatcacaggttatttcattacacctagtcagtccttgttttatttgggctgtgctctttcaagcaactgactagatttcccttcaacagaatgtttgtgactcacttgtcttccccataaaaattagaccggaagaagtgcatttaaactgaaacatactttgtgctttacatgcaaaagagcattctaaagaaaatcctcctagcttcaacctacctaaatgcacaggctttataaaaagggattcttattaggccctctataaagaagccttcataatgaacagcaccctnnnnnnnnnctaggagcatattcaaaataaagactgtggcaaataaactattagagaaaataagtcaaagtggcggccagtggcaataagtacaatacacaaatctgggcaagtctgggagcattattccaaaattattttaagtaaatcccaattactaaataaaatctttttataattttaaaaaaattctgtcacatactacatagtctaaatttaatcaccttcagaataaaactactctccttcatttatccaattagaacactgctcaaagtgaaggagggatttagaatttcttccctagaaatgagtaacagctaaacatttgtagtctgacagaattttactttttaaaaagatttcttaaacattctaatgagggggaattttttttcataatactgctgatttaagaactgctacatacaccagtagccaatatttcatgatcagaaatggtatgatgtcagcacaaaggttgagctggacacatcagctttccaacaggagaaacatcaatgacatctgaaggcagcactgagtttcctgaactaatggctacttttccacaaaaaaattagcacaatctttatggactgactagataccacttccttacatttaatcataaactttgattatg

SEQ ID NO: 435943 - DNA, 2433 bp, Homo Sapiens
gtcaatggaacacaaaattccctgtcttaacattgtacattcggggcctagctgcccttgaggatgtcctagttacaccctctctgatacctgtggagtttaagcaccattcctaccgctgtgtcccttgggagggggtgcagtggaagctcttaaaggggaatgcttgctctgcctctgtggctttttgtttgggaaagggagttgggattggaggatttagatttgaggtcatgatgtcagagcacaccaggaactcccaaggcttgttgctgaagatgcccacgctgtcaaagtagggtggtgggggagacagcgagggcagttcaggacaccaggcactcctttgtctggtagagaggaggaggggaaatggagctattccaggatacaagggatggcactgagggatgcataagtcccctgcctcccttgtctcaacatgttctcctctgccagcccagtcagcttggggagctaggtatcagaaacctgaaggattcagcccgctttgtcctactagtgtctataagtctctgtcctgagatcctggggctcctcctatttctagaagggatgaggtgccatcaaaaataacttggctggtgtaacagtttagagaaggaagtcacacctgtagcctggctggcaggcaggtggacatgaggctgagaagggaagccagatgtcagaacatactaggctagcatgcctgcttctagctttcaggacccaatgtacacatacacatgtgtatcatgtatgtatatgcatggacactcaagcacaggaggggttatgtgctctgatctttgaaaccagagaagggaggaaaagccttatggaggtccctcccccaccctaataggttgctaccctcaattgccatctgcccaccaaggcccctgcccagtgctaggcagatagccaagtggtaggggtgacatgactccactaaagcagcagcccaaggaagtgagggaggggacagaggctgaccctcctcaaagccccttgttgtagtagaccacttcaacgctggggttttgctcatggatctgagctctcagctctggttccaggttgcttatgtgtatggagctcttctgggggaatagggcacagcacaggggggttgcaaataccaggcagaagcccaccagtcccacctgcaggggtgcccccagccaggggcggcgcttcaggaagtctttcttctccagagtgtccatgatcagtggtgggatggccatggccaggaatggccatgcagattcttgaaatcaccacctggaagattccctgcttggctgcagtcaccgagtagccaagcctctgacctgcctcatcagccaccgggatgcccacctgcagctctctctgcctcatcagggggatgttgatgcagttggcagctgccactgctgcaaagggcacaaatctgccgaccaaggggggcaggtgcttggtgagggatttgagtcccagggccgtggccacagctccagtggtggcactcacataggctgtccccagctgcctcacagtgatgggagtgtcaccactgcggttggagtagttaacaatggcattgaaggactgattcacccactgccagaacaccacggttggggtcttcctgtagaatgtgagcatgcagccagtgatggtcatgttcatgggcacctgggctgacatgcggccaatcaggaccaccttctcccctgtgtccggatggaaggcggagtcatacacatacttggccctccacagctggtcctcggtgatccctggggtcaccacgccggccctgtagttctgcacgatgttccgagaagcttccagctgtgccccggacagcagcagatttcgaggatcagtaacagtgaaaaagtgccgggctctgcccaggaaagtactttggtcccagcgaggttcctggatgttgatgtctaaaggcaattcacccattttgctttccatcgctctctgaagctctcagaaccgccttcctctctgcctccgctgtcgccgccgggccctcccagccatcacgcgggacgtcacgcgtgacgccgaccagcagggaggggcaggagcttcccggccgcgcccacccggtgggcacggggattggcagaacccagccaccacacagagcacgcctgcagcaaactcaggctcacgtcccgctctgccccgtgacgtccctccacggaggcctcaagggtgcccagggaggggtggcaattccaggagccccggtagctggctcggctcagagaagaggtggttcgagccggaggggaacaagccagacccaagccctaaatttgcggaatgagctagggcgtcagaaccagaactggggtgggtaaagaactccgctgcccgggaccaggtaacgctcggctgtccgtggcgcctaaggga

SEQ ID NO: 435944 - DNA, 758 bp, Homo Sapiens
ccacctggaagattcctgcttggctgcaggtcaccgagtagccagcctctgacctgcctcaccagccaccgggtatgcccaccctgcagctctctctgcctcatcagggggatcgttgatgcagttggcagctgccactgcttgcaaatgggcacatattctgccgaccaaggggggcagttgctggggaggaaggttgcttgttcaagtgggccctaagggccatgggctgttgagggactcttggtgagggatttgagtcccagggccgtggccacagctccagtgtgtggcactcacataggcttgtccccagctgcctcacagtgatgggagtgtcaccaactgcggttggagtagttaacaatggcattgaaggactgattcacccactgccagaacaccacggttggggtcttcctgtagaatgtgagcatgcagccagtgatggtcatgttcatgggcacctgggctgacatgcggccaatcaggaccaccttctcccctgtgtccggatggaaggtcggagtcatacacatacttggccctccacagctggtcctcggtgatccctggggtcaccacgccggccctgtagttctgcacgatgttccgagaagcttccagctgtgccccggacagcagcagatttcgaggatcagtaacagtgaaaaagtgccgggctctgcccaggaaagtactttggtcccagcgaggttcctggatgttgatgtctaaaggcgttcacccattttgct

SEQ ID NO: 435945 - DNA, 823 bp, Homo Sapiens; identical to SEQ ID NO: 315778

SEQ ID NO: 435946 - DNA, 2435 bp, Homo Sapiens
  misc_feature (88)..(88): n is a, c, g, or t
  misc_feature (164)..(164): n is a, c, g, or t
  misc_feature (218)..(218): n is a, c, g, or t
  misc_feature (260)..(260): n is a, c, g, or t
  misc_feature (287)..(287): n is a, c, g, or t
  misc_feature (292)..(292): n is a, c, g, or t
  misc_feature (353)..(353): n is a, c, g, or t
  misc_feature (403)..(403): n is a, c, g, or t
  misc_feature (425)..(425): n is a, c, g, or t
  misc_feature (525)..(525): n is a, c, g, or t
  misc_feature (590)..(590): n is a, c, g, or t
  misc_feature (710)..(718): n is a, c, g, or t
  misc_feature (939)..(948): n is a, c, g, or t
  misc_feature (1021)..(1034): n is a, c, g, or t
ctatgggccgcccactccaccaggcgtctgtattttttctcctctacccgaccggggaggggcgcgcacaaaacaacagacctcgttngaagcaaacggccgccctcagaggtagtggccgctggtccacacagaaggaggtgtgtagaacgatgaggggaggnggagcaccccgcggcggcagcggcggtggatgaagaataaaccaagagggaggnttatttccaacaaggagagaagataggcggcccaggggtgtnagtggccgcgagacaacgttggtcagngtttnatgacccccactttatttttttcgtctagacgacaagaccaaaaaatatcgtccctcttanaacgaggtggcgagagagtttttcccgcgcgtgtttcatcatggtgtttntattctatgggcacacatatcnagatagtattttgcgacctccagggagaggggagcgcgagggggaggcacttcgtgaataatatattttttgggaaagtaatattgcccaagaaaaagcntttttacgacgggttgtggtgtgggggagacatcccccagccgcatgctttgtgaaatatatagngaaatttcgcccagaggtttagatatggtgggcccgtttcgggcgtgaggattttccgcattatctttgtagagaatattttgtgtttacccaaataacaaggccatccggtggttatannnnnnnnngcggggccgtgttatctttgtgtggggggggagggagattccccgagggccgcgttaagttggatgggcccaagggatttttctttagggaaaaacaggttgaatgagccattttttcacttttcctaaattggggctcctcgctccataaacgaaatggttctagaaaagtttctcgaggggccggagggcggcccgacacggtttgattcgtctttgcnnnnnnnnnncttatacacagttgcattttattacctccacattttgaagcagttcatgaccagcatagtgctttgggggcannnnnnnnnnnnnncaataaatgaaagcatttaagaaaaaggcacgtattccttgaataggtaagaaaagctccccatctgtcccctccctttttgagggagcagcccctatgggaactcgtattggtaccccagaaacattcagcaaagcaaccattagcctccctgacccctctccccgcttccccagcagctaggatgaaggcaacatattcctcacaggtcatttgatcttgaggtccttcaaggctgactccaagctcttcacatcccagatactcatgccgccatccatgccagtggtgcagaactgcgagcacttggccttgccgccgctgagcaccgagatctggctgacgctgttcttgtgcagcgagtctaggcccgcgcccgcagccgtgccaccctcggagctcgccttcttgtccaggttctggaagcgctcgcgggccgtcaagccacgctgcgagctctgcttaggaacgtccagccgcccgccgaagctcagcatccccgcggcggcgtcataggtgaacagcaccgggaagcagtcgtggcccgctgccaccaggctgttgtctgtgatgaaggtcagcgccagcagtggtagtgtttcagaggccagagtcgcgacggccatcttcttgtcggcatcagccaggcagacggtgctgtcgtggcttacccaggccacgcggctcccgctggctgagaaacagacgccatgtacccagccgcagctactgctggattcgaacatcagttccccaaagggcatcttggagccccacggggtgggtgccggccgttcctccacctccttgatgtaggctgaaaagatccgacacttgaagtcacaggagccggcagccagcagcacattgttggggtgccagtccaggctgaggacggtggagcggatgggcttcttgatgtgcttgcaaacccaccagtcattctcctgctcgaaataacagatggagatcacacgagagccgctgcccacagcaaacttgttctcgttgggggcccagcgcacgcagcgggcagcccggttgatccgcaggatgaccagcgtgggcttccatgtgcggcccttcagcgtccacacgtaggcgttgcggtctgtgccgcaggtcacaatacggttactctcgggggcccagtcgatgcctgtcacctgcccgttgtgctccttgagctcgtgcaccttggtccatttggcaccgctcttttcatagatatgcacctcatggttgttggggcagatggcaatctgggtgcggtccttgttccaggcgtggcagctgatgggctccaccaggaagctgtggtaggccatggcggcttggctcctcccgcgccccggccgcggactctgggcagtcgacgcgccgaaccggctctgggctccg

SEQ ID NO: 435947 - DNA, 1056 bp, Homo Sapiens
  misc_feature (44)..(44): n is a, c, g, or t
tttcgtggaaagccgttcgccggggccggttcaaaggccacggntttgcgaaagtttttgcttaggaacgttcccagcccggccccgccgggagggtccagcattccccggggggcgggctgtcatagtgaaacagcaccgggaaaggcagtcgtggcccgctgccaccaggctgttgtctgtgatgaaggtcagcgccagcagtggtagtgtttcagaggccagagtcgcgacggccatcttcttgtcggcatcagccaggcagacggtgctgtcgtggcttacccaggccacgcggctcccgctggctgagaaacagacgccatgtacccagccgcagctactgctggattcgaacatcagttccccaaagggcatcttggagccccacggggtgggtgccggccgttcctccacctccttgatgtaggctgaaaagatccgacacttgaagtcacaggagccggcagccagcagcacattgttggggtgccagtccaggctgaggacggtggagcggatgggcttcttgatgtgcttgcaaacccaccagtcattctcctgctcgaaataacagatggagatcacacgagagccgctgcccacagcaaacttgttctcgttgggggcccagcgcacgcagcgggcagcccggttgatccgcaggatgaccagcgtgggcttccatgtgcggcccttcagcgtccacacgtaggcgttgcggtctgtgccgcaggtcacaatacggttactctcgggggcccagtcgatgcctgtcacctgcccgttgtgctccttgagctcgtgcaccttggtccatttggcaccgctcttttcatagatatgcacctcatggttgttggggcagatggcaatctgggtgcggtccttgttccaggcgtggcagctgatgggctccaccaggaagctgtggtaggccatggcggcttggctcctcccgcgccccggccgcggactctgggcagtcgacgcgccgaaccggctctgggctccgcgccggagcagcagccacttcctcgtgggcggggggcgggc

SEQ ID NO: 435948 - DNA, 1251 bp, Homo Sapiens
  misc_feature (722)..(848): n is a, c, g, or t
  misc_feature (865)..(988): n is a, c, g, or t
  misc_feature (990)..(1013): n is a, c, g, or t
  misc_feature (1178)..(1178): n is a, c, g, or t
  misc_feature (1233)..(1233): n is a, c, g, or t
gttagtcttctctaattttattacagggcatgttggggacaggggagggaagtgttagaggagtgacagggcagcccggggccctctcccaccctgagcctcgaggcctggtgggggacatgaactgcagaggcatcagataaggcctcagaaagcccaggccatcattttccatgggaccaggctggctcaatgtggaactggccctcccagagcagcaggagaagggctcgcatgggctgcccccgtcacctgtgcctgacaggatgggggggaggcagagagagagcatcagacgccctccctccccataaggggcatgggggatggggacacttcctcccaggacacagggagcctggctgagctggctggctcatgccccatctggtctggaggtcagaggggagtgagacactctggtttgaaaggccttcctttccactttggggaaaacaggcagggagagaggtgagggtgccatgccaaaaaacacccccaaatccagatgcagactttggagccacatgtgggtttgaatctcaactctacctgagtgaccctgggcaagtcacttcacttccctgagactcaagtttcatcaagatgggaacaatgagcatctgcctcacaggcttgtcgtgaggattaagtgagaaggtgcgtgtaatattagcgatgactggatgatacaaaattaagtacaaggctgggcacgattnnnnnnnnnnnnnnnnnnnnnnnnnnnnnnnnnnnnnnnnnnnnnnnnnnnnnnnnnnnnnnnnnnnnnnnnnnnnnnnnnnnnnnnnnnnnnnnnnnnnnnnnnnnnnnnnnnnnnnnnnnnnnnnccatggtggcatgcacnnnnnnnnnnnnnnnnnnnnnnnnnnnnnnnnnnnnnnnnnnnnnnnnnnnnnnnnnnnnnnnnnnnnnnnnnnnnnnnnnnnnnnnnnnnnnnnnnnnnnnnnnnnnnnnnnnnnnnnnnnnncnnnnnnnnnnnnnnnnnnnnnnnnttgagaacaagactggctggggaaggctcagtggacacgcccaaggcaagtggggtaactcggcacataaaaggcccaggagtggctgcggagatgtctgccttccttcttcctctgccaggctgagtgagccccgggtggggtgagggggtggggagagaattnggggtttgggagggggcagcctgacttcaagaccttaatgaaagagagtcacagncatgcctgtgggcctttg

SEQ ID NO: 435949 - DNA, 2423 bp, Homo Sapiens
  misc_feature (119)..(128): n is a, c, g, or t
  misc_feature (163)..(222): n is a, c, g, or t
  misc_feature (229)..(310): n is a, c, g, or t
  misc_feature (323)..(347): n is a, c, g, or t
  misc_feature (370)..(493): n is a, c, g, or t
  misc_feature (1471)..(1471): n is a, c, g, or t
ccaaggcggcccaggggttgtaatccccgggggtattcaggtttttcacacccgtttggaggggtttccacttcgcccgaagtcttaataaattccccccctttcccaaaaaaggccannnnnnnnnntaatttaatttggaatccccttggatcccctttgnnnnnnnnnnnnnnnnnnnnnnnnnnnnnnnnnnnnnnnnnnnnnnnnnnnnnnnnnnnncgggggnnnnnnnnnnnnnnnnnnnnnnnnnnnnnnnnnnnnnnnnnnnnnnnnnnnnnnnnnnnnnnnnnnnnnnnnnnnnnnnnnnggccccggccccnnnnnnnnnnnnnnnnnnnnnnnnngggggcggggggggccgcaaaannnnnnnnnnnnnnnnnnnnnnnnnnnnnnnnnnnnnnnnnnnnnnnnnnnnnnnnnnnnnnnnnnnnnnnnnnnnnnnnnnnnnnnnnnnnnnnnnnnnnnnnnnnnnnnnnnnnnnnnnnnngtcagaactgtatttgttattcatacatttgcgttgatttaaatacattacgtacaatttctacattggattagaagaacgacacagggggcagcaacactctcgcagcccagcctccattccctgacactggaggcagggcctatggctggcagagggacggtgttccatgagtgccacccagaagcctcccccggcattctgggcccctggctcttccagagtccacattcaaggcaacctgagcacaggcttgagggagagtggagaaaggccaggaaaggatgcccacactcttgcctgccaggcccaggaccagctcgctcctacactggacccaatttccttctgatcacagagctggtctggatcaagacaatgtggagatctggtgtggaggctgtggccaggtgaggcagccgggctccctgttagacccccaggctctcttgagcaccagatgggcactttaccaacaggtttgggtaaaaatgtctacagagagctatgcacacctgggtccccttctggctcctacagtcaaggggcaagtgttctctcgaacattgttcccaaggccagtgtccgagtcagctgcatgtgattgtcggggctgggattggggcaggcaggcgagctgtaccttcgtccacagggcatgcacatccagctctcagaaattcttcctgtcagccaggtggaagcccgggacaagtggactcttggtggctggactggaaggggaccggcggggaccagcctggaccagctgaccagagggctgcacatctctgctctgcagccgggcaagcagaggacatgcagccatagtcctcactccctttctttggttgtttttcaaaccttcaagatagttactttctgaggttgactgaccaatcgcaaggtgccagaattgtgaaatgtccagtagcacagggcatgaacacagctgcccctccagacacaagatggcanccctttttactccctcctgaggccgtactttgctttggtgtagaaatggctcaaacacctggcaagtgggggtggggagtgaggcaggcaggggaaaagacacatggaagcaagaagatacgcactgagctgcgcaggacctgggacagtttgaaggcctctctcctttgggcctcacctttctcagggaagccatagagaaatcggcctaggacaagtcagagagaaaagggaaactgccacttatgaggcagaatccacgtcctgttacttccaccaagcagcagcggtagcacagaaaaaagtccaagaacctaatagcctgtcctcttggaagccaagactcatcccagagcccttgcagagacccactcccgaagacaaactgaactcttacatcaaaagagttggggggaaaaaatttaaaacgagaggaacaaatgagaagattgggaccaaggactcaggaagcaaggtgggatatgttcacccatagaccacttagctcccggcatacactccggctgccgtggatcacttttacatgctgggagtcaactttctattaaaatataaatgctaagactagctcttcctgcctctgcttgagaaacagacaagctgtaggccagcagagagcagagaggttctctatgattgtgtgcggaagtgctggcgggggtaaagcaaaaacctcccttccaggagaactgtttcgaagcttgcagccagcccacagcactgatgggagatggaggaggcttggcaaaaacccaaaagaaaggtgtggcttctgtctgtcccagtgctgtggtactgcgagtcatccagttgccctctgacaccaccttggctcatgggaggaagcaactgcaaggcagctgaatgtcaggtctatgcaaatttaggcctggattaaaggtttctgacatgagatgacccggggttctgc

SEQ ID NO: 435950 - DNA, 795 bp, Homo Sapiens
  misc_feature (282)..(544): n is a, c, g, or t
  misc_feature (546)..(557): n is a, c, g, or t
tggaatgacggcagcaccatttttttccctttccttaagaggctaactgaaattgattaggattcttgagagacgtaactaaaaagttgaatcaaatctatattcctgctatagatttaataaaaggaagacccctgtaaagatgcaactacaacctgaagcgtctgctgaggagaggactgggcagcttgttgaaggctcgtcaaaagtagcgcttagttatcacaggcctgcactcaacctcaaaaagcgtaaggtttaggccaggcacggtagctcatnnnnnnnnnnnnnnnnnnnnnnnnnnnnnnnnnnnnnnnnnnnnnnnnnnnnnnnnnnnnnnnnnnnnnnnnnnnnnnnnnnnnnnnnnnnnnnnnnnnnnnnnnnnnnnnnnnnnnnnnnnnnnnnnnnnnnnnnnnnnnnnnnnnnnnnnnnnnnnnnnnnnnnnnnnnnnnnnnnnnnnnnnnnnnnnnnnnnnnnnnnnnnnnnnnnnnnnnnnnnnnnnnnnnnnnnnnnnnnnnnnnnnnnnnnnnnnnnnnnnnnncnnnnnnnnnnnngcataaggtctgcctacctcatgggcacccaaacagttcagtgccaaactagtaccagtaaagccatgcctgcctctttcaccaacagtccagagtatatttcaaaaatatctttattaaccaaggaagcaattactgcaaacatcaggacaaaggacattctaatctaggacttgagttaaatagaggtttacacctaatcacaagaagagagggaaagcaattacgtgtgctgaaa

SEQ ID NO: 435951 - DNA, 823 bp, Homo Sapiens
atcggaagttgctttgtttgcttcgagatggctgcggggatgtatttggaacattatctggacagtattgaaaaccttccctttgaattacagagaaactttcagctcatgagggacctagaccaaagaacagaggaagcattagataccatctccagcctggaacattgagcaaatttggctgcattggggcattcacttggtttcttcaaagatgtctgttggagctattcccatacccactgaaggatctgtagtcttgtcttcattctatgtagccatgttcaaggatgtaacagactggttttgagatacatgaagctgtgtcttaagttactctgagtttacacatgaaaaggtgaacatcatcaaaaaccctggacatagttccctgagaactgcctgccgaatgacctgaaggctgaaattgacaagttggccactgagtatatgagtagtgcccgcagcctgagctccgaggaaaaattggcccttctcaaacagatccaggaagcctatggcaagtgcaaggaatttggtgacgacaaggtgcagcttgccatgcagacctatgagatggtggacaaacacattcggcggctggacacagacctggcccgttttgaggctgatctcaaggagaaaccgcattgagtcaagtgactatgacagcttttccaggcaaaggcacaacgacacggccggactcaaaaggagaagaaaagctgctcgtgctcggtccaacaggggaaaactcggatgaagaagcccccaagactgcccagaagaagttcaagctcgtgcgcacaagtcctgagtatgg

SEQ ID NO: 435952 - DNA, 1434 bp, Homo Sapiens
tttttttaacatgtatagcttttatttacctacccaagttccttttacatgtgagttatctgcattccaccttgccccctctcccaggatgaatcctcttggcacagaggaaggggtgccccttcaactagggccagagcctagatgacctggtggatcccccaccatgaaaaaagcaggaagggaatggagaagaaaagtgttgatcacacctagccctcaccacaggagggggaatgaagaggtctgggggactgcccccatgctatgccccagtccttaaatacaaagcaaggagaatgaaaaggaccctccctctgaaatacagcaccgacctcagcatggaggcaaaaggacagtgggcaagaccacgtccctccgaagggagagggctgaaggagagcacataccgttagtggctgcggcacccctccctaccagggtctgatgcagcctcagcaccgggagtggggagaggggaggagaagggatgacagcactgtgccatccactcctccctgaacccctggccccagcacaggcattcctctgcccactagcccaagtcaggggatgtggaagaaactgtgttggaatccaaggcccttatctatttcttcttccgttcttgggagcagcgtgggcaaaaccatttcccccgaggcttggttgtcagccccacacaggcaaaatggaaccactcaatggaacaatcagggttgtcacagccaatcatctctccataggagacctggtgacaaaggcaataggtgggttcgttgggatccacaggcatatccaacacatcagaggggtggacactgccaaaggtcactgagggcatcccatactcaggacttgtgcgcacgagctttaacttcttctgggcagtcttgggggcttcttcatccgagtttttccctttggaacgagcacgagcagctttcttctccttttgagtccggctctttttgcctttgctggaagagctgtcatagtcacttgactcaatctgtttctccttgagatcagcctcaaaacgggccaggtctgtgtccagccgccgaatgtgtttgtccaccatctcataggtctgcatggcaagctgcaccttgtcgtcaccaaattccttgcacttgccataggcttcctggatctgtttgagaagggccaatttttcctcggagctcaggctgcgggcactactcatatactcagtggccaacttgtcaatttcagccttcaggtcctctgttctttggtctaggtccctcatgagctgaaagtttctctgtaattcaaagggaaggttttcaatactgtccagataatgttccaaatacatccccgcagccatctcgaagcaaaacaaagcaacttccgatccgccccggccgctctcgacgaattcgagctcggccgatttggcctgat

SEQ ID NO: 435953 - DNA, 1052 bp, Homo Sapiens
  misc_feature (47)..(83): n is a, c, g, or t
agatgatagatcatataggcgaccgcaggcttacgcggtggcggcgnnnnnnnnnnnnnnnnnnnnnnnnnnnnnnnnnnnnnatcaggccaaatcggccgagctcgaattcgtcgagagcgggcttttgttttgcttcgagatggctgcggggatgtatttggaacattatctggacagtattgaaaaccttccctttgaattacagagaaactttcagctcatgagggacctagaccaaagaacagaggacctgaaggctgaaattgacaagttggccactgagtatatgagtagtgcccgcagcctgagctccgaggaaaaattggcccttctcaaacagatccaggaagcctatggcaagtgcaaggaatttggtgacgacaaggtgcagcttgccatgcagacctatgagatggtggacaaacacattcggcggctggacacagacctggcccgttttgaggctgatctcaaggagaaacagattgagtcaagtgactatgacagctcttccagcaaaggcaaaaagagccggactcaaaaggagaagaaagctgctcgtgctcgttccaaagggaaaaactcggatgaagaagcccccaagactgcccagaagaagttaaagctcgtgcgcacaagtcctgagtatgggatgccctcagtgacctttggcagtgtccacccctctgatgtgttggatatgcctgtggatcccaacgaacccacctattgcctttgtcaccaggtctcctatggagagatgattggctgtgacaaccctgattgttccattgagtggttccattttgcctgtgtggggctgacaaccaagcctcgggggaaatggtttgcccacgctgctcccaagaacggaaaagaatagataaggcctgggattccaacacagtttcttccaaatccctgactggggctagtgggcagaggattgctgtgcttgggcccagggttcaacgcagaatggatggcacaagtgctgttcatccccttttctcccctctcccactcgcgtgctgaagctggtcagacct

SEQ ID NO: 435954 - DNA, 462 bp, Homo Sapiens
  misc_feature (437)..(437): n is a, c, g, or t
caacatgtatagcttttatttacctacccaagttccttttacatgtgagttatctgcattccaccttgccccctctcccaggatgaatcctcttggcacagaggaaggggtgccccttcaactagggccagagcctagatgacctggtggatcccccaccatgaaaaaagcaggaagggaatggagaagaaaagtgttgatcacacctagccctcaccacaggagggggaatgaagaggtctgggggactgcccccatgctatgccccagtccttaaatacaaaggcaaggagaatgaaaagggaccctcccttttgaaatacaggcaccgaccttcagcatgggagggcaaaagggacagttggggcaagaccacgttcccttccgaaggggagtaggggtttaagggagagcacattacctttagttgggctttncgggaaccctttcctttacaggggt

SEQ ID NO: 435955 - DNA, 681 bp, Homo Sapiens
gagcggccgcccgggcaggtacttcagctttcagtccaatgagtcagtagcaaattccactaatatttcagctggatcttgaactattgttttataccacaagcttcttctgttttatccttgaattaagaatagatagccttttatgcccctgatatttatggtgacacactaaaacaaaaagcaataggctggacatactaaagtagctcaagtacttcagaggtcagagttcctttgaagcaccttaacacatcacttacggatcaaggacaatgtggcataatggaagtatttctcttaaaagactgtgcagtaagaccagaagtatctctgttgggaaatcaaaatgtcattagtggaaactgcaaatttagacctcagtgaatatggtggtcgtctgtctcagttctgttgtaaaatgagattttccagttcatctgcagatcgcaataaaaatgcagctgattctcgatatcctgcaacaagctgtctcacggcattgatttcagttggactcagctggggtctggagtttgagctgctggaggatcctgagctagtcgccaattgtctcttcatgctgagatcagtgggtcccctgctggaagcatgatttagatttagcagacccccttctagccctttgtaacttttggaactataggtccgatttccatt

SEQ ID NO: 435956 - DNA, 1972 bp, Homo Sapiens
  misc_feature (29)..(29): n is a, c, g, or t
  misc_feature (40)..(40): n is a, c, g, or t
  misc_feature (59)..(59): n is a, c, g, or t
  misc_feature (91)..(91): n is a, c, g, or t
  misc_feature (1884)..(1920): n is a, c, g, or t
cctgaagtccttcctcaaagaggcgatcntgaaacctacnccaagtgccgtgagcatcnggagaatgcccgtgcagcagcctcccagggtnagtatgtgatgggctggcatccgtttggaagcttagatactgggctggtcattaaaaccttggcttaccttacccgtttggggctcgatgggtgctaaagcagttctgtttgtactttctcgaaaaatggaaggctgtcaatttaaattaaatttatattggtccaaaaaaggccgggtctaaaggatttccaattcctcagaggcagacagcaagggggaccctttctccccttccttctcttcaagtgcttgcttcccagcccactggacatgcgtgtcctttgtgtcgcctgctccctggaggaataaggtcccaagcaccagcagtgcacaggccagtccttggcgggtggcctcagcacagtgacctgcccggcaggaggtctcagcaccttaatcacaggactttcctgcggtgtctctctagcgggtcagacactgcccttgggtctgtcccaaggaaccctgtccttcccccagatctggaggccccgggggcaaggcacggggagcgcctagtcctccgggatgggagtgttgcagttcccgtggtagatcttgacgtggccctcacacctgaaataggcctcgaagacgtcactgtagccatggtccctccaccaggtgcacagctgccggttcggggtacagtccagcacatggaagagcttggggtgctccatgccgatcatggtgaagaagtcctggtccccgaggtggccgcggaagtggtacttgtcggccagctgctgcacctgcgccggctccagcaggcggctgtagagcggggactggcgcatggcctccaggttcagcaacatcaccccgctgttgaagcccggcagcccctcgggggcgggcccccaacccgggtctgggggttctcatggcggaactgccagaatgtgtgcctgtaaactggctgcatctcccgggctatgccgatgatggcgcctggcaggaaactgtcaaattcctcaaacaactcccggatgttggtcttaaacttcaggtctaggtccagctgaatgatctgcaggatctctttgggcatgatctgatgcatggcgaccgagaggaagaagatggagtcactgtagtaggttcccaagccagcactgaagtgcttctgcatggcctccacgatggggaagagcttatccgtcagcacagcaacatcgtggaagatgaccttgcacttgaagccagcggcgggcggcaggagctcccgcagcaggcccttggccacctcgcggctggcctcctcgctcacgaagtgaaggttaagcacctcgtgcgcctcgaacttggcgaggcgcagcagtgagcgcagcgcgacgctgggccttggcctgcagcgcggcattgtgctccgccttggtgaacatcatcagcaggtggtagtccaccggcccggcaccgccgccctccaagctcttggccttcgcgccgggggctggcgccacggagccccgcgctagctccagcgcgggcggcgagggcgcggcgggagccccaggcgcagggcctccttcagcctcttggtggcgctggagaaggtctcccggcactgagccgaggtagtagaaggcgcagacggccagcgccgcggccagcagcagggcgcagtagtgggagcgcacagcgcccaggcgcgccatggcccgagcgcatgggagcccgcctcggaggaggcccatgcgctacgagaccgcggcgccagcaggtgccagcaacgcgggagaaccccccgctctcgacgaattcgagctcggccgatttggcctgatnnnnnnnnnnnnnnnnnnnnnnnnnnnnnnnnnnnnncgccgccaccgcgtgagctccaggtcgcctatatgagtctatctccgtgggg

SEQ ID NO: 435957 - DNA, 941 bp, Homo Sapiens
ttgcccttcatggtccgagaaggaaacggtggaaggtttcacatggttccaatgctgtaggtcgccgcgggcccgatggtgtgatggtacgggtcggcagctgcgtagactctgccgtaactgtcgctgtaggctgccgccgctgcagcgggctgagcgtatctgtaggctgcgtagctccataaatctcagcaccataaaatccatcctgatacacgaccgctccgtaagtcgggatggggggtgggggtggcgcagccggaaatgtattatacacggcccggccccggccccgaagatgtgcgccccggtaggcaacggctgtgccggtggtggggtaggggaaccccgtcactgcatagaattcaggcccgtagactgcgccgaccactggatttagcttccagccgttggtgtaggggttccccgtcttcttgttggtcatcactcgggccgtggcattattgacctcaattttccgtccctctacgatcgtcccattcagcttctcccgggctcggtcagcatctgagctagtttcaaaagttacaaacccaaaacccttggagccccgctcgttaaaaatgatctccacgtctaaaatttttccgaattgcccgaacatttgccgcaagtcggggtccctgaaccggagggggatgttggagacgtgtagccgcttgggctgctgcttctctgtagggtcggaggggtggagcggctggctgtccgtctgtgccgcctcgtctgtctgcggcactgtctgggtcccggcgatgggctgtgtgctggcctcggagcctggctgctcggggtgggtctgtgctggtgtgtacagggtcatgccatgctctgtggggaccggggtctggccggagtagtcctgcgtggggtgcggtgggggcggggcgtactcggcagggatgccgttctgtggcgga

SEQ ID NO: 435958 - DNA, 1641 bp, Homo Sapiens
tcttaggttaaattacttcgaaactttaattacagatacttttccacgcaacatttctgaaatgaaagctttgattctcccctttttttgcataaaggctgggaaggtggtttggccagaccgtacatctttttgtatatacatatctacacctgtgtctcttctttattaataaaaggtgtcttgatcacagtcccaaaccaactctgcattggattccagcatataaaactcagagagtaaaacaatttcaaaggaagacaggctgcaaccacaggaaaatggcaggaaaagttgtagcttgatagttgtttcttctaagtttaactcagaaatataataataattaagagaaaaaaataagaggccctagctttcatccctgctaccaaacacgctcgtccagaactctaggctgtcttaaagtgcaattactgttgtgaagttgctcaggccagggatcaggctggacggagttcaaagcagaaacttcaaacactccttgctgttcatgactcaggggctgggagggagggagaggagaaaaagaaggacagttctctggcattcaagtgcatcaaaagaataaatgtcttttcttttggtaaagcaaatctgtcaatagtaaggaatcctggtttggaaaaatagaactttctaaaacttctatctgcggatgttccaatgcagcagagggacaaggcaggcaagtgcagccagcagcagggaccaggtgtgcctcccaggggcccggccatacaggctgcttccactgtcttctgcgaggtcctctgccctcggcgaagaggaggcacactggaccaagggcatctggtaggacgtggctctcttctctggcctgtctgggctggacccgtcgctgggcctctgaccgttgaacagcagatagcgcccccgggcatcctgttccattttgaagatctcgtactccgtgtgaggtagtttgatgcccagggccacgcagccattggtgtgggtcacatcctgctggatgcccacctgccaggagccctcggccccgcactcattcccgttgaagacgttgagcagtgaggctgtggccgcatccatgggggtgaccttcatgtgattcactttgaacacgaactcggtgcctcccatgaccctggacgagaggacgccgcggctgtagcggccccgggcgtagatggagaaggtggggtgcttgcacaccgggtctgagtagtggtagtagtggccctcccaggtgttgttgttgtcatggaagatgaagtggcgggtgaggaagaggacttcggggcgcacctcacagcgctggctcacccactccccgtgcaggccgatggtcaggtctgcctttgggggcaggatgggagggtggtgctcgtctgaccgatagatgatccgacaggcgatgcaggcatggtcgtggttcttggcattctgcagagggggctggtaactggagggccggtagaacatcctctgggtggcatcagtgtgaatgtcaccaaggaagagctcctcgaccaggtggtcgaggttgtggtgaaggtactgcttctccacccggatgagctgaagttcatgcatggcaaagttcacggccttggtgcactcacagccgttctcctctcc

SEQ ID NO: 435959 - DNA, 481 bp, Homo Sapiens
actgtccaaactttttattgatatagttaaactgtacaacgatgtcatgaaatactatacacagagccttcaggtaaagagaaaaaaagcaaatttaaatatgttaaccagattaaagcatgcaaaagatccaatgataaagacattaaattaataatatgctaatagtatctaaatttacccactatagggtctttcatactctgtcacaaaaatattagtaaacatcaatttgaagttcggtgaacggacctgattcctgatttgtatatatgatatacccttgcatttatatggctaactttacaggctgtgttacagtacagttagaggaattggtataaatttactccccatactgcagtaaattaatggttggaaatgattctcctaatttgctctgtgaactcagaatgcattaatgaattaacaacacaggtcactgagggaccaaaattcctcagtattcacattaactttt

SEQ ID NO: 435960 - DNA, 470 bp, Homo Sapiens
  misc_feature (35)..(35): n is a, c, g, or t
  misc_feature (73)..(73): n is a, c, g, or t
  misc_feature (459)..(459): n is a, c, g, or t
aaaacacgtaaaaggccttgccctggctgtcactnaaccaatccctgtcaaccttccgggctgccctctttgnaaaaattaactgtagggcaagaaacttcaactggcaccggtcattggtcttatggttcacaatctcgaatgtccccctgactggtcgatcccagagcttgccccacgatgatgttgtgaacagttgaggtgctcttcctcccacacgtagtgattcccactggccctggaattctaagtggatggcacctagcggcatgatggagatgtattttccccggaacttgctggagatggtgatctcctgccagaggctccagccatgcttggagaacacgtagtgcgcagctgagggggggtggtggctcacctgctcacagagggagcgcaggcccatgtcgtcgaggcggtccagctcgaaggtctccccagcatggggttgaaggncttgcgatgcg

SEQ ID NO: 435961 - DNA, 1626 bp, Homo Sapiens
  misc_feature (11)..(11): n is a, c, g, or t
  misc_feature (54)..(99): n is a, c, g, or t
  misc_feature (117)..(168): n is a, c, g, or t
  misc_feature (1367)..(1412): n is a, c, g, or t
  misc_feature (1534)..(1553): n is a, c, g, or t
gtggcccctgngccgctggcctctgaactctaactgctttgctctcctgtttcnnnnnnnnnnnnnnnnnnnnnnnnnnnnnnnnnnnnnnnnnnnnnntatatcacctctggaagnnnnnnnnnnnnnnnnnnnnnnnnnnnnnnnnnnnnnnnnnnnnnnnnnnnncaccaactcaaatatactttcacaaaagatggagaacatggatttccttcctgtttatttccttggtgacttggtcatacaagcaaacatggcaaaaccctctcagaacccaaaagaacagcacacggatgaaccaaatgtgaggaaagcagctgtgatattttgggtggagagaaacacaagggcaatttggcacaacgctgctagatactgtgggtttacaatcaaccttttcattcccaagctgtacacaaaactctctgtttcttgttacacgcctgcctgctccatgctgaaggagacttcggggtgcttgtagctgagcagaatgtctgtaatacacgtagatggatagcaagaggagtttaaatgctggctgccatcactcaggtctgggtgctcatgacctcccaggcttgccccacattcctcattttccccatcctgaaactgctggctgcccatgagcgaagactgactgagaactgcatccgacatccgggcagagctaagtgctttcccagccacgagactcattcctggcaagttatccagctgtacataagcatcgtcgctgttctggatcgtgtggtgtctctggagggcccggggcctgtggtgctcatggacggaggggcgtgctgggtacccgagcccattgtgatccggcagctccactgcttgtcctggagaacttctatccatgcagttccctatgacaggctctctgctgggcaccttatttttactgaatgcagcagttggctgatgaccatagggatgtatccccaattcttgggcatgactcacagttcctagcaaagattcagggtccccaggtccaccggtactcaagagcagagggctgtcatggcaacctttggtcaatgtacttgaactcttactgtcttggaagccatccttggccccctcacacgagcagtcctcctccatgctctctgaatgcatcagtgccggctggtgagcatacccgtggggcggggtgggtgaggaagcctgtgagacacattcttgtgccctgatttgtagcagatgctgggggctggtgtgatggtgataagagtcagcattttgataagataaagcctggcgctctgtcatgctctgtcccccaaggctgggagccagactccccgcatccccttggttcatgtgcctgaacagttcctggtattctnnnnnnnnnnnnnnnnnnnnnnnnnnnnnnnnnnnnnnnnnnnnnnttttaataagctgtgcaaactctgttgggggcagccggatgtccgagtggccggtgagcgaatgccggggagaaagcagtccttgaaggagtggtgcgaaaattgccgggccggtgccggcnnnnnnnnnnnnnnnnnnnntggttttggcggatggcgggcgtcttgctgtgaggggcgccgggccggtcgtcgtcgggcccgaggccgggga

SEQ ID NO: 435962 - DNA, 762 bp, Homo Sapiens
  misc_feature (148)..(148): n is a, c, g, or t
  misc_feature (378)..(492): n is a, c, g, or t
ttctttatggccccaagggtcaattttttccaagcctttccggttgcccaaaacctttttccataatgattctttggcttaagaaccagaacatgtttttccgtgggatccccagcagtaaaagacctcctttggcgttcccaggctnggggggtttctcttttttggttcttttggttttctaagtgccagaagccgtcacccttcctctctccctttgcctgccattaggattccagaggatggcatcctttagtatttgctttcacagaagagcaatgcagggggatggagggtgctctgctgatgaaggctagggagggagtggccctgaggccgctggcctctgaactctaactgctttgctctcctgtttcnnnnnnnnnnnnnnnnnnnnnnnnnnnnnnnnnnnnnnnnnnnnnnnnnnnnnnnnnnnnnnnnnnnnnnnnnnnnnnnnnnnnnnnnnnnnnnnnnnnnnnnnnnnnnnnnnnncaccaactcaaatatactttcacaaaagatggagaacatggatttccttcctgtttatttccttggtgacttggtcatacaagcaaacatggcaaaaccctctcagaacccaaaagaacagcacacggatgaaccaaatgtgaggaaagcagctgtgatattttgggtggagagaaacacaagggcaatttggcacaacgctgctagatactgtgggtttacaatcaaccttttcattcccaagctgtacacaaaactctctgtttctcc

SEQ ID NO: 435963 - DNA, 805 bp, Homo Sapiens
  misc_feature (739)..(758): n is a, c, g, or t
tgcagtttcaaccactttattagggtatattaggagtgaattcatggatatgaacttcattgaatgcatcatgattatattcagatgcaactgttctttaatatatctttgaaataacaatcctcttccctacataatagcaaataactaacgtatatgaagcattggtacactatttttaatgcaaaatttcttaaatcttgattcctatatagtaaaatctataaaagcaagaaaaatcaaaattatcagtttaatggacaataaggacagttgaagtatgtgtcttcaagttcgagttaagccattaaattttttaaagtaaatacttaaaggtaaattttatataaatatgtacaaaatgtagatctatttatttagcactttgttcactcagataaatttatattgcatatctaatgagatatgcaatcatctccaaagattataactcctataattcaaaacaaaacaaaacaaccctttaaaggttattcactatatgaaaacagaaagggaacaattacaacaatgaaattgttttaactttttcaaatctgattctaatgtgtattgacatatatttaattatataaaagactgtgggaaaggggcattaacagtactctagaagagtaaaggataaaaatccctctttttcccctagcttccagtttgacaagagggaatacttaatcgaatcctgtccacaaaaacagctaacagtactgtgctttgnnnnnnnnnnnnnnnnnnnncaaacctgacttcatataattcttaatacatcctgtgctgctgttgg

SEQ ID NO: 435964 - DNA, 2010 bp, Homo Sapiens
ttctgaacgttcattcaaagttttatcccctttcctttgaaaggccctgattaatcgggacttgttgtcggactggtggtcctgccattttcgttcctcctgggagccatcatggtagttgacctgtttacggattctttttcctttgcccagatttcggggctagatcttcttgctggctgctcataatggtgccgcagcaatttctcccagtagtcaggatccacacttttcttcctgtttaatgatttcccgttctacctcctcttcctcccccatttcttctttcccgtaccacatactgggccactttgaatgagctcaaatattcaattcatgccctgcaattctgtgtcttcagtctcatccctggttacggtttagcagccgttcaatggccttatcatcgtagtggataacactgctatcttctccctctttgttgtctcctcctccatcagtggcttcatccttgaatagttcctcagtgccaaatttgaggatatcatcaagctcctgtttggacatagatccagtcttggagcccagcccaggccgcaccactagatgcgtcagcatcattttcttctttgccacctgcgtgatgcgctcctccactgacgcacgggtcacaaaccggtagatcattacctttttattttgcccaatccggtgagctctgctaaaggcctgaatgtcattatgggggttccagtcagagtcatagataataactgtgtcagcagtggccagattgattccaaggcccccagctcgagtggaaagcaagaagcagaactgctgagcacccggtgcattgaagcggtcaatggcctcttgccgcatgttcccagtgattccaccatcgatgcgttcgtatttataaccttcatgttccaagaaatcctctagcaggtctagcatcttggtcatctgggaaaagatgagtacacgatgcccaccctccttaaggttcttgagcattttctgcagcagcaataatttcccagatgctctgattagggcactgccatcatacatgccattaggcatcttaggagcttccattgcagccacagggaagaggtatggatggttgcagcacttcttaagatccatcaccacattcagcagagacacctggttgccaccacctcgggcattgagtgcttcaaaatttcgagtgaggatgtacttgtagtatttcttctgcatagggctcagctccacacgcacaattagttctgtcttggagggcatgttcttgaacacatcggctttgagccgccgcaacatgtgcggccccagcatgtcatgcagtttttttatctggtcctccttggcaatgtcagcaaactcctccaaaaaaccttccaaattgtggaacctctcgggggtgagaaagttgagcagatgaaacaactcttccagattgttttgtaatggtgtcccagtcagcaacagcttgtgctggagtgagtaaccattcaatacccggaagaacttagactgattgttcttcagccgatgggcttcatccacgatgaggcaggcccaatcaatagagcccaaaatagccatgtcaatggtgatcaattcataggatgtcagcagcacatggaatttcacagatgcctctttcttcatgcgggaggccttcttgccaccacgaatggcattgtcttcaaaggagaactcattctctcggatgatggcacggctgtccttgtcacccacataggttacgacatacatgtctggagcccacatttcaaactcccgctcccagttgatgatggtagaaagaggggcgctcactaggaaggggcctttggaatgaccctccttgtaaagggaatacaggaagactgctgtctgtacagttttcccaaggcccatctcatcagccaagatggtgtcagtgccctgagcccaggagaagcgcaaccaattcaggccctccatttgataggggtgcagggttccacctgtagcatccaggtactctcc

SEQ ID NO: 435965 - DNA, 529 bp, Homo Sapiens
tgcgagaaccgggtagtgtttattgccaggaggacacccgcacagcctccggaccccagagggttttgacacaaatgacttaaaggcactggcttctgtccagctccagccctgcccggcagggcgtgggggcggagaccccatcaccacgcagcctcgacccgccccctcctccagggctgcagctccgcccagtggctgaagatagcaaacgccttgcagggcgaaggttcccaggatgcagtgagggggggtggccccaggctggcggggaggtggagtaagggggctctttccgcggaagggtgagggactatgagacgctggggggcaggcgggcagccgcggtcttctccaccacgaagccgtagttatactcctcctcaatgtccgccagagacttgatggtcaggtccccaaaagcagagaaggccagggggctgcagctcttgccctcaaatcgtgggtggagtgtgaagggaaccccatccatggctgagatgccatagaggctggaggcctcgtagat

SEQ ID NO: 435966 - DNA, 1373 bp, Homo Sapiens
  misc_feature (1292)..(1328): n is a, c, g, or t
ttttttttggcgagaaccgggtagtgtttattgccaggaggacacccgcacagcctccggaccccagagggttttgacacaaatgacttaaaggcactggcttctgtccagctccagccctgcccggcagggcgtgggggcggagaccccatcaccacgcagcctcgacccgccccctcctccagggctgcagctccgcccagtggctgaagatagcaaacgccttgcagggcgaaggttcccaggatgcagtgagtgggggtggccccaggatgcagtgagggggggtggccccaggctggcggggaggtggagtaagggggctctttccgcggaagggtgagggactatgagacgctggggggcaggcgggcagccgcggtcttctccaccacgaagccgtagttatactcctcctcaatgtccgccagagacttgatggtcaggtccccaaaagcagagaaggccagggggctgcagctcttgccctcaaatcgtgggtggagtgtgaagggaaccccatccatggctgagatgccatagaggctggaggcctcgtagatggagtcattcctccgcagagtggatgcccgagagcccagccttgacgctgtccgctccaggaggccgcccttacttggctggctggctgcatccagagagaggccctgcatgtcccggctgagacctcggggcttgggcactggcctcggggccttggccttcttgcaccagatggcaaagccgcccatgtcccctattcgaaggtatccaggcactgtcttggtcttcccactcagccggacatcaaacacagccgtgtccgtggctcccaggggcaacagcttcacacacatgcgtttcttcttggacacagaggccttggaatccatggggtcgcagacgggggagaagcccagcggcagggggctcttgtccaccacgatctggatatcggccaccacgttctcctgcgggttctctaggctgcccagagaactaaggcacaggaagtagccagatttctgcgcgaagctcttgccaaagctggcgggtgccccctcgacggtgcaggagatcgcgctgaacccccgcggcgggggtgcagaggccgacgaccaggccaggccagccagcggcgccgagtctgtcccgggtacgggatccatcctgcgagccgagcgccgaaggcggggtcgcggggcacagcctcgaacctcggagcgcctcccgacggcagcgctcgcgaccccgctctcgacgaattcgagctcggccgatttggcctgatnnnnnnnnnnnnnnnnnnnnnnnnnnnnnnnnnnnnncggccgccaccgcggtgagctccagtcgccctatagtcagatgca

SEQ ID NO: 435967 - DNA, 1604 bp, Homo Sapiens
  misc_feature (100)..(100): n is a, c, g, or t
  misc_feature (919)..(930): n is a, c, g, or t
  misc_feature (1248)..(1348): n is a, c, g, or t
cagtaatagttgaagacgaggtggatcaaagggagaaagaacgggagcgcacccgccgccccccaataggcacccccggcgcacgccgcgaagcgtagtnaggtaaggccatatgaaggtgggaggggcataagccagcccatagaaagaggaaactgccgagcgcgccggccatccacggaccagccccgcactgctgggcggccaaacaaggccgcccgaaaacccccgttttggaaccgacacgggcagacgaggaagaaaacgccgcggtggacccaagattttagggaagggaaaacgaagttatagccctggagtggaaaagtaacaacatccaccaagacaaagggtggggaaaagtctcacggcgggggcctgggaaggcctgccgctacgggttgtgggcccagacgaggaggggtagggacgggtgaaggtgacatctgccggaggacggagaattagctctaaaaagggagagaaaaagtgccccaggcagaggaaggcggcgtgtgcaaagctggaatccatggggtcgcagacgggggagaagcccagcggcagggggctcttgtccaccacgatctggatatcggccaccacgttctcctgcgggttctctaggctgcccagagaactaaggcacaggaagtagccagatttctgcgcgaagctcttgccaaagctggcgggtgccccctcgacggtgcaggagatcgcgctgaacccccgcggcgggggtgcagaggccgacgaccaggccaggccagccagcggcgccgagtctgtcccgggtacgggatccatcctgcgagccgagcgccgaaggcggggtcgcggggcacagcctcgaacctcggagcgcctcccgacggcagcgctcgcgaccgaactacaactcccagaaggccatgcnnnnnnnnnnnnccggagattgcccggaagcgcagtatacgcgtgcccgaggagctgctggccaatggcgtggggaggcggagcctcgccaccacgcgtcgccagggttgcgcgcgtgagcgatgatggcggaaaaaaaggtcttgccggctttccgcgcccagcaacttccgccggaaatgctacggcacaggaccaagagactcgttctctgcaagtctgcactacgttccccagaattccttccggcctcagctgctagtctagaaaaaagctcggtgcttaacggaaaagttgggagctttgtggccgcgcgcagtggctgacgcnnnnnnnnnnnnnnnnnnnnnnnnnnnnnnnnnnnnnnnnnnnnnnnnnnnnnnnnnnnnnnnnnnnnnnnnnnnnnnnnnnnnnnnnnnnnnnnnnnnnntgcattgtgaagaatctgcaattccagttctgggaaatcatcccaaaggaaatcatctgtgggatacgcagctattgatttaaagagcgagtactatggaccatcatgagctttgaaatcttgggtataacttgaagatttgttcacaggcacaatacgtttaaaaagcgacgtataaaagaatttattgcctgtagtcccagctactgaggatgccaccagcaaaccgagcctcgtgccgaattcgccacccagc

SEQ ID NO: 435968 - DNA, 523 bp, Homo Sapiens
  misc_feature (368)..(368): n is a, c, g, or t
  misc_feature (387)..(387): n is a, c, g, or t
  misc_feature (389)..(389): n is a, c, g, or t
  misc_feature (401)..(401): n is a, c, g, or t
  misc_feature (482)..(482): n is a, c, g, or t
gtgaactctggctgatgttgctgtttcaggtataccatctggagttaatttcctagcagaaggtgaaagtccaggagaattgtcctctttcattgaacatgattgaaaatgtaactggctctgaacttcaagaagatagatgcccaagtgatgcattaaagtaagggaaataaagtcaagtttttcaactgccatccatattctcattggcagaattctgatttttttccaagcactgtttggtgagcctgggaagcaccgtatcctgtcccagggagtacagtgaaatttccaagcaagagctgaggtgccaataccaaaagaccatggggagtctgcacggtttctggttagatcaattaggaaantccatgtgtacaactgttnanttcctcatcctnccattaggcactaaatttgttcacttttaaattttgaaaccaggggaaacaacacctgtcattctgtcccccattcttccntaggttttcaatctttacatgccgcaagacttttttgatag

SEQ ID NO: 435969 - DNA, 1083 bp, Homo Sapiens
  misc_feature (189)..(277): n is a, c, g, or t
cgagcccccatatgcggggtgggtcaaaaggatttttagagggggtgggcggaaaaaaaaggtagttcccatcacaggaaggtccccggttgggaaggccctctcccaaaggtgtggtttccccccattgtgggcgcagttcgggctttttgggggcgatttcccctgggcccccgcgggggacttgtnnnnnnnnnnnnnnnnnnnnnnnnnnnnnnnnnnnnnnnnnnnnnnnnnnnnnnnnnnnnnnnnnnnnnnnnnnnnnnnnnnnnnnnnnttgttctcccggggaaggagaggaggtttgggtaggctggggtggcctgggaaagggcagagcttgagaggaaaaacttggaggagggatggaattatgccagaggggaaatctgaaggatggtgagattaataaagaggtttttcaaggaggttatgtagggagtcagtgtgtcaacgagggagtatgggggtgacacaaaaattggtctccgggagtgtttatggaggagacgaaagcatcgctgggcaatggtgagaaggagatggtttccagggcaattaggaagtatgtgtagccatattgaagtaataatggcgggggaatgttctagaagccacaagaaatacatgagaaagtgttgagataggacacagcgcagttagggagtgttggaaagttcaggcaatgtgggtgggagtgctggcatttcctaggaccccagaaagcaacagagataagtaaggtcaccagtaaggagaaggttctggaaaaggaggtgtctggcacagggtggacaaagataaaaggctcggtctgtggacggcaggaaggagtcttaggaaacaggaaggaggtgagtaaggtctagatcagaggtaagtttggggacggaagggaaatttcaatgggggcaggggagggactccagactggtcctggtgggggctgagggattgggatgaagtcagttcaccgctgactgcagtgcctgcgcgcggcgactggacggggcgggcggcggcacctctctccgctgcgtccaggtccccggtcttgacaacggcgcggggacccagcggatc

SEQ ID NO: 435970 - DNA, 926 bp, Homo Sapiens
cgttagaaggacacgtccgttcccattcttcaggtgcgagtagaagacaagcagatttgccctccacaacagtcaggccggtcagcaatccacgtcgatgcccgcgctcgaaggccgcaaagaactcttcgccctcgaacatctccaccgtgtcagaggctcggggccccggtaccgctccagcagccgccgaagggtggcgtccaccttgtttcggggcaggcactgcagcaggacctgctcagggtcccggcgccgctgcagagcgatgaggttcacacggtgcagccgcagccgctcccaggccttccgagccaggcctcccacacagttcttggtggtgtaccagagccagtacctggaagcgtgcgtacaggtgggtgagctccaggaccacctgagctgtgatgtcatcccaggtggctgcaggaggggcccagtacaacaggtgcaggcgggagcggtccagactgaggcctgtgatgccagagggcagaggcagctgcacggtgaccggttggaggaagctggggggaccgctgctgtgacaggcacagcagggggctcactgcagcctgctggttctcccaggagggcctgcagctgctcggccagccatgcgcaccacctgcatggagactcgacgaggctcctcagtggccccaggggggaagatgactttgaccccaggatgaccgcgaggagcacagcagtgtcccactccaggtggcagccaggcaggcattggacacagggcgggaaaccacaaggaaccaggagaagtggggcacctggcagtgagcccagagccgctggggtgcctcttcctccaggtaggtctccaggtcaccccagcatgttgtcattccgggtcctgaccaccacttcacggcagcgccgggctgcggtggggtgaagagcagcca

SEQ ID NO: 435971 - DNA, 1585 bp, Homo Sapiens
  misc_feature (487)..(488): n is a, c, g, or t
  misc_feature (548)..(548): n is a, c, g, or t
  misc_feature (584)..(584): n is a, c, g, or t
  misc_feature (591)..(591): n is a, c, g, or t
  misc_feature (597)..(598): n is a, c, g, or t
  misc_feature (610)..(610): n is a, c, g, or t
  misc_feature (616)..(616): n is a, c, g, or t
  misc_feature (651)..(651): n is a, c, g, or t
  misc_feature (676)..(676): n is a, c, g, or t
  misc_feature (693)..(693): n is a, c, g, or t
  misc_feature (704)..(705): n is a, c, g, or t
  misc_feature (707)..(707): n is a, c, g, or t
  misc_feature (709)..(709): n is a, c, g, or t
  misc_feature (717)..(717): n is a, c, g, or t
  misc_feature (750)..(750): n is a, c, g, or t
  misc_feature (765)..(765): n is a, c, g, or t
  misc_feature (770)..(770): n is a, c, g, or t
  misc_feature (776)..(776): n is a, c, g, or t
  misc_feature (778)..(778): n is a, c, g, or t
  misc_feature (1567)..(1567): n is a, c, g, or t
ccccctgtcatccatcaaataatatcaagctctgaggtgatagagacagtgcagttttgttgctcacagggacccgtccccacacactggagagacttgaaggtgggggctctgcatccactggggaatatctgggccagcctaaaagtctgtggggcctaggctgggcaggctctgggggctgtggagccgaggagccaggcagagcggggtccttgggggccaagcccatgcgtcggatgctgtcctggtacttgcggcggccgagctccaagactgcgcgcacctcttcagccacgtcctgccggtcactctgctccagggcctgcaccaggagccccacagcccctggctgcccagcctggcgctcagcccaggagaagagcatgtgacggatctgctcatccagatcatcccggaactcgtgccggatgcgctgcaactcccggtaggacacccccaggtgcagggccacggctggccagtnnagacccagacgcccagccacactcagcaggttgctctagcgtcagaaagccggtctcggnatgtcccagattaaagggtgacaaggagaggcaagncccccgnggtggnncctcggaacctngaagtntctgttggaaggaaaaagtgcattaagccctgggntccacccccaactccaccatgtcancctggtaacccctgggnctcggtactgnncngngcctttgntgttcctcagtcccaccggcagcttgtatgggnagagtggccatccanagggngtctgngnccttcctctgccgggcagcctcagcctcctcgggcacccgcacaggcaccgcgccacggtagaaggacacctggccccgcacagcctgagcctcccggtccagagtggtggtcacgtatacctccttcacattcttcaggtgcgagtagaagacaaagcagattctgcccgtccacacagtcagggcggtcagcatccacgtcgatgccgcgctcgaaggccgcaaagaactcttcgccctcgaacatctccaccgtgtcagagggctcgggggcccggtaccgcgtccagcagccgccgaagggtggcgtccactttgtttcggggcaggcactgcagcaggacctgctcagggtcccggcgccgctgcagagcgatgaggttcacacggtgcagccgcagccgctcccaggccttccgagccaggcctcccacacagttcttggtggtgtaccagagccagtaccaggagaagtgtgtgaccctggaagccgtgcgtaacaggtgggtgaagctccaggaaccacctgaagctgtgatgtcatccccaggtggctgcaggaggggcccagtacaacaggtgcaggcgggagcggtccagactgaggcctgtgatgccagagggcagaggcagctgcacggtgaccggttggaggaagctggggggaccgctctgtgacaggcacagcagggggctcactgcagcctctggttctcccaggagggcctgcagctctcggccagccatgcgcaccacctgcatggagactcgacgaggctcctcagtgngtccaggggggaagatga

SEQ ID NO: 435972 - DNA, 1007 bp, Homo Sapiens
ccccccggtttgttttgggtgtaaagggaacgttcattccaggctttggaaaaaaagagcgggggcccccaggggaaccgggtagtttctttaggggtgtgctgttctgccccaggctccgcaggatggccaattgaccggccagcccggactgaaacccccgggggtcgggggtccctcccagtttctcctttcaccccggggaaaggcagggcgcaggcgactcggggtacttccaggaaccaccttgtacatgatcagcacagccttcttcctgatgtagggcttggtgtgtgacatcagtgtcatgatgtcatttgccaggtctctggcaaggtctggggtgacgaagcaggacagacccgtcagtgcaacacctgtgtcgtactggctggggctgctcaagtccttacggatctgattggtggtcagcatgatgacgtcggtgccttcgtgaaagctctgggaagcagcgaggtagccaattcgcttgaaggtgaacttggaggcactcatcacttctatgatgttgaaggcggcccagctgatgtcgtatcccaacatctgtaaatacgtcagcttgcagaccgcgttcgccttcaccgctatgttgtcctgcttcagctcctgcttgatctcatcaatgcactgagatatgtattttgcctcgtcctccttgtggttacggatgccgcggaccaagtcctgcagattcttgtcgaacatgcggtcgatgctgcccttcaccatcttgagggccatcgcggcggcccacgggcttttgcctcgggaggcccgcggctgggcgccgtgagggggcccggggcccgtgcctgccgcccgcggagcgccgcgctgccggccgctgcggcggggcaagctcccaggccagggcggcggcggggtccaaggaccgcggcagaggcggcgacccgctcggcaggtgccgcgatctttttgggaagccccttgcaaatggccctcgagtatgaacgcccacccaggcc

SEQ ID NO: 435973 - DNA, 1337 bp, Homo Sapiens
  misc_feature (14)..(14): n is a, c, g, or t
  misc_feature (115)..(179): n is a, c, g, or t
  misc_feature (1243)..(1243): n is a, c, g, or t
  misc_feature (1248)..(1248): n is a, c, g, or t
  misc_feature (1265)..(1265): n is a, c, g, or t
  misc_feature (1277)..(1277): n is a, c, g, or t
  misc_feature (1290)..(1290): n is a, c, g, or t
  misc_feature (1309)..(1309): n is a, c, g, or t
  misc_feature (1313)..(1313): n is a, c, g, or t
  misc_feature (1321)..(1322): n is a, c, g, or t
  misc_feature (1331)..(1331): n is a, c, g, or t
  misc_feature (1334)..(1334): n is a, c, g, or t
aatcaattcttaancacactattcccgaatcactactacgatcagaccagccggctggtaccggtccggaattcccgggatcagcgcggggcggagcggcgccagcagccaggannnnnnnnnnnnnnnnnnnnnnnnnnnnnnnnnnnnnnnnnnnnnnnnnnnnnnnnnnnnnnnnnacgccagagcccgtgggcgccgttcgcgaggccgccgcagaggcccggccgcagcgcagggaagcctgggggccagaggtcgccgctgccgccatgccgctgctcttcctcgagcgcttcccctggcccagcctccgcacctacacgggcctcagcggcctggccctgctgggcaccatcatcagcgcctaccgcgcgctcagccagcccgaggccggccccggcgagccggaccagctaacggcctcgctgcagcctgagccgccggcgcccgcccggccgagcgccgggggaccccgggcccgcgatgtggcccagtacctgctctcagacagcctcttcgtgtgggttctagtaaataccgcttgctgtgttttgatgttggtggctaagctcatccagtgtattgtgtttggccctcttcgagtgagtgagagacagcatctcaaagacaaattttggaattttattttctacaagttcattttcatctttggtgtgctgaatgtccagacagtggaagaggtggtcatgtggtgcctctggtttgccggacttgtctttctgcacctgatggttcagctctgcaaggatcgatttgaatatctttccttctcgcccaccacgccgatgagcagccacggtcgagtcctgtccctgttggttgccatgctgctttcctgctgtggactggcggccgtctgctccatcaccggctacacccacggaatgcacaccttggctttcatggctgcagagtctcttcttgtgacagtgaggactgctcatgtgattttacgatacgtaattcacctctgggacctcaaccacgaagggacgtgggaaggaaaggggacgtatgtctattacacagactttgtcatggagctcactctcctgtccctggacctcatgcaccatattcacatgttgttatttggcaacatctggttatccatggccagcctggtcatctttatgcagctgcgttacctgtttcatgaggtgcacgtcgaattcgtcggcacaagaactatctacgtgtggttggaacatggaggcanggttncagttgcactccagagngctggctgtcanaatgacgactgtncatctgttggactcatgcngctnggggaaannccctgtggnatnttt

SEQ ID NO: 435974 - DNA, 2233 bp, Homo Sapiens
  misc_feature (16)..(16): n is a, c, g, or t
  misc_feature (35)..(35): n is a, c, g, or t
  misc_feature (43)..(43): n is a, c, g, or t
ctcctctgaaaagccnaatctccacaacaacacanaagtttanacagatgttaccacacgtggggcggcttaactgtcgctccccacactcttccactggttgtgttctcagacacctcatttgtggacgtacgcattaggcaggagtagaagctcctgctgcaggaaggcgactgctcacttcctccttgatcgtcccccaccccaagcagtccagtcaaaccccagaagaggtcataccctacagttaaaatttgcagtgtttctaaggggaagagaaatgtcacatagaaagtattacaaagaaggattaaatttatcagctgtccaaacactataagaccacatgctttatacagcggcaatgcagtcaagcccgcttttccatggagcgggcagaattgggacaggcctcctccagtcagtcgggcacagggcgcaggaggcagctgaggaaggcaagggagcgctaggaggtctgctgcttctgaagcctccgttccgcggcggcagccagcatccttcgacgcagggtcacggggtcagaggacgcaccttccgaggggaggaagctctctgaggccgcatcatcttcagaacttttgttcaagaaacgtttgcgagcttgctggaggagttcgtccttacgctgcaccagcatgcgctgtctctaatcagcaggcttggagaagcggctcccacgagcctcgaagtcttccacctcactgggctccacttccacctcgccgaagtccagcatctcccccaggcgaggactgaggtccagtggcacacgctcggtctgagcagaagtttctccctcttccctggtcactgcttggcctttccacaggactgttcaatgcaggtctgatgctatctgaccgctgtgtaggaaaaggtacttgaatccgtccttctaaaatattgtctgttgttatttcaactgagcgtgtcagctggaggtcctgcagtaccagatggtatggaacctggggaaacatctcttgaatctgatgagccattgcattgagctgggagttgctggcctgcgtaatgccaagaatgttggtggtgtgcatcacttcaaccgaaaaactcggcagccagctcgcaatccgagacccatcgaaatggaagaagtgattgtgttggtttaagcgaggtctcccttcggctgctgctacaggaaccaaattctcatccaagttctctccttgatgttcttccctgacacgattattgtcggcaatattaagagacattctgcatgttggacaggaggtgtcttgttctagccaggaacgaagacaggagttgtggaaaagatgtccacagggcagtttccgcgcagcctgcatggagtcccaacagatggcacagtcgtcattgttgacagccagctcctctggagttgcaactgcaaacctggcctccatgtttccaaccacacgtagatagttcttgtgccgacgaattcgacgttgcacctcatgaaacaggtaacgcagctgcataaagatgaccaggctggccatggataaccagatgttgccaaataacaacatgtgaatatggtgcatgaggtccagggacaggagagtgagctccatgacaaagtctgtgtaatagacatacgtcccctttccttcccacgtcccttcgtggttgaggtcccagaggtgaattacgtatcgtaaaatcacatgagcagtcctcactgtcacaagaagagactctgcagccatgaaagccaaggtgtgcattccgtgggtgtagccggtgatggagcagacggccgccagtccacagcaggaaagcagcatggcaaccaacagggacaggactcgaccgtggctgctcatcggcgtggtgggcgagaaggaaagatattcaaatcgatccttgcagagctgaaccatcaggtgcagaaagacaagtccggcaaaccagaggcaccacatgaccacctcttccactgtctggacattcagcacaccaaagatgaaaatgaacttgtagaaaataaaattccgaaatttgtctttgagatgctgtctctcactcactcgaagagggccaaacacaatacactggatgagcttagccaccaacatcaaaacacagcaagcggtatttactagaaccactctccctcagcagcgctcccgcgagcaaggccgcgccccccaggcgctcgccctcgggggtacctggcgaggggcccctagcc

SEQ ID NO: 435975 - DNA, 762 bp, Homo Sapiens
  misc_feature (570)..(570): n is a, c, g, or t
  misc_feature (627)..(627): n is a, c, g, or t
  misc_feature (665)..(665): n is a, c, g, or t
  misc_feature (691)..(691): n is a, c, g, or t
tgttctagaggatcccaaggcgttgtcagtgaggaggcagcggcctggtggaagacttgacccagacccttcaggacagtgattttgagatacagagtgaaaatggggagaactgtaatcaagacatgtttgagaatgaatcacgtaagatattctcggaaatgcctgaaggtgaaagtgctcagcactccgatggggaaagtgactttgagagagatgctggcatccagaggctccagggacacaccccaggtgaggaccacggggaggtggtttctcaggacagggaagttggccagctcataggcctgcagggcacctacctaggggagaagccctacgaatgtccccagtgtgggaagaccttcagccggaaatcccacctcatcacacacgagaggacccacacaggagagaaatactacaaatgtgatgaatgtggaaaaagctttagtgatggttcaaattttagtagacaccaaaccactcacaccggggagaagccctacaaatgcagagactgtgggaagagctttagccggagtgccaacctcataacccaccagaggntccacacgggggaaaagcccttccagtgtgccgagtgtggcaagagcttcagcaggngtcccaacctcattgcacatcagcgcacccacacaggngagaaaccctactcgtgccccgagtntggaaagagctttggcaaccgttccagccttaacacgcatcaggggatccacactggagaaaagccctacg

SEQ ID NO: 435976 - DNA, 520 bp, Homo Sapiens
  misc_feature (488)..(488): n is a, c, g, or t
aaagaaggaagaggtttttttattcggccgggagcgttggcagactcgtgtcttaagagccgagctccctgaaaaagaaattcctagcccttttaagggcttacaactctaagggttctacgtgaaagggtcataatagatcaagtaagcttgaggaacgtgactgggggctacatacatcagctaacagaacaaaaagttttacagtgctttctcatacaatgtctgggatttacagataacaccagtagttttggtcaggggttaataatattattattattttagccaccagggccaggtggtggtgccaaggtcgtctagctatttatcttacttctgtttctttccagctttttgctttctcccttttctcctgtcttataaactagggaaaaggggaggttggagagaaactaagaaggccaacaggagaagtggtggcctcataccatactgtaacagtgctgagttagctgttatttttnctgggacctagagaagttggaatagttaggaa

SEQ ID NO: 435977 - DNA, 374 bp, Homo Sapiens
  misc_feature (164)..(164): n is a, c, g, or t
  misc_feature (272)..(272): n is a, c, g, or t
ctggaattggtttgacacacctgtgcattctggtcacctacagagctgtccctaaactgcctcaggggctcagagtacatgcctgcagggaaagaggcagcctcaagttctgtgcttgcttgcttctcagcaacctttttctcagggacccctattaaccccangcttccatcagtagctgagtggctgaaggaacctgtcctcacgtcaggagcagaaggggatctgcagccttgagctcgagataggacagcagccacagtagaaggctnacaagtgctgctctctgttagcctaaattccctgttaacatctttgggctcaaggccatgtgtcaagtgcacatcaggtcccctagagatctctcctcggcc

SEQ ID NO: 435978 - DNA, 1134 bp, Homo Sapiens
ccccataaaaatcccttaagacagcatcactctttgctttttcatctggatgtagcatctaccccttggccagtcccctttccaagcacaaacctctctggcttggagactgtgtaatgagctgcaccacttttcgcaagcagacaagcttctgctgtggggaggtgcattttgttcagctgagccagctctcttttggcacgaggtatgttaaagctgaactccggtttcacaccaatatctttctgctgaagatcttgaaggcttcttgtgattttgttaaaggccgcatcctcacttgcctccatggtccccacgtatttaaagatcaggttgtaaatttcatgatggacgtatatctccactgcctgcttcatcaggttcatctgggcctcctgcttggcgagcattttcaggtgagagtccctcagaagctgctggaggcatttggtgtagagagcattcgctgagtctatgtggtgacggaggctctttctctcgcattctcggaatgttcgatggaaagaggcgatgttcctgtcaaatcgctcggagtgtcttcccaagaactctctcacatcttcaatggttttcagggaaaagggatctgagggtgccaaaggctcttctgaactctctctcttttccaaaggatgggctatacacaggatgctgaaactctcttctttttcattgtagaaagtttcttcaaagagaatgggcactgagagaagacaggcaaaaccagctcctaatttaatcctgttcccttgaataaagacatcctttccatttaaggtctgaaaatgctcttccacaggtatcaaaatgtaggactcaaactgacaagtagactggatgctgctcgacaggcttcctttgcagggtactaagacaatgccatggatttgggccactttgctgcacaagtcagggcggcacttttgcagagccagatagaaaggatttttcaggaggtcttcatcatacagagccatatggacttcagatgggtcagagcaaatctcttaaaaggctacatcgcttcattcccagcccatcctgggcgacggcggcacctccctcgtccgctgctgggacctcgatgcccaccaccctcgcgcggcgatctgg

SEQ ID NO: 435979 - DNA, 1052 bp, Homo Sapiens
ttttttcaggcttgcatgactgtgtttatttgaaccaccagatctgttccaataaagagctctccagaccctgcctcaccttacagggaagggcttagagtcagggaagaggggcctgttgctcctgtccctgaaaaaggaggtcaagatggagcccgggcttcctggtgaccattcagactcctcccactgcttgtccctgtggaggacacaggacgggctaccccatctcaggtttggggtgggatcgctcacagtcacccccggaacagccccaactgagggtggggggcctggccctggacacctcatgtctctgggccgggaagccacgatccctcatccatcaggcctgctgccgctctccaccccagcgggggatggacatctgtgctccctcgcagtacactgcggacccaggaggtcccctgcatgacattcctctccttggcctcaggccagcaggcggctgtactctgccagagcagaggactttctcaccccatcccagatccgggcagcgtagtggaaccagttcttctcggtgaggatcgtgtgtgacagctgtggccgggccatggacatcacttggctccggagcttgctcaccaaggactggaaactggggtggccacgatacccaggcagcagggagaagagtgggctggaaccaggtcctgctcttggtgggttttcactctctgcttcactgtccatgaagggtaccaggaataagttgacctcagagtccaggaagtcaggtggaagccccgggaagacattgcattgtaacatggacagagttcccttgtaacgcaggtgggagtgggccatgagctggtcaatcatcaggtgcatctgccgcagcttcccgaggacagaagtcctctcggcgagctttgttctgcaagaagactaggtgggggtagtactcggtgccttcatcggagcccgatgagctgctggactcgtggctgggggatggggtggagggcttcaccatctctgctgtctgcaggaacctgtagagactgaggtctgtggtgacgagg

SEQ ID NO: 435980 - DNA, 2050 bp, Homo Sapiens
tacataccattaaaataaaccaacaactacaaattcagcaacatgaggaacagttcactgatttattaggatgaatatatacccatataatcaatgaaaactgtatgatataaaataatttaagaaatgttgggaattagcagcaccatctgttattgaaatagcaaggaaaacttcacatattttaagcaaacacgagaagggagtaactactttaagacctaataatgccattggtctgggatgaaaaagaagggaattgttttagattgttttaggaaaacacacttccttctatgctgaagatttagtaagcatatctgatgactaaggttttagaaaaatgctactgatgtaagagatactgcatagtattttaattgggacaagactaactgtagcatggctcaacacttctatgaaaaatttagttctgaattatgaaatcagaaataaaaaataatgtttaaaagacacttggctctaagaaacattaagtgacacccaggtcactatgagattacatcacttttccagtctgcttaataatttactttaaaaagttgcacagttttcaagacaagtggcttatacaaattttttaataagtattttaaaaagtttaaatgtttttctaaaatctaatagattcttttgatttctttaaacatttagccctattgtcacaattactgtgtatcagagactctgaatactgtgtattcagagactgaatttgtgtggatacaaatttacacaaattttacagcaacttataccctaacatctacaaaatccacatttacaataccagtcagtacaaggccaggataaaactgctgaattccaaaaagtcaaactgtatattttttttaattttctcccctttaaaaaaggttcaaccatcggcaccaaattttaaaaagcccttttatatcctaagtttggaaaaacctcatttcccagatgcatttcagcaaacacaaacagttttcctgtgttgatgaagtaaaggatttccaattttcttctgggccctaagtctgcgtcgcatggtgagtttaacagagttctttcgctgtgaggttgtggggagacttgcaggctgagcaccactacttcgacttaagccatttcgtctatgcttcttcatcagggggccagaattggactcttctaatgtccttttaaagtttgttggaggggttctttcaatttcttgggctttcatttggccaggagttgacatcttcaaatttttttggtccatgacagtgtttgttgaattagtaggcacaaggccaattggaaggctattattcaaagaatcatgtatccttaaagtcagggctttagcgcaattttcttcaagtggttctggatcttttgagggtatgactacaccttggacattctctcgagctatctcagctgaaacctctaaaaaattctctgagaaggcattgctacgaaccagggcaggtatatggtccttagaattcacccttggccatggatcctcctccagtgacttgactggtggtgtagaacatggggaaggagtcatcacacaggtttcttgactattataggaagggctgtcagtcaggttcaggtataactcatcttcattggtaaagtttccctgattgtccacttctggagagatgcagattactatggcactagtgttatctgctcggagcatacgctgcctccagcggcccaatgctcgattcacaagcattttggcacaagattgtccatgctcacccatcaggtattttttctcctcttggtcctggcacattgagatggcatcttgtggtggaatcatattccaaagtccatcactccccaatataatatacttgtgcttctgagggtcaagagtgtggacacttgtgtctggttcaggtgacaccacaaattcaccactgaagaaatcatagctccacaaatcaccaagtgctcttgctactgccagaaaaggaatctggtcaataactgtgctccttctaacaggtccatttgagtagtcgaggtcgtt

SEQ ID NO: 435981 - DNA, 1579 bp, Homo Sapiens
cgggaggaacagccagttctgatgggaattaagctcaccactaaaaaaatgaaaagagggtgctttccctctttatctctcccttgaggagtctgtctttttcaaaagagctttctgggtcactcaatgatctcctccctcttatccacttctttgaaaagggcccttttccccaaggtttctgcaaactcacttttcagtctgtggagtctcctcaatgcagcctctggggagggtggttccatcaaagggaggaggtgggagaatcttcccaggggtgacaactgaagtatctaaccagtgtggaatgagcaccagtgaactgctggctctgggactccacagccttggatcggccaggcagtaaccagatcgtaggagtcctgggggaagtgccaggcggtggggggcacctggagtcacttgggggagtagatatttaccaacgagtacagaagggtttctgcattttatcaactggtgtggcaacactggtcccactgggtgtcagtccaggctccgctgttctgctgggaacgactgctggaccatttgtttcctctgttagaaaaagtggcctagggtggagccggggaatgaaatggcttctgagcagagccagctctgtggagtccctgttgaacaggatctcaggcgctcgacccactgcatgaccttgaagggccaaggtgcctcgaatcatcctttctcttgcccctccttgcagttatttttgtccagcctgacagtccttggctgttccagcagtctgggctctgtgagccggatgcaaaccaggcagcacagacgtctggtgctgaatcccaagaggttcctctctgcgcaccatcacatggggccacggcccctctgcactgtgcacccaatggggaggggaccacacgcctggaggatggcgactgtaagacgtgggggctgggctctccattgctcaaccctggctcctgtctgggagagctgtccaaggcctggtgtgaggacaccctgtcacagagttttgctgctgcctagaaacctcccagctgggtttaccaggccagctgtgtgcagggacctgttagtcagtgagagggtgggtgtctgctgctgggaggagggtgggagcaggctctgctgggcccccagtctccaggccttggctgtggtggagaaagggtctgtcctgtggttcagtgtgatggtgtggcccaaggacaggtgggaaggggcagacagggttcccaggagacctctttgtagcccctgctcagttactatctccaggaagcgaggcagacactatgttccagcctcttggcgtgggaaggctgcagccagtcagtcattgctcctgactggggtctgaccgccccaaggaacagcctgccttgggtcctggtgccctgcaggttaaagctttttcccagacccaaggttcatgcctgctgctggtgtgcagagggcaggagaggggtctgggcggatctctgagggtctctcccaggactcatctgttcaggtgagaaatggaaccaagcctctgagaccagaacagctccaggagagctgggtggataag

SEQ ID NO: 435982 - DNA, 1666 bp, Homo Sapiens
  misc_feature (9)..(10): n is a, c, g, or t
  misc_feature (16)..(16): n is a, c, g, or t
  misc_feature (27)..(28): n is a, c, g, or t
  misc_feature (31)..(31): n is a, c, g, or t
  misc_feature (37)..(37): n is a, c, g, or t
  misc_feature (45)..(45): n is a, c, g, or t
  misc_feature (47)..(47): n is a, c, g, or t
  misc_feature (52)..(52): n is a, c, g, or t
  misc_feature (62)..(62): n is a, c, g, or t
  misc_feature (85)..(87): n is a, c, g, or t
  misc_feature (127)..(127): n is a, c, g, or t
  misc_feature (135)..(135): n is a, c, g, or t
aaaaagacnnagtctnctctcccctannaanttctanggttgctnantgtcnacttcccttnggattattataaacagtgccacnnntctctgaattgtgaacggctcgactatggaagtagatcgnatcttatngctctaatcttggtttgtattcctcactgtaacattacttctagccccattttcccaaacatgtgctgctccaaaccgttgcccctccctttgcctgagttcactaccacctgattggtttgtgtgactactgaaattagtgcgtgaagcgttagctcgaggaatgccagctgctcccccaattccatttcttaaccttcccaatgttgagaaagatccttcagctggattttgcccccttgaagcaagcctagtccttggaatgttggaactactaccattgaaattcactgaggtttggcttcttgttcgcctagccacaggactagttgacctttgttgcctatttgcagtatgatctctgttactatctgaaagtggaatgtctgtataatcttctccatgaatttcaaatcctctattttcatgatttacgtggatttccaaactaaaccgaaactctccattgttcgggtttgttcgactcacagctctccaagtttggttcccattttgtccacttcgagttgcatttcctgtgcgccgaaaggtgttcaaccattctagaagagaatcttcatgtgaactttctctagggacttctgagtctctgtaattcgttccatctctcaagtcaggctgagatgctagttgttccttgacgccatctaaccgctgttgcagttcttctgatgttatttctccaggggtgcctaaaagattatggtctctcataagccgataatcttcatcattgagttcattaataaactgataataggcctcttctctgtggagacgctcttgctgccatcttctctcattttcatgatgattatggtcttgaggtaaggtttcttcactgccaccatctgatctcgatctagactgattcatcctgagattcctggctttcttattttcctttcaacacgcttttaacatatgccatggtatccatccttcaattgtttgtgccttttttgagagctgaccatctcttcccaaccgagcctcaagtaacgcttcccttagagacctagattctcacaaggaagcaggtgatagacggtgcatcccaaccaatcaccagccagcggagcgcaataagaaggcagttaaccaatcggagaagagatgggtggctcgaaggatggcctgctttccccggcgtctccaggaagtagtggtgggacccagatctttccctcgagcccacctctccaggtcttgggccttcgccctcctgtccggagaacgtgtgctgtgggcggccgttctctcgggtgctggaggctgtggttgggaggcgggataggcttgccgccgcgcctccggagcccgctgtgccctcgaattggccactgaggagagaagccggaagcccgtgctgcagcgtggggtcgtccagctggaggggatactcgggaggaagaacggcaggccccagcccttctttcccgacagccacgccgcccacttggcggcggggagtcgctccgcagccggcccggagctcgcccgtgcaact

SEQ ID NO: 435983 - DNA, 978 bp, Homo Sapiens
  misc_feature (32)..(32): n is a, c, g, or t
  misc_feature (63)..(110): n is a, c, g, or t
tccggaattcccgggatctgatctggcgcgcngggaggaggagagcgcaggcgatgcgaaccnnnnnnnnnnnnnnnnnnnnnnnnnnnnnnnnnnnnnnnnnnnnnnnngagagccgggaggcagagggagtagtgaccgccttccggagccgggattcatgcctgtcctcgggaccagcgaaggggactttacggctgagtatgagccaggctgctaggagccaggtacccccacgcctgcagtccccgcgccgtgcccggaatgcgagctggacgcagggctctcccaagttcccaccgagccgaataaaaagcgtccgcccgcagctctccgccaaagacggacattgactccaggactccacagaatggagcaagaatgagaggaaaaaggccggcagaaaagcatgaactggaggtttgttgagctcctctacttcctgtttatatggggccgtatctcagtgcagccctcccaccaggaaccagctgggacagaccaacatgtctccaaggaatttgattggctcatttcagacagggggcctttccaccactccaggagctacctatcctttgtggaaagacaccgtcaaggatttacaagcagatatacaatatacagggagtttgcccgttggaaggtgaggaacacagccatcgagaggagagatctggtccgccatccagtgcccctcatgccggagtttcaaaggagcatccgcctgcttggcaggagacctaccactcagcagttcatcgataccatcatcaaaaagtacggcacccacctgctcatctcagccacattgggaggggaggaggctttgaccatgtatatggacaaaagtcgcctcgacaggaagtcagggaatgccactcaaagtgttgaagcttataaggacctggagaattcagatgagtttaaatcatttatgaagcgactccccaccaaccacttcctggaccatcggaa

SEQ ID NO: 435984 - DNA, 1305 bp, Homo Sapiens
gagccgggaggcagagggagtagtgaccgccttccggagccgggattcatgcctgtcctcgggaccagcgaaggggactttacggctgagtatgagccaggctgctaggagccaggtacccccacgcctgcagtccccgcgccgtgcccggaatgcgagctggacgcagggctctcccaagttcccaccgagccgaataaaaagcgtccgcccgcagctctccgccaaagacggacattgactccaggacatccagatcatggagtacacgctggccaacatggccaagtcttgggccgaagcttataaggacctggagaattcagatgagtttaaatcatttatgaagcgcctccccagcaaccacttcctgaccatcggaagcatccatcagcactggggcaatgactgggacctgcagaaccgctacaagctcctgcagagtgccacggaggcacagagacaaaagatccaacgcactgcccgcaagcttttcggcctcagtgtacgctgtcgccacaatcccaaccaccagctgcctagagagaggacaattcagcagtggcttgcaagggtccagtcactcctctactgtaatgagaatgggttttggggaaccttcctggagagccagcggagtcgttgtgccacggcagcaccacgctgtgccagcgccccatcccctgcgtgataggcgggaacaacagctgcgccatgtgcagcctggccaacatctccctctgcggctcctgcaacaagggctacaagctgtatcgaggccgctgtgaaccacagaacgtggactcggagcggagcgggcagttcatcagctttgagactgacctggacttccaggacctggagctgaagtacctgctgcagaagatggactcacgcctctacgtccacaccaccttcatcagcaacgagatccgcctcgacaccttcttttgaccctcggtggcgcaagcgcatgtccctcactctcaagagcaacaagaaccgcatggacttcatccacatggtgatcggcatgtccatgcgcatctgccagatgcgcaacagcagcctggaccccatgttctttgtctatgtcaacccctttagcgggagccattcggagggctggaacatgcccttcggggaacttggctacccacgctggggagaagatccgtctccaaaacagccagtgctacaactggactcttttgctggggcaatcggtggaaaacatttttcgagacgggtccacatctacctacgtagtccgactccggtactaacctactgcaaatgagactg

SEQ ID NO: 435985 - DNA, 1744 bp, Homo Sapiens
ttttttgcaaaacattacacaattttttattattaaatgagaaaatctcatttgttacatcgtcacattgctagtcagagaaatgttgcagtgatgaagaaagtcaatgttggaccaacccaagtcctcattcctacaacattcatttacaaagaaataatgttcaacacagcccaacaaaacattcttggttttcttcatattgaagtcccccaaaaaatcctcttctaatggggtatttcactacataaattatagttcttcatttttacaattcaccccaaactgtatgagagatgtatcacactaagatttctaaagctgttaggaaatccttcacacatcgtcgtcatctgatgtatcactgctacttgtctctgtgtcatcattctcagttgtgggtttgaaagtgctgttcttccacggtccaaacttgaagtcacagatcaagccatttttcaaaataccattttttctcagaccattcttctgtaactgttcactaataacttggaattctctcatttcatcctcagttaagggagcacatgtttcatcattttcactgtcttcctgccagcccatttcctttaacaatctgtgttctgcctcaagtgaacttgaaagaacatcagtttgtgggaaggttgaagaccgaatgatctgctgggaaatcactgaggcattgccattctcttgaggaatttcattttcatcgaagtttcggtttatatccctttcttggtgagtactattgctgttatgtaaattaaatgagtcgtcatccttctctgagccagcacggctttcatcttcatgttcctcttctactctgtctcttttcaatgctttcaaaaattcactcttcttatcagtgcgcattcgtgtcagtttggttagacgaggctgctgattaagtttgtcaacaggagaagaggaatttgagcgattacactctttcactgaatttgtagatggactaaagttcttggcagttgatttaaaagcattaaagttgccaacgccaaatgtggactcatgagggaaagaagttccaactttattttcttttgtttggcttttccattgtgtaggttttgtaggtggagcagcaggtttagggactaaacctttataaacacttggaccagttccattcttaactggctgtgacggaagatttcctactactgggaatccagatagctgtaagtcttttgtattacctttcttaatgaccagcatccttggagctctagatttaggattcggaggatattcccacacacctgcagctaaagacttattgtgatttggttctctctcatactcaggatttaaagacggaaaatcctcagcttcaaactgtttgcgttctctcttgtcttctttcctcccggtttcattgtcaggtatgttgttttcatgtagtccttggctttttcctgcatggaaaatactgctacgagaacgggaacttccaccatggtatccacctcgatgatttatgttttctgtaccatttcttccatgtgtacgccatccatttttttctttccttccaaagttacctccattaggacgtccaatagcagaatcaaagccatctgaagagttgtgtcgtcgacggttcacatcataacgattctctgtccatgcaaagttttcagaatgcttctcaaaattcaatgacgaaaattccaacaggactgcacaggaaggtgttggttttttctctgtaatc

SEQ ID NO: 435986 - DNA, 852 bp, Homo Sapiens
cattcgttacctgctgtggccggaggatttctcacttacggggaattcagataacgtgtaagtgctttgtgtatgaccttttgtgtaattgaccagcattcctggagcctctagattttaggattccggaggatattcccacacacctgcagctaaagacttttttgtgaatttgggttctctctcataactcaggatttaaagacggaaaatcctcagctgtcaactgttttgcgttctctctggtcctttcgttcctccccggtttcattgtcaggtatttgttttcatgtagtccttggcttttttcctgcatggaaaatactgcttacgagaacgggaacttccaccatggtatccacctcgatgatttatgttttctgtaccatttctttccatgtgtacgccatccatttgtgtttctttccttccaaagttacctccattaggaccgtccaatagcagaatcaaagccatctgaagagttgtgtccgtcgacggttcacatcataacgattcctctgtccatgcaaagttttcaagaatgcttctcaaaattcaatgacgactttgttgatgatggtggagtagggaaattaagccaggctggagcaaagtcatgtgcgccatttaggtccagtctctccaactcagtgaaacaaggcttcaacacctcatggcaagtccaaattccaacaggactgcacaggaaggtgttggttttttctctgtaatctttattttccagtttgtatttttattttgtatcctctgaaataatatcgaagttctttgaagatacttaacctacgactatttgacatagagttacttcaagtcagctacccatac

SEQ ID NO: 435987 - DNA, 463 bp, Homo Sapiens
agaggaaattgaaccgaataacactcctttcgactgaaatttgtaagatggaacctaaagttccttggcaagttgatttaaaaagccattaaagttgcccaacgcccaaatgtggactcatgagggaaagaagttcccaactttattttcttttgtttggcttttccattgtgtaggttttgtaggtggagcagcaggtttagggactaaacctttataaacacttggaccagttccattcttaactggctgtgacggaagatttcctactactgggaatccagatagctgtaagtcttttgtattacctttcttaatgaccagcatccttggagctctagatttaggattcggaggatattctaagagaggagcttgggagatttttttggttgggtatgtgtgtgtctgggcgtgtaggccccacacacctgcagctaaagacttattgtgatttggttct

SEQ ID NO: 435988 - DNA, 425 bp, Homo Sapiens
cctgaagagatgactgttggggcggttggagggagtgtttgaaggctgaatccttaacctctggagctgatggctaaggagggctgtctgaatttcacatgcagcctggagagtgggagatctctgacgaggacagatagagtcttgaatttgttgctgcagaatttgatggtgctgctgctgctggtataacatatgctgctgctgggtcttctccaggggtctttcatcaatctgccccccgtacatcttctgcagctgctcacactcctgctgcagctgtttgatgctgctgttgttgcccattttttccaggtgagctttgaaggcctggatgctcgcagcctcatctgagaaccggcgcgcaggggagaaacgctccgtagggaggtgcagagtgttggagtccttgtaggtagagctga

SEQ ID NO: 435989 - DNA, 1736 bp, Homo Sapiens
  misc_feature (78)..(143): n is a, c, g, or t
  misc_feature (1434)..(1434): n is a, c, g, or t
  misc_feature (1492)..(1539): n is a, c, g, or t
aatacaaaagaaagctctgtacataggactgtgaccatgtccactattcctgggtcagcatcccaggggaagtagaannnnnnnnnnnnnnnnnnnnnnnnnnnnnnnnnnnnnnnnnnnnnnnnnnnnnnnnnnnnnnnnnntaccccagagccaccgaggaagggaaacaccaagggtcgctgcacataaaaatattcacttcaacttaatcccttgacacacgcatgtcctcccaagggccacgtttcacacaacacacattataagccctttgcctgattcactcactgggtctgtcttttttgggaaggagaggaagaattcatcaaaggtctcttccccatgggtgggggagtggggagtgagtgagtgatggtggagtgaaacaagagcagagaaaaggggctgggcagttacagacctgagtcccaagctcccctgctctctggcccctgatttgccatgccccagccttgaaagccacccataagccccagctatctccaggagaaagcccagaaaggtgacttccatcttggcaccccaaactggggcaagacagcaatgagggttagaggttagggggttctcaaacatgtcggcaaatcatccccttgataactaggctgtgcataaaatcttcccccatcccttcacctaatcacagaagccagcttgttcctactgaaggcagtcttaggggttaagaaaatttcaccccactgctgccctgtttctgaaaaagctccccttctggatataggtggtgaaggtaggctctgacacagggtaaaagaccctcccccctatgctggcccaccctcaaggtctaccccaaagggggaggaggggggtggggcatggcccctgtacaaattacataaatactgaggttacacttagaaaaataaagtcattttcttcaaggctttttgtcttaatttaaaaaagttacagtagctgctcactccctgggagaactgcccatttctggctcccctttggctgcactcagcccaagaagctgctcccacttcttctgacccccattcctgcctctcaccccctcccagaccccaccctgctcactgcaacttgggccccaggcagctgcatgcctgggacagcgcaaggctgcaatgcccatgcgtgtggcacaaatgaagtcagttgcctctgcctgacgccctcccacccccaaccccgacatttggtctccctcttccctctccctagcaacagccctaaagggcaaaaagaggcccagagctgtgggtcaccctcccccaccccgttggggaatggcctgagggcccctcccccggctttctcctggaaacaacccaggactgggcaaacccagaatctcccccacacactggtggaccccgagctcatggggtggctctgtccccaggggcccagccagtntctggggagcctgagggctccccagggaaggggagtttgggcagggagggggacgagnnnnnnnnnnnnnnnnnnnnnnnnnnnnnnnnnnnnnnnnnnnnnnnngatttgttttcacttcgtctcctcaaataaaaagttcaaaatcaactttaagtaaagcagctgggaggagaggggggaagacaagggggagaagggaacgctggtggttccctccaacccaggagcccctggaggtccaaggggagcggcaaggcagggcaggcggcccatcccgggaatccggaccggtccagcct

SEQ ID NO: 435990 - DNA, 666 bp, Homo Sapiens
  misc_feature (76)..(76): n is a, c, g, or t
tatatttatagatttgttttcacttcgtctcctcaaataaaaagttcaaaatcaactttaagtaaagcagctgggnggagaggggggaagacaagggggagaagggaacggctggtggttccctccaaccccaggagcccctggaggtccaaggggagcggcaaggcaggtcaggcggccccaggtacctgcccagtgcacaggcccagctacatcaggagctgaagggggagaggacagcagtagtgaggaagtaatgcctcccatcgtccccagctggcccctctgaggggcagagtccaggggcatctttttgacccagcctgtgacagacacagggtctgacctggggtcagcaaggaggctggcaagagggctcccaactgcttcctcagaggaggagacggtggcccagcccacacagaaggcctgtgtgtggggaggtggggcacggtcccattgggtaagctaatactcatggcaaacatcgagccaagctggcgagggggtcccaggaaggaggacagcccctccagcaacagaaatgggaggtggggcgggaagaaggggaggctgagggaggacgggtggaggcaggcaggcccatttctttggctggagtgagagggctcagtcctgtggctgcccgttcctcctccccgcctc

SEQ ID NO: 435991 - DNA, 316 bp, Homo Sapiens
  misc_feature (49)..(83): n is a, c, g, or t
acaattacattttcatcacccccaaagaaatcgcaaacctctgagcttnnnnnnnnnnnnnnnnnnnnnnnnnnnnnnnnnnnaacaggcttccggtcctgagcaaccatgacctggctttgtctctgccgtgtgtcctatttggacttgaacgtgaatgcagccatacaacacgtagacggttgtgtctgacttcatccacttagtgcgatgttttcaaggctcatccatgctggagcccatgtcagtgcttcgtttctttttatggcttaaaaatcgtctatggtgggccacgcacggtggctctcgcctgtaa

SEQ ID NO: 435992 - DNA, 914 bp, Homo Sapiens
  misc_feature (357)..(418): n is a, c, g, or t
  misc_feature (585)..(646): n is a, c, g, or t
  misc_feature (727)..(730): n is a, c, g, or t
  misc_feature (736)..(786): n is a, c, g, or t
  misc_feature (788)..(788): n is a, c, g, or t
cttgttttgtcttccctccaccccccctccttgtggttgagctgtggtcgcgcccgctccctccccccggttaggtgcgcccacgccggggaaccacgctcgttgttgctgctcccacgtcgctcgtcccgcgccctcgtcggtgtctttacgaccgcgcgcgtcgcgcgccccgccgtcgctcgcctctcgctctgttatataagaatgagcgcgcgcgctcctcctcattttttggggcgcgccacctcttgtgccgcacacaataagaccgcggcgtcgtctcgcgggatatcttgtgtggccccccctcaggggggagatcgtctttgtaggcggcgcgcgccgcccacgccnnnnnnnnnnnnnnnnnnnnnnnnnnnnnnnnnnnnnnnnnnnnnnnnnnnnnnnnnnnnnngaaccgctttagatgtttttggcacacttgtgaaaaggccccacaataaattgacaccacttccccggtgaaaggtctcgtggtcaccccggcccacgccctgtggagatccccggataataaaatatgtgttagaaccccacacccgcaagtttcccttttggggnnnnnnnnnnnnnnnnnnnnnnnnnnnnnnnnnnnnnnnnnnnnnnnnnnnnnnnnnnnnnnatcacctccaacatggactctgtcgtgatttgaaaccttccgaataaataacaggatgaagggaggggtggaggggctgannnngccgtnnnnnnnnnnnnnnnnnnnnnnnnnnnnnnnnnnnnnnnnnnnnnnnnnnntngctttgaagccccggccttgccccctgcggggaggggctggcctccagggagggggcctggctgggctgaattttgtgttttagaaaaagaagtcccctcccagtcttgggggtggcaggggccta

SEQ ID NO: 435993 - DNA, 986 bp, Homo Sapiens
  misc_feature (139)..(139): n is a, c, g, or t
  misc_feature (502)..(511): n is a, c, g, or t
  misc_feature (711)..(711): n is a, c, g, or t
  misc_feature (739)..(739): n is a, c, g, or t
  misc_feature (749)..(749): n is a, c, g, or t
  misc_feature (762)..(762): n is a, c, g, or t
  misc_feature (774)..(774): n is a, c, g, or t
  misc_feature (786)..(786): n is a, c, g, or t
  misc_feature (788)..(850): n is a, c, g, or t
gacaatgttctctttgtttctttaagttttgccgagacatggttatgcctaatttatttataaaaggggaagtggaatcattaaagtaataataattattaataacagtaatggtagccgagtggcacgcgggggcttngctctgcgggacagtccccacggccagcgacgtccaggtcaccaatgggattctttttgctcttgtcttgagaattttttcagtcctatttagctggtgaaatccctagcttgttcttgatacacgaacctatttattctcgtggttttaagtcctccctgccctctctcctctcccctgcagcagggcagggacccctctcccctgctgtctcttggggctctctcccctccgccctctgcattcgggaacacgcacgtccgcgtgggaagcttgcagcagggcgtccgagcaataagggctgggtttgtcccccaccctggggggggccaggctccagagagggggcacctccccacacannnnnnnnnnaccgaggcctaggcccctgccacccccaagactgggaggggacttctttttctaaaacacaaaacttagcccagccaggccccctccctgggaggccagcccttccccgcaggggtccaggccggggctcccaggcgagggggacttggggcttccacgtcccttgggggcaggggccaggcccaggggggaaggctcancccctccacccctcccttcatcctgttntttattcggnaggtttcaaatcncgacagagtccntgttgggggtgntnnnnnnnnnnnnnnnnnnnnnnnnnnnnnnnnnnnnnnnnnnnnnnnnnnnnnnnnnnnnnnncccaacaagaacacttcgcgttgcgtttagactatttattaccgggatcacaggcctggccgcggtaacagacttttacatggaattgtttaattatttgtacttttcatgccagaaaataaaagttcagaatctt

SEQ ID NO: 435994 - DNA, 1072 bp, Homo Sapiens
agttcgacggagactctcgcctgtgtgggtgcgcacattaccttgcggatgttagatgtggtgaaggagcggccacagccctcaaaagggcactggaacgggcgttcaccagtgtgggtacggacatgcttctgcaggtctcctgaggtcttgaaggccttgctgcacagctcctctgggcacttgtatggtttctcaccagtgtgggtacgaacgtggctcttcagtccatagcctgtggcaaaggccttgtccacagctggggaaggtcacatctgtatggacggtcacctgtatgagctcgttcatgcaccctttaagtgatgagcggtggtgtagagacgcccacagcccttgtagccacagcggaatgctctgtgctccaacttgctgcccttttccattacggggaatctggctgtcatgaagaaccttgctggcatactgctccaggtccaccactgcgtctgcactgaagccctcatcatcctctgctgccaggtcctccaagcccacctctgtctgtacggccaggatggtgctctccgatggcacagccacagggtggtgaatgtaggcagtggagccatcttccagttgtacaggcttccagggtgctggggtcatagccttctctgggtgtgcggtgtatgtaagccatgctgccatcttccagctgcacaggctgaccatcctcaaaggagagagcttctttctgtaccgtcacactggtgaatgtatgcggtggtcccatcctcgagctggatcacctgccacttcaagaagcttctctcctttgacagcttgcatggacgtaggctgttgtcccatcactaagggtcaccgtgtgcagcacccaagctctccatggcaaactgctgctcgtgcactcagacatgaagttggcttctggccagcacacaagagcacacagctgaggtcagagatttccttctgggtcacaaatctgacagccccacgagggcagactcacagcacgacagaccgccatgcaccgggccccgcacaccagcgccggccccacaacccgcctgcgccatagcccgcccag

SEQ ID NO: 435995 - DNA, 711 bp, Homo Sapiens
ccaccgcgtccggcactgaagccctcatcatcctctgctaccaggtcctccaagcccacctctgtctgtacggccaggatggtgctctccgatggcacagccacagggtggtgaatgtaggcagtggagccatcttccagttggacggcttccagggttctggggtcatagccttctctgggtgtgcggtgtatgtaagccatgctgccatcttccagctgcacaggctgaccatcctcaaaggagagagcttctttctgtaccgtcacctggtgaatgtatgcggtggtcccatcctcgagctggatcacctgcccttcaagaagcttctctcctttgacagcttgctggacgtaggctgttgtcccatcactaagggtcaccgtgtgcagccccaagctctccatggcaaactgctgctcgtgcactcagacatgaagttggcttctggccagcaccaagagccacagctgaggtcagagatttccttctgggtcacaaatctcgcgcgatatccaggttccagggccgccgcactttcctttcctcttggcgcgcctctaccgggccccggaacccgtatagaaaataccgggcacggtccaccccgccccccgcttcgccgcggcagccatccaacttatcctggttccggggctcctggagcccaggcggccgggatctgaacacgagctcttcggagccccgccc

SEQ ID NO: 435996 - DNA, 978 bp, Homo Sapiens
gcggccgcagctgccgcctctgccagcccccagctgcccagacccgcgcctgccccctcggggccctctccgccgccggcccctgagcccccgcacaccgagcagggccccacattgcagcagacggagcagggcgcactcaaggcgggcaggccagggccgggctgcaggggagaggggagaaccccacggtgctggcgcttgaggtggcggcccaggctggagcgtgaggagaagcggagctcgcagaccaggcagcagtagggtttctcaccagtgtggacgacctggtggtgcagcaggccggtggagtcgcggaaccccttggggcaggcagagcagcggtagggccgctccccggtgtgcgagcgcaggtggttggctaggttgaagctgtgcttgaaacccttgccgcagcgcggacatgcgtggggcttgagcgctgtgtgccgggcaaagtggcgccgcaggtctgagcggtagcggaagctcttgccacattcactgcagtgaaacgggaccctgggggcggcagcggcgggcggtgctggtgcaggggttggggcggggacgtcatccatggtggcggggaatacagtggtatgtgggggctctctctcatggagtggtggcgaggaattaaagtaaaatttgtggcaataaatgctaacgtgcctacttaagctggtgcacagcaaagccgcaacaagtaagctgtttggatgactattatcccgtaagttcctcctggattcctccttaagtcctaccatgattgctaagttatttgacttatctagagccgtctcgggtccactaagacccacttccaaaactccacccaatttttcctttaaagaagccacatcctttctaagactctccacgtggactcccgtcaccttctcaggccttctctacgaagtctattcccatcccctgcaagtcctttccacattcattataaagacctgatag

SEQ ID NO: 435997 - DNA, 449 bp, Homo Sapiens
  misc_feature (65)..(142): n is a, c, g, or t
ccgtggagatttctggttcctctttttcttggcttttagcaccatctggatctttttctacattnnnnnnnnnnnnnnnnnnnnnnnnnnnnnnnnnnnnnnnnnnnnnnnnnnnnnnnnnnnnnnnnnnnnnnnnnnnnnnaggtttgatgagatcatcttctggtttttcacctggcgatgtgtttggacttacaggggcacatgtttcttcccttctgttttcctcttgaggcaacagggcttccccagtttccttgacctcctcctcaatcctgatgggactggggctggtttttccttctgaagtctccttctgttcttccactgttacctgctcgtcaggctccatgggtgtttctggcggggtgtacaaattcagtttaaatccggtcttcctctctttgttttgcctccacttagatagaccgcgctttgttccttttggc

SEQ ID NO: 435998 - DNA, 333 bp, Homo Sapiens
aaccggatgacagggcgactcctctcactttcagcagttcagttatagagtccacaaagccctggtaatgaaagttgcacattttctcaatttctcggtcgtgattacggatacgagtttcaagcttctccatgaaacgtccatgttcttcaccatcataaacagacctgagcgtgggcccgatgcaggccgtgtcagtgctctcgatctctcgcaggatccgctcgtgctctgccgctgtctccaggctctccgcctccgccatcttaccccgctccatagactgggggcgccccgcagcgcgtcccctccgtcggctcggctcaccttttc

SEQ ID NO: 435999 - DNA, 1142 bp, Homo Sapiens
  misc_feature (41)..(77): n is a, c, g, or t
  misc_feature (1100)..(1100): n is a, c, g, or t
tgtacatctatgggcacctgcattcaccgcggggcggccgnnnnnnnnnnnnnnnnnnnnnnnnnnnnnnnnnnnnnatcaggccaaatcggccgagctcgaaattcgtcgagagcggagtttgtggcagcgccattttgaatgtgcagctgcagcgggcgtgagttgggggaggacgggttgccgactcgcctacctagcggtctcttgattgtcgatattttgttggcataggtttatgtagagacgtatacatatatatagacacactgtctttaaatctaggcctgtatccggtgtccgaggcgaactcagtaagatgatgttaagaggaaacctgaagcaagtgcgcattgagaaaaacccggcccgccttcgcgccctggagtccgcggtgggcgagagcgagccggcggccgcggcagccatggcgctcgctcttgccggggagccggcaccgcccgcgcccgcgcctccagaggaccacccggacgaggagatggggttcactatcgacatcaagagtttcctcaagccgggcgagaagacgtacacgcagcgctgccgcctcttcgtgggaaatctgcccaccgacatcacggaggaggacttcaagaggctcttcgaacgctatggcgagcccagcgaagtcttcatcaaccgggaccgtggcttcggcttcatccgcttggaatccagaaccctggctgaaattgcaaaagcagagctggacggcaccattctcaagagcagacctctacggattcgcttcgctacacatggagcagccttgactgtcaagaacctttctccagttgtttccaatgagctgctagagcaagcattttctcagtttggtccagtagagaaagctgttgtggttgtggatgatcgcggtagagctacaggaaaaggttttgtagagtttgcagcacaacctcctgcacgaaaggctctggaaagatgtggtgatggggcattcttgctaacaacgaccccctcgtccagtcattgtggaaccccatggagcagtttgatgatgaagatggcttgccagagaagctgatgcagaaaactcaacaatatcataaggaaagagnaacaaccaccacgttttgctcaacctggggacatttgatttt

SEQ ID NO: 436000 - DNA, 1132 bp, Homo Sapiens
  misc_feature (302)..(315): n is a, c, g, or t
ccggaggtgcgagtggggggtaatcgctcggaggtgcgcaatattttgaaaaaagcaggtccaattcgggcctgttccagcggccttataaggggtggggcaggcgtgataattcccgaaggaattggtttggggcggagagtttcatggggtggactaaggggggagagtccggggggaaaaaggcgggtccatttaggaaagggtttcaattttcccccatttctcggtttgatatccagggatacaggcgaatctggcggtacagaggggttgccagggtaaacagcattgccggccannnnnnnnnnnnnnccggggcgacccctggttcccctgtgtggtgttgcctcaggagggccagctcagtcacacaggcggtagaagtggaagtggtagtctgtggctggctgggcgagagcctctgaactgcagttggcctgacccagcagtgccacccggaagtggtaggtgaattcacggaaggacaggatggttattggccaccggtgagaggtgccctgggtgtcctggtgggtgtggagactctgtggaaggctcccctcctcacatggttcctcctttgacctcaggctgcacagcaccacagacacgggggaggaggagttcatctgcagagtcaggctgaggtgcagtggggtgccactactgacagggatgtggtaggtgaagttcccaggcctgcaggcatcccctggagcacagtactgggaggtgatggacatcgaattctccagcacctggatggaggtcagggagggcactggctctgcaaggagagaggctgactggccctgggcccaggtgggctcagcagggcccacgctggactggagggcccctcggcgggcccggccatggaaaccaaggctgggactgttcttggttttgccctgccccccagggaaggggactgcagggctggccagaggctccagactcttgtgatgcttggagtggccaatgccattgactgaaagaccccaggacttggctctgatgttggtgactggcagaagggccatctggctggggcctgagcggttggtgctggggctgggacttgggttgagaacatggccagggttaaagatcccgagaattccggacc

SEQ ID NO: 436001 - DNA, 342 bp, Homo Sapiens
gtttttttatgacacgactgcacgatgtggatctggtcctgcctatgtggttgttctcaggtacaggaatgtgtctaagcatggcctccaaaggtcccttggaaacccctggctggtagggaacccgcactgtgccatcagctacagtccacaaaggtaaatgaacagatgccaccaggaaatgaggatggactggctctgtgtgatcataagctcagagcatcagggaaatggtcatttgaaaactaagaaaacagattcaaattattctgagaaaaccgactattcgcagactcgtgtcccaggtttcagaacccgaaaatctcactcctgatcaaaggt

SEQ ID NO: 436002 - DNA, 1854 bp, Homo Sapiens
  misc_feature (88)..(88): n is a, c, g, or t
  misc_feature (94)..(94): n is a, c, g, or t
  misc_feature (1791)..(1791): n is a, c, g, or t
tttttttaaagattgacagcgtcatcaagtttattacacaattttcaacctatcagaaaggacaaacaaatcaccgacaacagggggnacgggnaccttggcctttttgagggatgggtgttttttttccttttgctatcaggaaataaaactaaaaatggtgtcattgagtaaaaacaaaacaaatggggagaaaaaaattctccgggtaaacggcatttctggtattctatatatatttttccttaaactgtcaccttttctctacattttaaaagacacccggagttgctctcaataagcacatcacttaacacttggccagttgggtggggtgccatgttctgaagtggaggtggggatggggttgggggacaggggaaaaaaagctccaacctgtagcctctgtcccaagggaatgtgcctctccaatcctgcgggggactccctcagtgactgagggctatatgagaaacgtgctgggaacagaggacgggtttagtccaattcagtctctctcctctgacccagaagggtctctagtgaccctatgtctcacatgccaagtctcatctcacatgccacgtctcatgttaggtgtcagatgccctgtagatgcatgcagaagtagcatcaccccatgggtaccgcaggacctcgctgctgcctcctccttcagcagcaaccacattacaatttggatgttatggaaaagcaattccatttgcctgtagagaaaatggcccccagaatgctggtccttagaactctgagctgagttcattcaagtcgggctctgtttcttctggctcctcatctgaggcaggaagtatctccaggcagagtgagaggagctattaagtcaacagtcaaaaggtgaaaagacaccaaatttgtgactttacctgcctactagtgccaggttatcccacaataagtaaaagtatgtacctgggggatgtaagcccatgcttacatcaaacctgaaaaaagaaaagcctatggaagtaggccatatcctgcccaacttgcttctttccccattcctcctggttacttcacaagggttcttcattgctgaggtcccaatgtccccatctcccaatgggcagtaccttcctctaaaacaaggaagtagccttctgggggaagggctccatgtgttaaatggaaaagccccagggaaagggaacaactaagagctggttattgcaagaggtacccaagcactaagcagcagagggtggtaattggctctgccaggcttcccagcagcaagcaacctcataggccttctctgcttaggaggggcaagtccactgagaaggctgggcagcgcagagttgaaagagttcagccctctgggaggtcaaagaaataaaccgtcaatacgtgagagggaaagcaggaacagaagtagcttttcataaggtaatttctgttctcatggtccctcctcaaagggctggaaaggtaaaggagttaaacaaagaagtggtatgttagcaaggggtttggaccctcttggccccattaaatctagtgctgagggcaggaccctgggcatattttggcacacccagtcactctcctagatcctgcatggaggatctattttctttgggaaggaagtcttcccatcaacctcaccattgaacggctcccggagaatcagaaagtcatacgttttcttggacaaagcaccattctctatggagaccaggggcctggacatgttttcttcctgtctgccacccctcccaatcacacgaagtctataggttctttccnctggcaaacaggcgacggcctggtcgacgatatccaatacgcggggccggtaccagcctgcta

SEQ ID NO: 436003 - DNA, 914 bp, Homo Sapiens
ctgctccgcccctctctgcactgttgctccttgagccatacccaggtgggcattggtggggccacaaccatgatcttcccatgaggcccccaagaaatgacgagctgctctcaggaagcttagagccggggcgggcgtgccctctgagccacctagaatccagcacccaccgccccagggctccaggctgtcagtcaccaccaccaccttcccttcccctccaggcagaggcatacctgtctgcacccaaaccggtggaattcctgctctgctcgcaaccttccatcatgcacacaagaaacagtcacatgcagctgtgcctccatcctctgcccctgcctttgctctgctcgcaaccttccatcacacacatgagaaacagtcctggccctgtctccatcctctgcccctggctttgctctgctcgcaaccttccatcacgcacaggagaaacagtcccggttctgcctccatcctctgcccctgcctctgcctgtcatcactgtgcaactcctaactcgccttcaaggctgggcacagcagacactgcctcttcttagaactccacaggcctccccaaggccgaaattagactccccactcctgcccaccagcctgcaggggggtcagacagcactagattccttgggcctcagggagaccagaggggccaatggggcagaagccctgtagcttcctctgcagtcgggtcctgacagtctgtgatcgcccaggggcactgcgaggggagaggaggaggggcccaggggtcttgagctttgccctaagggtctctgcctggcccccccggaatggggctgtctgcgcacgcaactggatgcgactgacgctgatctctgcagcttcgacgcgtggtcgacgatatcccggaaactccggaccggtaccagcct

SEQ ID NO: 436004 - DNA, 988 bp, Homo Sapiens
caaggcctttgaggactcccaaagggccatggggccctgggctgaaagggttggcttgaaatacactcaccagagtaaccgggcatagccctctagcaactgagcgaggcgggcataagtgaggcgtgaggcaggtacactgaccaggaagggttagccaatgttctcaggtcggcagaggcccttgtggtcaggaccagtgggttttctggcagagctggttgcagtagcccacacggtagcaccgggtacagcgcttcagcttttcatcctccgactgttgcttccgctggcaggctgcacacttggagatggggacgctgggcacctgggggcgctgttgcacctctagcaccactacccgctccttagccaactctgaggatagcagctcaaagcagaggagcgtatcagatggggacacagtgtccagtgagtgggagggtaggaacacacgatgaaaacgattcttaattacctccgccaaacgcaggttctcaggcttcacatgaacactctgagagagggagtccaatacttcgctcgcagtggagttctccttgttgacgctcaccaggaacttgatgggcttgctgtggggctctcgggcaaaataaaagacagggagaaccttttgcttttgtggcaagggcaccggcagataaagaaacgggtcaaaagtgatggagaccttggcacacacagggcacaccagcttcgacttgtactgcccctgaaataggtccacgatgaaagagtcattcctcatcttgtgccgctgccatgcttcctcagctaccacctcatcgggccgcccatctgaatccacggtctctgtgtagggcttgttctgaatgcgattcaggtcctcgtgcagcccatccagcaggaaagccatgaactcctgggcatcatgctgtgcatagcctgtgaactggctggccttactcgccacaatggccttcaacttggaaggctggaaggcatg

SEQ ID NO: 436005 - DNA, 319 bp, Homo Sapiens
tgaagcatctgagggttggggctgggggcaagatgtccagggctcagggtcttagcaggaggcgtgttcctggccacttgagccacaggaaggggaccaggcgccgggtgaaggtggcagtgaaggtgtagatgagttcctgtgactctgcgttggtgaaagtcacggtgcccccttcataatccagggcgatgcccactctccggggccgcagtgctgggataagctcagcctcggggctggtgttggcccagatgccggaggaggagaggcgcagcgcccacacgccatcctctggccgcagggagaggtctccctt

SEQ ID NO: 436006 - DNA, 258 bp, Homo Sapiens
  misc_feature (191)..(199): n is a, c, g, or t
ataagccactgtgcctggcctcaaagcacttaatatatttgttttatttttttaaattggacttaatatatttaattttcacaacagtcctcttaaaaatcccacttagggaattaaggatccagagaggtgaagtcacaggtataaagagaaataggatatgtggtaagcctggaactggactttggttnnnnnnnnngagagaggaaatggagcaaggatttgaacccaagctgcctcaagcttccaggtacccgg

SEQ ID NO: 436007 - DNA, 735 bp, Homo Sapiens
  misc_feature (140)..(140): n is a, c, g, or t
  misc_feature (161)..(161): n is a, c, g, or t
  misc_feature (195)..(251): n is a, c, g, or t
  misc_feature (479)..(479): n is a, c, g, or t
  misc_feature (719)..(719): n is a, c, g, or t
aaaactctgtatcccaaaagtatttaatgaatgttcaagttcatacatctaaaaagtttttatatagactcaaaatatggttctaaccatgaaacttagaaatcatagtgacaatcagtataatataagctggtaaaatntgtgagattttcagaaggcanaatccatgttttttgtctattcactgattcagcnnnnnnnnnnnnnnnnnnnnnnnnnnnnnnnnnnnnnnnnnnnnnnnnnnnnnnnnnagtcacagccctttctctatagttttccagctagagagggatgagatgggttggaccaccccatattttggaagatctttttctatgttggcctccctgaatcttcagagcattgagttctaagttgtctaaagctggtcttatgaacaggctgtgtctgtatgataaaaacaaactagttaaaagatgagaaatttaggcattattcacacatccacaccatatctnatagatgtttaaaataatgtagaccaaatattccacctcttggggtcctacgggcacagttgagtaacatgaaatgagataagatcagtttgatgtcacagttgaaaactgcatttgtaaatctgtgtaatccatctcgagccaagttctttggagacagtctaaaatccttaaaaagcctctgcatgctagattttgcatttagatctaagtattgtcttaaaagactgtgattgttcncataactggagaattc

SEQ ID NO: 436008 - DNA, 1048 bp, Homo Sapiens
gcggcagagttatcagatgcgacgtaccctagggggcccctctttttaacaaaaaaatggggggaaccgataagctggggcccccccggggaatttctttatgagggggcccccccgaggtgtgttcatgcgtagtaatgtgaccccttcaccgtatatcacccggccgtaggggataaaagattaagttgtttgtgggaaaaaaagtctttattaggtatcatcattctcattcttgttattattgacatcctcgtcactgtgaatcagccagcccagcctccaacacacataccaccagcacaactcctcatgttgactcgtgggccctgaaaccacccacagagtagatgaggaaagggaggctccatctgtcctagggagaacgctttgcagctgccccccagaagactccattctttgcctctgctagaaggtcaatctcttttccgcttaagaggagatctgggctgtttctcaagtcatataagcgcatcacgatggggacttgacatttattgatcggtttatcgaatcatataagcttgcatcacgatggggactgtgatggcagtggtgcatatgagcccatcaggtccttcttcgcgtattcagtcagcaaactgcctcaaccgtgtcctactttttcttaagcatataattcccctttcatttaagccagactgtagctagaggggctcaaataggtaagagagaagatactaaagagttaaatgcactcaaaggggagaactattcagatttcttataaaattactggtggcataaataggccccaaatacagaagggaagggctgactttcactcggacacctcatttgagcacagaaggggcctggcaattacacatggggccaagtggtctattcatctctttgccattttcagccattaaagccctacataaacatacatttcataatgagacccacccggtggacacaggcaaatgcccacacccatgcgcacagacctaatagacccagaacactcccacacacattaaagctttccggaatcccggga

SEQ ID NO: 436009 - DNA, 2198 bp, Homo Sapiens
  misc_feature (164)..(178): n is a, c, g, or t
ttttgaggccatctaaatttggtgctggaagatcattccagaccttctacacagctctataaggccaaaagccgcacacattgcctcccataaattccgtttgaagtcctttcttctatgtctacatttgtgatgcaattaagtattgaatacattttcttttnnnnnnnnnnnnnnngctgagatgagattgagaaagacttggcaaaacacccaatgaaagaattgtagatgggacttgggaaaaaaagtctttattaggtaccatcattctcattcttgttattattgacatcctcgtcactgtgaatcagccagcccagcctccaacacacataccaccagcacaactcctcatgttgactcgtgggccctgaaaccacccacagagtagatgaggaaagggaggctccatctgtcctagggagaacgctttgcagctgcccccagaagactccattctaaggttggaatgggaggaggatattatgtaagttcaagaggaggaaagagaaaatgttttctctgtggaagcagcatagatggatggacttttgggtggctaaatgccttcctctaaatgctagcattgggatacggttatgcgggaaaatatatgtgtgcatatgggcacacccctcctccgaatatctctctggcaaaagctcctcatacattcacaaaagccgcccccctccctttggtaacagaagtaacttacaggagtttacctttgcctctgctagaaggtcaatctcttttccgcttaagaggagatctgggctgtttctggcaggggaaagaagagtatcaccaatttttcctttgacacatttctaaatctggaagtatctggtagagttacctcaagaatcatataagcttgcatcacgatggggactgtgatggcagtggtgcatatgaagcccatcaggtccttcttcgccgtattcagtcagcaaactgcctcaaccgtgtcctactttttcttaagcatataattcccctttcatttaagccagactgtagctagaggggctcaaataggtaagagagaagatactaaagagttaaatgcactcaaaggggagaactattcagatttcttataaaattactggtggcataaataggccccaaatacagaagggaagggctgaccttcactcggacacctcatttgagcacagaaggggcctggcaattacacatggggccaagtggtctattcatctctttgccattttcagccattaaagccctacataaacatacatttcataatgagacccacccggtggacacaggcaaatgcccacacccatgcgcacagacctaatagacccagaacactcccacacacattaaagctttctggaacaagagtttacataagtaatgaagtaaacaatatgcccctcccatcatagattatctgcagcagaaacctggcaggcgtcagccatggtacctgtggtttaagctctcagcttaaagcatctgaaaggggcattacgtgggaaggcatctggaggttttacaggagggcagcacatcagcgaagggtacagcaacctctgaaggaattacggggaagcagttactaaaaagaggctcgtcaatgtggacgtttgtggggcaaggggtttagtaatcggaggcttaaaccatgcctaagagaagcatccagcggccttcacagtgagcagaaggggcagagcaaggcgcttcacaccccaataaggcccagcactgactgctttcttcttcccaaacctgtccagaaagggcggaggggacaccaggactcagaaagctactggtttcgggggaggtatattttgaaggcaacggcaaatagacaagggcttgtgaaggctcaggggtgagagaagctgttctccctttctgtcctgcagccaagcttgccttctgggactccagaggcagcccagcacctgcagtctgcaggatgtgcactgcagctttctctctgcgggggcaagcaggttgtgccacattctgcagacccagagaaggttctggaagtatctaggtgaggtgcaacacacttaacctctgcctgactctaaacactgctttaggagggcaaatgaagagcctaagaggtaataattacacaaggattgcacacagtaggtacttaataaatatttggggaaactgaggccggggcc

SEQ ID NO: 436010 - DNA, 721 bp, Homo Sapiens
cggctgtacgcccggaattatgggatagcaacgagcggggccggccgagcggggcctgggggtgctgacgccgagggcgggggagagcgcgccgttgctcccggaccgggccgcgcacgccgcctcaggaaccatcactgttgctggaggcacctgacaaatcctagcgaatttttggagcatctccacccaggaacctcgccatccagaagtgtgcttcccgcacagctgcagccatggggtctgaggaccacggcgcccagaaccccagctgtaaaatcatgacgtttcgcccaaccatggaagaatttaaagacttcaacaaatacgtggcctacatagagtcgcaggggaaggccccccaacccgggggtccgggggccctggccaagatcatccccccgaaggagtggaagccgcggcagacgtatgatgacatcgacgacgtggtgatcccggcgcccatccagcaggtgtgtgacgggccagtcgggcctcttcacgcagtacaatatccagaagaaggccatgacagtgggcgagtaccgccgctggccaacagcgagaagtactgtaccccgcggcaccaggactttgacgaccttgaacgcaaatactggaagaacctcacctttgtctcccccgatctacggggctgacatcagcggctcttgtatgatgacgacgtggccagtggaacatcgggagcctccggacatcc

SEQ ID NO: 436011 - DNA, 333 bp, Homo Sapiens
  misc_feature (31)..(31): n is a, c, g, or t
  misc_feature (35)..(35): n is a, c, g, or t
  misc_feature (42)..(42): n is a, c, g, or t
  misc_feature (56)..(56): n is a, c, g, or t
  misc_feature (72)..(72): n is a, c, g, or t
  misc_feature (76)..(76): n is a, c, g, or t
  misc_feature (112)..(112): n is a, c, g, or t
  misc_feature (283)..(283): n is a, c, g, or t
  misc_feature (298)..(298): n is a, c, g, or t
  misc_feature (300)..(300): n is a, c, g, or t
  misc_feature (308)..(308): n is a, c, g, or t
gaaggaatggaggcccttctctgcatgcctnaggnggcctgngccccaggggcctngacctgtgggggcagngggncaggcctgagcctccattccttccccagcccctggnccagggtcaaaggagagatggcagcccctcccccgcatgcatgcacctcagctggcaggaggccaagcctctggccgcagggtctaagagccggggcttacccaagctcagctgaggccacccgagccccagggaggaagagggccctgtccccctgtggccactgctctncctcccagccttcantntctgcccnttagcagggcctggccaggcagagt

SEQ ID NO: 436012 - DNA, 1157 bp, Homo Sapiens
  misc_feature (166)..(166): n is a, c, g, or t
  misc_feature (184)..(185): n is a, c, g, or t
  misc_feature (211)..(211): n is a, c, g, or t
  misc_feature (213)..(213): n is a, c, g, or t
  misc_feature (264)..(264): n is a, c, g, or t
  misc_feature (289)..(290): n is a, c, g, or t
  misc_feature (378)..(379): n is a, c, g, or t
ataagaattaaaaaaaaggggtggggaagagaccttcttttgttttttggttccacccaccctagagggcgcattccctggaaaaggtttccctccaacttaaattaacctccctgtgccctttgaattccttcccaaaatcctttcctttctacttttcctttcnggccgtgggtaatcgctnngctggggaaaattcctgatgtgtttngncttccttccaccagggcatccccatatacttcttttttctctttttccacntatttcgagcccagccattccgagnnccatttgggcaatccttccattttgtgttcttcagaaccccacaattgaaaccagtgagggctttggcctttttgcctttactgtatnntctgccccttctagagaaacaatgtggctgaagacttgatggtacttgggtatttcccatccttcggaaagctgagggttttcatttagaagcggttgccccaatttatcaaggcaaaaattagtaaaatacaggacacttcctacaacactgaaagcttccttgttgtttttaatggcacaggactcttccactttgtggtcctcctctagcacaatactggatggctggggcaaaagattaaaggaagtcttttccacatcatttttctgctgttcctcaaatctttttactaaatttgatacaaattcctctatttcttgatgatattgctttgaaatagcattgttcatgaatagaatctgtaatataggtccatctaacttagtatcgttcaccaatattccactcggtcgagtcagaatgttcaattttcgtttaagttcttgattctcggcgcggagctgctcgatggtctcctcgcactgccgaagccgctcccgtagctccgcgtcgccgaccccattttcgtcctcctcgtcgccgtcgtcgtccttgaagcgagtgtgaacgggcttcggaatcgactcctctgggtggtcgaacggctcgaagagctctagatcgccaaaatacacctctgcggccattttgggctgtggaaaagattcgagaagaggcggagccggccaccagggcttggggaagaaggttggaaggcggcaccactctctagagctctggccgcacggagatccgtacttccgggccgtaccag

SEQ ID NO: 436013 - DNA, 369 bp, Homo Sapiens
ggcagagcattgtattgtttttaccctgatttgattatcagtattttaggttaatttgtaagagaaaaatcaagtaatgctgtaaaagctcatgtaaatcacagaaaagaactgttttaatgacttttgtttgcttttaataacatcaaggtattagaatttattaattgccatttttatgaaagtattaataaaattgtttgctacaatgatatttctgaagccacagtttgttaaatatatttgtctttccattatttttcagaaaaatataaagcagtaaccaaactgatcatttcacccagatttgagggtaagatatagctttagcctactgtttatattcaacttaactgctaaatctctgtt

SEQ ID NO: 436014 - DNA, 813 bp, Homo Sapiens
  misc_feature (616)..(616): n is a, c, g, or t
  misc_feature (753)..(753): n is a, c, g, or t
  misc_feature (768)..(768): n is a, c, g, or t
gtaatctatgacaagtaagctatctataaatggcaatgaagggtagaacaaattcaatgaaaatatctatttaatcctagtgtttactggtctagaagaataggctgagtaaattagtatttctctggctgttgtggtaacacattgcatgctataacagttttaagtaattacaggtgcattgaaatttatctatggctttgtcatcatattctaaaatgtcatgagtacttttttctgacctcaattactatgaaattggtttccaatatttaattaaccaagaatatcaagtctatagggtattattaaggtgagacttctgtagccttttcaataaagaccagaattttggagtgccttgaaccttaatcattgatctttaattcttattaagtcaactgcccaccttttaaagactgaggcccagggagagtaagtttctctgagacaatgcatacagtacagtgcttcttgggtattggctctaagaccagatgcaaagaaaggctaaaatcccatttcattgttcattaggtgagaaccctttgttaagctgtgtaacctctgtgcatagtttcctcatcagcaaagtcagaaaaagtatgtacctganggactgattgtaaggctgggatgaggagaatccatgtgatccagccctcaccaacaggtgctgcccagtttcatggagtgcttgctgctgttccttgccccaagttaccccagctttgcaggagttgcccgagtttngagttcccaggggtnttttttccacaggttgcatgtttgattcccggggcttttcagggt

SEQ ID NO: 436015 - DNA, 829 bp, Homo Sapiens
  misc_feature (596)..(656): n is a, c, g, or t
tgggaggagaaattacacaaatagaggctttcacataacattttcccctttctataaaaataattccatggttaaaataacctcaaaatccaattcaagcgccgacttgttcgctgatgtagcacaattcagaggacgctgaacgtcactatggtgtcgaactccgagattcccattattattctgtctccttgacccaaatttacacttggagctaatgacaatgggtttctacagaatttaatgacaatgaaaaagcaggaacgaatgattgcatcttgcaaggacaggctcctggaagtgaggacctcggaagaggcgatgcggcttcctgagatggttccatgttgatgcttcacctctaagcctagccctgacccaacgccgcttttgtgattggtttcttcaaggtcaagttttcacccaagacctctccagggcacgccttccaaggccagcctcacctccctccaggaccgtgaagggccaagccaacatgcttcgcacccaggcctccctgctgccttaaaaggacagacatttcaaagtccataagttatatggtaaatctctctacttctggtttctggtagggnnnnnnnnnnnnnnnnnnnnnnnnnnnnnnnnnnnnnnnnnnnnnnnnnnnnnnnnnnnnncctccttagcagattacctgatgagcacaagggcgatgctaggaaaattcaaaaattccccaaactttgtcatttggaggagagagaaagatgcggatgatgccccacatccaaaagtttcttcaaagtctgtggcaaaataatggtagcaccttcagaatcttaaataggga

SEQ ID NO: 436016 - DNA, 884 bp, Homo Sapiens
  misc_feature (92)..(103): n is a, c, g, or t
  misc_feature (277)..(337): n is a, c, g, or t
tcgggctgggggtgcccacgtttgctacctcccactgtgaaatcgctggtgctcacaattgtctctcacagtgtatgtgatttttttaaggnnnnnnnnnnnntccctatttaagattctgaaggtgctaccattattttgccacagactttgaagaaacttttggatgtggggcatcatccgcatctttctctctcctccaaatgacaaagtttggggaatttttgaattttcctagcatcgcccttgtgctcatcaggtaatctgctaaggaggnnnnnnnnnnnnnnnnnnnnnnnnnnnnnnnnnnnnnnnnnnnnnnnnnnnnnnnnnnnnnccctaccagaaaccagaagtagagagatttaccatataacttatggactttgaaatgtctgtccttttaaggcagcagggaggcctgggtgcgaagcatgttggcttggcccttcacggtcctggagggaggtgaggctggccttggaaggcgtgccctggagaggtcttgggtgaaaacttgaccttgaagaaaccaatcacaaaagcggcgttgggtcagggctaggcttagaggtgaagcatcaacatggaaccatctcaggaagccgcatcgcctcttccgaggtcctcacttccaggagcctgtccttgcaagatgcaatcatcgttcctgctttttcattgtcattaaattctgtagaaaaccattgtcattagctccaagtgtaaatttgggtcaaggagacagaataataatgggaatctccggagttcgaaacccatagtgacctttcagcgtccctctgaatttgtgcttacaatcagccaaacaagttcgggcgctttgaaatttggaattttttgagggtttatttttaaaccca

SEQ ID NO: 436017 - DNA, 2538 bp, Homo Sapiens
  misc_feature (2156)..(2156): n is a, c, g, or t
  misc_feature (2332)..(2332): n is a, c, g, or t
  misc_feature (2472)..(2472): n is a, c, g, or t
  misc_feature (2503)..(2503): n is a, c, g, or t
cctttaagcggcgggacttctggtcacgtcgtccgcggtcgccggaaggggaagtttcgcctcagaaggctgcctcgctggtccgaattcggtggcgccacgtccgcccgtctccgccttctgcatcgcggcttcggcggcttccacctagacacctaacagtcgcggagccggccgcgtcgtgagggggtcggcacggggagtcgggcggtcttgtgcatcttggctacctgtgggtcgaagatgtcggacatcggagactggttcaggagcatcccggcgatcacgcgctattggttcgccgccaccgtcgccgtgcccttggtcggcaaactcggcctcatcagcccggcctacctcttcctctggcccgaagccttcctttatcgctttcagatttggaggccaatcactgccaccttttatttccctgtgggtccaggaactggatttctttatttggtcaatttatatttcttatatcagtattctacgcgacttgaaacaggagcttttgatgggaggccagcagactatttattcatgctcctctttaactggatttgcatcgtgattactggcttagcaatggatatgcagttgctgatgattcctctgatcatgtcagtactttatgtctgggcccagctgaacagagacatgattgtatcattttggtttggaacacgatttaaggcctgctatttaccctgggttatccttggattcaactatatcatcggaggctcggtaatcaatgagcttattggaaatctggttggacatctttattttttcctaatgttcagatacccaatggacttgggaggaagaaattttctatccacacctcagtttttgtaccgctggctgcccagtaggagaggaggagtatcaggatttggtgtgccccctgctagcatgaggcgagctgctgatcagaatggcggaggcgggagacacaactggggccagggctttcgacttggagaccagtgaaggggcggcctcgggcagccgctcctctcaagccacatttcctcccagtgctgggtgcgcttaacaactgcgttctggctaacactgttggacctgacccacactgaatgtagtctttcagtacgagacaaagtttcttaaatcccgaagaaaaatataagtgttccacaagtttcacgattctcattcaagtccttactgctgtgaagaacaaataccaactgtgcaaattgcaaaactgactacattttttggtgtcttctcttctcccctttccgtctgaataatgggttttagcgggtcctagtctgctggcattgagctggggctgggtcaccaaacccttcccaaaaggacccttatctctttcttgcacacatgcctctctcccacttttcccaacccccacatttgcaactagaagaggttgcccataaaattgctctgcccttgacaggttctgttatttattgacttttgccaaggcttggtcacaacaatcatattcacgtaattttccccctttggtggcagaactgtagcaatagggggagaagacaagcagcggatgaagcgttttctcagcttttggaattgcttcgacctgacatccgttgtaaccgtttgccacttcttcagatatttttataaaaaagtaccactgagtcagtgagggccacagattggtattaatgagatacgagggttgttgctgggtgtttgtttcctgagctaagtgatcaagactgtagtggagttgcagctaacatgggttaggtttaaaccgtgggggatgcaacccctttgcgtttcatatgtaggcctactggctttgtgtagctggagtagttggggttgctttgtgttaggaggatccagatcatgttggctacagggagatgctctctttgagaggctcctgggcattgattccatttcaatctcattctggatatgtgttcattgagtaaaggaggagagaccctcatacgctatttaaatgtcacttttttgcctatcccccgttttttggtcatgtttcaattaattgtgaggaaggcgcagctcctctctgcacgtagatcattttttaaagctaatgtaagcacatctaagggaataacatgatttaaggttgaaatggctttagaatcatnttgggtttgagggtgtgttattttgagtcatgaatgtacaagctctgtgaatcagaccagcttaaatacccacaccttttttttcgtaggtgggcttttcctatcagagcttggctcataaccaaataaagttttttgaaggccatggcttttcacacagttattttattttatgnacgttatctgaaagcagactgtttaggagcagtattggagtggctgttcacactttgaggcaactaaaaaggctttcaaacgttttgatcagtttctttttcaggaaacattgtgctctaacagtatggactattttttnccccactcttaaacagtgtgatgtgtgttancccagggaatgaggagtttggcaaacaacttctca

SEQ ID NO: 436018 - DNA, 795 bp, Homo Sapiens
tccttggcctccgtggaaatccttaaaagcaacacccacatattgctgggcttttatccaggccagtgggcaccttccgtgctggtaatgaacagccacaaaacttctggaaaaccacatggaagtttctattttatgtgaaatgtcgaactcacacaccacttgcccagtggtcctgaggagtccacccacagtgcccagagcctcacatatgggcacacaagtcaggaggtgtcagggcagcttcactccaaggggcagagagcccacctctaggatggggatgggctgagcacgcgatgctgggcaactaaagaaccagacccaaccacagcctgggggacccacccctcgaacagcaagcactcagacacagcacaccacacacacagagcccgaccccaggccctgattatgcatgtgtgatgtgcagggagacatgaggggacgtgcatcaggacacttgagaccctttattttcagagggttcatggtcgggggttgggagattcttttctttatgtattgatgtttcttcactatttgtggtaagtatggatgatctgcataatctctgaagactaatttaataaacaatgtctaacattcagagaaactacaggaggaagtcccaatgatagcatggaccatggagcccctgactccctggctgcccttctgccctctcccaaccacaggcctctgcccaacaccccacctaaggcccagcagaggctgccaggctagctgggcactcacgtgtctcagaaggtgccgggatctccccagctcccc

SEQ ID NO: 436019 - DNA, 1790 bp, Homo Sapiens
  misc_feature (370)..(475): n is a, c, g, or t
  misc_feature (556)..(557): n is a, c, g, or t
  misc_feature (1706)..(1742): n is a, c, g, or t
ccccatggagcctgcggtgttggggccccgtagatggaaaagggttgtgcggggaaagaggggcgggggaagaaggcacatctctgccacacacggacgcggtaatggcggggttggtgtctacgggccgaggcggccgggagagaatatttattattgggcgccggagaagccctaaaaacgctctgcagggggagtttctccaaagtgggcgcccgcgcccccccaaagggggtgggcccttccgccgggaaagggcccagtgattggcggcttttctcccggggcgccagcgtgtttataaaaaggccgcgccccccggctagttttgagaggcacgcggccccatagggggcccctctgggacagnnnnnnnnnnnnnnnnnnnnnnnnnnnnnnnnnnnnnnnnnnnnnnnnnnnnnnnnnnnnnnnnnnnnnnnnnnnnnnnnnnnnnnnnnnnnnnnnnnnnnnnnnncgaagggcattaagggtgggaaggccgctgccacgtcgtttggctgcgtgggtctcgggtcttggctttctgggcggttgnngcaaacggatgattttaatgaggggtgagaagcactccgcaggtgcgggcagcggcgggctgcggtcggggcccagcaccggtgggagcggggccttctctggcctcgcgcgcgggggacgcggccctttcccctccggggggacgcgcaggaggcaccgcggccccgggttggaacaaacgcgtttactgcaggcaaggcggcgggcgcggggcggctcaccaggcgaagaggggcttgccgtcctccttggagagctcgcacaggcagttgagcagcagcagcgagtcgcccaggaacttggggggcaccacgtcgatgaccagcttgcgcagcgcggccgggctgctgtgcagggggttggcgcgcaggtcgggccgctgcttcaggattccgtaggtgttgatgaggaactcgctgaacgccgggtgcacgtcgcggctgtagcccagcttctccaggcgcgcgctcagggccaggtagcgctgcgtcagctcgcgcagcttcctctcgtccacggagccgtccagagacttggtggaggtctgctcgatcttctcggggatgttggccaccgtgaagccgtagagccgcgtcacgcccgggaacacgtaggccaggatgcggcggtccagctggaaggcgatctcgcccaccacgcgcgcgtccttctcggcgcccgcgaagctctggatctcattgaggtagtagctcctcctggtcctgtccccggtgggcaggctgctctccgagaaacacaccttcttaggccggaccatctccctgggctccagcagggtcttgtccaccagtgagtcttgcaaggggctcaggagcggggacagcttcctgtcggtgcctcggtggctatgtggctctgggggactgaggaaggccttgaagggtgcctgggagggggctgcacagcccggggaggtgtcgtcctcgctggacaggggggcatgtgagcacagcaggtcctccagggaggatgtctgcagttgggagggcgtgtcggcaacactcgtgaaccttccgaaatctggaactcagtgttgtttcttggctccgagggtcttgttttatcagcagccgggatgcaacagatccgctctcgacgaattcgagctcggccgatttggcctgatnnnnnnnnnnnnnnnnnnnnnnnnnnnnnnnnnnnnncgccgccccgcggtgagctccaattcgccctatagtgatgtatcatcc

SEQ ID NO: 436020 - DNA, 366 bp, Homo Sapiens
  misc_feature (226)..(226): n is a, c, g, or t
aacagctcccccagctccctgactttctaagtcagtatcgcccaggagtatcgccggagattgtgcaaaatcaagcggaagactttttttagaggggagaggaggcagcaaaccagaggggggctggagctgggacctcccacagtgactgccccccaccctggccccagccccgcctagaatggctattcctgaccacgttctagaaatcctctaaattcagaanaaaagcccagaaggaggccccacacctgcttgggcccaggtagagactccccaggcggctggaagactgagcctggaacttggggggcagtgggggaaggtgaggggagggatttggaagtggaaagcgggaaccaggaa

SEQ ID NO: 436021 - DNA, 409 bp, Homo Sapiens
  misc_feature (21)..(21): n is a, c, g, or t
  misc_feature (39)..(39): n is a, c, g, or t
  misc_feature (68)..(68): n is a, c, g, or t
  misc_feature (168)..(168): n is a, c, g, or t
  misc_feature (297)..(297): n is a, c, g, or t
  misc_feature (350)..(350): n is a, c, g, or t
  misc_feature (372)..(372): n is a, c, g, or t
gacctgccgggcaattaaagnggctttctcttggagggngtcgggcacccccaaagcccagcctggcncacgagcagcagacgggccccctggcttcctgcagggcgacgacactgtgtctgactgagggaggggcactcaggtcaggcgggggcgcgaggaagctcnacctgcaggctgggccgtgacgacggtgcaggcagggctctaagtggcaagttttacgcagacagccccgtggaaaaaaacaacttactttgcacaatgatattccctgcttttcagagcagttttttnaggggttgtttaggagaagtgggtaaaggtttgttttggttttgtttttgccnacagtcagtctctctcatgcgnaagccggagtgcagagcacacagccaggacagcctag

SEQ ID NO: 436022 - DNA, 1167 bp, Homo Sapiens
  misc_feature (32)..(32): n is a, c, g, or t
  misc_feature (133)..(133): n is a, c, g, or t
atttagtgcggcgagtgtttctcggtatttcncggggggtgatagatgactctagcctcgttgttatggtcgcgataggtcttgtacgagggcgtgttcgctctgcgtccattgcgtacgtgggcggccgtgntctactgctggctcgtcgcggtagatgtggtgaggctactagcgtgagaggcgtcgggcgcggagggcgttgtggcggggtcgggtgaacggcgcggggtagacagaagtgttgggtatgagtggggtggtggtgtatcgatatagccgtaagagagggttttgtatttctggatagttttttatttgatattgatttgttggtatatgttgtcaacagatggaaggtgtccagcacgtgcttgtgtatccatagagtatgggagtgggatgcgggggggtttggcctgagagggccttccatactttgagaggtttggaggtctggaaagattaaccaggatgtctaccaagtagatgagaggaggggagaaagaaggatcttttcagcaaagggcagaaggagcaaatgcacagaaaaatgcaagtgtgttatttgttcaagaaaaggcaagcagttcagtgtagctggggcctagggtacaagctgagagggcagaggctaacaattgagaatagaaaagtaagcaggaaattgtataacccttacggagggtcaattcttataaaagcttttaccctatgacccaatgatgctacatttggaagtacatccaatggctatatctacacatgcacaaaatgacttatgtacaaggttctccacagctgcactttctggactagcaaaatactggaaggagtccaagcatctaccaatagagcactaattaaatgaactatggtacatctccacaatggattactatgtagctgtaagaaaaaaataaggacaatctctatagaaaaatctttagaaaatgttaagtgaaaataggaaagtgcagaacttttctgtaagttcaaagttatatattaaaaaatcatgtttaatagtagtatacataatgtgctgcattcacacaaaacaatagaaaataaggcctgatattcagtttttttggatttgcataaaatacttgaaggatatgcatgaaattaataagagttatacaggatggagacaagggagga

SEQ ID NO: 436023 - DNA, 1145 bp, Homo Sapiens
  misc_feature (24)..(24): n is a, c, g, or t
  misc_feature (29)..(29): n is a, c, g, or t
  misc_feature (43)..(43): n is a, c, g, or t
  misc_feature (108)..(108): n is a, c, g, or t
  misc_feature (210)..(210): n is a, c, g, or t
  misc_feature (698)..(698): n is a, c, g, or t
  misc_feature (1092)..(1092): n is a, c, g, or t
  misc_feature (1095)..(1095): n is a, c, g, or t
ggccttttttcccagggcccattnttggnaaaaaactgccaantgatgccaacaagaaaacaagggatgggggctaaaaaagtcccaaggtcccccaggctgtccccnaagctgggcgtgtctgcttctcccataagcagcacgttgggtgtctgcttcccttctcgcgtgggtttgtaagtggtttatgatcctcctgcgcaggtgtgntcttgccgcatgcccggggaaaggtcagctctgggtcaaagggacctgctttaatcaggaggggctacttctcagagaaaccggcctctctcctgcaagaactgtgactcgctgagctcaatcaagtgagctcagacacaaaggagctgggaatcggcacttgttgttacggatcacacaactgctcccagggacaggatgggagcctggagaaagggggcccaagaggagggggggaaggcaccccacggagggaggccgagctcaaggcccaggagatggtgggttcctccaacccccgcaacaccggcctgttccctggggggggccgggctatggcagaggcccgcactgcacatttgtttgcacaatagccctgtggacagaaagttgggcccaggctgccatctgtgctaacactacctatttcctttcacaggaaataggcccagagcgtgatgaaacgccctaagaatagagccatcgancccacatgaagaaaatgtttccatgaactcgaatgtccacccctctgtcccaactgaaacactaagtttaaatgggggatggggaagactccctgcctttggaaggcccctgattttggagatactttgagtctttaggtgacgtaagtgtcgcctgttgctgtattcacatttgtgcaacactgcctcagttcaaggtgctgcacgcccagataaaaccagagagttcactgtggacgtgaaagtcatctttccgaattactgggctaggcaggaaatgcaatccccaaagagacactgctcggctcccctcgagagagggggtaacagttccctgcccacaccgcccccagatcatcctggtgtcccccccacatttatcctccgccaagcntgngtgaaggcctctttgtcaggcatgcatgcttctgccaagaacatctgtgg

SEQ ID NO: 436024 - DNA, 405 bp, Homo Sapiens
tgccccctgggaaacagtgccatgcccaccgggtcacgttgacggtctgggctgtggtggaatcctgaaaaggggtcagtggtccggcccctctggccacaggatgagggtgctgggttctggggtcccaaacgtgccgctgctgttgccatggaaatcaagctagaacaaacgcgtccccactcctcccctgcctgttgcacaaaccaaaaccccaagtggaaaacggtgactgccttttcttctttccaaaaaaggccttttgaaagaaaccaacgattgtaaactgtccagtttattattattatttttgatggctacagacaatgtgggctctcacacctagactagcttttctggtggaaggggggggcaggattttcctgtgttttatccatttgcaag

SEQ ID NO: 436025 - DNA, 501 bp, Homo Sapiens
  misc_feature (65)..(65): n is a, c, g, or t
  misc_feature (117)..(117): n is a, c, g, or t
  misc_feature (125)..(125): n is a, c, g, or t
  misc_feature (149)..(149): n is a, c, g, or t
  misc_feature (163)..(163): n is a, c, g, or t
  misc_feature (349)..(349): n is a, c, g, or t
  misc_feature (359)..(359): n is a, c, g, or t
  misc_feature (445)..(445): n is a, c, g, or t
catcaaaaataataataataaactggacagtttacaatcggttggtttctttcaaaaggcctttnttggaaagaagaaaaggcagtcaccgttttccacttggggttttggtttgtncaacaggnaggggaggagtggggacgcgtttntcctagcttgattnccatggcaacagcagcggcacgttgggaccccagaacccagcaccctcatcctgtggccagaggggccggaccactgacccctttcaggattccaccacagcccagaccgtcaccgtgacccggtggcatgcactgttcccaggacaccctcctcctctcctggacctcccttccgtcctggcctncctgcctctncagcccctcctctgcccccaccccagtcttcccagtgagaatcctgccagctgggttgtggcctggcgcagagtggggagaggctnccactgacaggatggctatgacctggggacatggaaacagttaccttcgcgttctg

SEQ ID NO: 436026 - DNA, 610 bp, Homo Sapiens
ggagttcattcaaaatttattgagctgcaactgtgtgctcagcaatgagaatatagcagtgagcaagatgtgaacaagatctctgccctcgtgagcttacaatctagcagcgcagccagcctattacagccataattttacaattgtaataaaaactctggaaaatgcatggtgctaactgatttatcagaaagtcttgacccaccaagaaatcagaaaagacctccctgaggaaggaacatttaggatcagctaggtggaaagtgaaaggaagagtgttgcaggcagagaggacagtgtgtgagggtctgaggcaagacatgtaatgaactgaaagccagtgtgtctaggccatagagaacaaagaggggtgttgcgagatgagcctgatttatacaagatctttgaatttaggactttattccaaaagcagttggaagccactgaagaagctaaggaaagttcgatgtttaggtttgtttttcatagctgactctcattgcagcatggaagtcagaagtggaaatgggagaacaggttaggaagtttccgtagcagtttagacaagaggtgatggtaacttggagaaaagaagataggttccagagcc

SEQ ID NO: 436027 - DNA, 2344 bp, Homo Sapiens
  misc_feature (45)..(77): n is a, c, g, or t
  misc_feature (86)..(306): n is a, c, g, or t
ttgctgctggctgggttctgctgaaagccccttggcgctggaaannnnnnnnnnnnnnnnnnnnnnnnnnnnnnnnngagcccgcnnnnnnnnnnnnnnnnnnnnnnnnnnnnnnnnnnnnnnnnnnnnnnnnnnnnnnnnnnnnnnnnnnnnnnnnnnnnnnnnnnnnnnnnnnnnnnnnnnnnnnnnnnnnnnnnnnnnnnnnnnnnnnnnnnnnnnnnnnnnnnnnnnnnnnnnnnnnnnnnnnnnnnnnnnnnnnnnnnnnnnnnnnnnnnnnnnnnnnnnnnnnnnnnnnnnnnnnnnnnncaggtaggatggctgttgaacggacgcctgcctggacgccctgggcactcattggagtcatggtacttatcatgggtgtctgctgcagtgtctggtgtgaaaacctttgagtggaggtcagtccatgtccataggtgggggcctgctggtgcacatagccactgggccgctgttgcaggtgtcgggtaggatctacaagagtaggattggtagaagggtgggtgctctggtaaggctggctggagtatctggggggcaccatggtacctgcagggcctgtgtgttgctgcaatcccacatgagaaacataaggagtatagccctgggaagtctgcaaaccgtaggaagagctgggagtcatctgatggacagatgactgtcccaacatgccctgactctgtatctttgcctggagctgttggcgaaggcgctgtccttggggcaccgcaggttgctgctgccggtacacagaggtcttataagaggagggttctaaacccatgacgccagtcatggttgtgggcagcactccagggtaagttggtcgggtgggcagcttctgcattggtaagcgcacaggacgttatgggttccacacgaggggccacctgcaggtagtggctggtttctgggtgtacaggcctatggagcccttgcctgtagttaaggtgtgttatagaaccagggtttggctggtgacaggaggtccgggaggcactgtcacaccataggggcggttccgaccggggcccattccatagtcctctgtctttggtagctggctggctgcgtttcttgcccttggtggacttcttcttgcgtttcctcagtactgggtggagcagcccccggtttgtcagttttggggggctctggagcctttttctcaggctctagcagggtaggagcaggcggctcctcatcttctgggggcagtggcagtggctccaggtaataggcgcggggccggggcctcaggtgtgtgtggtagagcagcaaccgctgctgctcctctcctcgagccactcgccggtccactcggactgttccaaaccagccccaagagagtggtgctgacggcttcaacccctcaaaaagatcccagggcgagatcttctgtttggtggaaacctgtagaccctccttcttgaagatggaatcgaagccagcaatcttgttgcccttggtatcgataagggagccctgtggctcacacgtgatgacatctcgggtctgcttgggcagtggcagcagctggcgaaccttttccagactgtctgactggcgctcccccaactccttctgcaacttcttcgccaggttcatgtatgcacgcttgttttcctccatgctaccttgcgagatgctagacatgtctgcagccaatgtcccattgatgagcacgctcagcatgtccaacacagtagtgaagagctcattgttggactgcatgtcgacagtgccgctgatgatgatctccaggaggagcatggcccactccgtggtctgctgggtgctgcgctgcaccgtgtcaaacatgccccccaccaggttgagccgcagtttgagtgcctcatgcataagctgctttggtttgcaatcatctaagtactggtcatctcgccaattattcacaatctggtgcacctggctgtagagggaggtaaggagtccctcgcgttgttcatcctgccctttcagacatgttagcaccagcgataagaagggctgctggctcaatagggacatgctcttctgcttttttcgatcacgttctttgcgtgaagaggaacccaggtgctgacccttctccaattcttccccagcagcctttaacacatgtccctggactgaggtgggcagtttagcaatgaggggggccaccagccatacaccagagcgctctagagagctgagcacaggcttggtcttgctgctgctgggcatgttgcttgcagtacttccagaagatgaccctgtctctgctgactgtggaaaacctcgattgtggcctcgtgccgaattcgccacccaggcc

SEQ ID NO: 436028 - DNA, 1649 bp, Homo Sapiens
  misc_feature (1560)..(1596): n is a, c, g, or t
tttttttaaaacatttttacttctttcaacccagaaacatcaccatttatgaggacaagagggaaaggaggaggggggcaatgtggcatgggggttaagggacttccatctgagcttgggagcaggtgtgtggggaggagtgccatcaggggcactttcgctccacgcactgcttcccgccctcctcatattcctgcttggagatccacatctgctggaaagtgcccagtgaggccaggatggaacccccgatccaggggctgaacttgcgctccatggtgctgttgctggcaatgagtttcagtcgcatgctcggtggggtcttctgggaaagctctcgattgagcctgtcagtgaagccctgcagcagtgtgttcccgccggtgacaatgacactcccgtacaggcccgggcgaatatcaatgtcacacatgccgatgctggtggtcaccacgtggcccacacccaacatggtgttccccgacaggcccttgacgttcgagggatcaaacaggccctcagggatgcggagtcgctcggcgccgtagtctgtattgtagccattgggcatctcgtagtgcactgtgggcatttgtgcagccacctgttcatcgtagggggagtctgagacctgcagcacggaggcctggaagtcctggatcacctcattacacatgtagttatgccaggacttggagacctggggtagcttctccttcttcttccagtttgggggggcaccctcccggacaggctccttggctgcgatcatgtaaggtgggatgatgtcaatggccatctcctggaacagctcccggcactgcatggagatgaagtcccctgccagaggggacttgacgatgccttgctgcagaacgtagccgtcatgtactggaatggccgtggtgtgggtggctccactgtccagcacgaggccagtggaccgcccgtttgcaaaggcggtgagcacagccgtcttgcataagaagaaggcaggaatgttgtactgctcgaacatcagctctgtcagcttctcccgcttggcccgtgtgttccacggagcctcggacatgagcactgggtgcaggtttggctcagacttgacgtgtttgctgtaggtgtgatccaggatggctcggaagcactcccagtcctcgatcatgccattcttgaggggcgacatgacctccgctccatcccgaggcacgtgcagggcattggtgtcgatgtggaagatcttccctttcttctctttgtccccctccagctccagcccgcccccctcctccgcggccagcagccccactgtggtggggaagtcagccttgggacagtcctccccagcgtacccagcgcggactgagaaggagccaatgtcaaagaccagcgcccccacctcatctccgccgtagacgcccccgctcatagtgcccgctgcgctgctagcggcccgtgggcggtggcgggatcagcaccgaggcggccggacagctcccgggatcctggcggggcgggactcccgctctcgacgaattcgagctcggccgatttggcctgatnnnnnnnnnnnnnnnnnnnnnnnnnnnnnnnnnnnnncgccgccaccgcgatcagcccgggtcccatctctgtagcgttcgataatacgg

SEQ ID NO: 436029 - DNA, 750 bp, Homo Sapiens
  misc_feature (528)..(590): n is a, c, g, or t
cgggagttctcagtcgcaccctatgccaccgattctccaaaagccagggggatccaagccagatcatttgccagacggtactgtagtctcagctactttggagtctgaggtcaggcggatcatttcggcccagaatttcgaggctacagtgagctataatcaggccactgtacaacagcctctttaagaaaccctctgtcttctgagaagctccggaaggtcccaacacgttgcctgtctttctgaaaagtgtcttgtctgttaatgttatatgagccttagggctggaacaccagtaaagcttctcttctctggaaaaagcttaggtctctgaagttttctcagtgcattaaaactgacagcagcaggaatatggttttgcttttctcctggcccagacgcggctggggcggacgggatctctcgcgctctgcctcctcctcttgcttcatggagccatgcgcctgggtggaggctcccgagagaagctggcctgcgggcgggccggacgcgctgcgcggacggggnnnnnnnnnnnnnnnnnnnnnnnnnnnnnnnnnnnnnnnnnnnnnnnnnnnnnnnnnnnnnnnagaactagaggtattccccgggcggctggaggactgagtcgagccgggacccgagtcctccggtatctcagcagccacgcggaggcagatgaggataatggaggaagaatgtagcctcgtgccgaatttaaacccagcactcgtacctagtcattagttc

SEQ ID NO: 436030 - DNA, 620 bp, Homo Sapiens
  misc_feature (422)..(422): n is a, c, g, or t
gtaaaaagcattaagagagtttttcagagtagttttctgtctttctgaaaagtgtcttggtctgttaatgttatatgagccttgaaataacagagatatatttctccgcagatcaatatctggatatgtttttaagataagtagaaattcccatacttgtccttagtatcaggacaatctccagtggattcaacagagcatctgcagttttgttgaacaaaggtttctgcaatatagacttatggtgtgagcttactgggtcacattctttgttccttcttggagctttgggaggcttttataaaagagctgctgcagtagaaggactgagttgtgtcacacttgaggatttaagtttctttagggctggaacaccagtaaagcttctcttcttctggaaaaagcttaggtctctgaagttnttctcagtgcatcaaaactgacagcagcagggaatatgtttttgcttttctcctggcccagacgcggctggggcggacgggatctctcgcgctctgcctcctcctcttgcttcatggagccatgcgcctgggtggaggctcccgagagaagctggcctgcgggcgggccggacgcgctgcgcggacggggcggggcga

SEQ ID NO: 436031 - DNA, 491 bp, Homo Sapiens
  misc_feature (348)..(348): n is a, c, g, or t
acttagatatatacaggttattttgaagaaaataaacacagctgcttctaaagtacagagaaattgcaagctacaccaagcatgcagtagctgaagtattcacaaagtactgcatccgaacacctaaggactcggacccaagacgtgtgcagacagaaacttgccccatcctctagggatgatctagtgttgaagctactgactcccctaccctgccaagagccttttcttttgttgaaggatttcagagaagggagatgtcttccctttacagagaagcaagaatacttgaagctcacagttctgaaaagggcaaaagaatgaacagggtcttgtccctggcagacnaaatttgagataactgataatgttcctttccatgctgggtttatgccaggctttccttttaaagagcctacagcacggtattactagccttcagctcaggctggttcttaactgcccatcagctgtggacacatgcccttgct

SEQ ID NO: 436032 - DNA, 383 bp, Homo Sapiens
  misc_feature (363)..(363): n is a, c, g, or t
  misc_feature (369)..(369): n is a, c, g, or t
attctttctgctgagccttccttaattgtgagggtggttgtttgggtatcttagagctaaaagaatggctaagagtccattaatggtcctgtaatattcaccatccctgagcagttagtaaagaatggccgcaaagccacaattaggctactaacaaggaacttatgtagatgtgctaggtccagcctgtgttctggaactatagagatgaataaggtatggtcctttctctctggaggctcacagttgaatagggaatattaatacgtgaatgatagcagtacagtgtggcagatgctaaaatatatgtgtgtagcagctattacaggagaactgattaatagggagagtctggctgggctncagtgnactcacccctgtaa

SEQ ID NO: 436033 - DNA, 1043 bp, Homo Sapiens
  misc_feature (132)..(132): n is a, c, g, or t
  misc_feature (142)..(142): n is a, c, g, or t
ctctgtagctttagactgtacagaagaaaaataaaaaaggattgtccttactcaagcaaaaaaaccagaatgatgtaggggtctcacagacttttctagttcggaaacaagttatgagggccagacttttanttacttgtcnaatagagatccaaaaaagagtcccctgtctctgaagttaggagacaccagaaagaattttgccaaaggacatgtacaaatggccttccatccatgattcacatcctttcaaattgcacaccaagttaaaggatgttctcagcagtgaaatacacacacgtgcagcaaggcatgctggtcttgtccaagtagctccagtgtgcaccaaaaggtcacgtgtctgtacctcctcatctgcctttgaaggggtttcagcctgtctttaagaaaggtttcctttaggccctacgttggaaagtaaattttagtgagaagagactaatctacaatggggacaccttcagctctgtttctaccactccttggaatgtgctgagactttgtctctcttttcgttttaaaaaggtcaaactttacatttattctagcccagttggggattagtgataatcaattcccactgaaatcatgcagagatggtaagtggggtttaccttctctggaaatgaacttttaacttacctgattatttcttctacaacaaactggtaaatgacccccagagctgagaaatgtgaacgattcaagtttttcagaccacttaacttcattcccatttccatcagcaggagagaggacaacttggagaatatcctcaactgggctaatggctccacatctgcaggggtcgccccgatctcctttgtgatgtactggacatgtctcaaaacagtcttagaaacaatattccttcaactgaacctagattggagagcaaaaccctgggcaccaataaacattcaacagcttccactttgtaatagcagcatatgacagaaaggctggtaaaattatggctattgggcaatattttgagacagctcgaaacccatgccttttaa

SEQ ID NO: 436034 - DNA, 521 bp, Homo Sapiens
tggggctttgtggctcagctgccactaaagagctttttggataaaattgagaacaagctgtgcttcctaccccactctccccgtccccttttattcccttttcctcttaaagagctgctctgagctgtgggattctatgaaaaattcttgcctttccttgtttcagtgctaacgatttctcacctcgaagcgccttttgaaccccggacagagtgcacaatcggagggaattgcgagcttgggaattagactttggagtcttttctctgaagtcaccaggccaggggtcaggagagagatggattcccaagggatgaaaggtttctattcaatgaagaaatcggagtggggaagagacacagggaaatttgagccatattttggctatcggctggaaccagcagtttcagagatctgccttataaacattttaaaaccggtttgttggtacacaaaggagggacccagttttggggaagggggcctttatgttgggggctttcttctctgtttgggattcc

SEQ ID NO: 436035 - DNA, 1480 bp, Homo Sapiens
  misc_feature (11)..(11): n is a, c, g, or t
gagaaaagttntttctgttttatttcacaggatagctccacgtcaaaccagcaggcaccatcagaatacgcgacagaggatccaatcagacactctataggacgggcgtttggtcgtaaggtagagaaacgatatccagaagagggcaacatttatcatcacgtggggacaggcaaccagcaatttcctagggtggttttggtctgtttttcctgtcacaatttggggaggaaggaaaccaaaggaaacaaaatagaccagccactctgaagcaatcagattcaaacctattgccaaaccatgtaaacagtcacactgccgggaacaagggcctgggcagaaaccctagccaggatctacttccgtctaaggaaggaaaagtgcactctggttgttctggttcaaggaacagctttgttattggccggggacaactcacacagaaaggaggtgtcaacaaggggcagcgatggccatgtggccagtcccagagggacagcaggacactggcagatcaatctcagggaggtcaggagggcttggacctgacagcaaagtcccttctctcggctcccctgggcagctttggatatgtggggaatgttctatgtggctgctcagaggagaggagaccccagagaaccggggaagttgacatgaaatgtcagcattagctctgcacagcagaaaatcagctaggcaacacctcggctcacccctttctgcctttcctcctggccgccaccccgactcccagcccagcaggggctaaccccatggttgtgagccagccactcttctttctgggtttctcaggagagtgaggcatttgcactagtgtggaaccatctggatgtgtgaaaagttaggaatagaaagactgagaggaagaaccattacccgagtcctcgtgtttttccattagctgtggacatgcactgagtgccacatcacgaccaggtcacgagaagtcctccacattcgtgcctcctgaatgacagagaaatatacccaacaaggcactccaagggactccaacagagaagaaagccccacataaaggccccttcccacactggttcctctttgtgtaccacaaaccggttttaaatgtttataaggcagatctctgaactgctggttccagccgatagccaaaatatggctcaatttccctgtgtctcttcccactccgatttcttcattgaatagaaacctttcatcccttgggaatccatctctctcctgacccctggcctggtgacttcagagaaaagactccaaagtctaattcccaagctcgcaattccctccgattgtgcactctgtccggggttcaaaaggcgcttcgaggtgagaaatcgttagcactgaaacaaggaaaggcaagaatttttcatagaatcccacagctcagagcagctctttaagaggaaaagggaataaaaggggacggggagagtggggtaggaagcacagc

SEQ ID NO: 436036 - DNA, 1547 bp, Homo Sapiens
  misc_feature (1262)..(1302): n is a, c, g, or t
  misc_feature (1424)..(1449): n is a, c, g, or t
  misc_feature (1468)..(1495): n is a, c, g, or t
ccaacgtagaaaagttttaatgagacaaatgtcaaacaagcacatcaacttcttaaaaaacaaagaaaatctgaaagtttaattacaaaaacacttatacagaaaacttggcatttcaacagttccaaacacatgtacacaagttttttctaaaatcagtcagaaataaaataccttgtctccctttcctcagctgcttcttgtattttaattaaaaagaaacaaagaaatctgtaacactgaataggcaacaacttatttcttgagaacataaaagtacagtaatatctacaggtgtactgggaaacatgaattaggtattgtgctagcctgtaacttcatttactgcctcctcactgagcacagaggagagaggaggtggcacagacctggtctatagatactgacagttttgtggcatctgaatcccagccaccagaggcaggtgagtagctactgggaaagacagcatttcagaagcaagctgccttattttgtgaaaatgatttcatactgtaggctctcttgaaatcctcatgcattcctgaatatgcaaatgtttcaagtcactgtcaagtgtcccatctagagtcagaagaatgatgatcctggaccatgttatggccttttctggtcacaaaagcagtgctagcaatgctgcacaaaactgaacacaaatgagaaacagaaatatgaggaggaaggaagacaggacacaaagcatctggcagaaggaaaaaacaaaactccagaatgggctctggatgtccttctgccatagacagtgagttctagcttgggctttgcagacaaggagtctaagagaagtggcagaaatagcagatgatggcagggaaataggaaaatacagaagagcaagagaactggctaggttttatacaatagataataatggggtcttattctaaaaaattgccaagtgatggtatgtgggtttcagcgcatggatatttgatatatgttcatataagacattgttaaaacacagattttgttgcctgttgttttcctttggactaataaagaaaacaggcaaggagatgctgaagaagacaggatggtgtagcaacatgacaggtagttctgccctatgccctgacttatgggcatactatgagaggggccgcacttctatccacctggcctgcagtggtgtggggcccagacaacgggctctgcttgctctgcctttggttccaaagatctcagctgtaacctttagccttgtgctctgcagtgtnnnnnnnnnnnnnnnnnnnnnnnnnnnnnnnnnnnnnnnnncctgaggtaagaatcagaacctctctttccttttgctgttaaaggaaccagaaactgctaggcgtgatgcttgagcccaagagttggaggctgtagtgtgctatgatagcatctgtgaatannnnnnnnnnnnnnnnnnnnnnnnnncagcaagacctcatctgtnnnnnnnnnnnnnnnnnnnnnnnnnnnntgaaccagcctgtgccgattcaccacccggcctcgtacctagccgtaacttt

SEQ ID NO: 436037 - DNA, 531 bp, Homo Sapiens
aatgaacaaaggccttccaacattctttacactcattgcatttgtcaccattttgaattgtctgttgtttaaaaaggcatggtgtattaacaatttctgtgcattctttacattcagaaagttctttagaatgagttcttttgtggtgactaaaaaataaatggtaactgaagatttttctacactttttacattcagagattttctctctatcataaaattcttgagtgagtaaagtatgttggctaaaaatgggcatgttttcatggttaatcataagttgtctaaaataaccctcctcttgtccctgatgttgctcaaaatgacagttgccttcccagatagcgctgaaaattgatctctcaggactatggcttttaaattcttccatgttaacccactgggataattctgtttcataaatatccctttttggagataacttctggggctcatctctggatgccaagtctgaaagataagaaatatattttaactccctggttttgtactataagagaaataaaatat

SEQ ID NO: 436038 - DNA, 1401 bp, Homo Sapiens
tttgggatgcagcactttctttattgcccatccagggaacagccaagccagctccatctgcattctggctgcagcgtgtacattaggggactcaggggccacagtgtgggaccgtgcacactggcaaggcactggcggatgctggcaggccagtggacatggatagatgagaatgacaactcacagatgtcctagcttctgctggcccagctgccagccactggccatcacccttttgcccagcatgtgtgcattgtcacccaaaacatcttgaaacttgccattagtgaggcattcaacaaagaagtaagctaagtgagtaggaaacagtgtttcctggaatataccgcactctgcctgaaataggaaaactatgtttgccgggaagcagcagcagcaggaaagaagttataccaaaaacgacttgtacaccacagacattataaccctttcctcaaagaaacagtcatgttctgttgggtattatggacaggtctctggaaatttatctaataaagaccaacaaacttccccagcagtgcctctgagtaccgtgtgaattctggtgtcttgtggaagtcagggtgccttctttgcatccaaagctttgagggagctgggaagctttggttccattttaggagggctgtgtgatggtgacaaaggtgttctggtcatttctgctctgttctccgttctgtgaagtgaggtggatgtaatgtgctgtgggatggggtgctccatatgtgtgtgtagcctttactttccaacttagttttttgcatctctcttgtactgatgagccatacctctcagccttcatttggtcccaggcctgaccctttgctttcatcgtcagcttttctgtcctgctcgggcaggattaactctgttcttgccgcggatgtcaccatcactctggagtccagcccagtgcccacaggcccgatcagttcaccctcttccttctcttcaggggagaaactttcttgggcatcaaaaaacgtgattgtttgttcttgaagtttttgttcttccagctctgccccatcttcggtgcttttgcttttcttggtaggagatgaggagaaccctaatttgggaaatcggaaccagcctgccttctcctgtttttttaggcagttctgcctctggtcgtgcctcaggctgtgtttgaatgggagcagatctctggacgtcatttttggaatcaacacctgtctcatcaacagaagaggaaaacccaatgtttggaagccaaaaccagagcagaccagattttttactttctggtttgtcttttggagccctgccttcatctgccagtggtgtggttgcctcttggctatcatcagggggaaactcgagaatttctgctggctcctcatctatccgaagaat

SEQ ID NO: 436039 - DNA, 1031 bp, Homo Sapiens
  misc_feature (14)..(14): n is a, c, g, or t
  misc_feature (223)..(274): n is a, c, g, or t
  misc_feature (292)..(305): n is a, c, g, or t
gaatttttggtttnccttttcgggggcttggccagggaagcttgttttcttttccgggttcccttagaccggtttcaaggaaattcggaagaccagaaagaggtcttcttctgtttgggccagccaggaatggtggcccagcgaaggtgtggaggaatacatccggtggtccccagctgcttggaaaagcgagggtaagaggattgcttgagctccagcattnnnnnnnnnnnnnnnnnnnnnnnnnnnnnnnnnnnnnnnnnnnnnnnnnnnngagtgagatattgtcttnnnnnnnnnnnnnnaaattcatggcagagtcagaaatagaaaaaaacagccaccatttccagtcagtcttcagggaaaccttcaataaccctcacataagcattttacaagtctatttcttcttattttataaacataactgcatctttaattgggtgtacttgaataattgaaaactgaacagcaaatcaatttttatggttcattttctccaacaaacaacaatattaaactgtatgagaagtaatatttattgcaacaggttatgaggtggaaacaaataattagtcttacaatttgctagaagcatgacagagcttactaacattttgaagaaaaaacagcaaagaaagaagtcatcaaacaagatggtatcttgacaaaggcacagcgctccacaactgcttcatactctgtgcacaagaaatcctctcaagagagaggagaggagtgatgccaaatgggcttacattagagccgtggacactaccactggtattattcatacaaccaaggctctacaacacccctctggagaaaaagtgcaacacaaaatctgtgtaacaaaggaaagcaaaagtagcaataagggcccagaggaatacaaacagtgcaaatacagtactgcaaactcagtaaaaggagtttttgattggagtatgaactttcaagttgaagatatatttcacaggaatattcacccaaagcttgagagctagagcgaggagagacttgcagtc

SEQ ID NO: 436040 - DNA, 397 bp, Homo Sapiens
  misc_feature (251)..(251): n is a, c, g, or t
  misc_feature (284)..(284): n is a, c, g, or t
  misc_feature (318)..(318): n is a, c, g, or t
gttcaagatagtgaggccctcttttccaaaacgaggaccaaaaatcaattgacagtgttggtcaagatggtagaaaccttaaaatgatagaaatctcaactctgaaataaaaactttatttgtatatttatttaccactattttgacatagggctaaggtctttttctttgagctgatttctggttttgttttcttaaagtggcataaaggaattcaaagacattttgaggaaggctgagtgcagaaatcnctctttttaaaatggacttcttcctttcttttnaacttgcactgttgtcttagccctcacttatttnggtcaattccttttagctgtttgtctttgaaacttcataaaggccatagcttttctcataagaggcagcactttctttg

SEQ ID NO: 436041 - DNA, 860 bp, Homo Sapiens
  misc_feature (172)..(172): n is a, c, g, or t
  misc_feature (188)..(188): n is a, c, g, or t
  misc_feature (666)..(666): n is a, c, g, or t
  misc_feature (744)..(744): n is a, c, g, or t
  misc_feature (814)..(814): n is a, c, g, or t
acgcgtccgcagaaagatgattagagattagctgctgaaggagggccagggctgggaagaatgttccaagatcagggaacagctgtgcaaaggcttggaagaggaagagacattgggagcacagagacttgattatatcagtgtttgggtctcattgaggcaggtggcctgngtcttgtgggctgtanggagccatagaagggttttgaacagaggagtggcatgaacgttttatagactggtttggtagacaactttggaaaagcaagagatggtccacgtacacacatgagcctggaaggtgaggagaactctaatgtgatctgaattcccaaaagcagtccgtttggaggtgatcccatacagactcctgggcctggtccaagacttagtgaatagactctgcccctcgaataaggttttaacaagtgcttcacaagattctgagcagccagctttgggaagacttaaattggatgactgtccaaaggtctccagtagaagggctgggtcagtttacctctctgaggttgttttatcatctctaaaattgggggcatgggtgaggtttgaactcagagcaatgctgtaaaacagatattgttttcacccccatttaacagatggaggaaatggggcttggagaggttttaaacagcttacctnaaaccatgaagccaggaagtggctgagtctgagtttaacctttacattattacagcatttatggggtctatgactttnttcatagagttttccatgtctggtgtggatgagtctcctttggtttcttgtggcctaggtagttatgctnagccccataggttagtgaaaggtttaggtccagtcctttttgctta

SEQ ID NO: 436042 - DNA, 1195 bp, Homo Sapiens
  misc_feature (48)..(50): n is a, c, g, or t
  misc_feature (276)..(277): n is a, c, g, or t
  misc_feature (279)..(279): n is a, c, g, or t
  misc_feature (351)..(351): n is a, c, g, or t
  misc_feature (358)..(358): n is a, c, g, or t
  misc_feature (393)..(393): n is a, c, g, or t
  misc_feature (783)..(816): n is a, c, g, or t
ccctccattatctataacaaaagggggggccaaggaacccccctcccnnnccgttctccctccttagggcccaaagtaggaggggggtggtatggctccccgccccttccagcccccaaatgggggttttaaagtcacctggcccctccctgggggaggatgcaaaaaagcccaggggtcccttccccttcgcccaactgggaaaacctcaggtaaatgggtccagccctttcccaaaaagttttcccccagggaaagggcaaggggccttttccnncnctttctcccatcaagtcttgatcatttcaatggacaggtccaaaacaacccccctactttgcatggccactntgctctntgggggacctcccaaaacatttgctgggatgaccntcctaggcgggctgcagactgtccttcctctgagcctcacaaagcgacagtgcggaaaggaaagggggccagatgaagggggctccccctctcagtctcagtcctcgacacccaggagctctccacactccctggacctcagcacaggctctgggtcaaggctctccagggtctgggcgcaggcgcctgctccaggctaggacccctcaggccaggatctgttccctccacttgggggggtcaggaggggtaagggtggatttagcctttttcctggttggctgaggctcctttgtcagcggtccctcctttggggccaccgccactgccctctgctcccgacaggctgaggaaggggttggtctgggcagtgaggactggaggtccgcnnnnnnnnnnnnnnnnnnnnnnnnnnnnnnnnnnggccatgagacttgtgttgttgccaagcgagggagccactagggctccagcgggcagcaggggtggagcagacgctgtgggcagcaggccaggggtacccgcagacagcagcggggtggagcttcctgccagcaggctggccatgggcagctgggagcccccagccatctgcaggcgctgcagctcccgtttctgctggatctgctggatcatctggtagacaacagtctggtgttccggggtcagctgcggggaggccaggagctgctggagttgctggagctgctgctcttgctgctaacgcgcgtgggcgcgattaagtgcacctaaaaggaccgtgatggtgatgtacaacctctcaagtaatgctcctctaatt

SEQ ID NO: 436043 - DNA, 2213 bp, Homo Sapiens
tggtggagaccaacatttttattaataagataaaaggaaagagtggtaaagcaaaggcgatcattggatggaatgattatgtgtcacgagcacttgaggacctagaaagcaaaccggagtgattatgccaatcaaattgcaaggttggagatatgctaaaaggttggaaggaatccaatcctggggctattgcacaggacttggggaaatcaagttgctgcaagcagctatgacttgaggaaggtgtgcagtgggggaccttaaaccatttccaacatctgtgcctttgaaatattttattactgatccagatatcccaagacattttaaatggaagggaaaatgtactatactagacccaaattctctggatatttacattccatccctgtctagggatgtgggggaggtgaatctgtcagtggatcagatcagactagaaggttcttgtgattaatggagctgggccatctctaagaaaaaggcagcaaataatttggttccctctatgtagttccacctgttgattttctcattctgcgaatgttctccatcatcaacagctcccagcggaattagcaccacgctcttgtggacgatctcctggaacattttggcaattggaatggtggatccatcccggatcatatctggttctgttccaaacactgttctgatcgctctttttgctgcgagatactgggtgtcatcaatatttgcaatccacgggtgtagtcctagagtcatggaaacaaccatcttgttggaactatttcttttggagaacacatcttcaagatgtcgtgtcacctgtttttccaccgcagacacattcatgtgagggactagacggattgaaaattttcctataactcggccaggtatgactgttttagttccaggctcatcaaacgcgccctcgatcccatgaatagaaagagatgggtacctccagaggtgcattagaatctcctccttagtatcgaacagaaatttctcaacccggctgctattccggtattcttctaggtctagatggatggctttgtatgtatttatttcctcttctgtaagaggaaccacttcatcatagattccagggaccaggatatgaccagacgagtctaccaggctaccgagaagagcaaccagatcagccattggttcatgaaggatgccaccaaaggttcctgagtgaaaatcctggtctctgcatttcacctccaccatgaagtagctgttcccccgggttccgtaagtgattgctggcttcctttggctgatccacaggttatctgaaattacaatgtagtccacaccagagaagaatcggtccttttctttttccacaagttcctccagggcaacagagccagcctcttccatcccctcaatgatgaatttgatattcacaggaagatcttgctccagggctctgaaggcgctcacagcattgatccaagccaagacagggcctttgttgtcggtcgctcctcgtccataaagtttcccgtctacctccgtcagcacataggggtccgtgagccacccatcgccccggtcagcaggctgcacgtccaagtggccgtagaagcacacggtgcctttcgtgggatcgctccccagttcggccaggatgacgggaggtattggaagactctgaccatcgggcagctgctgaggacccatgtccaccgaggccacacgggcccccaggcgctgcagcgtgtccgcagccacggccatcattctgaagagctcttgtctgaagcgaggcacaggctggacagagtcgctctcgatggccacccactccttcagcgtctgcacaaattcatcctgatggaggtcaatgtactggaagactttctctaacagcgccgggggcggggagggtgaggagaacatgccgcgctcatgcatgcagcatgcaagcacagccagcagggacgcagccattctcccgagtttgggatccattaggctggagttctgaagcctctagcaactttcccaacctccaaaaaatgtggcagagggagtcccatgaaagccccaagagggtgacattaaatatctctctgtgccctgacccacgttgtcccccggaaggaagacgaggctggtatagtggagctattcacatctggagaacaaagcggcttcggaggtattcattcagctcaactgcagaggaagagacaatgcccgct

SEQ ID NO: 436044 - DNA, 882 bp, Homo Sapiens
  misc_feature (105)..(131): n is a, c, g, or t
agcgggggattccctctgccacattttttggaggttgggaaagttgctagaggcttcaggactccagcctaatggatcccaaactcaggagaatggctgcgtccnnnnnnnnnnnnnnnnnnnnnnnnnnngagcgcggcatgttctcctcaccctccccgcccccggcgctgttagagaaagtcttccagtacattgacctccatcaggatgaatttgtgcagacgctgaaggagtgggtggccatcgagagcctctgtccagcctgtgcctcgcttcagacaagagctcttcagaatgatggccgtggctgcggacacgctgcagcgcctgggggcccgtgtggcctaggtggacatgggtcctcagcagctgcccgatggtcagagtcttccaatacctcccgtcatcctggccgaactggggagcgatcccacgaaaggcaccgtgtgcttctacggccacttggacgtgcagcctgctgaccggggcgatgggtggctcacggacccctatgtgctgacggaggtagacgggaaactttatggacgaggagcgaccgacaacaaaggccctgtcttggcttggatcaatgctgtgagcgccttcagagccctggagcaagatcttcctgtgaatatcaaattcatcattgaggggatggaagaggctggctctgttgccctggaggaacttgtggaacacagaaaaggaccgattcttctctggtgtggactacattgtaatttcagataacctggtggatcagccaaaggaagccagcaatcacttatggaaccgggggaacagtacttcatggtggaggtgaaatgcgagaccaggatttcactcaggaacctttggtggcatcttcatgaacca

SEQ ID NO: 436045 - DNA, 844 bp, Homo Sapiens
  misc_feature (249)..(278): n is a, c, g, or t
agcggagtttagctgaatgaataccctccgaagccgctttgttctccagatgtgaatagctccactataccagcctcgtcttccttccgggggacaacgtgggtcagggcacagagagatatttaatgtcaccctcttggggctttcatgggactccctctgccacattttttggaggttgggaaagttgctagaggcttcagaactccagcctaatggatcccaaactcgggagaatggctgcgtccnnnnnnnnnnnnnnnnnnnnnnnnnnnnnngagcgcggcatgttctcctcacccatcccgcccccggcgctgttagacgaaagtcttccagtacattgacctccatcaggcatgaactttgtgcagacgctgaaggagtgggtggccatcgagagcgactctgtccagcctgtgcctcgcttcagacaagagctcttcagaatgatggccgtggctgcggacacgctgcagcgcctgggggcccgtgtggcctcggtggacctgggtcctcagcagctgcccgatggtcagagtcttccaatacctcccgtcatcctggccgaactggggagcgatcccacgaaaggcaccgtgtgcttctacggccacttggacgtgcagcctgctgaccggggcgatgggtggctcacggacccctatgtgctggacggaggtagacgggaaactttatggacgaggagcgaccgacaacaaaggccctgtcttggcttggatccaatgctgtgtagcgccttcagagccctggaagcacgatcttcctgtgaactctcacattcatcattgacggggatgggaacaagcttgctctgttgccc

SEQ ID NO: 436046 - DNA, 1748 bp, Homo Sapiens
  misc_feature (616)..(616): n is a, c, g, or t
  misc_feature (656)..(656): n is a, c, g, or t
  misc_feature (724)..(724): n is a, c, g, or t
ttttttttaaaaaagtttaattttaatccttcctagaggaatacagatttgaatgaaatacattcattccataaatacattagcagcaaaaccttcccaccagagtcctctactccagcccagaggttgtgccttgagcaggagagcatgttccatcaatcctgtcaacttaagggtgggtctgcttctgagaaacgctggatgtgcacgggagacacaatgaccaggtgcatgggtgacttaactaagctgggaccctgaaaacaggcccatgtggtcactattcagccttctttaccttccaaaaatcctttggcatcttccatgcttctctgatgaggttcctcagcactgagacaactgggaagacctaactttgcacatgcattaaataatgttattttgagttggcaatgttttaacacttttcataaggtaaatgaaacataaaagattattcccttccttcccttcctcaggtgagtccacatgtactcatcaggagacaatccagcaggcattatttgggctctctgtatctccaggccccctttgtctgaatggctggatgtttactggagacagggagccatgtctaaacctacaaagatctccnacgttaacaataaccaggtgacttgctcaggcttccatcnaaagctaatttcttgggcagaggcccaggcatctctccctcttgttctctcccatcactgactactgnactgactgctgcttttttatattgccttccaggcacctgccgaaactttggaaaacaagatctaccctaaacttccaagtggccaggagcagttaaggcaggtcctgctttaaacttactagctgccaagtagcacacttatgctgctgtgtcccaatccattctgtggtgagtataagtcacaagagtctgcataaaacactatcagcaatcaggatggctatggggcaaggaccgtttagaatgttaccaagtcacaggaccagcaggaaaatggaataatggaagaatgtgaaataaatctgatttgtttgagcagaaggcagctttgattcaggcataaatgcatctcccagattatcatgtaaataaagacctcagaagttgacacttccctcccagtccaccacttaaaataggacacatgctcagttttcccaatctgttttaaagtgttttcattaggatactcttctgtaagtgctttattcattcccagtctgttttgattactggctgaaaataaatcaggaaccattttatataaaaaccattatagtagataactggttatgtgtatttttccatttgcattttcatccagaattgcttgtttcttttccttttatttatgtgcagaaagagactcatccgctgaatacacagcactgttaatcctacagtcttctgtccccacagagtctgctagatcttcctcttctgagtcatcctcttcttcctcctctggtgctgacgaactggaggtgggccctttgcaggttttcaggtggcgggtgagatggtatttggttagataagcctttgtacatttttcacagacataatcccgttttccttcatgagaattgagatgcttctttaagtgatttgttctcaagaacagcttatcacacttgggacacttgatctggcgttcttgagtgtggatgagcacgtgctgcttgaggtcctgcctccgcataaacaacttgtcacagtaatcacacttaagattccctcgtgc

SEQ ID NO: 436047 - DNA, 1094 bp, Homo Sapiens
  misc_feature (5)..(5): n is a, c, g, or t
  misc_feature (9)..(9): n is a, c, g, or t
  misc_feature (20)..(20): n is a, c, g, or t
  misc_feature (32)..(32): n is a, c, g, or t
  misc_feature (35)..(36): n is a, c, g, or t
  misc_feature (38)..(38): n is a, c, g, or t
  misc_feature (49)..(49): n is a, c, g, or t
  misc_feature (52)..(52): n is a, c, g, or t
  misc_feature (59)..(59): n is a, c, g, or t
  misc_feature (62)..(62): n is a, c, g, or t
  misc_feature (68)..(70): n is a, c, g, or t
  misc_feature (85)..(85): n is a, c, g, or t
  misc_feature (102)..(102): n is a, c, g, or t
agttncttntcccattcccngcttggattagntgnncngaccttagggnctncaccccnccngagatnnntttctaaacaacatnaatcttcacaacactcngcaacagacagcttgatgatttctactaccactgtgtactgtggattggtgagatccacttttttttctgaattgagggtgcacactattcctgccaattctctgataacttcttctctattcacatgactgttatttcgagatttgtacacaatctgaaatgtccctttgtttggagctttaaaccagggttccaaaaatgtttctgcatattttttcatatcttctaaaaaagccttgcatgtgcctgagatgggtaacattcgcaaaataactcgagtcttctttttcttggttttgtacatatcctggagaatatgatgcaccaatttctcaggctctagtcattctttccaaacagtatttcttcagtgcctaatacgtactataatgtatctaatatattttaacttttcatcattattactgcttgcactagaaatgactgtttaggtagacaccgttgttaacatttttgtgatgtcctgagttatccaaccgtaacaccatgctgttgttttcctatcccaagtgtcctgatgaagacaacgttatttgctccactttccactgactggaatcttcttaacctcatctctgtagatgccttaatgtcaccaacttctttcttcaaggcagcctccgcatcatcatcctctccctcacttccagagggctgctgatccttgtctgtaaacttttctggcccatacatgtcgtcgccgtattcgttgaggaggctgtaggcctcctccacgcacttgcgctcgttcatattgcaggtgatgaggatgccctgtagcccgggctctagctgacggggcccgccagcgtcgcagcgccgagcgcgcttggccagcacatactgagccttgcctttgcgcttcccgccgccaggctgagtagtctgctgggcaggggccgccatggtgtgcgcaaactgagaggaaagagaaacgtttctccgctgctgttggcgtcctcgtctaccg

SEQ ID NO: 436048 - DNA, 2102 bp, Homo Sapiens
  misc_feature (660)..(675): n is a, c, g, or t
ttgtccatgactggtgagtttcaatattttattaaaatagcatatttaaccatggttaaccaagaatatgttaactttgtgccccccaacctgcccccgccccagatacgcagcaaaacacagtagtgatttcaaatatccttgatcatgaccaacaggaatatttcaaagtcaagtttgcaactcaaaagtagaccttggaaaaactctgaattaaaagagaaacataaagctctcacacagaattcttttatctgccctaaaatcaatgccggcgcaccaccacctgacaatactgctaggatttttctttatgcatagtataacgactcatttattaagtacccacttttataaataaaatcggcattttttgtcccgcttaatgttccttttcagcttcacaaagaaaccagtaaataaaactgtcaacgacagtcacaacatatgctctcacagcaagataaaaaaacttgaaaatacgcagagatgcatctacgctattttacataaaaagagagattcaaaaagtgcaaggcaaaatctgcagttttttgaggggagcttttaggcacatccatttcattaaagcaagcttcagaatgaaattccagtttgttcttcatgacacctgttaaagtctttctttaaacgacaacnnnnnnnnnnnnnnnntacatcccatcaagtgtacaatggtagtcttgtgtcctaaaagtgaggagttcagctgtggcgagtccgtcctttctttattctggcaggctttggtttggggatgtactgattatttgcctggtactcgagttctttacggaagtagtgaattgctttgtttaaaccttcctccagcgggaccacgggctcccaccccagcatcagctttgcttttttgatgtctggttttcttttctgtgggtcatcctgggcttcggagagaaactgaatttcacttccgctaccaacaaggtttttaattaactgagcaaattctaggattgtgtgttcttctgggttccccaggttgaccgggctgctgacgttgctgttcatgagagccacgaggccattcactagatcgctgacgtactggaacgcccttgtctgagacccggatccgtataccgtgagtggctccccctggagcgcctgcaggatgaagttgctgactactcgcccatcgttcatgtgcatgcgtggcccaaaggtgttgaagattctggccactcgcatttccacgccttcctgcttcatgtaggcatagcacatggtctctgcaacacgtttgccttcatcgtagcaggcccgaggtcctattggattcacgtggccccagtaatcctcactttgagggtggacttcaggatctccatacacctccgatgtggaggccaggagcagacgggcaccgactcgttttgccagccccaacatgtttaatgtcccaatcgtattggtctttaatgtcttgataggattatacatgtagtttggaggggaggctggagatgccagatggtatatctggtcaacctcgatgtagaggggctccaccacgtcgtggttaatcaactcgaagttctcatgtccgatccagtgctccacgtttctcttcctgcccgtgaagaaattgtccaccacggtcacctcgtggccgtccatcatgagtttgtcagttagatgggagcccacgaaccctgcgcctcctgttatcaaaattcttttccgatccttttctgataaaaactttactggtgggtatttctgggtaaagcttttttctaaatctctgattttctctcttagtggttcaaccatctcttcaatcttgctttcaatttttagttcaccattttcctggatagacctgttgagtagaaagctcatattaacgaagttgccccaaacagaggcgacgtaggccagcaaggcgatgcccagcagcagcttcatcctcctgcggttgacggcagacacgaggcgcagcagcgccttgctcaccatccccgggagccgcgcgggtccagggccctgccgcgcgggggcccgcctgctgcacaatgcgcggcggcggcggcggcagcggccccgagagccccgcc

SEQ ID NO: 436049 - DNA, 1007 bp, Homo Sapiens
tgttaaagtgaattaatttattgattcatccattccataaatgtgagctcctttgaatgttatccttgctggggggatctgtgcccccaggcctgggggctgtcacaggccaaggcctccccacaggagccctgtggttacagagctgcaggctcaaggagcccatgggtcagagaggcaaggctgggctgctggtttgcttcaggctgtagggggtgagtgggtggaggcaatgggagcggccccttgccccagcttgcctcagctcttggagtaacgcctctgcagcgattcccggtagaaacggaagacgtgttgcgaagcggcctgggccgcagccaggcactgctggagctcagtgtctgagtagagccccttggtgctggacatcagcagcttccgttccacgctgtccagggcaaaggtcaggactgcccgggcctccttttcttgcttggatgtaggatccagcacgagggtcccatcagagtccagggcgcaggcgaccccacagaagagagcccgcatgggcacacctgcatccaccaatgccatgcaggcggcattcagacaacaggccaggagagagccggcatcgctgacaacctgcagcaccacggtgatggaggtgcgggggtgcaacgtgcccagcaccaccgcctcgcacgtgttcctgatcagccgctcccggctcttctctgcaacaccaggcagcccaatcttcggcctcaggatcacttcgagtgtggccttgttgaaaatctctttgctgaccttcacctcggccggcccgtacacacccgccaggacagaggtgtcaccttgcaggaaggaagcagagccatctggccgcgacagcaggttctgttcgcaggcaaagtgccggaggctgcagccaggaccccgagggctggaccctgttccattttcagcacggattttggcgtcagtatgcatctcctcctccatcgcgccgagcccacgtgcgatcccgggaattccggacc

SEQ ID NO: 436050 - DNA, 1901 bp, Homo Sapiens
ggcagtttggaaaaaatgttttattcctctttgcacagagcagtttatgaaggtggttttctcctgactccatgcatcttttacacaaagatgcccccttaaatatgccccgttatctgccccacctcagtgctggagaactggcagttagtaagtggggcagaatgcttaagtctcaggaaggtttttaaaggcatttttgtggggaggaagttctgggtcaaggggaaagattagacccaagagtgagtattccattctccatcttcctggggaaatccaaaccccaaaggttttatgaagaaaagcacctctctcagcgacctagagacagggagagcacagacctactgcttgggtgtaaggctgaggcagagagagggtaggttgcagcgactgcagacccacggcagagagtaaatgcatgtcggggagctgaggggacagagacagcctagaggcccaagtcataagttccactccttccccagttctgagtagaaacttttcttcccaagactagaatggagttttagttttaggaactggctttgctccaggacacagagaagacaaaccaggcaacgatcccacaggtagtaagggtggacagttaaggtagctaactaagagatggacactcgccactgcagttttgaagctatatgccagatcagggtacagaatgcattttatatgccctgttcaatacaatttaaatcgctgtttcttccatgttgtcccttccctatgaactattcccaaagcctcttccaaggcagaggacagggcagtaagaaggaatggaagaaaacactgaggtcactaagtggggttagggcttagattggataaatccctacccatccccgcccccactcgttctatagaaaagaattctctttctctctccccttgctgggctgttgggatgagggccaggtagaggcaaagggaggaaaacactcagcacattctttctcctactttaatctgaagtgtagctacagcaaagggcacagaatttacaaaaatgtcagggcaagggagcatgtgagcataatccagtctagaaagaaagagggtgcttcccctgccctattatctaaatatgctgggagctttactcccagaactgcaagaagaatgaaaaagaataggaagggtgtaggggaggttgagggggcaaccacaaacagaatggagatttaaggatccctgtgatccccgagatgaccctgagagcatcgattggggaactagatgaaaattcacagcagacatgcaaattttttgaagaggatgaagagccaggaacagtgaggtcttcaccgaaggagtgaccacttgatctgttctttggctgactgcagcacctgagacacggtctgctccgtaagggggacatcttcaccccttaatgccacccggtgtaccacctgctggggatcactctctaggatcacccctccatctacaatttcatccacagccaagaacagcccctccatgttctccagcagtgctcgcttttctacatttttcctcagcatctggctcaatgagtcgaagagacagttcagaacagccataagcatcagctcattttcataggagctgccaatcacatagaaatagagatctatactgcttttgtataccactgtcaggccttccaagagggcaatttcactgtcagtccgatgggtcttgttgaaaatgttcttctcaaaggccttttgctccttgacactggggtaggtgtcgtcatagtacttggcaaaaagtcgatctccatcattgtccagaatcaggatggctttgacagtatacagggaaggttccaaaatcagcgcctccatcttgccccgcagctggtgccgacgtggagccgcgccccc

SEQ ID NO: 436051 - DNA, 943 bp, Homo Sapiens
aagcccgtgaacgcagggggatacctcgcaaatctttgccactaaatcgaaggtatctacaccaagggcacagattaccaaaatgtgtcaggccaagggccaatggagcatatccaggtctagaagtaaggaggttggcttcccctgcccgtattaatctaaatattgttggaggcttactccccagaactgcaagaagaatgcaaaagaataggaagggttatgggagctttaggggccaaccctaccagaatggagattaaaggatccctgtgatccccgagatgaccctgagagcatcgattggggaactagatgaaaattcacagcagacatgcaaattttttgaagaggatgaagagccaggaacagtgaggtcttcaccgaaggagtgaccacttgatctgttctttggctgactgcagcacctgagacacggtctgctccgtaagggggacatcttcaccccttaatgccacccggtgtaccacctgctggggatcactctctaggatcacccctccatctacaatttcatccacagccaagaacagcccctccatgttctccagcagtgctcgcttttctacatttttcctcagcatctggctcaatgagtcgaagagacagttcagaacagccataagcatcagctcattttcataggagctgccaatcacatagaaatagagatctatactgcttttgtataccactgtcaggccttccaagagggcaatttcactgtcagtccgatgggtcttgttgaaaatgttcttctcaaaggccttttgctccttgacactggggtaggtgtcgtcatagtacttggcaaaaagtcgatctccatcattgtccagaatctggatggctttgacagtatacagggaaggttccaaatcagcgcctccatcttgccccgcagctggtgccgacgtccgct

SEQ ID NO: 436052 - DNA, 1728 bp, Homo Sapiens
ttttttttaatatcacaatgtgtaatgccaccatttattacttctttactacattaaaaaagtgaccctgtttctagagaccaaacagcaccacagaggcattcttggaagagaattccttttgttcccaagcctttgtgactgactttaaatcctctcacctgcagaacagagatggcttcaaagtggggagtgagggagtgagcgaggaccctgggctgagacctgtttttcttccatttctgctgtggcttcccacagctccctggttccacaccaggccctgctctgccgcaggaaaatggattcccaggccacagagctgtcaggcctttgactttgcagagaccaagcaccccagaggctgtgcgacagcggctagtccctggtgggccggtctggggcatggggggcagggagactgggagatggggagggcgtggagaatccggggggtcctggatactgacaaaatggctcaggtctgagctctggctgccccactgattgtgtggcttggccaaggtgcaagtctctcggcctgcttcctctgaaacaggagtggcaatcctggccgacagccctggtggcaccccctccccactgaaggcagagaacatgtgggaaatagtctaactcaggccctgggctgggctggcccgacccttctcctatgcctcccagggtactgtgtctcaaagaacctcttccctcctggaaccattttccactcctctttctttcaaacaagtcccccagcctgactcacaacccctgcttgctaccctcagccggcagaggcccctcatcagtggtaaagacagttcatctcagctgcctgccagcctatggtcttcacagcaccagaaggaaaatgcaaggcaggcaccagctcaccctggctcaggcctgtgcgacagcggcccctgcctcggcccgctcgggtccagtcctcacctgtccggcacgcctggctctggggaagcccagtccgccatcctctggcagttccaggtctcttagaccacttccccctggctcctttccacctggcctgccccttctgtggccatcccaggccccagatgctgccctggtcctcctgaatgtttacaacagatgacacaaccaaggcaggtccaggggtggggcccagggacagatgcggacaccagcctgggttccactctggatgcaggagcacagggctgagaggctggagaagtggagggctactgtcccgaggtgagggaggtgatggtgggaggaggggtgggcttgggacagcagggtctgctgggcctgcaacactcagggttcacagggcgcctcttcctgctctgtaggaggctgctggggaggctcgggcggcttgcaggcccactgcggtttctatacctggccctctgctctgagaaagggcgatggtcctggctgaggccatctgggaggaagtggccttcagcttcccgggtggtgacaaggtatgaaccacaggtccagtctgcactcacacactctactgcccggagagccatgggacagagtctgctgtgggcagaggatggggcacctgctggccgttgtggcacaggcagatgttaggaaaaggctggaccctgtcctgccccatgccaggccctgcttgggctgcattctccggctgccctacggtgctgtcaccacgctctgctcgccatggcctcgtgccgaattcgccacccaggc

SEQ ID NO: 436053 - DNA, 774 bp, Homo Sapiens
ttttttttggagggagaaacaactttattttcatcagaaattagtaatgtttataaatttgtttatagtagtttgtaaattattatcagaaatagtaatgtctataaaccacttactttaagagacaatcaggaactatgatgagggcaataataaaaggagaaatcttacaaaaaattaacctggatgttgtgcttgctctaaggttaagtcacttagggaaacagattcagtattatccaatggcttaaccatccttccttctttctgtttgctttttggtggtggctgggttacaaagagcagtgtcttctgccctgaaggtagcagtattatggtgggtgcctagaggtcaattattggtttagaagagattcaggcccttaacttttacatgtgctttccaggaaaggagacactttctttctcagccctgtgtgaggactatgttagcccagaaagtgttcttggaccactgggtgcccattctcagtgctaggaacaggaagaccctggattcctggtagaatttatggatcctacagctttctctccatcaaactttaagtcacagtaagataggactctggagtcacaggcacagccaggagaggtcagcgtccttatgctgactcctggtcctagacatgggtcttaagatccagtagtcagtaggtctgttgcaaagtcagggactggctagatctctccacagcagaagaaagctcatacatgctgacctgaggaacttaatctgacagtttaccgacacac

SEQ ID NO: 436054 - DNA, 648 bp, Homo Sapiens
tgttgatgggggtggaggtcctgtgattgttgaccactagccgcagtcgtggcccggggcccaggtgataaggggagcctaggaggctcccctctgccattctggggggccacagggcctttgagcttcctcagcaggcgggaggcaatgtcgtgcactgatgggctgggctgggatgctgggaaggcctgatgatgcaactggagggaactgggtttgattgaaggaagggaagccaggtgtgtaggggtctccagttcccaggtgcacatgtccatacactgcctgctggctggacaggcttggcttgggtgggtcctgggagaagtccgctggctctgggtatatgagcactccttgagccccgaagtcctgagcattggtcaccttctgggcgaagctgatcaacccccacgcgcaccagcaagcaggcaggcccactggatccacgcaccctggcccgcaggtcctgcaggtcttcgggccgcccgtagtgggcgtacaccagctctcccgtgacgttgccgatggcgctgtaggggcagtagacgtcagggtcctccagcggcagctgctctccgaccttcccggcctcatcgacccagtgcagggtcgttggggtgagcactggggaccggggctggtgag

SEQ ID NO: 436055 - DNA, 1785 bp, Homo Sapiens
tgaagagaaaataaagcacatttattaaggcaaaggccaagctggccgctcagaacatggccaaggagcgtgaagggattgctccactttaccaccactcagggcacccaggccccaggggtcctgggtccaccccaggccagcagaagctatgaagcttacgcataagcctggctctccctcttcacgaaggcctggaagaggctgcccagctcccagaggggtggggcccactcgccggccagcagcccctgtgtggcctcgaggccttcctgctccagatcctgctgtttctgctggagctgctgcccccgatcctgccccaagggaaagctgagatgagtctgtccgggacaggcttcccgccaggtgaaggggggactgtgtaccacctcacacaagcaggagaaaggagataccccccgacattccccaaaggcagttgctggctttgaagggaggaactcctctccccagctctgaaatctcttccactccctagttccttcatatttccagagtcccactgggagtgggggaggtctatcatcccctcaaggtagcccctactccctgggggatacctgatctctctccatcagccccagggctgcctggtgtccacggtagagggtatgccgacgatctacctgagtctggaatcggggcagggtccgaacagggtcttgtgctccaaaagtgggggacagcacctggggggcctgggccacccccaccccgaagatgaaagttttgaacacagacctggatgggtctggcgtggcggtaagaaagtgcacgcagggctgcgtgggatcctggggcaggacagacaccatgctggccgtggtgcgaaagcctcccgagtccatacagataccactctccttgtctctgaggatgcccatcatcacctctgccgtgatgcccccttgccgttgccgcagcagctcccgccctgcctggaagcgggccttggcagcctccatgcgcacaggctgctgggtcagggagaagatctgagcaaagtcaaaggcaccctgcccatcccaccagcccttggcctgggcatgagtccgcagctccgggtgttgggccgagatgtccgtgccaatgctcagctggttggagatgttgcgggccccctcctggatcctctgtgcagcccagagcctcccagctgtctccagcacccacgcctcagtgcggtcagccagcaggaaggtgctatggtaggagaatggcgcagcatcctccaggcagttgcccccctgcccatagtgctccagtaaccctgtgatcacatgcaaggcctcctgggcagagctgctccgttccaaagccagcctgagtaggtccatgcccagcagggcttccccctccccaactggctccttcgtccacacagcctcgttgccaatgcagacaccatgctcgttggcgcccatctcagccccccatagccaagaaggacggctcagaatcacagcgtgcgtcttcgacacctgttccacttcaatgtaggtgcactggagccggctcccaggagtgtgagtgcctgcggggacaaacaccacctcctgcacctcgtcccggggtcggtccgagttcttggcaaagatcacagccgggatggctgaggccgggggcacggagacaaagcagtcgcaggaacatggggagtcagggctcgacgacgccatcctctcttcctccaagaccccagctcggtcccgggtgccacctcctccgcttctggccagggccgccccattgggcggatag

SEQ ID NO: 436056 - DNA, 935 bp, Homo Sapiens
gccccctccctggatccttctgggcagcccagagcctcccagctggtctccagcaactcacgccttcagtgcggtcagccagcaggtaaggtgctatggtagggagaatggcgcagcatcctccaggcaagttgcccccctgcccatagtgctccagtaaccctgtgatcacatgcaagacctcctgggcagagctgctccgtttccaagcccagcctgagtaggtccatgcgcagcagggcttcgcgccgtccgcctactggctccttcggtccacacagcctcgttgccaatggcagacaccatgctcgtttggcgcccatgctcagccccccatagccaagaaggacggctcagaatcacagcgtgcgtcttcgacaccgtgttccactgtcaatgtaggtgcactggagccggctcccaggagtgtgagtgcctagcggggacaaacaccacctcctgcacctcgtcccggggtcggtccgagttcttggcaaagatcacagccgggatggctgaggccgggggcacggagacaaagcagtcgcaggaacatggggagtcagggctcgacgacgccatctggggagaggcgggcctctccataaccctggccacggctcagccccgaggagcagcctacccccacacgtgtaaaagacgcgcaaggaagacaccgccgtggctcctggacgctcggcgcacacaccatggacgggtgtgcgggaacggaggtgcccaccctctccccaggctccaggcttgggagtccgcaggcgggcactccgggggtcccgcccccactgggagtcccggccctgtcggagcagtcgtgggaccgtccccctcgctaccccaccaagagtcctgcggccctgcgcatgcccagatacccgaccctcttctgtccaacccttctctcacccccagtactg

SEQ ID NO: 436057 - DNA, 1094 bp, Homo Sapiens
  misc_feature (335)..(335): n is a, c, g, or t
  misc_feature (339)..(339): n is a, c, g, or t
ggaaaagtttgacccaccggccctgggataggttctgggcgtggccggtaaggaaaagttccaccccagggcctgccgtgggaatccctggggccagggaccagccccccaatgcttggccctgggtgcgaaaaagccttccccgagttccattaccggattaccacttctcccttttcttgggaaggatgccccatcatccgcctttggccgtggatgcccccctttcccgttcccggcagcaggttccccggcccttcctggaaagcggggcttggccagcctttccatgcgcacaaggctgcggggtcagggagaaagatctgagcaaagtntcanagggcaccccctgccccatcccccccagccccttggcctggggcatgagtccgcagctcccgggtgttgggccgagatgtccgtgccaatgctcagctggttggagatgttgcgggccccctcctggatcctctgtgcagcccagagcctcccagctgtctccagcacccacgcctcagtgcggtcagccagcaggaaggtgctatggtaggagaatggcgcagcatcctccaggcagttgcccccctgcccatagtgctccagtaaccctgtgatcacatgcaaggcctcctgggcagagctgctccgttccaaagccagcctgagtaggtccatgcccagcagggcttccccctccccaactggctccttcgtccacacagcctcgttgccaatgcagacaccatgctcgttggcgcccatctcagccccccatagccaagaaggacggctcagaatcacagcgtgcgtcttcgacacctgttccacttcaatgtaggtgcactggagccggctcccaggagtgtgagtgcctgcggggacaaacaccacctcctgcacctcgtcccggggtcggtccgagttcttggcaaagatcacagccgggatggctgaggccgggggcacggagacaaagcagtcgcaggaacatggggagtcagggctcgacgacgccatcctctcttcctccaagaccccagctcggtcccgggtgccacctcctccgcttctggccaggatcccgggaattccgg

SEQ ID NO: 436058 - DNA, 1132 bp, Homo Sapiens
  misc_feature (148)..(150): n is a, c, g, or t
  misc_feature (153)..(166): n is a, c, g, or t
  misc_feature (1123)..(1123): n is a, c, g, or t
  misc_feature (1130)..(1130): n is a, c, g, or t
  misc_feature (1132)..(1132): n is a, c, g, or t
ggaaataaattcggacctcccttatagggaggcccggcaagattctacccattttgtacaaagaaagttggggtcaggaaaacagctatgggcccaggtgccaatttcattacctcttttttccgcacccgacaagaatgcctcgagnnnaannnnnnnnnnnnnnttttgttacctgattcttttatttaagaaaagtgaaatacatggacctgaagtgagacagcagagggagggagtaagagcggccagggcaaggcagcttggctggccagcccccaaccctctgactgaaaagccagcagcaggctgcatctctgagggccatacctgctttgtacccaccttggggcctcagagctagctactctagaggaccacagggtgcagagagggtgtcctgagggtccttcctaagagggattcctgaggagggagctgagaccctaagggcagcagcaatcttctggttaaactgctccccttcactgtcccacctaggggtggggaagagccaggagcaatggggaatgctgtgagggctgtgggggtggggggacccagcagacctgggggccgggttgaatgtcagctgcttgaagagaggtccatggtgctggcactgaggccccgggagacctggaggggtgctgcactaggttggttcagatagttcaaggaggctgctcgcttcatgttgctgctggagggccgaggctcagtcccctggagcttcctcaccaagagttcactgcttctgcggagcacatcccggatcttgccaagagagccactcctctgcagggtcccactgccatccccggaccactccacagccacagaagcatcttcacctccctcgaatttcacactgtctccagggccctcctgggaggtccttctaccatcactctccccaagcagctctgccaccttcgtctggctgatagggtcagtgccctgtctccgggaccgcagggcacattcctccagggtctcagcagcctccagctttccctggcgcctatacagagctcccaggtttctcagagtagtgttcactgtggggctgctcactttgcaggccttgtaccagcctccatactcagcatagggtgtccancctcatngn

SEQ ID NO: 436059 - DNA, 571 bp, Homo Sapiens
  misc_feature (476)..(528): n is a, c, g, or t
  misc_feature (550)..(550): n is a, c, g, or t
gtgtttgaaccatgtgtcaacaagctttactgtcaaagcaggcttttggtatgggaagaaaaatacttataaatacttgttttaatatttgctttattaaaatacatttaaaatacagcatttttaaatctctaagctcaacttgaagatataagaacagtaaatttgataaaaatgagaaattacattcccattctttaacaatttgtaaattccaattatcctgaacatttaataccatttacatattttattaatcacattttcttaaacatttgataagagatttaatattttgatccaactaccaaaaaagcagacttgtgtacttgacagatttttctaaacacttcacaactcacgattcaaacaaagacaaaatagcatatcaaaagttaatcactcagttggaaagcactcataccataggcttttattcatttcttggaataattttgttatatcttcctcttttnnnnnnnnnnnnnnnnnnnnnnnnnnnnnnnnnnnnnnnnnnnnnnnnnnnnngcaagaccctatctcttaaaantaaaaaagtatatatatataa

SEQ ID NO: 436060 - DNA, 354 bp, Homo Sapiens
  misc_feature (186)..(186): n is a, c, g, or t
aatcaaagtacataaaataaaggtggacacaactgtaagtgatcaccaaccaggggatgtttgggatttttagatgcattaaaagagagtatagagaatatccacctgcaagtaagattgtattcttttgcaaccctgcgattttcaaatggcaccccaacacagtctttggtcaggataagggancctgcaggcctagccttaccgtccacatcaaatataggtggagggatgccatattctccacatttggagctctgtcaggctgctccctttccaccagtcctatccagtgatactgcagacaaagggtgaggcaacaggagacatcataccgatgttgatcaggagagg

SEQ ID NO: 436061 - DNA, 431 bp, Homo Sapiens
  misc_feature (21)..(21): n is a, c, g, or t
  misc_feature (26)..(26): n is a, c, g, or t
aaaatccacaataaccttctnaaganccttagtttgcctaatctgtaaaatgggatgtgaacgttaatacatttgcccacaaactttacaatctggaaattcataggtgcaacataaagcagacagcaggtcattagagctgaagctaattgccggaaaaaagatgaatgcccgggacagagagctgggcctgacgtccctcgtggtgaaaggggttcctttcttctctcttttataagccaagcgcctcttacattccaggtactgtgctggttgcttatgaactagaacttggaaagcaaagaagcaggagaagaatgaggctgggctgaactggctcctggcgtgggctcactcaccatagcgcagcccccaggacagcccccactcatggctctccactgtgcccagaggaattgtgatggggagag

SEQ ID NO: 436062 - DNA, 890 bp, Homo Sapiens
  misc_feature (24)..(24): n is a, c, g, or t
ctttaatcaaaacactgttgcttncattttagacaataaaaaataaccggaattttaaaaatgtcttttccttggctaataatacatttttgtgctacgtttaaaaataaagaaagttggctatgggctgtaaagtgctgacaccattggtgctgatttcagtttgaatggtgggtgggggcaactcttaggagtcagaatgtcctgaatttccaagcaaactcagccgcctggcctggccatctcagcactgctcacagccagcatttgttttccacattcccttccctgtccccaccccaaatattaatacacacatccacatattcagtgtctccccataggcaaatgcttaaatctaaaatggtggcagatattttttactagaagattctatggctaaaaaacaataaccaaggttctgtaatgctggaaaatacagtatacaaaagtaagcaaatctcatgggaaatcattagcaattctcagtgcagtcaaagaaagttaagtgcttggagaaatcaaaacagattgcagccctccacatctacaaggcaatttcttcactctctcaaattctctcctggacactgctttgggaaaactctacagcagcaggaggggagagggcagggttccacggcgaggaggtggccggtgaatgtggcatatgggaagctataaccacaaatgctcacagggaaagaccaaaaccagggtggatacagagggctgggaggcaacggaagttttcgtttgggctgtttgagtcaccttaggcaaagagagtgacccagcattttctctaaataatataaaataccaaggttggaaaaatgataaaattagcgatacaggaaatggagagcagcaagccaggcccctaaata

SEQ ID NO: 436063 - DNA, 796 bp, Homo Sapiens
  misc_feature (21)..(21): n is a, c, g, or t
gtgtgactggataaagtccanatgctcatccctgtcatcgtgctctttctacaggacactcaccgcatcacactttgtgcacaccaccaacaccgggatccccaggttatgagtcagcacattgtcacccagaggcagggcaacattttcttcatcggagcctgaggtcagagggcctcttctctgtggggaaccttgacaaccttcttcaggttccatatagtcttgaaaatctttcacaaacttccgttccagctccctcattttttctggtggaattttcattttatcaatgtgctcacgtaaaacactagcccatttctgcagagattccatcacagtccaaggtctagacatgtctgcaacaaaaatgacgagggtctctggcaaggattcagcagaaactgcaaatttcagcaggcctttgtggtacaagtctccatccagaatccacacgttgcagcgcgtgtgatcatctcggtcctcatcatggacactgaggtagagatattctaggcctcttccttttttgccatgctcagctccttgtagtttagtcatgagggttgttttaccagaaccatcttcaccgaagaccaggatgttcttgccggacggcagcttggacctggcgcgggtggacacttcgctcagaatggaggaccataggctctggccttcctcctcctcactggtcaggtcgccggcggccgccaccgcgggcccgttgggacctagcagcagcttcttctccacccccaccggcgccatcttgccaactgcagccccacccgct

SEQ ID NO: 436064 - DNA, 784 bp, Homo Sapiens
  misc_feature (82)..(204): n is a, c, g, or t
attctagagtatcccgatgacgctcctagacggagtcttgctctgtcacccaggctggagtacagtgaccaccatgcttggnnnnnnnnnnnnnnnnnnnnnnnnnnnnnnnnnnnnnnnnnnnnnnnnnnnnnnnnnnnnnnnnnnnnnnnnnnnnnnnnnnnnnnnnnnnnnnnnnnnnnnnnnnnnnnnnnnnnnnnnnnnaccatgcccggttgacttctagagtttcaataacagagatgtgattcaagaagggagacatgttttgtagatggcaggagcttcatgaaaagaagccaatgaagggcaggacgtgtagctgtctacctacaggaaaccagccaggagcctccccacagggacttcagcacagacggccgggaaaatctgcattaacctgagctctggacctaagagaggacaaggccttgactgtttctacagactcacaagatgcaatctctgtggtccatgcccgtggtgtgatctgggaaacagggggccttctaaatgccaacaacaaggaaatcaaatgtgcaacaaacagaaatagcggcattgacgtgggccatggagaggcctaaacagatgactgcagtccactgctaaggtcatcaaaggggtgactctgaaataataaatttcagacgccacggcccaaatagctgcatgagctggggaagtcctccacatgcctctgcttccttcggtacctgtttatgaaatcagccgaggtacttccctggggaatttcctttctctttctttctttcgagatgga

SEQ ID NO: 436065 - DNA, 316 bp, Homo Sapiens
  misc_feature (22)..(22): n is a, c, g, or t
gatgctgaagctttcagtgtcnccgctgtgttgtcatggtgtactacatcgagatgctgtagctctcagtgtcccgctgtgttaagtcatggtgtactacatcgagatgctctagctttcagtgtcccgctgtgttaagtcacggtgtactacatcgagatgctctagctctccgtgtcccgctgtgttaagtcatggtgtactacatcgagatgctgtagctctccgtgtcccgctgtgttaagtcatggtgtactacatcgagatgctctagctctcagtgtcccactgtgttaagtcacggtgtactacatcg

SEQ ID NO: 436066 - DNA, 297 bp, Homo Sapiens
ggccgggattagatctggctctcagttcatagttcctatgaagtaatgcagggagaagacagcttgctggcaggatgccagcagcatccctccaggggggcaaggggctgtctttctctacaggcttttagggaccagaccttctcaatctagatagacagaattctccctcccaggacatccccagaagccacagagttctgggggctctcagagatagcaggagaccaccaccccagaatgaggatagccattcttggtgtgagcggggtttcccctacccaaggacatgatggc

SEQ ID NO: 436067 - DNA, 299 bp, Homo Sapiens
tgactatgataacccttctctgcattgaccagaacaccacgtttacttggatcccctcccatcttcacttcctttccctttgggcaaagtctccaatagacatcattctggattacagttactctctggctagcctcatcagcttccttgtcaatctgtcttcttctcttaccagcctggcaaaaattccacctggacaaacctagattagaagactcatctgtcttctctatgccttcacctggggagatgagttacactataaacgatttatgtcgaacctcagggctcaacaattc

SEQ ID NO: 436068 - DNA, 666 bp, Homo Sapiens
ttgtggtaaaataatgttttattccatggatgaacagacgctaccatgccacatccccacttccctccgaccagatgtcgtggccagagctggcttccccttccagacctagctggctttgtagtcgttcaggcccattgaaatagcaaacgcacagtcatgtagcactcggatcggtcctgtttatcagcacgttggtcctttcacaaatggtggtgaatcacctttaaaacacccagtgatggagaccttccaatcaccctaactataacggacgttcagagctcatgtggataaacccaaagccccaaacgccaaaatgcaacagggacgcatctcctctgctgatgggatgccaaggacacccccgcagggctgggagctggagaagtcagtcctgacattcagcttgtccacaagctcaaaaggaaatgacagtaatggatatatttcaaactagcacttctagagtccagatcggccacagtgtcagcatgcaggctcaacacggggttagcattggcgggaggaggctgggttgactgcacagaggcctgacacacattgcttcctttatatacaagagaatgaaatatacactgggaactccggctgcacatttggtgggggtgtatcttacaaggctaacgtagcacatcatcaacc

SEQ ID NO: 436069 - DNA, 789 bp, Homo Sapiens
agcaactcacttctttaatttcagaatccacagaggtaagtccagcttagaccagggggctgagttctctcaaatgaaatctgtgccaatatttactccaggaaggcaagagcccagcccttcataggctcctgagatcaggaacggctaggtggttaggaggcgctctcctggccgctctagctgtgtggggcaccccctgcatatgtggggcacacgtggcctatgcacaccacccacctacaagcttgggcggctccagtgggaaagacaggagagggaagcaacatttgattgaatctgagccaagagggccagaggctgaggaaggcacccccacagacagcctcctgagcaaacagcacctgggggctctacccagttgggacaaagggcgaggctcccagcaacagtaagggagatggcgtcctctgggagagggtggcctggggtggggtgacagggcttccacgccaccactgcaccctcggcaagaacgagcagatgtggaagaagaggaattgccatcggatgcgccccccatctcggggtccctgtgctccccacctccaccagtatcttcctggatgggccctctgcactcctcccagcaggctgctcggctccttgggcctgctctgggatcccgtctggtgccactcctgaggtcggcacgtctagcactctgcactggctgcaaggaggagaggctccctgcagccgtgtaaggcaggcaggcactagaagcggggaagcggggctctgtgtggccccgcgtatgtgcgacgg

SEQ ID NO: 436070 - DNA, 763 bp, Homo Sapiens
ggggtgttccttctacctccctggtacgtccctctcaggcctcttgtccctgatcgcttcatgttggagtaccccgggctaagtcttgacctttgttcttttctctgtctttaagtcactcgctcagtggtcttatcgggtccatatcctgatggcgtctggatttgtagctccagtccagtcttctctctccacttcacactcatgtgttcagctgcctgcttgatgtccttatttatggaacccctgctatccacccgcacaccccgcttggggcctgctttacccaaagcctttcccgtcgcagtcagtggcattactggcctccagtgggtcaggcgagagcactcggtgatctctgactcctctctttctctcgtaggccgtaatggtcctcaggaaatcattccagctctaccttgagagcacacacagaacctgacgcttcttaccacccccaccctgtagcatcttagcccggggcctgtcatctctttcccgggtcacacacagcagtggtgttcatgaagctcctcctgccctcacagtggctgttctcacacagaagctgggtcagacccgccaaaggcccctgtctacagggcctcaaagtggcctgtgaagaccctgcactttctgctcgctggtaacctcttgccggctgtctcccctttgcccacttttcccaggcaacacctggcccccaatgctgtctgttgaccacccaggccaggcgttccaccttggaacccctggacaccgg

SEQ ID NO: 436071 - DNA, 303 bp, Homo Sapiens
cagttatcactatgtggtttctgtgggtcaggaatccaggcgtgactcagctgggttcagtgcaaggctgcaaccataatgtcagccagggctcagttctcatctggaggcttgactggtgattgatctgcttcccttctcatctggttgttggcagcattcagttccttgtaggctgctggtctcagggccccaggttctttgctgtcctcagcttcccgccacatgggcctctccatctggccactcatgacatggcagctcacatcttcaaagccagcaagatagcctcctagcaagaca

SEQ ID NO: 436072 - DNA, 963 bp, Homo Sapiens
  misc_feature (54)..(54): n is a, c, g, or t
  misc_feature (56)..(56): n is a, c, g, or t
gctttaggtgatccgtggactccctgaaattggggacaccattggaaatatgtntnaactcatgggcagtttcctatgatttccagtcctcaaagtatctcttggactcaaagatgccttagggcagagtacgcgtgtacccccagtacagaatctcggacagtgaatgtcagtagacattcggcagaaaacctctgccaaattgagtgctctgatgtgactttttcatcaagtcaatgttcctgggatctcttgtacatgataatctcactcttgtaaggtttcatcgtttctgcttaccctagttttctttcccattctgttccctctcccaccagactggactctgaaatgggcatgtacagagacgaagagaccccaacatgcttcaggctttgagtggagaggacacagcctctgctgggacagggaacagagggatgtggagtccctgaagatgcttttggacaatggtctgaggttgggacagtggcaggagataccattcacccaggatctccagtgacatagagatcatgcctggtcagtgtacatgtgttgttgttttcaaactggttgccaggttggcatgaacgatgacatcagagattccgaccttcctgattggagggaccggactccgtggtgcctggagatcagttggacaacagtatcttctcagagctgttctccactcctgacttctcctaggcttgagaattgataacatactcttctggatcctagcagtgtccagaagaaggccatggacagaacggagactaggttccgtaagaggggacagattacgggaaagatcacgaccagccgtcaaccgcacccccagaatgagcagagtccccagcggagcacctcggggtaccccctccaggaggtggtggatgatgaaatgttgggaccatcaggtgaggggactggtggaagaagaggtgggacgagtgt

SEQ ID NO: 436073 - DNA, 306 bp, Homo Sapiens
  misc_feature (16)..(16): n is a, c, g, or t
  misc_feature (164)..(164): n is a, c, g, or t
ggggtaggggtcgganactgaagagtgaggcagtcaggggtttggcatttttctttcattgtaagcacagaagccctgttgactactaagaatggctcatcagccgcgaggatggagaacccgttctgcatctgttttgttatattctgggcttcattgtcaanacaagcaatgctctgtcagccttgcaaaatgctctcttggaggctctttatccacatggcatggactgcatggtgccaaagaggaagaggggccatgcccaggatgtgcctgcagcaattccttttgctcctcacagcgtat

SEQ ID NO: 436074 - DNA, 307 bp, Homo Sapiens
  misc_feature (261)..(261): n is a, c, g, or t
  misc_feature (292)..(292): n is a, c, g, or t
cccagcactgtccgaaaacttgaagggcgacttcaacttgtcctgcttggtgagggagagggccttgtcgagcttgcttgccaactgctcctggtcgctggccatcttcttcttcttaatctttagctgactgatgaagtcggacgaggcctcatgttcatcccaagtctggttcctccccctggctttccccattccgatgagggcatcatgttcctcctcagaccccttgtgtctctttcttatccctgctcccagctnataatcatctgatgtcagcagagacttgctngctcagctttccgct

SEQ ID NO: 436075 - DNA, 256 bp, Homo Sapiens
gtgtggctgcagtgatgtgtcaccgtgtgcagatggagtgtggctgcagtgatgtctcactgtgggcagatggagtgtggctgcagtggtgtctcactgtgggcagatggagtgtggctgcagtgatgtctcactgtgtgcagatggagtgtggctgcagtgatgtgtcactgtgtgcagatggagtgtggctgcagtgatgtctcactgtgggcagatggagtgtggctgtagtgatgtctcaccgtggggagga

SEQ ID NO: 436076 - DNA, 292 bp, Homo Sapiens
  misc_feature (191)..(191): n is a, c, g, or t
  misc_feature (200)..(200): n is a, c, g, or t
cctgggtaaactgttcagtgttcggagaatgcaggatgataacatacaactcacagcactgttgtggtaaatggcacgcagcaagcaatgaggagcaaggctgagatgacggtggacacgcacccaactgcgcaggtcagccaagctggcaaagcgtgttcttgctgccccgtggtggcagaacatatggngcgattttncatagatgccaacagaagagacacatcccacaatttcttgttgattattactatggcaaagagccttgggagatggcccagctaagcatgct

SEQ ID NO: 436077 - DNA, 962 bp, Homo Sapiens
  misc_feature (99)..(132): n is a, c, g, or t
  misc_feature (137)..(266): n is a, c, g, or t
  misc_feature (858)..(858): n is a, c, g, or t
ttaaccttgaaagtgaaggggctaagtgccccaatgaaaagtcacagagtggcaagttggataaagagcaagaccctggccaggcaggtgactcatgcnnnnnnnnnnnnnnnnnnnnnnnnnnnnnnnnnntgaannnnnnnnnnnnnnnnnnnnnnnnnnnnnnnnnnnnnnnnnnnnnnnnnnnnnnnnnnnnnnnnnnnnnnnnnnnnnnnnnnnnnnnnnnnnnnnnnnnnnnnnnnnnnnnnnnnnnnnnnnnnnnnnnnttgaacccaggaggcagtgggggacagggcaagtctgtctcaaaaaaataaaagaaattgaatacattgatattttgccaggaccctgccttctacaggcatctagtctaatgggactgggagtaatcaaggcagatgacctaatcccagtgtccaggatgtaactagagagctacgggcatgcagaagttggaagatgagggaaggcatcacagaggctgtggggtgaactgatttcaaggaatgggtccttcccttcagagccacatgtgtgcgggacacccagacagaaaacacaaacacaaagtcgagtggagggcatttggaaggagcagtgaagccgagccaggaaataccaagatggcgagccagtgtgcttgtagagattgtagagagggtagaattgacactgtggaccctggcctcgatagagaaaggcatcagctaaggaagttgttcaggtgggcagtgaggttgtcgtgctttggaaagatgttcaggctgcactaggaagccccttggcttggggagggactccaggagaccccagccagggagcatttgacagtggattcgagtgatgcaagggggncctggactgtgacctctgtcacgggaacccagaggaggttggtggcttttgcggttgatgtgggaaggagagagaggagaaccggaaacgtctgcttgctgggg

SEQ ID NO: 436078 - DNA, 312 bp, Homo Sapiens
  misc_feature (42)..(42): n is a, c, g, or t
  misc_feature (83)..(83): n is a, c, g, or t
  misc_feature (135)..(135): n is a, c, g, or t
  misc_feature (251)..(251): n is a, c, g, or t
ccatgggttcatgtgtgattgatcacaagcacaaagggaaanaaatgcagaagcatcagggctgaccgatttccatgacaggnaaagaccctctatttgctatattgtgtctgcattttccatacctggttttgnaaatattaaacctgcatagaccttaccctgtgggttgtgtgaaggggaggctgaggttgaagggctccaggcaggagatcccacaggtgtgccagcgtgccaccctccctcctctnatttcacgttcaaccacagatagacggcattctgtcgttagtctttccagcctgggaattc

SEQ ID NO: 436079 - DNA, 160 bp, Homo Sapiens
  misc_feature (67)..(67): n is a, c, g, or t
tcctcgggaagtgaggggacacaagagggtgatgaagggacaccagagggtgatgagggggcaccanagggcagtgaggggacaccacagagtaatgagtggacaccacagggcagtaaggggacaccagatggtggtgaagggacaccagggggaagtg

SEQ ID NO: 436080 - DNA, 288 bp, Homo Sapiens
cggatcctcttgtctgtgtctcccgttacatatctgtaaagggtggatgtctcagaatggaaatgctgagtcatggggcgtatgctacaagtcccccctgccttcagaaagcccccaacccatagaggcagttcagccccggctcggcagaccccaggcagctaactcctttaacccaactaagcttcggttttcccgtctgtgaaatgggaatcattctacaggacattcattaaggtcacactgattacagacctcgtaccaagccctgtgctgggcatggcggcc

SEQ ID NO: 436081 - DNA, 651 bp, Homo Sapiens
tacctctatcacactggatgtgggatgtagacaaaaagagcacttgaggatggctccaaggatttggcctgacagaaggacggagttgacagtatctgagatggggaaggcagagagtgaagatagctgtgggggaaggttggggcattggtgttggcccacaggattacaggtggagatgttgaacaaaccatgggggctgttaagatggagttcaggggagagctgaaggcttgagatccctttgggatgtggcagagtataggtgatatttaaggacatgaacgtgagtggctggggaagccagtgaagatggagaagaggagagactcaagggcccagccctcgggcatcacaccattaatagctcagggagatcaggaggacacatctggggccccaaggtttcctctctgggaatccaagcccaggggtatgtctcttccctgttttctgtagccctctgcttaaacccataggctgagcgctcactttgggattattgtttttagtggagaaggggggtaatgggagtgtgactgtttacagttaacagatgttaatgtcatttgactgatgctttaacatagtattgcctgggttttctcaggcacgtgagaatctttggattctttctccctctaccttttg

SEQ ID NO: 436082 - DNA, 273 bp, Homo Sapiens
  misc_feature (23)..(23): n is a, c, g, or t
  misc_feature (36)..(36): n is a, c, g, or t
  misc_feature (47)..(47): n is a, c, g, or t
  misc_feature (196)..(196): n is a, c, g, or t
  misc_feature (198)..(198): n is a, c, g, or t
cattgccaccaactgctgctagncctgtgaatgtanacggccgattnaaaggctctaggtgggcagcagggttgaggaagttgctgtgatgaggaggtggcccaaaaggggtcccagttgggtgtgcagcaccagcggcagagaacaaagttgaaggccgtgccaggtcatgggggtggtggatggctccaaaaanantggggcctggagggcggctcaggaactcaggtttcagtccaaagtccagcttatgtgggtctgactgcatctgtt

SEQ ID NO: 436083 - DNA, 2092 bp, Homo Sapiens
gtagagcgggtgatgttggcgacgtcaattttttctggccacaggtgcggctgggcgtaagatgcctgttgatcgccttgataagctgacggttccgaactctgacggccgaggcagaattgtacaagaactgctggaagggccaggaacctcggagctgcagcacttgaatggctgaaatcctagtctagggggtttctgagtttgtcaagtgcttttgaattgctcgttcagatctttgctcacgccaatgtcttgaaacatgcgctgaagtttagaggtgtactcgaacccgcaagcttgctttaacttggagatcatgctggcttcggcatcgtcacttgcactgttctggtggacgagcctcttggcgagcatcttcgcatagaacttctgaaatacgtctttgtcttctatgtacttgaagacaaccatcacttgattgagtgtgtcttctagttctgcctcctctgggttcttggaacttttcttcaacaaggagtcacagtatcgagccagcaactcaggggatttactggatgattgggccatcttggtaaccgcgttgttgtttatgaagcgaccacaagccttatcaagagcagccacaaagccagcgtcattgttgaatgcagacattaccagggcattgtattttttatgaacatcaagcactgtctgtacatacattttggggtcatttaaagcagcttctccacacttttcaatggctgcaagaccctgattatgaatgtgtgtctccaacagttttttcaattctcctaggccatcctggattctagatacaagattatacatgcgtcccaaatcttcatttttgtcagcatccaataaattctgaaattctgtgtggaaaatttccaagtgtttttcaatgaggacttgttcacatttccttgctaattcatcttgtgtgctttcatgaaggtaaacctgaactcttcgttgttcctcaagcagacgagcctctgcctttttcatatattcagtaactgggttctgctgcaagaattcagtactctctctggtaataaaatctctctgtgtcagccaaaaattgagattcaaaggattctttatacactgttaacgtagggccctttgcaaatgcatcatcttcattcagccccaattccacgtaagactgtacaactccactaatcaatcttgtattgatggtttcaccattcctttccttttcaatcagctttaaaacagcatttgttacctgtttattcagtggcctgaacagacagtctctccaagtcaccaatgcaagcgaatagatttcatatattccttttcgtccttcgtcacattcacggcgaacccaatgtctattgaggtaggcacaaattccattcagcactttgcttgaaaatcgataatcttcccattgttgagtgtagaatttcagtacactctcatccatcaaatcttctccatccttaagaagatttgtcaagtaattcttcaaaaattccttaagtcgtttatataattccaggccaacaaactgagctcctccaggtgtctgcccctttttcgacttagaaggaggaactccagctcctcgtgcttggtttgactggtgaacactagtacagtagttataaacatgagtgtagagctccatatatctggacttggccatgctctgccgtgtgtacacctgctggatgccggctctgaggtcgtcccagatctggtccaggccaatctgcttcaggccgtgggggttctggctccgggttgacgacattgtgagggatgttctaaagtcgtccagtgcagcaatccttattcaaagtacagctagttctccattagatgaaaatatacagtaccattccaaatttattcacagcagctcagaaaggatgtcctttaaatgtagagaatgaaatctcattgcaggcaaacccgcatctctgtggtgccccaaaggctcccgcgacgcctccgcctcgtcctgggcctgggccccggcgaaagccccgtcccgccaaggtctagctgcgtccctcagctaccggggctgccccgcctggagctgcgtgcgacacccgct

SEQ ID NO: 436084 - DNA, 797 bp, Homo Sapiens
cctctattatttatttttttaaaaaaaatagagatcctaaccttagatctttgatgtgaagctagcactgtctgtaatacttctaagagctgccactaaaataatacagcaatccgtggccaggggagcaccccctcctggttgggcccctcagttggagtctaagggttaatctctcatcttgctaagcagtattcaagtgccttgaacagtgtcccctcggcatggctccccttcagcaggctggcattccaagcagtggcccccgcaggcagccgacccccttcctcttcacgctctatgagtttaaaaagctgatttgtacctctcccctgggggaaacggttccatatagaacactaacacttaattacaagctccattatgccattttaaatggcttctttttgttaattggaggcattgttcataacttaaggcttttgccattaacttagctggctaagcagaggcttggggtaaaatcagtgtttgcatttagcctcttgacccggagttccggcccaagctcccttgtgatagccgagatggcaggtgtgtgagttctgtcctagacctgtgcccaacgtcacttccagacccagacggaagtcttctgtcctcctcaccgaaacacccgaggctccctggtaaacctccctactatggaaacctctcctgtaatccaagtggaacggacattctaggagaggtttacctggctcaagccaggaaccgtacttcattcaggaaacaggggcttcttccagaagcccactggaagccttcagcctaca

SEQ ID NO: 436085 - DNA, 857 bp, Homo Sapiens
ttttcgtgattaaactactgttgtatcattgggctgcgacggttacaagtccacaaactgtttaactggacatatgtgaggtggtaaatccctccattttacaggtctttgggaagttctggggccaggaaatccaaatttgataataggattttctcaactgaactcagggcagagcacagatggtctgagtgaacgccctgtgtgacaggtgccttcctgcaggtaggaacacttcctctgcagtcagagggagaagaaaacatcaggagctggatgtgatttcagatctgcaccgagaaacatgctgatttcactggggatgtggcagtcccaggtgaaggctggctaggtcataattgacatctcctccctgtctctgctctcagacatggagttgattatgctttttaaatactttatgaattccatccggatctcctcagggtcatcttccaggtttgagtgcaccagcttcagcttgttcaagggtggcgacaaagacaggcttcctttatcatctccagagcctggtttgtggtgtgcaattagcatacactgtgtgtcctgtaaggacggctgttggacaaagcaggaataccacatctccatttccttccggtggcttgggatgtcagcattgaagacgatcaccactccatgagcatccttcatcagggccggccagcaggactcaaacttagcatcgccaccacagtcccatagctcgaattcacagcccgtgcctttgttgttgctggtaacatgcgggttctcaaattctaggatcctcgcaaggccccacgaagaggatcttggctttcagcatagttgtccgccgcggcttagccggccgg

SEQ ID NO: 436086 - DNA, 927 bp, Homo Sapiens
cacatatgtaagtggtaaatcccccaattgacagttctttgggaagttctggggccagaaatccaaattgataataggatttctcaacttgactcaggcagagcacagatggtctgagtgaacgccctgtgtgaccaggtgcccttcctgcaagttaggaacacttcctctgcagtcagagggagaagaaaacatcaggagctggatgtgatttcagatctgcaccgagaaacatgctgatttcactggggatgtggcagtcccaggtgaaggctggctaggtcataattgacatctcctccctggtctctgctctcagacatggagttgattatgctttttaaatactttatgaattccatccggatctcctcagggtcatcttccaggtttgagtgcaccagcttcagcttgttcaagggtggcgacaaagacaggcttcctttatcatctccagagcctggtttgtggtgtgcaattagcatacactgtgtgtcctgtaaggacggctgttggacaaagcaggaataccacatctccatttccttccggtggcttgggatgtcagcattgaagacgatcaccactccatgagcatccttcatcagggccggccagcaggactcaaacttagcatcgccaccacagtcccatagctcgaattcacagcccgtgcctttgttgttgctggtaacatgcgggttctcaaattctaggatcctcactccttgggttgggctgtattcagtgatgtcagaagattctgtcagaaagttggccaaaacagtttttccactctcgcaaggccccacgaagaggatcttggctttcagcatagttgtccgccgcggcttagccggccggagcccacgggaggcggcgcgtcaggacggagctctacttggccgctttcgtttccatggcccc

SEQ ID NO: 436087 - DNA, 310 bp, Homo Sapiens
ctcaggcgatcctcccgccttgacctcccagagcaccgggactagaggaatgagcctccctgccgagccagttggacactctgggacacagatttgtcagggctcacctcactccttgggttgggctgtattcagtgatgtcagaagattctgtcagaaagttggccaaaacagtttttccactctcgcaaggccccacgaagaggatcttggctttcagcatagttgtccgccgcggcttagccggccggagcccacgggaggcggcgcgtcaggacggagctctacttggccgctttcgttttccgct

SEQ ID NO: 436088 - DNA, 970 bp, Homo Sapiens
cgcccggcccaaagacgatatggaaatgggaaaaaaaccaacccgcgagccgggggtggcgaattcggcacgagggtagagctccgtcctgacgcgcgcctcccgtgggctccggccggctaagccgcggcggacaactatgctgaaagccaagatcctcttcgtggggccttgcgagagtggaaaaactgttttggccaactttctgacagaatcttctgacatcactgaatacagcccaacccaaggagtgaggatcctagaatttgagaacccgcatgttaccagcaacaacaaaggcacgggctgtgaattcgagctatgggactgtggtggcgatgctaagtttgagtcctgctggccggccctgatgaaggatgctcatggagtggtgatcgtcttcaatgctgacatcccaagccaccggaaggaaatggagatgtggtattcctgctttgtccaacagccgtccttacaggacacacagtgtatgctaattgcacaccacaaaccaggctctggagatgataaaggaagcctgtctttgtcgccacccttgaacaagctgaagctggtgcactcaaacctggaagatgaccctgaggagatcccggatggaattcataaagtattttaaaaagcataatccaactccatgtctgagagcagagacagggaggagatgtcaattatgacctagccagccttcacctgggactgccacatccccagtgaaatcagcatgtttctcggtgcagatctgaaatcacatccagctcctgatgttttcttctcccctctgactgcagaggaagtgttcctacctgcaggaagggcacctgtcacacagggcgttcactcagaccatctgtgctctgcctgaagttcagttgagaaaatcctattattcaattggatttcctggcccagaacttccaaagacctgtaacatggagggatttacaactca

SEQ ID NO: 436089 - DNA, 457 bp, Homo Sapiens
aacacttgccacccggaaggagcggtgtgagcggtcccaaggagcccccgcaggtttgcctcggagatgaagcagtgtgtccggctgacggtccatcccaacaatatctccgtctctcagtacaacgtgctgctggtcctggagacgtacaatgtcccggagctgtcagctggcgtcaactgcacctttgaggacctgtcagagatggatgggctggtcgtgggcaatcagatccagtgctactcccctgcagccaaggaggtgccccggatcatcacagagaatggggaccaccatgtcgtacagcttcagctcaaatcaaaggagaccggcatgaccttcgccagcaccagctttgtcttctacaattgcagcgtccacaattcgtgcctgtcctgcgtggagagtccataccgctgccactggtgtaaataccggcatgtctgcacccatgacc

SEQ ID NO: 436090 - DNA, 456 bp, Homo Sapiens
  misc_feature (57)..(57): n is a, c, g, or t
  misc_feature (67)..(67): n is a, c, g, or t
  misc_feature (101)..(101): n is a, c, g, or t
  misc_feature (111)..(111): n is a, c, g, or t
gccttgcctttatcctggggcagctgccagttgacaacctgtgaaacagttggtaanaggacccagnacacaggccagtctgagggacacgctcctcccanagtcctgaanaggggcctgcatgtttctgcacctggagggccgggccagggtggggaagactggggatgggggggaggctggaccctgcaggttcttggacctgtggtcaaccgggaagccaagtccctgatctgcagtgaggctgcggctgccagccccttgaataggcacagtaagcacctcccagcaatgccactgtgcagaagagatgccaacagtgacaaggggggccagggatggtccccaaaccagacaccccatcttcaccctctgccattttccttctccaggtcagccctgggggccctgggcacaagcttcaggaggggagagagggccatgcaaagtgatcca

SEQ ID NO: 436091 - DNA, 1133 bp, Homo Sapiens
gacgggccgatccccagccccttcggcaagcagcagcgcctcatcctggtccgaggagcctgtgcagtccaacatggacatctccaccggccacatgatcctgtcctacatggaggaccacctgaagaacaagaaccggctggagaaggagtgggaagcgctgtgcgcctaccaggcggagcccaacagctcgttcgtggcccagagggaggagaacgtgcccaagaaccgctccctggccgtgctgacctatgaccactcccgggtcctgctgaaggcggagaacagccacagccactcagactacatcaacgctagccccatcatggatcacgacccgaggaaccccgcgtacatcgccacccagggaccgctgcccgccaccgtggctgacttttggcagatggtgtgggagagcggctgcgtggtgatcgtcatgctgacacccctcgcggagaacggcgtccggcagtgctaccactactggccggatgaaggctccaatctctaccacatctatgaggtgaacctggtctccgagcacatctggtgtgaggacttcctggtgaggagcttctatctgaagaacctgcagaccaacgagacgcgcaccgtgacgcagttccacttcctgagttggtatgaccgaggagtcccttcctcctcaaggtccctcctggacttccgcagaaaagtaaacaagtgctacaggggccgttctagtccaataattgttcattgcagtgacggtgcaggcccggaacggggaccttactgtccttgaatcgaccattggtttctcaaacaaaaggcaatgcgggccaacaaagggttggcctataaaggaagcatattggcatcattcggcagtggcgacaccccctgtgtacagcacacctttggtaaggggggaacccacgatatatctccgggtgccaatgtgggtccaccacacgtaacgggaacgcatgtttgtgaggatttctcgtgcgcatgtatatacggcgctgatgactatatgagaggagttaaaacacacataatcctttactaagggtacgtttcccccagagtacgatcggcgtgagtacgacacagtggcggactactatggggagataccgccagcagca

SEQ ID NO: 436092 - DNA, 484 bp, Homo Sapiens
gtcgacgtgaggactcccccgatgaatgcgcgttcggtggtctgcatgatcttcatgatgaagctcctcaccaggaagtcctcacaccagatgtgctcggagaccacgttcacctcatagatgtggtagagattggagccttcatccggccacgtagtggctagcactgccggacgccgttctccgcgaggggtgtcagtcatgacgatcaccacgcagccgctctcccacaccttctgtcaaaagtcacgccacggtggcgggcagcggtctctgggtggcgatgtacgcggggttcctcgggtcgtgatccatgatagggctagcgttgatgtagtctgagtggctgtggctgttctccagccttcagcaggacccagggagtggtcataggtcagcacggccagggagcggttcttgggcacgttctcctccctctggccaacgagctgttgggccgcctggtaggcgcacatctatcgtg

SEQ ID NO: 436093 - DNA, 916 bp, Homo Sapiens
tctagggtcaaagcatgtcccaaagggtgtatcctaattctccaagtgagacagtgactgccccttaatcctgccagcctcgagggccacatggctttggcctcacttggccttaggatttgtctgcagagaagggaaaatccaggtagctgtggttccaatgaggtggtggtttattttctctcaggtagaagaatttcagaggctggtggtctcggctggaatgggtggctccacaaagtcatcaggcacccagctttcttctgtcactcttcttcatcatccttagcacagaccttctatctttaaagaagcctcatgattcaagatggctgctacagtgccagccatcgtgtcatgttttaggcaggcagagagagaggatgaagggcgaaaggacgcgtcttctagctgagttggtcctttaagatctttcctggaagcttcatccaagggcttctacatacctctctgtgaccattctgtctgcaagagatagagaatcataaagtcttttatctgaggaatttgctgcccagatggaatcagggttattttggaaagaaagaagggcagaatcgcttgttgggcaggcaacctgctgtctgtcctacaggtctcaacttgtcacactctcggggccatttggctctgcctctgggagggaggagactgggttggggaagagtcacagtggaatattcaagttgacctcacagcaaaggtgttggatgaagacagaatgtagatatctgaaaatagatcctgacatgccctcaggattcaggtgtctgacacagaaaaattatttttcgtttgttcctgtgtccaaggctggaagtgtggttacggctctgttcccaagtctgggtcctctaattgaacacgaggaaggttccactctcaaaggctctgg

SEQ ID NO: 436094 - DNA, 312 bp, Homo Sapiens
acattcttgcaccaaccccagcaacccagtgctaagagccacactggcccaccacaagctgtctagtggcctgccaggcctggagagaggccttgtgtccaagcagggcagacatccttggttttagggaaaggacacttggctactaaaattgtggaagacgagaggtcagggaatgcggaaactgatgtgggcctgggctcagtgttggctgggaactgtaccagcctcatttgcttttgcccagacatgtgtccaggaacccctaaacacaaggcaagcaacctctctgttcttccttcagcttcccca

SEQ ID NO: 436095 - DNA, 235 bp, Homo Sapiens
aacccacacctctggggtgtactcctgcctccgccaacagactgtgccccaaaccctcacttctggggtgtactccagcttgtgtgaatattgtgccccaaatcctcacctctggggtgtactccagcctccgccaacagactgtgccccaaaccctcacctctgggtgcactccagcctccgccaacagactgtgccccaaaccctcacctttgggtgcactccagcctccgcc

SEQ ID NO: 436096 - DNA, 353 bp, Homo Sapiens
tgcagtgacccctgagctccacagagaagcggaccttactgggagaggagcctggtgcgcaggaccgttgctggggccgcagcgtgtgctgcagcgggcaaacgcagctctgggtttgtgactgagcatggcggtgattctgccagaggcgggaagcctccctggtgtgcactccagcctgtgtgaaaactgtgccccaaaccctcacctctggggtgcactccagcctgtgtgaagactgtgccccaaaccctcacctctggggtgcactccagcctgtgtgaagactgtgccccaaaccctcacctctggggtgcactccagcctgtgtgaagactgtgccccaaactctc

SEQ ID NO: 436097 - DNA, 301 bp, Homo Sapiens
  misc_feature (65)..(65): n is a, c, g, or t
  misc_feature (103)..(103): n is a, c, g, or t
  misc_feature (119)..(119): n is a, c, g, or t
  misc_feature (128)..(128): n is a, c, g, or t
gggaggagggcatcctaggaggagagggagtgggggctacctcagggacggggaggtcaggctgnagaaacacataggccctgattgggaagaagggaacggnaaataagacttaaagnatttaaacnaaaagagccattgcagcgggatgagaccacatcatcaggttttgggaataggactttagaggcgtaggatccattacagcatcaccgaaccagaagcaggaaggctgagctaagcagagcagcagcagtggagataggaaggaagggagggaggggccgaggaaggaaggaag

SEQ ID NO: 436098 - DNA, 858 bp, Homo Sapiens
ctatggtttactccgtagctcctttcccagttaaagagaaccacatcctgttcctagcttgttactattaatggctgcacagccgtcaatcttgaaagttaacttcgtttaggggattcctgttgttcgttctgttctagttattatttcaacgtgtatcacctaggaaaaggccagttcttaatcttatttcaaactggtgcttgtagggggctcagatgggttataacacacatcaggtcagtcatttcctgggctacataccttgtactgagtggcattatacaaacaagtctcttttattgtttccatacattgataataactatagaacagaaagattgttttcatttgctgtcctacttcagtgacctgatgaatacactgggaatagtccccagtttgagtaagatcagttgaagcccttactgtataagtccaaaatttaagaaaaatgaatctcacgatgagcttcctcatgcttcggctgtgcgtggaccagtcagcttctgggtgtgactggagcagggcttgtcgtcttcttcagggtcactctgcaagggttgtctgggcttggtcttgcctcccaggtttcaggcgctgcaggttttacatggttgtggtggatccaggctgggattctttctacgttcacagcggtgggagtgctcaggacgacagtctggggtcctttccaccgtgggcacaaagaggctacgttccagttcttgatccacactcgatcacctctacactttggcatctctgtgaagtccacctggagatcttcaaagggggctgctctataagcttgtatgccgggtggaacggctggacattgcctcgcattatgctccc

SEQ ID NO: 436099 - DNA, 920 bp, Homo Sapiens
ttctcaggcactctacgggtctttggcgttgtcttcctcccagtctcagcactgcagtttttacaccggtttgtgtgttccagtttggttcccgtgtcctttcgcatcgtttggaatggctccatgtttgccaagatctcgggatcctttccaccggtgtacatcttatcatggctactgttttcagtccatgatccacactcgatcatctggggagaatgggtgaactggggagaataaggttaacagggcatttctcattttacccaggctgagaattttttgtgtaatgttttcctgaggcctgtagctgtcgctgtaactcaaatttcacctaactctcggggagttgcctggaagtccccgcaatataggagggggcctatgatataatatttcataaggggaatatcctgttcttttagaaggggtacatctaattttaaataataccatagggagagcctgtatccattttaatcctgtttcttgacatactttccctaaactatttttgatagtttgattcattcgctctacctttccggaactctgaggctggtaggcagcatgcagtttccatgtgatccctgatatctttgccgtcttctgtactaagtcagccacaaatgctggcctgttatctgagccgatccgtaagggcagttcaaatctaggaataagatctcgaagaagcacacgggttacttcatgagctttctcagttcgtgttggataagcctccacctgcccagagtaggtacgcccaagaactagtaaatacttgttacctctacactttggcatctctgtgaagtccacctggagatcttcaaagggggctgctccataagcttgtatgccgggtggaatagctggaccttgtctcgcattatgctgtcggcaggtacacaccgctg

SEQ ID NO: 436100 - DNA, 573 bp, Homo Sapiens
  misc_feature (89)..(89): n is a, c, g, or t
cctgggtcccctctttcatgtcccacaggccacagagcccagtgtgtccaaccagctgttctctcctcaaagcagcccccaagcaagtnccttctctagggtgtccctgaggacagcacagaggcgggactcagagaccccattcctcttcacgcagcccttaccccaagccctctagctgtgtggctggcagtgttggccacgtaggggctcccatccccccaccattgtgtcacatgggctgccaggctcagctcccagctgcgtccacagtgacctggatcagggtggggacaaggactggaccctccttctccagaaggccttcagctcttgccttgccatgcagtcacctccttccccctctgaccccagatcccaaaggtacaccgttgccccagcccctttctggccccatggggtttctctgatgccttcatcatagaggcccggggctggtccgatggttggcaaaacttgactccggcccagtccccactcttggggacttagaacccctgctgtcctgggatctggcctgcctttctttggtcagtccctgtggtcccccac

SEQ ID NO: 436101 - DNA, 371 bp, Homo Sapiens
cacacacacacatacgaatataatatggttcagctgtgttaccacccaaatttcatcttgaactgcagctcccataattctcatggtgttgtgagagggacccagtgggaggtaaatgaattatggggacgggtctttcccgcgctgttctggtgatgtaagtcatgcgagaactcatggttttataaaggggatttcccctgcacatgctttcttgtccatgtaagacttgcctttgctcctcatttgccttctgccatgattgtgaggcttccccagccatgtggaactgtgagttcattaaacctctgtcctttataaattacccagtctcaagtatgtctttattagcagtgtgagaagagactgat

SEQ ID NO: 436102 - DNA, 281 bp, Homo Sapiens
gtgaccttggccagggtagttagtctccctgagcctcagtttccttgtctgtaaatggggtctaatgatatcgtatctcgttaattgcaagaactaaacgggctggaaaagggctggctccacaaatgagagttgttgttacaaatcgtcagcatctgtctctcccggaggttgtgatgattgcaaagatgaacagagtccggtgagaggcccttggccaggccagttccctgaaggtctttctcgtctcctagctggggtgtcagggcgaggtggggaat

SEQ ID NO: 436103 - DNA, 296 bp, Homo Sapiens
gccttagtagggatgactgggttcaactggaatattggaacagtggggcatcttctccctcccacccatcttaggcctcttcctcacaaagtggcttcttacgtggtctttttatgtagcaagaaccccactagcaggataaccataattcttatatagtggcttaggcttcccaagagtgccagagtgcaaactgccaagcctccttaaagtggaggcatggaacagttccaacatcaattctgcctcctcctgttggttgaatcgagtcatacagccagttggattaattgggg

SEQ ID NO: 436104 - DNA, 372 bp, Homo Sapiens
  misc_feature (28)..(28): n is a, c, g, or t
  misc_feature (362)..(362): n is a, c, g, or t
ggccgggttggtggcttgtcctcatctnttgcctggagctgtgctggcctgtggtttgctttggctgctaccatgtggagggagaggtgcttgtgtccatgcctggcctcttggaaggccaccactgtaatggagagaggaaggccaccactgtgatggggagaagccggggccagaccgatgagggctgagagcccatgggcaggggttgtggtctcggccaaaccccagctgatggcagccaccccggggtcctcagatatggcacagctgcctggctgagcctcggcaaagggaagccttgtggaaaatagcaactcagggatgttgtgagtagtggactgagctgtggtttatttttnagagacaggg

SEQ ID NO: 436105 - DNA, 1651 bp, Homo Sapiens
  misc_feature (3)..(3): n is a, c, g, or t
  misc_feature (89)..(89): n is a, c, g, or t
  misc_feature (824)..(824): n is a, c, g, or t
  misc_feature (880)..(880): n is a, c, g, or t
  misc_feature (1355)..(1391): n is a, c, g, or t
  misc_feature (1476)..(1568): n is a, c, g, or t
ggnatctggggatccagataactggggatcaaggccatcttgtgaccccagtggtggtccctagtgggactgctgagctccagcctganagttcatgaactcaacagtgattgcttgtgggtactaatgacccagtgtgtggagacctcatttaccaggtgtgcctagcctgcaggcaaatcccaaggcagtgacccttagggaagagacagcgtttggggtcatcaaaggctgggaaacccaggtacctgtcagggaatgggctacagactggagctaagccttaaggtggggaagattccagcacccctgagtgaccacctcttttggtaatgcaaagaagggattttgtgactccagggtgacatttctaagcttggcatcatgcagggtgggcttgggctcaatatgggtgactgttagtctagggctgtctcaatgaggctgtccaggcagaaaggcttacacacctggcaggcagagggtctagagaggaaggggcaacaggcctaaggaggggacagccaggcaaggaggtagaataggccttgtctggacagtggtcacctgttaggtccacagcttgtcctccctggcctgaccagccaggtgaggagagatccaaaccatccacctgaaagcattcagggtgcctgatgacaagaccccagccactgtgggctctcatgtcctggtaggaaggtatacctaaagcaggtggacctggtagtggtggacgctgtctgcctccccggggcttgtctgtttatgccagaccgttttcccatttgcttccacctccagctcagagaggaatcaccttnacacctctgctaaaactaacccagctctgcacccaccattccccactgtgcaacancctgctactggagaaccctgccccctcaaatacacgtcatcctcagggccctgcgatgtgctgtggtctccctgccaccattcaaggggccacagccaggtccagcctgtcttccctggcaccaggctctatgcagtgggggaaactcgggcacccctaaactattctccagtgttctcaccagaggtggtcagccatgtgatggcaagagtcacttcttaagcttttgctatccccagaaacttaaagcaacaccaaccacacccaaaagtcaagtgatatccagacagcaacagtagagcattaactgagtgcagggccgtggtgactcctcgacactccaggctctcctgctggtaacctcccattggcagagccaggcactcagcaaagccctggacagtcagcagcctcctgaacaggctctgctgtccccactcacgacttcagagcagctaggactcactgtgaccannnnnnnnnnnnnnnnnnnnnnnnnnnnnnnnnnnnngccaactgcctcatctctgtcccaagataactgctctccagaattttccatgatatggtcattttaaaagttattttttcttttnnnnnnnnnnnnnnnnnnnnnnnnnnnnnnnnnnnnnnnnnnnnnnnnnnnnnnnnnnnnnnnnnnnnnnnnnnnnnnnnnnnnnnnnnnnnncagtgggcaccactgtgcctggcttgatggtgtcatttttcactgtacgtggatttgtaaccgcataaataagaatctctgtg

SEQ ID NO: 436106 - DNA, 724 bp, Homo Sapiens
cacaggcagacctccaagtagagaagcatctctgggagaaatttagagcctccccacaaggaatatgagggctccgatcagtggccacaaggaacccctccctgctgcctccacaagtggccccacactctgtcttctctgctcccatcttaccccaaggctgcaggaccttgggatagaaatcttctcccctaagcagcccagagaatgctccttaacccaagacagtgggttctcagtactacttcctccttcctgcctggaaaagtgccaaaagtatagatatgcccacagttcactgggcaaataatgtactgacctccgggggatcctggccttgaatggactagatctgccttctctgagacacaactggtcatggagggtaccctgcgaacagatgttcatcacagaattatttaaaaagatgaaatgttagaaacccaaatatctagcatccaggggattggttaaacatattgtaataatatcttcctgatgtattctacaatattaatatcaatacagtatcataagcattcagtgtcaactgtagaggtatttaattgaatgggaaatattcatagtacattatcaaataaaaacgtttaaaagatatagtaatttcttatctttgcaaaatagatatgcatatctatgcataaacaaaacatgggaagatgacactaaaatgttaatagtggtgagtgatagatgatagatt

SEQ ID NO: 436107 - DNA, 218 bp, Homo Sapiens
  misc_feature (59)..(59): n is a, c, g, or t
gattgattgtggagccctaattaccacggggacaatcctactggcagcctctgcctgantttcagtccaaagcaaagaactctcggccgagtttagctacatccagtgtaatcttggggaggtctctgtgtatgtttgagactcggtttcccagtctgtgaaatgcgggtactgatgacacctgtcctgtaagggctgtcgccggactgtgtgctggg

SEQ ID NO: 436108 - DNA, 289 bp, Homo Sapiens
cagcatgcagagtttttaatggggtctcagtgtgcagccacacagagcattgctgaccagggacgctcgcccaggtctcagagtgcagaatttctattgaggtctcagtgtgcagccagccacacacacagcattgctgggcagggatgctcacctgggcctcagcatgcagagtttttagtggggtctcagtgtgcagccacacagagcattgctgactagggatgctcacccgggcctcagtgtgcagtttctatcgaggtctcggcgtgcagtcagccacacacac

SEQ ID NO: 436109 - DNA, 639 bp, Homo Sapiens
  misc_feature (74)..(74): n is a, c, g, or t
  misc_feature (97)..(97): n is a, c, g, or t
attgtgagtgtgtgacagtccttttgtgtggatccccaaagaaagcaaggtgttgccagttcctttctcctgcnggatttttcttttctatcagtgnaatattattaaaatgtcttaacatttgtttagtgccctatattttataaataacacatctttgtgcctttttattgtgtaatgaatcctcacaactctgaggtgggtgggattgacaccagttcacagaggagagtggggaggtgcagactcatgagcagcatacacggcattcttgttgttttctagataccatcgataatggggtgggtgctgtcgccaacatccctcgaggcgtggtgcggtggcaggacttgtccagggtcccgcagctggtccatggcagagagggtttctgaagactgtacggtgcttctcttaccactgtgggggaagttgtgtccagaccacatggctggtctgtggtggccccatccctagaagcatcctaactctaaatctagatctctttccactttggttccgtcctggcccttgcacagctctgggcccacaagagcctgtggttggccggtcctggatttctcgagcagggtggctggggctggcgactcctacgaatcgtgatcctcacggacatcg

SEQ ID NO: 436110 - DNA, 307 bp, Homo Sapiens
aagccaggtccaccagacacatgctgctcatttatgcaaagtttgggcacaggcaaaacaaaactagtttgatcgtgatgggaaacattagagaaatgcaaagacatgaccatcataattgtcaggagaaggcattggttaggattgggaagcggcaagcagaagcatttagggattggctggcaatgttttacttctcggctgagtgagggttgcatcggtgtttatttgataacacgttctaggggctgggcaagatggctcatgtcttgtggtctcagtactttgtgaggccaaagatgggaag

SEQ ID NO: 436111 - DNA, 459 bp, Homo Sapiens
  misc_feature (304)..(304): n is a, c, g, or t
  misc_feature (312)..(312): n is a, c, g, or t
gaacaaagacaagcatggcaggagggcaggactaaagcagtggtgtggaaggaggccaagaggcaaggattgtttgtggccagggttgggtgtttgggtcttaagtgttcaggaaaactattgcagaatcaggcagaaggatgcagtgatggttcctcccatgtggaagatgaatgtagatcccatggcttctgtttgcttcgtgaagtaggagagaaaatctgggagagagagggtcaggataaagtgtataaaaaaaggggtcttttgaaatagtcattttggacagtgggggaaaggaacntcatattnaaaagtgtgatcagtttccaggcagtttgtgggctggaaaattgtggttgtgaagttaaagtgaggccagttagcatggcgtgtgtttcccagcgacactgggtatagatctaaggtcagcggacagctggtgccacccggctgtgg

SEQ ID NO: 436112 - DNA, 596 bp, Homo Sapiens
cagagtgattctaagtttaacatacggaagaacggaaggggctttttgcctaactcctgggagtgatatggagaatgaccgtgggtgaagtggaaccaaaatatgagattttgagggaaagaagattggaagaagacgagtgtatgagaagcctcaagaggatttattatgagatttctgagtgccagtcccaagagacctgaactagagacagtggcaatctgatgatgaaatgattgggtaggttgagtcgtagctgtttctggggggctggaagacaaaggggaagataacctggggttggtgctcaggtgggcatctcttacggtgacaaggacgtgggaaggaatgtggcactcacaatggtgtcagaggtgagtacaatcatcatgcctgctctatgggaaggagctgacactctcagtgggaacaacgatcaatctcatttacagacaaagaacagagtgacctggctaacaaatggctgatgcgaggttgaatccgtctgacccgaagcctgtgacaaggcgccctaagacagaggttgacaaagttctttttttcttgtgatggagtctcactctgtcgtccaggct

SEQ ID NO: 436113 - DNA, 1188 bp, Homo Sapiens
  misc_feature (168)..(168): n is a, c, g, or t
  misc_feature (171)..(171): n is a, c, g, or t
  misc_feature (180)..(180): n is a, c, g, or t
  misc_feature (189)..(189): n is a, c, g, or t
  misc_feature (193)..(193): n is a, c, g, or t
  misc_feature (197)..(197): n is a, c, g, or t
  misc_feature (200)..(201): n is a, c, g, or t
  misc_feature (929)..(929): n is a, c, g, or t
  misc_feature (1031)..(1031): n is a, c, g, or t
atttaaaatcagactctttttgtcttttgattgctgtctcgcgacccaactccgatgtgttccgttatcagcggccggcagcctgccattccagcccctgtctgggtggggtagcggttggagagtcccccgcagccgcggcgggcaaggttataaaggaagagaaanagngaggcagcnagcgatggntagntctngcnngcgagccgtatcgaggaagggaaagcgcaagagagagcgcacacgcacacacccgccgcgcgcactcgcgcacggacccgcacggggtacagctcggaagtcatcagttccatgggcgagatgctgctgctggcgagatgtctgctgctagtcctcgtctcctcgctgctggtatgctcgggactggcgtgcggaccgggcagggggttcgggaagaggaggcaccccaaaaagctgacccctttagcctacaagcagtttatccccaatgtggccgagaagaccctaggcgccagcggaaggtatgaagggaagatctccagaaactccgagcgatttaaggaactcacccccaattacaaccccgacatcatatttaaggatgaagaaaacaccggagcggacaggctgatgactcagaggtgtaaggacaagttgaacgctttggccatctcggtgatgaaccagtggccaggagtgaaactgcgggtgaccgagggctgggacgaagatggccaccactcagaggagtctctgcactacgagggccgcgcagtggacatcaccacgtctgaccgcgaccgcagcaagtacggcatgctggcccgcctggcggtggaggccggcttcgactgggtgtactacgagtccaaggcacatatccactgctcggtgaaagcagagaaactcgtgggcggcaaatcgggaggctgcttcccgggctcggncacgtgcacctggagcaggcggcaccaagctggtaaggacctgagccccgggacccggtgccttgcgcggacgaccagggccggctgctctacagggacttnctcactttcttggacgggacgacgcgccaagaaagtttctacgtgatccaaacccggaaggccggcgagcgcctctgtttaccgccgggcacctgttttttgtgcgccgacaaagacttggcccccggggagcccgaggcgtccttgggctctgggg

SEQ ID NO: 436114 - DNA, 1189 bp, Homo Sapiens
  misc_feature (381)..(391): n is a, c, g, or t
  misc_feature (553)..(588): n is a, c, g, or t
tgggggaatggggtgttcgagagttttctgccggtctctccttgcacgccgccaccggacactgaccactggaatcttcaggttccttgaggagttcccaagctgaggtcagaacgggcatgggaggcagcagacactagcactgccctgctcccgcctccaatgttctgcttgcctcaatgagcctccaacccaactgctctagaggagagtggatgggctgaaggagaagccagggaagttagagctaacacattatcatagaaactgtactgtacatgtgctaaagcaagatgtcaggagtatcttacaagatgttctttatacgatatcactgctgaaacaagccaacttgttaataactagaaaagtccaagtttnnnnnnnnnnnttaaacatgtaaattcttcctgcttttcttctgctcccctaagagcttgactggtatgtgggtgggctgggctccaacacccctctggccagatccagtcaaagtaaaggttatatgcatgattataagcaggactccagtctctaagtgaagtgccttagnnnnnnnnnnnnnnnnnnnnnnnnnnnnnnnnnnnngggggggtgggaggagctgtcacaaagaaggggagattcaggaatggctccaggacacgtccctttactctgccaagatcaactcaaaagaccacaactgtttcatgatgctggtgaatacacaattctgtatggcactcactgatactgtcacctgagaggaagacgggggaagagacagagtatgggcttaaagaaacaagactgtataataaatacagattaaaaaagaaaaatcgccaccatctcccctgttggcctgattaccccgatcctgctatgtaacacagcaatccctcccctggagaccagaggggcttggcactgtggtggaagccagagcgagcaggcccttaggaaagaaggcaggaacaggaactggcttcaccagaaaagctagaccctcggactcctcctggaaactctcagaagggagggttatggccctctttgtcccttcatatttctggacaaagaccaccaacccaatatcaagccccataaagagcttttagaaaaacagcataagcttgggatgacaggcgtttctggactccctgtgatctcttccaggttcttggtcttcctcgctcgccccgct

SEQ ID NO: 436115 - DNA, 1325 bp, Homo Sapiens
  misc_feature (990)..(999): n is a, c, g, or t
  misc_feature (1160)..(1196): n is a, c, g, or t
tttcggttcgttgtgttgggcgtgcttgtgtcgtgcggtatgtccggtgtattgtctagttcctcccctgttggtgggtcccccttcgctgctgtgtgtatgtcttgttttgtttgtcgtttctgctatctttctagtttcaggtggtcgctgattcttggtaacacaggtattctcactgatgtactagtcgcagactgcatgtagtagtcaggggaagcttgccgctggtgggtgttatgaagcctgtgatgtcagttgcctactccatgcctatagaagggtacgtgtataactacccagcagccctggagcaatgcctcgtcgtgccttgggcaggtaggaccggaggaagctagagtgccacatttccgcagtgttacaaattcacgaggccttgatgcgtcatgtctctaggacgctgcaggtccccttggtggacgtttaaactaggtactagaagagcattgggtgctcactaaactttccacaattcaaaggtgataaaacaagaaaaaccctgttttgtaccttttactcaaaatccatcataaaagggaaagaagacgtacaaagttttgcctaaactatacacgatctagagctagactttgttcgtgggggaaggggctctcagagcttctctgccgctctctcctcccaccccccaccgacactgaccactggaatcttcaggttcttgaggagttccaaggctgaggtcagaacgggcatgggaggcagcagacacagcactgccctgctccccctccaatgttgctgcttgcctcaatgagcctccaacccaactgctctagaggagagtggatgggctgaaggagaagccagggaagttagagcaaacacattatcatagaaactgtactgtacatgtgctaaagcaagatgtcaggagtatcttacaagatgttctttatacaatatcactgctgaaacaagcaacttttaataactagaaaagtcaatttnnnnnnnnnnttaaacatttaaattcttcctgcttttcttctgctcccctaagagcttgactggtatgtgggtgggctgggctccaacacccctctggccagatccatcaaagtaaaggttatatgcatgattataagcaggactccagtctctaagtgaagtgccttagnnnnnnnnnnnnnnnnnnnnnnnnnnnnnnnnnnnnngggggggtgggaggagctgtcacaaagaaggggagattcaggaatggctccaggacacgtccctttactctgccaagatcaactcaaaagaccacaactgtttcatgatgctggtgaatacacaattct

SEQ ID NO: 436116 - DNA, 533 bp, Homo Sapiens
tgccacacttggatttggggcctgaatttaagcttttggctaacaaatcgctgtcctgcgcttggttcaggcgtgtcttctagcttcccagctgtttttagccatcatagaagcaatgccacaccagcaggccccaaaactcttccgtgtcttgtgaagagagagccgcagaggaagccggctgtggaggcagttctgggcatgcgctatgtccagaatgggctgccctccaggcatggagacttgggccgggcctgctccaccggacaggcggtagaggagggggcaggacggtgctgaggttggaggagaggccgttgcagaggagggggcctgggagggttctccttggggagtcagaggaaaaagcacattccagatgtgggacaaacaagatagtatttggggcaggacagtctgagtgtgacatgttcatgggctgccagaaggtgcgggttgtggggagagaagaatgggggcggatggtatgattgctgatcacagcggggaggttggatgccattagagtagca

SEQ ID NO: 436117 - DNA, 291 bp, Homo Sapiens
ggcgggacacggggtgtgaaagagaggagatgaggagtcagcacatccagccaccccctccaaacacacctgggaaaagggagaaccccggaggacagcccagtgggagagtggctcacaacaagtccacatacatcttgtgggactcagggaccagccagacacaggaccagggtatacaggtgctgacttttgagttgtccacggcactaggaggcacatgccccagcacctccccaaattggaaatctgggggtacaacctctgtacacacatgcattccagctcgca

SEQ ID NO: 436118 - DNA, 574 bp, Homo Sapiens
  misc_feature (63)..(63): n is a, c, g, or t
tactgacacccttggccgaggcagaaacgtcccagactggaggcagcgctggcgagcgtggcnacagggccgccgagccctggagggggtcgctctcatgaggattactgccctgcttcagcagtttcttaaacttagagcgtttgttctgaaaccatatcttcacctgtgtttgtgtcagtcctaaggaagctgccagttcggctctctctggaagggccagatactgtgtctgctgaaagcgatggtttaaagcctggagctgcaggctggaataaatggtccgaggcttccgaatctttttcccttttccattgaacctgatttccccgttttcaatcactgtagttttttgttgatctgtaagcaaataatacagaggagcggtcacccgggaggctactgctgccatctccctgctcctggcgtggcatgcaacgaatctccccaaagcccaataagggttacctcgaaaaatccctatgatgccccgacctctcttggtccactctgcccgtgtgctcccagcgtctgcgtaatctccttgacccagtccctgggcccgaacaatgtg

SEQ ID NO: 436119 - DNA, 1127 bp, Homo Sapiens
  misc_feature (137)..(137): n is a, c, g, or t
  misc_feature (188)..(188): n is a, c, g, or t
  misc_feature (202)..(202): n is a, c, g, or t
  misc_feature (260)..(260): n is a, c, g, or t
  misc_feature (262)..(262): n is a, c, g, or t
  misc_feature (289)..(289): n is a, c, g, or t
  misc_feature (331)..(331): n is a, c, g, or t
  misc_feature (401)..(401): n is a, c, g, or t
  misc_feature (452)..(452): n is a, c, g, or t
  misc_feature (470)..(470): n is a, c, g, or t
  misc_feature (520)..(520): n is a, c, g, or t
  misc_feature (792)..(792): n is a, c, g, or t
tccaaaatcatcagcaagtccctattcctcagtgtctgcctctctcattgcaaatggtgatagcactagcacctgtgggatgcacagttccggtgtcagcaggggtggatctggcttttctgcttcgtataattgtnaggagccaccatcctctcatataaaaactgggctctgtggacttggaaacntgggaaaaacctgnttcatgaactccgctttgcagtgtttgagcaacactgcaccaatgaatgaataatttntnaaagatgagtatgaagccgaaatcaanagagaaaaccctctggggatgaaaggggaaattggagaagcntatgctgaactcattaagaagatgtggtctggaagggaggcccatgtgggacctcgaatgttcaaaaatnaagtaggaagttttgctcctcaattttatgggtaacagaaaaaagattttnaggagctgctggcctttnttctagatggattgcatgaagatctgaaccgggtggtgggaaaggaagcntgggagaatgagaggttgaggaatgattgtgtgattgtggatagtttccatggcctcttcaaatctactttggtttgcccagaatgtgctaaggtttctgtgacctttgacccattttgctatctaacgctgccactgcccttgaagaaagatcgagttatggaggttttcctggttcctgctgaccctcactgcagacctactcagtaccgtgtgactgtgccgctgatgggggctgtgtccgacctgtgcgaggctctctccaggctgtntggcattgctgcagaaaatatggtggtcgcagatgtgtataatcaccgattccacaaaattttccaaatggatgaaggtttaaaccacatcatgcctcgggatgacattttcgtgtacgaggtctgcagcacttccgtggatggctcggaatgtgtcacgcctccaggctccttaggaagaaatttagaacaaacagcagaggtcagagttccatcctcagctcctccatatctgaggtcttcctcacctcccccacatctgagctcttcctcagctcccacacatctgagctcttcctcagctccccaacatctgagctcttcctcagctcccc

SEQ ID NO: 436120 - DNA, 1585 bp, Homo Sapiens
  misc_feature (628)..(639): n is a, c, g, or t
  misc_feature (1418)..(1418): n is a, c, g, or t
  misc_feature (1428)..(1428): n is a, c, g, or t
  misc_feature (1538)..(1538): n is a, c, g, or t
  misc_feature (1556)..(1556): n is a, c, g, or t
  misc_feature (1562)..(1562): n is a, c, g, or t
  misc_feature (1576)..(1576): n is a, c, g, or t
  misc_feature (1579)..(1579): n is a, c, g, or t
gaatttctctattttgtttttctatctttgccagttttaatggtgcgggacttcctttaaagcggttatttaattaaaaaagtggtttatttaataaaaagttcccacacagtatttaaccgtcttaattcatctagggtagcaggggatataacagaactgctgggttccacaggaggttgaggggccaggatccccaacactagatatcttccttagcggggagaaagctggaaattacaagatgactcaacggagaaatgggcttcagtgggtaactttcagaaaattataaacccatatcagtgcacatagcgagggaaaggggagtttacttgaggtttgggttactgtgagcagactacttggggtgactagtattggcatcagaaccagaaatccaggcgctcagggcgagccctgcaggtggggtgggtctccaggctgctccatactcagcgcctgtgttcctctccattcttcgggatccatcagacatactccattgagtacccccatcccacccccttttcagcttcacaggtttcacagaaatttctcaccacctgtttaaaaataaaaataattcagcctcttgacatagcttcttctaggtaaacggtcttcnnnnnnnnnnnngtttccttctgctcataaaagaagggtatttccttgtctggtttttagacagaacactagcagtctgcagagtgtcaaagatgttctcctgggggattacactggcgctacagggtggcaggatcgtggagtcagcattagttggtgtccatgctgcaagcctcatcatccccaaagccctgctgagagctgcttggtcgtgtccctccatcagaggaaccagaactgctaagtgaaggtgtcttataaaattcatcatctcgacgttggtaaaataggacataaggtgctttagtagtgggcaacccccatggctccataatgattggagacgggaatgaggtcgtacacataagggcttggtgacaggttacagacaaactcggacatgttcagccctctgattgggaattctacgactgtgtcgagcttatccctccagtatctgttgtaggagaaacgtttgaggtggaccaccaggatcttggggaaggaccataggtcaaacttttttgtggcctgttgatggtttttacagttgggacagtacccggggtcatggtccccaagggtctcccatggtggtgaagaggtccgatggagtctcttagggccactgtggtcttctttttcttctgaaggctgcaacatgctcacatgcttctcgtaggcctcagattcttgctcatcatagtaaagtctccgagtttcactgtcccaatccatggccagtgtagatcgagagttgagtttaagtagttttccatcagctgcaagtnaatttatgtnagctgttccataggagttcacaagactgaaggtaaaaagcctttttgggcagggctggcctttgatcttcttttgggtggtctcactggggtcatttcctggctcatctncccactgccttctgtttntgaaanctgctctttgcctnttnctgatg

SEQ ID NO: 436121 - DNA, 693 bp, Homo Sapiens
  misc_feature (634)..(634): n is a, c, g, or t
  misc_feature (679)..(679): n is a, c, g, or t
gagagacacacgttagcaaagaagcatagggatactttccaggcatatgagtgcaagaggccacccatgggagatgattgattttaagaggtatcagggggttgatccagagcacctgtgagcatctgacaagaaagaggatgagcattagtttgccatggctgtctttagccttgcatgtggacaaagccccaagtgatatttctgcctgttcctagcaaccatcgagaaagagatgcggaagctattcaacatccctgcggagcgtgaaacacggctctggaacaaatacatgagcaacacctacgagcagttgagcaagctagacaacactgtccaggatgctgggctataccagggtcaggtaggagggccctggccattccccagcaggtagctctgcccagggtgtgtggccagatactttttgcttctaagcatgttggaagtgcggtggtttgaactctcctcatttggtttcccctttcactcaggtgctagtaattgagcctcaaatgaagatggcacatggcccatgcagaccttgcagtcaaagtaagtgaatttttcttcctttgtgaggctcacatgtgcaaaagagacagtctttcctaaggcagtacttgtactaagnaatgtctgattcagatgaacaatgcctattttgtatattcagagntcatgcttcttgtg

SEQ ID NO: 436122 - DNA, 2503 bp, Homo Sapiens
tgtttccttctgctcataaaagaagggtatttccttgtctggtttttagacagaacactagcagtctgcagagtgtcaaagatgttctcctgggggattacactggcgctacagggtggcaggatcgtggagtcagcattagttggtgtccatgctgcaagcctcatcatccccaaagccctgctgagagctgcttggtcgtgtccctccatcagaggaaccagaactgctaagtgaaggtgtcttataaaattcatcatctcgacgttggtaaaatagcacataagctgctttagtcactatctgatcctcagaggccagggacacgttgctatcatcaaagtaataccatttaccattcagtttgttcttcgcatatgcagtgtagtggccaacccccatggctccataatgattggacacggcaatgaggtcgtacacataaggccttgctgacaggttacagacaaactcggacatgttcagccctctgattgggaattctacgactgtgtcgagcttatccctccagtatctgttgtaggagaaacgtttgaggtggaccaccaggatcttgggcaaggaccataggtcaaacttttttgtggcctgttgatgcttcttacagttgggacagtaccaggggtcatgctccccaagggtctccatggtggtgaagagctcgatgcagtctctcagggccactgtggtcttcttcttcttctgaggctgcaacatgctcacatgcttctcgtaggcctcagattcttgctcatcatagtaaagtctccgagtttcactgtcccaatccatggccagtgtagatcgagagttgagtttaagtagttttccatcagctgcaagtgaatttatgtcagctgttccataggagttcacaagactgaaggtaaaaagcctttttgggcagggctggcctttgatcttcttttgggtggtctcactggggtcatttcctggctcatcttccccactgccttctgtttctgaaagctgctctttgccttcttcctgatgctccatttcttcctcatcttctccttcacagctgttcctggagccattgcaggcccctggctccaagggtgagctgccaaactcatcaggtaaaggctgtttcacatagcggctgatacgatcacaaacagcctggtacaaagactcaagggttaacttgtgcttggggacagaaagcaatagtggctgcccatatagcgctgatgcggaggaagtgcttgatggcctggacttcctctccctgaagtagactggaagcgtgacacattccgagccatccacggaagtgctgcagacctcgtacacgaaaatgtcatcccgaggcatgatgtggtttaaaccttcatccatttggaaaattttgtggaatcggtgattatacacatctgcgaccaccatattttctgcagcaatgccagacagcctggagagagcctcgcacaggtcggacacagcccccatcagcggcacagtcacacggtactgagtaggtctgcagtgagggtcagcaggaaccaggaaaacctccatacctcgatctttcttcaagggcagtggccagcgttagatagcaaaatgggtcaaaggtcacagaaacccttagcacattctgggcaaaccaaagtagatttgaagaggcccatggaaagtatccacaatcacagaatcagttccgtcaaacctgtgattctcccaggcttcctttgccaccaccgcatctggccgcccattggcatccttcagctccaagtagggctttttctttacccggttcagatcttcatgcaatccatctagaagaaaggccagcagctcctgagaatcttgttgctggtagcccagaaaattgaggagcaaaacgtcctacttgagttttgaacatgcgaggtgccacatgggcgtcccttccagaccacatctgcttaatgagttcagcataggcttctgcaatttcccctttcatccccagagggttgtctctgttgatttcggcttcatactcatctttgagaaagtagtcagtcagtggtgcagtgttgctcaaaccctgcaaagcggagttcatgaagcaggtgtttcccaggtttccaagtccacagagcccaggttgtatatgagaggatggtggctcctgacaattatacgaagcagaaaagccagatccatttgactgcaaggtctgcctgggccatgtgccatcttcattttgaggctcaattactagcacctgaccctggtatagcccagcatcctggacagtgttgtctagcttgctcaactgctcgtaggtgttgctcatgtatttgttccagagccgtgtttcacgctccgcagggatgttgaatagcttccgcatctctttctcgatggttgcaatggtgtctgccttgctgaaatggcaactcagcacattggtggggtcactgttctcacagagcttcagttccagcaaatatcccgggaatcc

SEQ ID NO: 436123 - DNA, 755 bp, Homo Sapiens
ttatgagttagtgcattgtctgctaggcgcatgtgcttgatttttgcttgcaaggtctgcctggtccatgtgccatcttccttcttgaggctcaattactagcacctgaccctggtatagcccagcatcctggacagtgttgtctagcttgctcaactgctcgtaggtgttgctcatgtatttgttccagagccgtgtttcacgctccgcagggatgttgaatagcttccgcatctctttctcgatggttgcaatggtgtctgccttgctgaaatggcaactcagcacattggtggggtcactgttctcacagagcttcagttccagcaaatacacctcgactttgcagtgcttgacaaacaggccatgctccacaacttttctgacgatgggttgctggccttctacacagccgtaccagtttagtagtttattccacgcctcggtagggaccaatacatagtccaattcatcaattaagtgttctttcaaggtctgactctcaggatctgaaaatagcccagagttgtctattgggccaggaaataggttatgttcacccacattgtacatgtcccagctgtcaaagcccacatacttcttccactgcttgaaccaccggctgtcaataagataccactgcgccccgcgttggagtgtggtcctcattaagggtccaagctcggacttctgagtctccgcatccggtcgctcacggcagcctccaccttccgccatctcctccgcggcccgct

SEQ ID NO: 436124 - DNA, 1078 bp, Homo Sapiens
  misc_feature (18)..(18): n is a, c, g, or t
  misc_feature (133)..(133): n is a, c, g, or t
  misc_feature (159)..(255): n is a, c, g, or t
ttttgagatggggtttcnctcttgttcccgaggcgtagagtggatggcgcaatcccaggtcccgcaacctcccctggggctcaagcatctctgcctaggcgccaacagctaaagcagagatgtggccagggcngccggccagttctgcacccttagcannnnnnnnnnnnnnnnnnnnnnnnnnnnnnnnnnnnnnnnnnnnnnnnnnnnnnnnnnnnnnnnnnnnnnnnnnnnnnnnnnnnnnnnnnnnnnnnnatgagccactgctcctggccattgtgcttaatcccatctgcaaagtcccttttgccatgtcacctgacataatgacagatttttgactgcaaggtctgcctgggccatgtgccatcttcattttgaggctcaattactagcacctgaccctggtatagcccagcatcctggacagtgttgtctagcttgctcaactgctcgtaggtgttgctcatgtattgtttccagagccgtgtttcacgctccgcagggatgttgaatagcttccgcatctctttctcgatggttgcaatggtgtctgccttgctgaaatggcaactcagcacattggtggggtcactgttctcacagagcttcagttccagcaaatacacctcgactttgcagtgcttgacaaacaggccatgctccacaacttttctgacgatgggttgctggccttctacacagccgtaccagtttagtagtttattccacgcctcggtagggaccaatacatagtccaattcatcaattaagtgttctttcaaggtctgactctcaggatctgaaaatagcccagagttgtctattgggccaggaaataggttatgttcacccacattgtacatgtcccagctgtcaaagcccacatacttcttccactgcttgaaccaccggctgtcaataagatacccctgcaattccgctttcagctggaggccttaggcgagtcagctgcccaaacgtgggatcggggctcctgctccagcggccctacagggatttcgggaagtaccatgtgcaccagcgccttgggaccaagactcaatggtgtgttggg

SEQ ID NO: 436125 - DNA, 193 bp, Homo Sapiens
aaggcagatagcccgtcacaatgtggatgggccttatccaattagttgaaggcctttgaaaaaagactgagatcccaaacgaagaaggaattctgcctccagacagccttccaactcaagtagcaacataacctcctccttgcggctctagcctgctggcctttcctatagacttcagacttgccagccccac

SEQ ID NO: 436126 - DNA, 480 bp, Homo Sapiens
cttgtgtagcatgacccgcaggtcacggttctgcagctgctggggtccaaaactcaaggcaaacctccgggccaggtccctcatctcgatgaaggcagtaagctcattcaggccttggggcccatgctcctgcagcagttctgtgtacagctgtgtccaggagacgtggtgcatgtgggaaagggaggaacacggcggaaacagagaagtccagcattctcttctctactcagaaattccaaaggccttgggacaccatctactacttttactctttccttccttctagggaactcccgatacccctgcagcaaacaaagccaatcacctctactccataacattaaataaaaacgtctatagtaactgaaggaggctgagagagaacagactgaaaaataattaggaactccctatcacttccttgttggcgttccaatgtcctgataagttacttttgatggggttgcccagtcagtt

SEQ ID NO: 436127 - DNA, 292 bp, Homo Sapiens
agcagacaccgtccccagcctcactgccagacaataccccgcagcagacgccgtccccagcctcactgccagacaataccccgcagcagacgccgtccccagcctcactgccagacaataccccgcagcagacgccgtccccagcctcactgccagacaataccccgcagcagacgccgtccccagcctcactgccagacaataccccgcagcagacgccgtccccagcctcactgccagacaataccccgcagcagacgccgtctccagcctcactgccagacaatacccc

SEQ ID NO: 436128 - DNA, 331 bp, Homo Sapiens
tttcccgtcccatgcgcccagcacagttacccttttccgccccatgcgcccagcacagttactcttttccgtcccatgcgcccagcacagttaccctttcccgtcccatgcgcccagcacagttaccctttcccgtcccatgcgcccagcacagttaccctttcccgtcccatgcgcccagcacagttactcttttccgtcccatgcgcccagcacagttaccctttcccgtcccatgcgcccagcacagttactcttttccgccccatgcgcccagcacagttaccctttcccgccccatgcgcccagcagagttacccttttccgcccc

SEQ ID NO: 436129 - DNA, 350 bp, Homo Sapiens
agaatttatacactgattaaaggagtattaccatcttaagaccacttttctgccacttttactgcctcagtctgcagctcaacaacctgttcaaggctaggagttggaagtcatttgctatccccttctcctcgccctcacagccaatccatgaccgagtcttaaagaatggatcacttcggtatctcatagatctgtgcttcccactcacatttcaggccatgccatcctcttgctgaagccctaattgatgctttctaacaggttctcgtgtctctccctgaccaggccctcttacagactgcagaattaccatccacagtgtacattggatgagaatgtgtcaccat

SEQ ID NO: 436130 - DNA, 285 bp, Homo Sapiens
ggttggggggacagattgtgtatagttgggagagagattgtttatggttggggacagattgtgtagtgttgttggcaggcattgtgtagggttggggccatagatggtatagagttggggaacagattgtgtagcattataggaagagatgtgtaggattgggagagagttgtgtagggttggtgggatggattttgtagggttgtgggggacagattttgtaggatttggagggatagatggtgcagggttgagggggacagattctgtaggattcggagggat

SEQ ID NO: 436131 - DNA, 865 bp, Homo Sapiens
tctgtctttcagccgtggggttcacctctgccttccacagttttcatggggccatgctgttgaaggtgtctcccaatctttcttttcttttctcttcaccccttctggatttctcaataactttcccatcatcttcagtgggctcggtccagagagagcatctttgaacactccttggcaaggggctcctggtgaccgggggatgtttggcagtaaaatggtcatatcccattaatagaaactctgtcagaggtagcacatctaggccaccacagcggcaaggacatcgcggtctgcagccttcagatcttgactgaggccagtctccacacttgtggcattttctaatgcgggcagcagtcatgttttcttcaatagaggtacggtacttgagtgtccgtctttttcagccagctcttcacaggtgaggccattatgttctgttccagagtccctgacacttcctacaggtttcctttcggcagtgaggattaggacagctgaacctcttcacatcactgtccaacagagccggaaagctacaggacgggcacctgacaagctcgtcggcgtaggctgccgcaacctcctcctcggcttttcgctcatagtacttatacaggatggtctgggggagcaccttctccagctcactggttgggaacgaacacgtgcagctgccttccatgcagctgagctccaactttccagatccaaagactgcctcttgggcatatctgatgagacactctttgcagaacaagtgagcatctgcgcactgcgtcagctcctccccatggaaattccccatagcagcgagccccttccgtgccgaattcggcgcccaggcctcgcctaccgggta

SEQ ID NO: 436132 - DNA, 879 bp, Homo Sapiens
ccaccatttgggacgtctttattatggatccgtccactcttccaggagcagtagcccttctaggaaaggggtgggaagaaaaccagcctacccttcaagctgacttaggatgcaatggtacagacaccagccttgggggagggttctccatccacactcctaccccaaacgggctttgtgctgctcaatggggattcggggccatcagaagcgatgccgcggctgggggccaaagtgcatgggcaggttgtgctccaggggcatgtggatgggaccggaagtcatagttgacccgcacgttgggcagagggggcacgtacggggctgggataggccccatgttgagtgggaagttgttgaacacaggccgcacgggaggcagggggaagggtgggtgcgcgaaggcatagggtggcatctgtggctgtggcaggttctgcggaacgggcctcgggagggcctccaccctctgcaccttctccacaggctttctccagcgggggtccaatgcgtttgaaggtgttctctccattctttcttttctgttcctcttcagcctccttctggatttcctcaataagcttctcatcatcttcagtgggatcggtccagagagagcatcttgaacactcctggcaaggggctcctggtgagcggggatgttggcagaacatggtcatatccattaatagaaactcgacagaggtagcacatctgggcaccacaagcggcaaggacatgcggtttgccaggcttcagatttgatgaaggccagtcccacaacttggtggcattttcttatgcgggcagccagacagtgttctctccaatagaggtaccggccctgatgtcgccctttcaagcagctcttccaggtga

SEQ ID NO: 436133 - DNA, 447 bp, Homo Sapiens
gtgtgagccaccacacccggccaaatcactgcgctttttaaaaagataaggtcaacgatcctagcccttgtctcctcctgcacataagataacgtctgacaggatcagtggctgtaatctatgacgagatggactcttgcaccgaaactttgacgatcggatttggctctaaggtaccccctgagccaggtgcagagcctccgccacccgttgataagctgaggcccgaaacattgctttggagcagtcgaactgaaactctgaaacaccctcccggattgcaatgctcaataggaatctgaataaaactaactttacttcttcgaaagcaaaattttcctttagttgactccttgaatctgggtgggcacttgtggtcacagtggaggctggatcccaaacagtgatgcagcttcctcttggttccccaggacacctgtgccgtgg

SEQ ID NO: 436134 - DNA, 292 bp, Homo Sapiens
  misc_feature (171)..(171): n is a, c, g, or t
actactcccagttctttggcttacggaaggtgtctgccatgctttgtgctttgggccgaatcgtctgagcaggctgggccttggaaaagttgcgctgcatgagcttggggcctcccagcagctgcagcctgtgtagaaggtggtccaggcttagggaacaggagtgaacanacttcagccccacctggcaggggctggctcccgaggttgggcccagtccctgagggtctgctctgctacgggtctgcccttgagtggccttccgtggagggtgtgtgaccaggtggatggg

SEQ ID NO: 436135 - DNA, 297 bp, Homo Sapiens
gaaggtccccccacgctccttctgcttcctcagggcaggtcttgagccgcctagcgtctaccccaccctcctgccccaggctcccaacactccaacccctttccttgacgggcccctttccgatcgtgctacagacaccgagggaaggacgaagcatcttttctgtgcacgcctcgcctgcgggaaaagctctcattccagctggcgttcagaaagacccacacaggtgccccacaaggctgcgaccgccgcccgaggaggagaagcttgtccccaagtgccagaaggggccagccc

SEQ ID NO: 436136 - DNA, 261 bp, Homo Sapiens
acttccaggcttccagttccctcctccagccacattcaatttcttcccatccttcccatctctctccttgaaagtcccagtggggaaaggtgatctcaccaggcttcaagttgctgcctggatggctctgagcagggctggctgtttcaccccaagctgagcaccatctgatcacctagaggcagtgctggggcaggctgagctctgacctgtaggagggatgctgacagtggctatgtcaagatgggagcctggcttctg

SEQ ID NO: 436137 - DNA, 402 bp, Homo Sapiens
  misc_feature (18)..(18): n is a, c, g, or t
  misc_feature (56)..(56): n is a, c, g, or t
  misc_feature (73)..(73): n is a, c, g, or t
  misc_feature (97)..(97): n is a, c, g, or t
ttattcctttggggcgtngaggaaaccctggtttggtgaagtccggtgctttctgnatgtgggtttcgtatcnggacaatctggcaacaaggagttnagataattaaaatcagaagtcttgttactagaagatatgttttgattattagattagatgaagataaggtagcaatgattttggaagaagtatcgctgaattgtttcattaactgcacggtattaaacaattcccccaagatacggataacgaacattaatttgctaaaccgcgtttcatttttttgtgaaggcaaacattgaaaccttaactgatttggaagaaattgctcgtataataaaaaatgtgaggtctacagctttgctctctgtagccggtgtgtattgagtcagacttacgtgact

SEQ ID NO: 436138 - DNA, 1437 bp, Homo Sapiens
aaaggctgcagatacaaccccaaggaagaaacaaaactcgaattctcagtctacacctggcagctctgggcagcgtaacgcggaaagttcagctgctgccttctcggcgaggggaacagctgaccttgcctccacctccccagcttggctattcgatcactgccgaggacctagacttagagaagaaggcttcattacagtggttcaaccaggccttggaggacaagagtgatgctgcctcgaactctgtcactgagaccccacctaccactcagccttcatttacctttaccctgcctgctgctgcacctgcctccccacccacctccctcctggccccaagcaccaacccactgttagagagcttgaagaagatgcagactcccccgagcctgccaccctgcccagaatctgctggagcagcaaccactgaggccctctcacctccaaagacacccagcctcctacccccgctgggtttatcacagtcagggccgccagggctgctccccagcccctcctttgactccaaacccccgaccactttgctggggctgatccctgctccatccatggtaccagccactgacaccaaggcacctccaacccttcaggcagagacggctaccaaaccccaagccacatctgccccgtgccccgcccccaagcaaagcttccgtgtttggagcacagaacacctcaccttccagccctgcgagccctgctgcatcttcagcatctcccatgttcaagcccattttcacggctccacccaagagtgagaaggaaggccccacaccgcctggcccttcagtcacagccacagcgccctccagctcctccctccccacgaccaccagcaccacagccccgaccttccagcctgtctttagcagcatggggccacctgcatctgtgcccttgcctgctcccttcttcaagcagacaactactcccgccactgctcccaccacaactgccccgctcttcactggcctggcagcgccacctctgctgtggctcccatcacctctgccagtccatccacagactctgcttcgaagcctgcgtttggctttggcataaacagtgtgagcagcagcagtgtgagtaccacgaccagcaccgccactgccgcctcacagcctttcctcttcggggcgccccaggcctctgctgccagcttcaccccggccatgggctccatattccagtttggcaaacctcctgccttgcccacaaccaccacagtcaccaccttcagccagtccctgcccactgccgtgccaacggccaccagcagcagcgctgccgactttagtggttttggcagcaccctcgccacctccgccccggccaccagcagccagcccactctgacgttcagtaacacgagcacccccacgttccgccatggctttggcacgtacgcgaaag

SEQ ID NO: 436139 - DNA, 369 bp, Homo Sapiens
tccgtagcacggatcgttgcactctcgagaggttccagttgactgttgacttggggtgcatatcggcggttgcaaaagatgagacactctcggaaaatccgtagtagagctccatgttttcttgtggtctttctcacctgagatatccgtgttggtcttcacgtgtactggacagcagggaccactgcaatttagggcaggcattcctgcatgagctgtgctgagagcctgctctctgacaggcatgtggaaagaagtcccagacaagccaggactgcttcacctttctttctttcttagatgctgcctcgaactctgtcactgagaccccacctatcactcagccttcatttacctttacccggccta

SEQ ID NO: 436140 - DNA, 3356 bp, Homo Sapiens
  misc_feature (199)..(199): n is a, c, g, or t
  misc_feature (360)..(360): n is a, c, g, or t
  misc_feature (533)..(541): n is a, c, g, or t
  misc_feature (638)..(646): n is a, c, g, or t
  misc_feature (692)..(705): n is a, c, g, or t
  misc_feature (710)..(711): n is a, c, g, or t
  misc_feature (716)..(717): n is a, c, g, or t
  misc_feature (719)..(719): n is a, c, g, or t
  misc_feature (724)..(724): n is a, c, g, or t
  misc_feature (728)..(738): n is a, c, g, or t
  misc_feature (740)..(740): n is a, c, g, or t
  misc_feature (742)..(743): n is a, c, g, or t
  misc_feature (751)..(811): n is a, c, g, or t
  misc_feature (813)..(813): n is a, c, g, or t
  misc_feature (816)..(821): n is a, c, g, or t
  misc_feature (922)..(922): n is a, c, g, or t
  misc_feature (1049)..(1073): n is a, c, g, or t
gtatgaagctggcctgggtatgatttctcctgcggcggcccactatactgttgtgcgcgacaagatggttgcggatagaaactatctatatacacctctgccgacgcgcgcatggcgtcttagtttgattgttgttggtatggccgccacccgttcgggcagactatatgttgttggtgacatataccacgcggacagnttggggagcatgcgcgaggttgccttctccctagctacctggggatcgagagaggagtgcgacagacataatagtgtcgtaaatcgcgaacgtcctgtggtgtataagcgtggcggtccctgccccgcgggcgcgcgcagagcattatacgaggatatganagcctagccggctgctgagcgaacactctctcattgtttgcctaggagacgcgcccaagaaaacaagtcccctcccgcgaggagacagcggtctccgcggcgggatgttgtgggcgtaacaaaaacactatcgcctatgtggcaccctcggggagccggtatgtctgtttgtnnnnnnnnnagacccgcgaagcccccttgttttttcttagtgggcgatatttctctactgcaggagaacaaccagggtggccgctattggtttgaggaaattattnnnnnnnnnccccagggccccaaaacgagtattttgtgtagagaaattttcttannnnnnnnnnnnnntggannttttnngnggggntaannnnnnnnnnntntnntttaaaannnnnnnnnnnnnnnnnnnnnnnnnnnnnnnnnnnnnnnnnnnnnnnnnnnnnnnnnnnnntnttnnnnnntttgatttggaaaaggaattttaaaccttaaattaaaaaaagaaaacattttcacacagaagaattatctgctttgagaaataaagaaattagaaggtgtnaaaaaaaatttttcaaaccccaaataatgataaaaatagatgtatcctctgtaaaaatctggactaaactattcagtcattcatggttattcagtattcagagcatgaagtgaaacaccaaagtatnnnnnnnnnnnnnnnnnnnnnnnnnggaatccgagatactgtcgtttgttgccggcctcggcgtggacgccccgaccatgggccacgcagggcgtctgcctcctcccaccttccgcagacctcaggccttcaaagctcttccttggtcctgctcagttttgtggcatgttcttctataaacttgctcaaatgctccagatctctgtctccaccctcaaatttaactgggttctttttgtccccactgggggcgaagtagatggtggggaagccctccaccttatagcggtcgctggggacgtcgttggcagtggcgtccatcttggcgatgaccaggcccttttggcccttgtacttcttggccaggctgttgtacacgggctctagctgcttgcagtgcccgcaccatggcgcgtagaactcgatgaggacgtccttcttggggtccatcacaatggagtcaaaggtctttcccaccacgaccttgacgggtcccttgttgttcttgggcactggctgggatttgatgactggcttcagttttccttttttgaaagcagtgacaaactcgcggagggtgtcagagtcaaactcctctggctccatggcgaacttcttcccactctcgtccaggatggcggcattgacatcctccccactctcgctgagccccaggtccttcacctccccagcatagtcctcttcgtccgcaatggcaaaggtgtactcagggaagtccttggccacctctaggactttgctccgccaaaactgagttgcagctctgtaatcaaagctgaagtccacactgtagtagacgaccaccagggggcgcctggtgtagcgcttagcatcgtttgacaccttgcggtggccaaccaggggcagggcgtacttcagcacgaagtccttgatggccgagtcctgggtggagccctggacgtccatcatgtggctccggggctcatacttggactggaatttctcaggctgcattacaaccaactgcccctgggagactttcaagaactttgctatttctgtgctgaaagtgtggtgaaatttgtaatcttctctcaggttgttagcggcatcctggtattgctggtaggctgggtcactctcccccttaaagaccccgatgatgatgacatcgtctccatccttcaggaactcctggacctgcttcagggtcagaatctccttggagggaggcccggactgctcgatcatgtaatcaacgattccatatttttctcgtgggccgttgtagtcataaggccttcctttgcggaaaattttcagggtgggatagccagagacatcaaacctcttggccaggtctgtttctgcggtggcgtcgacctttgccaggggaattggaggagaacgcttgctgagctccttggcggccttctcatactcgggggcaagtttcttgcagtgtccacaccatggggcataaaactccaccagaatgatatctgcatcattcacaacttcatcaaagttctctttggtcaacacaagcgtgacttctggtggaggcgtccagtcgggctgggagacttctctgaccttggcaacaatttcttcctgggttctggagccctcgtagtctacagcctgccccttcttaaggatcttgatggtggggtagccactcacatcaaacctgctggccagcacagacgctgaggttgcatcgatcttggcaacaggaatgggaggatctttatcctttaatatgttggcaattttttcatattccggagcaaactgcttgcaatgtccacaccatggagcataaaactccagcagcactgtgtctttgtcagccacaaaattatcaaagtttgcatcatttaggaccaagactccattttcttccttaacttccaagtcgtcttcttcctcatcatcatcttcctcctcctcctcctcttcatcctcaatggcattttctctgttagaagaatcctcgtccgggccctcggcacccgccacggccagcagctgcaccagccccaagagcagcaggagcaggaaggctttccggggcctcatggtagcgggggcggagcgcggcctcctagcgtcggcggccgctgagcgcaccgagaactcggggtctggccgacagcccgtcgctccttagcgacgcgggggagccggaaaaacccacggaagtcgtccccggcgattggcagggggcggaggaagtcgcgggccggccaatcccagactgacgccggcacggaccgcgcgcgcctcggccgctacgagtcggctccgccgccctaggccc

SEQ ID NO: 436141 - DNA, 296 bp, Homo Sapiens
cagcactttctgaactggctgggggatggggccatgcccattggacatctgggctttgttgtaatggactttgggaagatatggagtttgtgctgtatggacctgttgaaaaaatcatgcttgtgcttccggcttcctgcatagcccttggagtagaaggactgcattagctgccgctggagaagagagtttagtgcaaattttcctgtagaagccaggggtaggctggggcttgccagggatgagctgaaaaagtcttgacttaaccccgctggtgagaactggtgtgtaccatt

SEQ ID NO: 436142 - DNA, 1085 bp, Homo Sapiens
ggaatatttttgacctgtgatcagttgcatgcccgtacactgagcctgagcccacagatccggagggctgactgcgccacgtatctctaaactccagggcagctcagctttcctaacagctggaggacgggcgctcagagaactttaccttgaggacagaggcccgaagggggtgcggaagcaggagacacccctctgcctccgtttccggaatgcctgttccacgagcttggcttcagaggcagggtctattcgccaaaaggaccccttcccaggctcctcctgggaacgtgggactttgataaagtaacggttcaaagagaggttgtgccggatagaattctgccagcctttgtcggccgtccggtagtaggggtaatgcttggtgatgtgggcgtagatcccgctcagggtcagctgccggtcctgggcggaggagatggcctgcacgatcagctgcgcgtaggagaacggcggctttgactcatccttggggctgtctcctccagacgtgtctgcctgctgctccgacgcggcctttgctgcaaactctgctgccagctgcaggtccgaggtcacgttctgcacaaagcggtaactggaggagccggcaccgcgtggactggctgggcaggagttggggacactgatggtgcccgtcggggaggggacggggctgaccatgctccggaggtccggctccgggatgtggatcttcagaggggagatctgggggtacagtggccgcagcggggaggctggggcctcttctttgtgatagagcgacgtgaactggatcttgatggccgtgctgggaaaccggaaggtacactgcttgggcagctgcagggcgggcgcgccgcgtctctggaaggccccgtccacgaagacgccgttcttgccgaggcagcgcaggtagaagtgcggctcctggaagctgagctgcaggtggcgccgcgagatgaagctggacaggcccatgctcaagtccaccgagccctgcgacgagttgcggccgatggtgacgctgggctggcgcatgaggaactcgaactaacggccctccagccgcgccagcgccaaac

SEQ ID NO: 436143 - DNA, 1310 bp, Homo Sapiens
gaaaattttcaggagttccttcccctagttcttccccggggaaaaaattacaggcttcaaaaagaaccctccatatcccttttcccctccttttcggggggggaaaaaccttttcagggcgtgtccaaggttattgaaagtgaaaactgcaggagagctccttgagaaaaggtgatcatttcctatttatcctcatacttccagcacctcgttcaatgcaaatcacagatcacgaatgtttattaaatggacagtttttaagggactcaataaacagttgaaaacgtttgttgagagaattctcctctgtgccaaataagaaacaatactcaagaactggcagcaaacaacatccagaaagatgttagtcccaagaggctgccactgtctccaagctaaggtgcccacaaccacactggtcttggatgacacggcctggaagcgctggcaatcccgtcaaatccctgaactccgcccccaagcactttctttccaccttttcttccaactcaaagcctcttgcccaaagccaatttatgacacaggtttctaagcaatgcccagatacttccatgaagtacataacctagaaacagaagtggcaaaaagcatgccagatgccctctcttttcagccctttcttggtaaggaggatctaggcagggtcaagccctcaagcgtcccaccctgcagctcccactggcgtccgatccagactccaagccttagcagggcctcttcaaaacgccgaaggtggtggggaaaacaggaagcaccttcgcatcgctccactcgggggtcacccaacccagcatcgacccagcggacgctcggcagctcggggaggatgcgcggacaccgaacggaagcgtccgctcctctccgccaccctcccggggtcgggcgccgaagtgcgggaagagagggcgggccggcgagtccttccctgcaagcctggctcatctgctgggcctccgcccgagccgccccgcctcgcccgagcccggctcggggatcctcgggagggagcgggcggcccccgggccttccagtcctaccttccccgactctctgggctccatggccccgctttcggaggcccgtgccgccccctccccccgcggcctggccctgaggatgcagccgccgcgaccgccccggggacccaggctcccggagggggagggcacccaggtagggagggagcgcggcccaagaacttcgctctctcacgtcggggggcggtagcgccggtggacccaggataagcgcgctgagctgagacttgcgatcccgggaattccggaccg

SEQ ID NO: 436144 - DNA, 688 bp, Homo Sapiens
gtttcttatttggcacaggaggagaattctctcaacaaacgttttcgactgtttattgagtcccttaaaaaactgtccatttaataaacatttgtgatctgtgatttgcattgaacgagatgctggaagtatgaggataaataggaaatgatcacctttctcaaggagctctcctgcagttttcacttcaataacttggacacgcctgaaagggttgtcccacacgaaaagagagaaaaggataatgaggttcttttgatgctgtagtttttcctgggaagactaggaaggactctgaatttcaaaagaggtgatttctggcatgagcatctcttccatcctccctccctccacaagctacagtgatgcatgtagcagacacggcacctacagagtacatggtccaagccaataaagctcaacaaaaacccaagcaaagatggagcttatggcccttaccctttggaaatatccccagattggtttagattgaacctgaatttgaataaagagaagcaaaatgtagggggaagaaggattataaaatattgggattgatattggtatcagtgatttgaagttgatttccaagctattctgttcagtcagaggctttcttagccctttaacgggagaagagaaatacggtcatgcgctgtataacaaggtttccatcaacacccgctct

SEQ ID NO: 436145 - DNA, 295 bp, Homo Sapiens
cccaccagcatattcaaaaggcacaggtcccctggcaggtgcaaaagaaaatgtgccatggagatgaaactgggggagggagttacgagtcaattactacttatgttgaactaaaagaagcccaaggcatcagcttcggctcagtcttctccatacaccccaagctgctttccattctcactcagcccctgactattcctcccattcccctgcccagtacaataaaaacagcatgcagttagcttcctccaccccggaggctgaccaggaccagaatcgaggatccagaattctc

SEQ ID NO: 436146 - DNA, 173 bp, Homo Sapiens
aggaagagcatggcgggaggaagagggtgtagtgggaggaagggcatagcgggaggaagagggtgtagcgggaggaagagggtgtagcgggaggaagagggcgtagcgggaggaagagggtgtagcgggaggaagggcatagcgggaggaagggtgtagcgggaggccttggg

SEQ ID NO: 436147 - DNA, 824 bp, Homo Sapiens
ctggccttgagaaagcgttccctggtctgccgagggatcggggtggggaattgtccgcgcggtgagtacggttattgttacaaaacactgttttgtctcctaagtgacagtcccggctcctggcctggaggaaggtactgccgggcagccgcgtgggggctctggtgtggactgggctgctccacagtatcccctcaggatcagtgcttgtcctcttgtttctgagctttgtcctgctggtggatgccgtttgcagaaccggaattgccgatggttctgggccttgtcagggcagctcctcatgggcctccatcaagcttctccacctgctgagcctggtccagcgcattccggcagggcgtcctccgtgctcatcagctggtgctgcagccgcagaagctcgggcgccgaggacgggtcagatgagggagtagcagcctctgatccgacaggggtttctttttgtccagcccggtcagcttttcacgcaggccccggatgtcatccttgagtttctgctccttgatccgccactcagccttgtgtacctcacggctcaggtcacctctccggccctggggagtgacgattggcctaccagcagcaacaccacgcagttcgttacaggctccgctcacttccgcagcagctcctggctgatgaggactagctggcccgaggcgtcatgggtcttccgggacacggtctccagactctgccatccaggcgccgcttctcctctcaggagggcgtccaccttcttctcgcccacgcgtcacgcgacgcgtggtcgacatatcccgtaattccggaccggtacagcc

SEQ ID NO: 436148 - DNA, 1150 bp, Homo Sapiens
ttctgaagctgttgtcctgcttgttggatcccggtttgcagaaccgtgaattgcctgatgtgctgggcctgtgtcagggcagctcctcatggcctccatcagcttctccacctgctgagcctggtccagcgcatcccgcagggcgtcctccgtgctcatcagctggtgctgcagccgcagaagcttcggggctccgaggacggctcgatgagggagtagcgcctctgatccgacagggatttctctttgtccagcccaggtcagcttttcacgcaggccccggatgtcatccttgagtttctgctccttgatccgccactcagccttgtgtacctcacggctcaggtccctctccggccctggggagtgacgattggcctccagcagcaacacccgcagttcgttcaggctccgctccttccgcagcagctcctggctgatgaggactagctggcccgaggcgtcatgggtcttccgggacacggtctccagctctgcctccaggcgccgcttctccttcaggagggcgtccaccttcttctcgcctgacttacacttgctctccagcgcacttacttgggccctgagcatctcggtctgggaggtcaaggctgtcacctctttgtccctcttgttcagcttgtcctgcaggccctccacagtttccttcgtcctgatcgtctcctctgaaatgtcattcgactcaatcatgtgggtgtgctgggaggagcacagggcctcgaccgcctggagtctgttctcagccaccaggagcttctcccgcaaactctcgacctcctgtttgccctgggcttctgcccgctgcagccgctcgtagtccaacatcttcttctcggccagcgagatctgctccttgaggaactcgatagcctgcgcctggccccggtactccacgtccagtttttccagctcgtgcacacgcagctcggcatcccggcgctggtcctgggcctcctgcagctccagccggtgctggctggcttgcacctccagctgggcccgccagtgccgctgcagcccagccagctcctcctgggcctcctgcagcttctctcgcagggcctccttctccttcacgtgcatggcggtctccaggtcatgccctcgtgccgaattcgccacccaggcc

SEQ ID NO: 436149 - DNA, 1066 bp, Homo Sapiens
  misc_feature (980)..(1016): n is a, c, g, or t
atgaggaaaatttgttatctcaggcattggaccagtttactggagtccaatttttcagatttttctttgtcaaactgtttgtggagtggattccagacaatgttcttcataaagtgctcttttttgttcggccctgtgggcggaatttcagtcaatctcggccacctcagtatctaacatgctgaatatgtagcatcgatcaacgaacgagatcctcggtctcatgaagtcagctttctgggaagctccacgtccttatctcttcctcctccatccatggctccttcccctgctccaaactggagatcacagctggtttgctgacttgacaccctcttggggagaaacggttaaaggatttgtgctgagccagctgggccttccaagcaagcagacagttcagcccacagagagcaggtggctgtagttctccagcatcacatcctggtacagggtcctctgctccaggtccagctgctgccactctttccgggtgaagcccacagccacgtccccgaatgacagtgacccctgggccatggttcttccttgctgttgtgggaaagcaggtatctgcgtccaggtggtcacagtggcaggtgccctgcacaagcttccagaggacggtggggtccgaggaagggcagtgagatgaggggccagccgctgctccggacccactacctgtagcgtcccccaacccaactcggcagcacccgacaacccgcagagacgtctggaggagccgcccccaaggaccccagtacagtgccggctctgcagcaagtgggtgccggccacgctcgcgctgggcacagccccggagccagagcgccgccccccacaacgcgtgtctgaggtgtcagtcgccgtaggaagagtctggggtccggaagtgcgcgcattgcagtcctgcacctcaaaacactgcgtaaaagcccgctctcgacgaattcgagctcggccgatttggcctgatnnnnnnnnnnnnnnnnnnnnnnnnnnnnnnnnnnnnncgccgccaccgcgatgacctccagttcgccctatagtagtctatcattcc

SEQ ID NO: 436150 - DNA, 298 bp, Homo Sapiens
  misc_feature (86)..(144): n is a, c, g, or t
gctgtgatagttgagatgtaaaccaaaaataaaattggaagccacccgatccgactgaatggacccttcctgttgagcaaggacannnnnnnnnnnnnnnnnnnnnnnnnnnnnnnnnnnnnnnnnnnnnnnnnnnnnnnnnnnatcagactaagatagggttactacttgagttgctatggctccagctgaaagaaagcccgtgcagtcatatcacgcgtaaacatttgctttatgctaaaaatatggtggacctggcattacagctattacaaatctcctaagatgtctcgggtag

SEQ ID NO: 436151 - DNA, 1039 bp, Homo Sapiens
  misc_feature (45)..(45): n is a, c, g, or t
gggtgttgagcttgaagtccacagcgaagtaacggttcaccttcncacttcgccattttcgcttgatctccgcttgtacctcaccattcagaaaacagtagagaacagccaccacaaagccctggaaaggagcccagccccagctccaaacacgagtctttccccttttgctgacattctctggggagaaggcaaatactgtgtagtggattccgaatagtgggatgagcagcagggtggaccgggccagtcgcaagtagatgctggactcattgcctcccatgtctggagactgaagtttctgcacaaggatgacgataatgccaataaaaagcacaaagttaaccatgatagagccaaccacagggcctttgatcacccaccacagagctgtgctgtcattcatatcccagcagcctgtgtcatcaaagtagagtctcagcgtagcccacactgtcacacacacagttggggtcccccagccaatgatggtgtaccagtagaagtatctcctttcagggaagaaggtctccaccagcagagtgaagaggtacaggccctcgatgaacagccagaagtagttggacacaacacagtagtggaagaaaaccatgacggccttacattccacagtggagatgaagcagtggttgctgtcctgctccgcatacagaatccagtctttgatgaagacggagatcgccctcagcatgaacgacacaaacaggttcatgtggatgaagttgcgtgtgcagtgcagcttccggaagcgacaaaggatgaccatggcagtggtgagggtgacgagggatgtgctgtagccaaccgtgtagagggccttcactgacaggtagtaataatcctggtccccagtctcagattcatattcatcaaacccacaggcatcaaagtaatgagggaagggttccgaccagccatcctccgtgcagttccggctcaccactcccatgtctggagaggaatcattgaagcccatcagctccctcgtgccgaattcgccacccaggcctcgctcctt

SEQ ID NO: 436152 - DNA, 676 bp, Homo Sapiens
  misc_feature (617)..(617): n is a, c, g, or t
  misc_feature (664)..(664): n is a, c, g, or t
cagccggccacacaggcgcggagacccggctcggcgcgcgctcctcggcgcacacgctccccatccccgcgccgcgcgggccgcggacttgcaggctgcgcgtcctttgcggagtctgccccggccccacggacaggccccgcagtgagcagcccagagacacattggggctgacctgccgctgctgtcagtgggaggccagtggtgctggccaagaagtgtcatggctggtgtcgtgcacgtttccctggctgctctcctcctgctgcctatggcccctgccatgcattctgactgcatcttcaagaaggagcaagccatgtgcctggagaagatccagagggccaatgagctgatgggcttcaatgattcctctccaggctgtcctgggatgtgggacaacatcacgtgttggaagcccgcccatgtgggtgagatggtcctggtcagctgccctgagctcttccgaatcttcaacccagaccaagtctgggagaccgaaaccattggagagtctgattttggtgacagtaactccttagatctctcagacatgggagtggtgagccggaactgcacggaggatggctggtcggaacccttccctcattactttnatgcctgtgggtttgatgaatatgaatctgagactgggggaccaggnttattacttacc

SEQ ID NO: 436153 - DNA, 311 bp, Homo Sapiens
ttagagggagaagcatggctgtccccagaagttctttgtggccttggggcaaattgcctaaccatgctgagcctctgtctgtttggcttgagtgtgaacaagagcccatgtgtctggggcaggtgctgagaaagtgaccgtgactttgctgtcacctcttggagtatctctggcagagaagggcaagatgatctcagttggtgggtgtggaggctggacatgaaggggattggcaaaaaagtggtgtaattggcgggtggcctggggactcagccagctctgatgagatctgggactggagagcgtggggg

SEQ ID NO: 436154 - DNA, 290 bp, Homo Sapiens
aaagaaacgagggaggcatgtgaaattctgtactcttcgataaccccaagggaaactggccacgatgtagacgtcactctagtgatgaagttgttgagaaatgaagatgagaattccttgggccagtttctgtgcccatggatttgatgtctatctgaattttggagttagtaaacacatcagtgttacatagtttgaagggctcttgttgaaagccttgtgatacctgtagtagctgatgtgttattactaattctacacatctcctgggatatatacagctcctggga

SEQ ID NO: 436155 - DNA, 1294 bp, Homo Sapiens
gatcttgccacatggtgggaaataaaatgacagtgtcttatcgctcacgaccctctctgtcagtcctgatgccatcattttctgtagcgtcttctccttgctctgggctgccgggccagcttggcactgccatgaccaaacctcgcaatgtagttcttcatgtgtgcaatctgatcttgctcccagtgaaacctcttcatctggttctcctccagctctagccgcgtcttcacatactgatcataattacccgtataatacttcagtttcttgttgtgcatgtgaatgatattggtacagacaccattcagaaaatcctgggaatgggagacgaggaccaagatgcgcttaaaagtttttagttcttcttccaaccacacgcaagcatctaggtccaggtggttggtaggctcatccaggagcagcatgaagggccgaataaagagggctctggcaagggcaaccctcatcctccagcccccactgaagtcttttagcttcttgcgctgcatggcaggtgtgaaacccagtccatgcaagatccgcgaggccctcatctctgccttgtcggcatccagctcctccaggcgctcgtagagctccatgagcttctcacactccgcatcctcatgagccagccgctctgcctctttctccagcatgcccgctctgtgtcgacttccatcacacaatgcaagggtgtcttgtcactagggggcatctctcgagtcagatggtagatgtcgatgtgctcagggatgggcacttcacgcttcccaatagcagagagcagcatggactttccaattccatttaaaccaatgaggccataacgacggcctgagtttaattccagtttggtgtcactgagcagctcttgaccatgaaaggtaagtgagaggttgatgatgtgaacatcagtactgttggggtgagaggccaggacgccagtgacagctcgagcagcagctttcttcatctcaaagtcctctagctccttggtcagcaaatctacttctgtggtctctctgccattggcctcattcttctctgccacctgtggttctgtgacaacatctccattttcttcatgtccttttctgggccgctgtcgagctttggcagcctccttctttttggctgccttcttcttggccaggtcggagggcatgatgatgacccacaggggtaggttactgttgtttcagggagctgggcctcgctgctcggcctatgtcgcaacagagctgctccttaggatcctccgcgtgcggccggctcaccagccaatccc

SEQ ID NO: 436156 - DNA, 448 bp, Homo Sapiens
aaccagcccatagacttaatatataagcatatacaagaaaaagtctctccccactctgtacaaaagttgctgtctttgtgtgcattctattgcattttataagttttttgggggaggggagtcatatttgagtttcctgtaccttgtccttggtatgggtctgaattatataaggttcagagatagtggtgactgtggggtgcagagagttccccaggctgttttctgtccagtgggccccatgtgctggtttgtaggtgttgtagttaatatggtcatgaattgtgggcagcactactgccccctcacctgatacaccggacggagctgctgttgctgctgcggatgttggctgctggggatgtcttcgtccaccctggattatctcaacagtccgggcggctgtgactgtactccgctgctggtgccgcttacgaagtttatagaa

SEQ ID NO: 436157 - DNA, 842 bp, Homo Sapiens
  misc_feature (278)..(582): n is a, c, g, or t
attcagatcagctttccccacagctgtcatgtacagatgctaagttccagacagctacgatggaggcctccagtcaggcacctcggctgtccccagctaccctgttcgcagagactcccttgtgcacctggagcctagtaccatgagatccccaagatctggaccttgagaactttacatcctcctcacacgaggcccacggctcttgaccacccctacatctgtctctgcggcgataaactttccctctgtctggacttctggccagattttggtgnnnnnnnnnnnnnnnnnnnnnnnnnnnnnnnnnnnnnnnnnnnnnnnnnnnnnnnnnnnnnnnnnnnnnnnnnnnnnnnnnnnnnnnnnnnnnnnnnnnnnnnnnnnnnnnnnnnnnnnnnnnnnnnnnnnnnnnnnnnnnnnnnnnnnnnnnnnnnnnnnnnnnnnnnnnnnnnnnnnnnnnnnnnnnnnnnnnnnnnnnnnnnnnnnnnnnnnnnnnnnnnnnnnnnnnnnnnnnnnnnnnnnnnnnnnnnnnnnnnnnnnnnnnnnnnnnnnnnnnnnnnnnnnnnnnnnnnnnnnnnnnnncagactttaacagacgagctacacggtctaagccagctggggctcaccagcgccgggcaaggccagacctgcgacctgtcgagaagatgtggtcctccaggaaagctctacttcaacgacaaataggtggggttacgttcatttgggtgaaatgcatcagcttttaaaatcacagaatgaagtgagttcactgttaattaaagggtgccaaggtgacaggcctggaacaagagcccttcattttcaccaacaggaccagg

SEQ ID NO: 436158 - DNA, 642 bp, Homo Sapiens
  misc_feature (31)..(31): n is a, c, g, or t
  misc_feature (47)..(47): n is a, c, g, or t
  misc_feature (53)..(53): n is a, c, g, or t
  misc_feature (63)..(63): n is a, c, g, or t
  misc_feature (86)..(86): n is a, c, g, or t
  misc_feature (605)..(605): n is a, c, g, or t
tgcacccctaaatggtttgggaccattcctngtccaccattggatgntgttcncaaagtgggnttccaaccatatatatttatggnatccccaaccagtgtaaaaccaatagtgtaaaaagaagtgtgctgttccaggagtggttatttcctacggacctgaagtattagatgacttttagtcttttctctgcactttcatgtattttctagtttcctacaatccagcatgtgttattataaacaggaaaaggtttatctaaaaatggccacagtgactcagcagtctcccctttgccctctgaaggaaacactggcttatcattaaaggacatttaaaagctcattgtggtggaagtgtcattaccaggattgtttaagaaaagaaaaacaaaaaccagggaaggcccatggggaagtagagaagagtgtcatggggtttccaaccaaagatccatatgctgtcactgcaaaatgtttagggaaagaagcgaggactgacttccaccctctccatacacaagttcctgaattctgtccatagttcaacagaaagcatggatgggccatgccagcactgtgctgagcatgcatacgacattaaanacaaccctccctcaggcagctctgctgtcctaagatg

SEQ ID NO: 436159 - DNA, 308 bp, Homo Sapiens
ggcagctgaggggagggacaagggtcattagtccacatgggagctggctgaggctgatgcccagggataggggagctgagtgggtgcaggcccaggaagtgagcaattgccagtgacaccgggtggagggacaggtggaggaggagttgtgagctcagctgcacaggacattactccaaatggggctgaggagcaagggggacccccacactccccacatcccaatgctgaggcatgtgggtagggggctacccaggagggcttcagggaaaaagtgttctgaaggaagaggcaggagggtggtgaag

SEQ ID NO: 436160 - DNA, 218 bp, Homo Sapiens
ccacttggcgctgtgaggaccacaaagccttggtttcggtgttctggccatctctaaaccaggccccactttccgccatccagcctacctgcccgggctaagcaccagcctcgggggacctctggctagtccttggggtcacgcccagctccagagagggaggaggggagactacctcaacccccgcctctggtgacggtcagcagaggggacgctcc

SEQ ID NO: 436161 - DNA, 1044 bp, Homo Sapiens
ttttcaagatgttataagtttattctgaatctcattcaattgtgttcaatgtggctcaattctttacaaattaaaattcttgaatatatgttaaaaattaaacaatcttaatgtttcttccttaactagactggatacacgtctgtttaactacgcaaaaggtaatgctggcatggcttactgggaccctaagtgtggcgaagggactctgctccagtgaactggcgagtgtggaacctcctgacaccttctgaggacctcctgcctgccatgttgctgtggagctcgcactcctcaggcatcccctgatgttgagtgatacaaactctatcaccggaatcgatgctgctgcaatgacaagacttctttctggttttcagattctaaagtttaaaacaacgacaacaacaggagcgcttgaaagttacggtgcttctccctctccagtgtggactcgctgatgtttggaaagattggacttgctacagaaggtctttccacagtgatgacaccagtagggcttttccccggtgtggattctgtggtgtttattgaagttggagctgtggttgaaggctttcccacactccttacacttatatggcttctctccggtgtggagtctctggtgggagctgaggcccgcatgctgactgaagctcttcccacattcgttacactgataaggcttctccccagtgtggatccgatagtgacgaatgaggctgcctttcccgctgaaagccttgccacaatctttgcactgatatggcgcctcttctgtgtgcattctctgatgtttaagaaggtctgagctctgcccaaaagcttttccacacttacagtcatagggccggtccaccaagtgtgttctgtagtggagggtgaggtttgagctgtggctgaaagctttcccacacttggtgcacacgtaaggtttctccccagtgtgtgttctcctgtgtttggtgagatttgagctattactaaaggctttgccacattcagcacatatataacgtctctctcctggggtaggtttag

SEQ ID NO: 436162 - DNA, 365 bp, Homo Sapiens
gccctgagagcttctctcatggcactttgggactgtctgtttgcagtccatccctctgtgggctggtcacccctttacccccaggatagagactgtggtcaagctattcctgcacccagtgcccagcacacagcttgatgtggacaacagggaaccggcggctcacagaaaggtggggtgggagagaacagcttagaggcaaatgtctcctactttgaggactaagtccagagatgtagcttcaaggtccagtttctctgcttgggcctggggaaagcttttcactttttgggattttagtatgagcctggtgtccctccagggtccaggtgggcccttccattcaccccagccttagacccaag

SEQ ID NO: 436163 - DNA, 290 bp, Homo Sapiens
ttgagtgactctcttccctctctgtgcctcgacatttatttccccacatgtatgaactgtgagggtttagggttccctgagtcacagaagaaacaatcatatgagtttctgtaatgtgggggccacctgcacccaggtctctcagtgtaggcagaccttggcctagggacatgagagagcaggaagctgatttctggatgggtctgatggggggaagcaggagctgagtcaaccagcaaccacctcccaaatcctccttctgctcagggctcgtggactgtgcttcccat

SEQ ID NO: 436164 - DNA, 320 bp, Homo Sapiens
ggtgagggctctgccaagacccagtatgcatgagtagatggtgagggctctgccaggacccagtatgcatgagtagatggtgagggctctgccaagatccagtatgcatgggtagacagtgagggctctgctaagacccagtatgcatgggtagatggtgagggctctgccaagatccagtatgcatgggtagacggtgagggctctgccaagatccagtatgcatgggtagacggtgagggctctgctaagacccagtatgcatgggtagacggtgagggctctgccgagatccagtatgcatgggtagatggtgaggg

SEQ ID NO: 436165 - DNA, 390 bp, Homo Sapiens
tcagagaattgttttttaagtgaggttttgtgagctgagccttgcaagaagctctccaaggtctgtgggatctgtatatgactagagctcaggcttcactctggagagtaagtgcgatctccgttttctcctcctacctctccaaacactcctaacctacatttcttccagctctccttcctctaactgctcttgcccactttcctcttcctacgtgccttccttaaacttatccattcgcaaggtttctaacagtcacgaccagtaactcgggcgcacaagcgcctcgtgatgtaccgaaaccctggttgatctccaagtgtaaaatgcaggaactcttggaaaacgtagatagcctcaaaagtcaaccggtgtagatctgaaatggaa

SEQ ID NO: 436166 - DNA, 742 bp, Homo Sapiens
tatcgatgccaccttatctaatttcagaatccatggataaggtggcagcaaatagagcagatggtatttaacaacattaactggtggcatcgataaacacctgcagtttacatttcaaggcccaaacttatttatatatttacataaagatgctaccttgattaatcaatgtctattggcatttccacatgtgaatttcttcagtttggatattccatatgaaggagctacagtgaaaacactttggaataaagcagtgaaccctaagaatcttatcttgagatgagatgtgtgaaccaccatttgaatgttatttctccctgctgtgtacattagtctggctgggtgttggtcacagacatggatgcactgacggctattcccataaccgagccaggcgggaagggggaaaaggaagacattatttgtcaccaacaacccagtatcccaagtcaaaattctcaactatggccaaaaaggcctaaactcgacccacaggaactggctttctaactggttgacaaacacgtaagctgccctcctgcaaaagccaaccagagaacaggcaggtggcaacaggacccagcctagagcagagcacttcagaagaggatggataaatccatcagggatgctcagggcttcctgaccactgtcccgggtgaaggcactgccacattttctctcaacaaatctgttatgtccctggatccaattatttagcctaaggaatgtcacctct

SEQ ID NO: 436167 - DNA, 541 bp, Homo Sapiens
tcacgccatgtcacgatgatgcccacatccaccctctgttcagtaggtgccacgtccaccctccgtcctgtgtgaaggctctcggtgtccatgctcaacgaccacgatgatgcccacatccaccctcggttcagcaggtgccacatccaccctccgtcctgtgtgaaggctcttggtgtccatgctcaacgaccacgatgatgcccacatccacccttggttcagcaggtgccacatccaccctccgtcctgtgtgaagcctctcggcgtccacactcaacgaccacgatgatgcccacatccaacctccgttcagcaggtgccacatccaccctccatcctgtgtgaaggctctcggtgtccacactcaacgaccacgatgatgcccacatccaacctccgttcagcaggtgctgggtcctacatgaagctctcacatgctgacctgtagtctctgtggtccgtgagactcagaggctcatagcgtgcccagattcctgtggcttgtgacatggcgtgaggtatcctctagatcaccacg

SEQ ID NO: 436168 - DNA, 303 bp, Homo Sapiens
gtgcaaagatcctgcggcactgaggccaggggatggagcagaagaggaacggggtttgatggttgataaagcatccctccagctgccgttggcatggaggtgagtgaggagctacttcaccagtccaggcccttgagaatggggctcagacctggaggaggtcaacgtggcactgggaggtgccggattccaggtcttgtttggacggcagcccacaggaccggctgatgggttgagaggtagggtgtgggagagggaagggggctccaggtttggggtccactgctcaaggcaagaaggctg

SEQ ID NO: 436169 - DNA, 296 bp, Homo Sapiens
tgcttttcaactgaaaacagggaggggatcaactcttctctgttggtaaccagaggggaaggaggaaccaagtacacatcgcctccgctcaggttgagagaggaacgcaccaggatgggcaaccttgagaacagacacctggggtgtcgtcacgcccggtttacccccagggctcagacagtgcccgtcacaaagggggcgtccaacagacacatgagacaaacaactcaataagggagtgacccggttctcagagggcagccactggcagtgcaggacgcagatgcacacacggg

SEQ ID NO: 436170 - DNA, 295 bp, Homo Sapiens
agcacactttccaggctgagcatttccttttgtgcatcctctccaagccctgaacttactccagttggcctcttcagaccaagctctccctcccagtggcctctacaggccaaaattgtcctcaggtcagcctctccagggccaactcctagctaccggtggcttctgcaggccaaaatcgacctcaagtcagcctcttcacacccagctcttgcctctgagtggcctctccaggagcaaaactttctcaagtcggcctctccaggcccagcctcctgcttcccgagggcatgta

SEQ ID NO: 436171 - DNA, 943 bp, Homo Sapiens
ctgatccaagttcctttatttaagtgtactcgaaatgtcccggcttattatccatccacctttactttggggtcatcctggcatgatgcttgagcaagccatgtgttaacagggctgccctttctcttccggcatgacgggtctagcttaatgatgaactgtctgttgtgtaacatcctgtatttcttgtccgataatctagatcttcctcagtgactggtggtggttcaggaggctcgggaggtcgttggtcaggaggcagaattcgaggccggtctggttctggcgttagctccaagatcctcatatcttgatgctggatgaggtcatcttgtcccgacaccggagtgctaggttctggaggtggcctgagttgtaatgacgcttcatgtcccgatccattttccctctcttctagtagcacatctttctgctttgactgctgagcctttattaactgagtcaacagaactgcaattgcactctgcacagccgcctgggcagcatcagtctccactttaggctggatggtctgagaagaaggctgaattcctcccaacggtttcgaagactcctgttgtggtgttgatggatctgtctgtttttcaccaggtgccacatttgagctgccctgagatttcagctgtgaagatggcagcacaccctggggtgtgttggttctgctgtcatccaagcccagagacaagtccttcctgggggctttaattgtggaaacatcatcagtcatgcccatctgcttctgtcttcttcgctttttactccataactcatgacaatcttgccataaagggagatctggtggaggcatttttgagggttccacatctcggaggaactcgcactgaagagcctgttcagcagtgcagcgcttactaggatccaaggcaagcatgtaatcaaataagtctagcgcagctgcagg

SEQ ID NO: 436172 - DNA, 566 bp, Homo Sapiens
ttttttttcacacttttaccgtttataccaaaccaaaatcacgaaattcaaaatccgagtaccaaaaaattcaagccaagtcaaaaccaaaaccagagtatccagcaattcaggtcaagtcaaaaccagaacaagagtgcccgtgcaggcatgctgtgggtgatcaggccacgtttccactcagatggagtggggcaagttccaaagactagtcttaccaagtcaagccaagtcaaaaccagaacaaaagtgccaatacaggcacaccgtgggtgatcaggccacgcttccactcacgtggagtggggcaagttccaaagactagtcttaccaagtcaagccaagtcaaaaccagaacaaagatgtcaatacaggcacaccgtgggtgatcaggccatgcttccactcacatggagtggggcaagttccaaaaactagtcttgacaagcttcagatgtctggacttcaagtgccagttccttcccggtgttcagccagtgttaatccttctcgggagcctgctatgcgctgtctctgtggcaaggcattccacaggggccatttcc

SEQ ID NO: 436173 - DNA, 540 bp, Homo Sapiens
cttctcctcttctgggactccacctatacatatagacctttccaacagatctcctctgcctcatacactccatcctgtactttctctcagttttgatctgttactctgcctcattatttcccagggaccttcttccagcccactcatctgctcttccttcatactcaatgttttgtgatgcccatctattgagttattagattcagctctagaatttccatttgattactttgtttatagaatcaatttttctggtgaaattttccacttaccctttattttcttgaacatatcaaccacagttattttaaaatttgactgcaacaagtataataactatctgtgggtgtactgttgtcatctgtttttgtgtcttggttttgcttcttgacaactgaaattcagacattacatatgaaactgcagagactctgggtgagtctatcttcttaccttcctcctcgctagacagccagatcgagggtagatccccttaactcaagggaggcctgagacaagaagacagacccatcattcttg

SEQ ID NO: 436174 - DNA, 257 bp, Homo Sapiens
gcaagacacactggccagaaagtccctgcccactgaagtcaccgtgcggcgccgtaggaaatcacagtgtaccgtgtgtgcatgtgcggccgtggtggcattggagacaggttgtgggtaaacagacggggcccccacacggttcctcatggcccagctccttccagttctggggctctcgcaagccttcgtggccaggcctgacagtgagcgacctctgaggccatgacacagatctaagtgctctgggtgtggag

SEQ ID NO: 436175 - DNA, 325 bp, Homo Sapiens
gcaggagtgcagccaggacccggaagggggagcaggtcccatggccctcgtcctggcccatctgcacgcgaggtgtctgcagtgacgtcaggtgactctactcttagcatccagtctcatgacctccccggccagccttaccctccatgggaaatactggtcctccaggcgaccgattcccaggcaccctcggatgttcttgccccatacaaacagctctcctttgttggtcagtgcagcaaagtggctgagtccacatcggatgcgggaaacctggatttttgggttgaactccgtcaagctaaagagagtgggtggaatcatt

SEQ ID NO: 436176 - DNA, 2348 bp, Homo Sapiens
  misc_feature (461)..(461): n is a, c, g, or t
  misc_feature (463)..(463): n is a, c, g, or t
  misc_feature (484)..(484): n is a, c, g, or t
  misc_feature (537)..(537): n is a, c, g, or t
  misc_feature (555)..(555): n is a, c, g, or t
gagcttaaaaaccaaaaggcagaaaatagactttattccaagacagatttgtaaaagatgtttttaaagggaaaggcaagtcacgctactaaatcaaacattgttcacaatttctggatcttcctcctccgcctggcactgcagctgagccttggcggatatgctcggggccctcggcgcagaggaacttagcctcgattctcttcctgaggggcttcttaacttttccaagccaggcagtgagcgtggtgggaggctggggctggtgcctgcggacagctccagatggaatcccaggccacggtgcttctagtgtccccccagcgagcttgcggtgtggcaggcggccaggaagggccatgagcagggtggcctgaatgaaaaccgagggccgaagccagcctgactccctcgcctaagctggggctcggtccgaggcacacgcatggccttggccagananaaaccaagagactgccatganagaaagagcagaaacctcccgagcactgtgttcaagctaagctttcctaagangggcttctcaggggagangtgacaccagacaccgtcgcatgttacttggagagaacagagacgtgcgggccacagcggcccaccaaaggctgccatccaagctgagttccgcaggctttacttgtagttggagagggactttgccctgatcctcctggtaggtacccgctaagggattcaggacagagcgtcaccactgcacgcagggtcctccgccacccaccatccaagaaccccggggggctggccacgcgctggcctctgccaaggagtgccagtggttcccgggacggggccgcccaagcaggtgagggaggtttagatgaatgacttggccagggtcaccatgtggtccacgccacatgccacgtccacaggctccccaggcatcgtcaccctccatgggaaatactggtcctccaggcgaccgattcccaggcaccctcggatgttcttgccccatacaaacagctctcctttgttggtcagtgcagcaaagtggctgagtccacatcggatgcgggaaacctggatttctgggttgaactccgtcaagccaaagagagtgggtggaatcatttcagggacggcactttccactaggtttggacctttcccaagaattccatagccccagacaaaaacatgtccttctccgtttaacactgcacagcccgtgccaccgcatgcagcctgtcgcaccttccccactcctgagaagtgtaagcagcggggcacattcacctgtgtggagtcagtgacagaggccagctgcaggtactccgagtttccccaaccaaaaagtcctccgtcggcggacacggccaggcagcaatcaccgtaggtggcaacttggataacgttcactcccgccaggtctccacccagcttggtgggcgagctggtgatattgtagtgacccagacctgtttgcccatcagcaccccatccacaagaatagacttctcctttatccgtcaggaacagactatgatcctgaccacaggcgacctggaccacctggccatcgaagtcctgcatcctgtggactctgtgactttcactgtaaatttcattttcgaccacctttcttccacattgcccataagaattgtttcccatgctgaagactccttccctgtcagtcaacacaagagagtgagctcggccgcaggagacctgcagcacccgtgtctcctgaggtctgtccagaggcagggagacgggtgagggctccaacacatactcgtagcccctcgttttatctttccggctcctgtgaaatccaagctgagaatctttgttgagtcccatcccccagactttcgtaacatccgcagtcttagaggacagcagtgtgaatccatagccgcaagcagcagatgaaatcttttggtccagctccaggcgatagggcacgggctggatcctgcggcgcggtcgggcgccggcgcggggcccgggcccggagctgggcaccacaaaggaaggcacgcccagcgcccccgagaagctgaagccccacacgaagacgcgatcggcgcgggcagcgcgctcgcccacgtactggaccacgggcacctccgcctcggcttctgccgcttcgcgccggctccgggagcgcctggccgccgtccagtgccctcgccccagccccggcccgctcagccgccgccccagccgagccccagccaccaacgccaccagcgccatcctccgttccgcgcctcagcagcctctgggcgccgccatcttgcgtgacccttaacaccctcgtgccgaattcgccacccaggcctcgctacctaggc

SEQ ID NO: 436177 - DNA, 285 bp, Homo Sapiens
cagatctggggttcagccccctccccacgtccccggctagtaggtggtctgttcctgggcttcaatcttgagggaggcaggtcctcaaggtcctgggcttcatgtggagtccccatctccatccaccccaaggccacatggctgtcctcgtgtgactataggaactcacaccccagctctcagcttccacaggaactcacaccccagctctcagcttccacaggatactcacaccccagctctcagcttccacaggaactcacaccccagctctcagcttccaca

SEQ ID NO: 436178 - DNA, 842 bp, Homo Sapiens
  misc_feature (282)..(570): n is a, c, g, or t
  misc_feature (747)..(747): n is a, c, g, or t
atcaggccaaatcggccgagctcgaattcgtcgagagcggactgagtccttccacccgccagtccgcggggacagtggcggccgggatgtggccgagctcttctaccggaagctgacgggactgccaggagacgagtcccaggttgtcatggtaaccagtggcgggaggcgggtgaggagcggggtcccgtcgggccgggtgggcgccagctccctcccaggactggttcattggtagattccacttggggggtgcattccgccaaataaagctaacgtgannnnnnnnnnnnnnnnnnnnnnnnnnnnnnnnnnnnnnnnnnnnnnnnnnnnnnnnnnnnnnnnnnnnnnnnnnnnnnnnnnnnnnnnnnnnnnnnnnnnnnnnnnnnnnnnnnnnnnnnnnnnnnnnnnnnnnnnnnnnnnnnnnnnnnnnnnnnnnnnnnnnnnnnnnnnnnnnnnnnnnnnnnnnnnnnnnnnnnnnnnnnnnnnnnnnnnnnnnnnnnnnnnnnnnnnnnnnnnnnnnnnnnnnnnnnnnnnnnnnnnnnnnnnnnnnnnnnnnnnnnnnnnnnngggcatcaccatggcgtcatttcattcacttcggacacagcggcctctattgtggtggtcacaacttcagaaaacgtttctcccttcagcctcctagaactgctctccaggtgaggagggttgggctgggcacctggtagctaggaagggtctgagaggaaagagaaaatacacgcnccaagtgtttcctcaggttggccacccttctgggcgattactgtggctccctgggcgaggggaccatctcccgcaatgtggctctggtatacgaa

SEQ ID NO: 436179 - DNA, 1231 bp, Homo Sapiens
gatcaccagtcaagctccgccttgaggtgttgccaaagcggaggattcgatgagactcaaatttggtccagattcacagagctgtgaaacgagacttcatcgacccggattcctggcccataacctctcagctctgacttccccacacaaactcttccgtcaagccaatgcgcatctcagagccgctaggaaggaagctcttgagccgaatctctccctgcacatccaccttcagcagggatccattagatgctatcagtacagacaatctctcgaccacatccaaaaaaacttcattcttttggctctggtcagagcgactggacaggacggggcggctggctgcactgctgggggccactttgctctgttgtgtctcagccccaaacaagccaacgctgctgaggtcaaagaggctgaagggcttgctgaccacagcttccgtctggatgaaattcctcagcatctccgtggatgtggtctgtacatagccatagtccagcacttcatccaggagttcgtataccagagccacattgcgggagatggtcccctcgcccagggagccacagtaatcgcccagaagggtggccaacctggagagcagttctaggaggctgaagggagaaacgttttctgaagttgtgaccaccaaatagaggccgctgtgtctgatgtgaatgaaatgacggccatggtgatgcatgacaaccggggactcgtctcctggcagtcccgtcagcttccggtagaagagctcggccacatcccggccgccactgtccccgcggaagtctttgtagatgagcgggtcccccttggaggacagaatgaagaattgggaaatcatggccgttctggagagtagacaagaagacggcgaaagtcgggcctgccccgccctgcggccccggaacaaaagaacgcgtgtgcgctggccctttaagagcgattctcctccgcccgcgccagctcggaccgcgggaaacccggcgcctgcactaccccgcccggagattcccttccgacgcccgcaccgcctccccgtcactcattctaggcccgcacggtgattggcttgcggctagcgggaggtgaagaaggccgccttgtccgattggcccgcacgcagtggcgccggtcacgtggggggcgacgtttcgcgccaatttcggttggccggccacagtccaccgcgcggcacattctcagcttccccaggagcaagaac

SEQ ID NO: 436180 - DNA, 340 bp, Homo Sapiens
tgtgagccaccgtgcccagtctactgtacattcttattgttagaatcggtaacgtgcaaatattacctttcctggttttggctttttttaagtaaaaaagtaaaattcctctgtcccagcgatccgagtctccatccagtaggtacccattgttaacatttttactgtgtgcaaacacagataatacccagaattttttgactgttctacatagcagggtcacagcatatttgctttttaaaaagcatcttcttttctcttttatccattacatcttgcatagcattttgtatcgtgtaatttgcctcattctttagatggccttttttactagagtata

SEQ ID NO: 436181 - DNA, 400 bp, Homo Sapiens
  misc_feature (382)..(382): n is a, c, g, or t
acgaaaataagtttatttttggtacctagaacacagaactaagcatgaggaaaccgctgaacttctgttttatcgtaagagaagattctgctctgatgtccagctttctggacccactctctctctctcagaaacactggctttcccttcctatcttacttctccatcagctgctgaaatgcattttcccctctcctcacaaatgccgttgtcctggggcggccgtgcccataccttcattgcttcctgggcctgctctgtggctataaagggaaaaacacccctgccctgtggggagtgactcacgttccagcctccagctgcagctgagcagccgtggggacctgaagggaaagagggccatggtactttcccacaaggnggactttttccaacttaa

SEQ ID NO: 436182 - DNA, 358 bp, Homo Sapiens
ccccgactagcccgacgcttttctggaattcggtctgagttccgcgatttgggaatgtagttcaggccatcgctttcatttctggaagccaatttcagggtgggaaagtgggccagattattcctcgtcaaatgagtctcccagaggcacagttttgctaggaacgcccggatcaggtcatacatctgcgtgacgatttgggagtgtccttggagagagatgttcaaagcgttcagatgcatcgtcatgtcaaccaagaaggccaggtctcggatccaatctatggagctcagttgaggcaggggtttccctctggatgacatgaaggagtcgatttcttccaaggattcgaaaaatc

SEQ ID NO: 436183 - DNA, 1447 bp, Homo Sapiens
  misc_feature (53)..(53): n is a, c, g, or t
  misc_feature (67)..(67): n is a, c, g, or t
  misc_feature (71)..(71): n is a, c, g, or t
  misc_feature (78)..(78): n is a, c, g, or t
  misc_feature (133)..(133): n is a, c, g, or t
  misc_feature (1218)..(1396): n is a, c, g, or t
caggacccgtttctggagcctccgggcccagcgcctcgtgggtctcgcgtttnttcctctcctccancagntggccgntgacctgccggagctcctcctgcagctgctgctggcccttctccagccccccggncgctgctggtgacggcgctgttcttgtccttcaaggcaagctccctctgctgcagctcaaccacgaatctggaaaggtcttctggagtcctgatgctcaggcccatggtctggtccagtctctcccagctttgcagcttggccagcagcctctcgttctccagctccaagccaaccagcgtctcctgcatcttctcctggcgccccagcttcctctgcagcccttccagctcttcctggagcagcccgttggtctctctcatctcccgcaggtgcgcgctctcctcccgcagctgcttcagctcccgttccagcctagggagccgtaccagctcagacttcatgttcttcacaatcgctgcatcctgctcttgcagggacagcttctgctccagatccttaatctgctgctcatggtctgctcttgcttcttggctggcctggagttcctggattttctgattggcttcctggcattttttgtgttgcaggtccagctgctcctgcagctcctgcttctccgactccaggcgcttcacccgcatctcctggtccatcacgctccactgcagttccgagatcctccccttcagtgcgttgatggtctcgccagcctgggccagactgtcctctttctcacgcagcctcttgctggcagcatccaagttctgctgacactgcctgttgcgctccagctgctcctgcatcttctcctccgccccggcctcccgctcctgaagctgccggatgcgcgtcaggagctcctggttgcggtcgacctcacgctcgtagttcctggcactggtgctggctgctctctccagctccactcgagccctcttgtgactcagctccatctgcattttctcccgctccacctggatgaggtgggacttcgaacggatctgctctgctctttcctccagctgcatgctctgctggtactgcatctgcagagaacctggggccgaggtagaaatatccagtccagagcctccctccacacgctgagagatgaagttgttcaaagatctcagggtggataaaaccatggtgttttcccccaggtcttccatggttgctttnnnnnnnnnnnnnnnnnnnnnnnnnnnnnnnnnnnnnnnnnnnnnnnnnnnnnnnnnnnnnnnnnnnnnnnnnnnnnnnnnnnnnnnnnnnnnnnnnnnnnnnnnnnnnnnnnnnnnnnnnnnnnnnnnnnnnnnnnnnnnnnnnnnnnnnnnnnnnnnnnnnnnnnnnnnnnnnnnnncagccgctcgcagccagcttgccgccgccgctcggatctccctccgctccg

SEQ ID NO: 436184 - DNA, 1772 bp, Homo Sapiens
  misc_feature (368)..(368): n is a, c, g, or t
ttaatctgaaggacaatgatcgtccaggaccgttacacaggtgtaaaatacacctttgtacaactcgagaaattaaattgtttctagtaaatcacataagaaacacatatgctattgttataaaaattcaaatactgcttaggtctatggaatgtatttctatggccctggagagatgggcacagagggcagtctctcctcgatgcacccttatctgtgaggacagtccccccagcccctgtgcctccatccgggttccatcagcaaagggaagccccagagctggggcccggccttgaggcagagctggaagctgctacgcggaggggcctcagcccatggtggtgggggggcaccccagccacctntggtcccagctgccacctgtgcactccctgagcggaaatgcctgactcaccctaacgttgtccggtctgcagatggcggcggctgctgagggagctccttcccctcctcccgcctaccctgctagggctaggccacagatacacagggcgagtgggagtgtctaggggagaagattttatttcacaaggtgaggaacccaggctggtggccgacgcccacacaccaggctccgggacgcatggggtctgcacgtggagagggtgctggccgccccagcaggaagcccgacgtaggtcccagcgtgtctgtcagtcatgctgctgccctgtggggctggagaggcaggacgtgcacccagcctgtggctggcggggcaggggacctgcaggtcaggccaagcagagtggctccggctatgcccccgagcctgcaggctacgccacggtctggcggctgaagagctcgagggtgagcgagctgaggaaggcagggatgctgtcctggcgccgcaggtgcacctcgatgagctcgcccacggtgtgtgagaactctgtctccagtagctgcatcttggaacccgaggggctggtggccttgaagatgaggcagtcgcctgggtgctcggcgtacagcgaggtcagccggtactggttctccgtggtgatgtcgatctggtagccggtgagcgtgtagcaggccttgcggaactcctggatcttggtctggaaaacctccttgagccgctggttcttcagctcggcactctccacctgcttcttcagctctgccacctccttggacgatggcagactcgcggcggcagcctcaaggtcggctgggacggtgcctcctctctccatggcgcgcaggagcccgcgcagtcgctcgcactccgcctgcagctggctgtggtcctcgcgcaggcgctgcctggccacactggtggggttcaggctcatgtgcagcactttggtcctgctctggtcatagtcacctggaccagggacctccggccccatgacacgatggcagaggccgccgcagagggaagcggggtttgcagacacggctcgcttggccgctccctctgtgcttctcctgggaaggaggaggggaggggaaatccacccactcaggcccaggggagagggaggcggcagccctgccgctgggccggggcaggagaggatccgcgcagctcttcacaggttttctgagaaccttgtaaacctcagaggatgaagagacatcttgtaactctggctgaatcacagactcttggggttgaaaggattgctacttcatccagttttcacagccggggttaagataacccagtatgcagaatccagccacccacacgcactcaggagacccctctgacgggcggcactggctttccg

SEQ ID NO: 436185 - DNA, 810 bp, Homo Sapiens
  misc_feature (508)..(508): n is a, c, g, or t
  misc_feature (550)..(550): n is a, c, g, or t
  misc_feature (704)..(704): n is a, c, g, or t
  misc_feature (724)..(724): n is a, c, g, or t
ggaggcccttgggccagggggtttaaccgcccccacggggtttctggggcggggcctgaaaggaaggctttgaagggggtgaagccgacctcgaagggaaaggccaggggaatgcctgttcctgggcggccgccaagtgccccctcggatgaagctcgccccacgggtgtgtgagaactcggtctccagtagctgcatcttggaaccccgaggggctggtggccttgaagatgaggcagtcgcctgggtgctcggcgtacagcgaggtcagccggtactggttctccgtggtgatgtcgatctggtagccggtgagcgtgtagcaggccttgcggaactcctggatcttggtctggaaaacctccttgagccgctggttcttcagctcggcactctccacctgcttctttcagctctgccacctccttggaacgatggcaagactcgcggcggcagcctcaaaggtcggctgggacggtgcctcctctctccatggcgcgcaggagcnccgcgcagtcgctcgcactccgcctgcagctggctgtggtcncttgcgcaggcgctgcctggccacactggtggggttcaggctcatgtgcagcactttggtcctgctctggtcatagtcaccctgcagagctcgccgctccagctgtgcctccagcatcctcttttcctcctccagccgactccgctcgccttcnagctcctcgaccttcaaccntgacgtgtccgcctcctccctggagaacaggaagctctgttcggcagagctggactgagacttcagcatcttcagctccatctcca

SEQ ID NO: 436186 - DNA, 1343 bp, Homo Sapiens
  misc_feature (1331)..(1331): n is a, c, g, or t
gcccggacgcagggtcgcactgagaggtctgccccccagcagaagcccgacttagtcccagcgtgtctgtcagtcatgctgcttgccctgtggggctggagaggcaggacgtgcacccagcctgtggcctggccggggcaggggaccatgcaggtcaaggccaagcagagtggctccggcatatgcccccgagcctgcaggctacgccacggtctggcggctgaagagctcgagggtgagcgagctgaggaaggcagggatgctgtcctggcgccgcaggtgcacctcgatgagctcgcccacggtgtgtgagaactctgtctccagtagctgcatcttggaacccgaggggctggtggcctgcagagctcccgctccagctgtgcctccagcatcctcttttcctcctccagccgactccgctcgccttccagctcctcgaccttcaacctgagcgtgtccgcctcctccctggagaacaggaagctctgttcggcagagctggactgagacttcagcatcttcagctccatctccagcatgtctgctctttgtttctggcctcccagctcctccagggcctgcgacagctgagcctccatctcggcgctgtggctgtgcacctttctgcaccatatcctcagcctcccgcatgcgccgcgtcagctggggtgagtactcggccggggtcagctcgctgtcgtaggaccccaggatggcccgcataccgtcccgctccttggtgagcagcaggacccgtttctggagcctccgggccagcgcctcgtgggtctcgcgcttcttcctctcctccaacagctggccgctgacctgccggagctcctcctgcagctgctgcctggccttctccagcccccgggcgctgctggtgacggcgctgttcttgtccttcaaggcaagctccctctgctgcagctcaaccacgaatctggaaaggtcttctggagtcctgatgctcaggcccatggtctggtccagtctctcccagctttgcagctttggccagcagcctctcgttctccagctccaagccaaccagcgtctcctgcatcttctcctggcgccccagcttcctctgcagcccttccagctcttcctggagcagcccgttggtctctctcatctcccgcaggtgcgcgctctcctcccgcagctgcttcagctcccgttccagcctagggagccgtaccagctcagacttcatgttcttcacaatcgctgcatcctgctcttcgcagggacagcttctgctccagatcctcctcgtgccgaattcggcacccaggcccgctaccttataaccctgagantactgccatcag

SEQ ID NO: 436187 - DNA, 272 bp, Homo Sapiens
cacacctgtctgcttcctgagacagtcgttccctctccaaggctccctccccaaggctccctccccatgtagattccctatccctggccgttctgtgtcctaataaactccttgcctggggctctctcctgccctgcaacagctcctgacatcttccttcctctggcaaaatcttttctctttaatcaaaagagatcagcaactctggagtgatttccctgctgtctcatctcctcttgtcttgtccctcctgaggaccctgtcctgtcccc

SEQ ID NO: 436188 - DNA, 405 bp, Homo Sapiens
  misc_feature (73)..(170): n is a, c, g, or t
gagtgttgtcgcattcacatgtacatctgcatgtgtgtatacttgcttttgtgtgtggctgtatgtgcattcnnnnnnnnnnnnnnnnnnnnnnnnnnnnnnnnnnnnnnnnnnnnnnnnnnnnnnnnnnnnnnnnnnnnnnnnnnnnnnnnnnnnnnnnnnnnnnnnnnagacagccacaggcaggctggaagggctccttctgaacagctaacccactgctgcaggcagggcacacgggaccccgacctggccagccaggactttgtcttccaggccatattgattcactcaggggtgggcacatgatcctggccaggccaaggagcttcaatactggacttttgctagcaaacctgggaaggaggtaccttctgctgggactgccacactagtggccaggag

SEQ ID NO: 436189 - DNA, 430 bp, Homo Sapiens
  misc_feature (317)..(372): n is a, c, g, or t
caagctcctgccgacgtgtatgcataaagttttattgaaaccaccatcgtgtccatttgtttatggcagaactgagagatggcagcagcaagtgtgtgcctgtaaaacctaaaatatttactaattggctctgcaagaaaagagtttgcatccccctaacctagaacagtgtctagcctctagtatgtgtttagcctacagtatgtgctcagcgaatacagtctatatttattactgcttttatgactgttataattactgtgcttggatttcgttacaaagtaagtcacaatgtgcttgcttctgttagtatttcnnnnnnnnnnnnnnnnnnnnnnnnnnnnnnnnnnnnnnnnnnnnnnnnnnnnnnnngtcctttcaattccttaacgttgatgtcattttcaatagtattttgagccaaacttaa

SEQ ID NO: 436190 - DNA, 651 bp, Homo Sapiens
  misc_feature (485)..(515): n is a, c, g, or t
  misc_feature (538)..(538): n is a, c, g, or t
  misc_feature (565)..(565): n is a, c, g, or t
  misc_feature (579)..(579): n is a, c, g, or t
  misc_feature (606)..(606): n is a, c, g, or t
  misc_feature (632)..(632): n is a, c, g, or t
agcatgagccactgcacctagccaagaagtgtactttttgtttaatgattaccgaaagaagttctcctttagaagcattgacttatacaaattcccacattcacctcagttaatatcttcctttagggattcttggataatagaaattcttcctaaaacatactcagagatgcagctcattattaaattaaggtaaccacattctgtattgttgctagcttttcatgtaaacattattcacactttaaaggattaggtgtttaaatattgatggtcatctttgtctggtgttaggtgccagacacctggctgctgaatttgttttttccctcaccaaagttgtcatttggaacgccagctgggaggactttgaaggaaaagaaaatatatgacaataggcagtattgacacattgtttaaaatctttttcacaataaaacaaaacacccaagttgtcatattgttaaagttggaaatctataggnnnnnnnnnnnnnnnnnnnnnnnnnnnnnnngattctagatttcatggccagancacaaattcacgtttcttgtcccaggncaggggaatttggnggacaaaatgggtttattacccatttnaataaccgtgggaaactttttcaaanctacaagtgttttacaccc

SEQ ID NO: 436191 - DNA, 1474 bp, Homo Sapiens
  misc_feature (1309)..(1309): n is a, c, g, or t
  misc_feature (1312)..(1312): n is a, c, g, or t
  misc_feature (1322)..(1323): n is a, c, g, or t
  misc_feature (1327)..(1327): n is a, c, g, or t
  misc_feature (1331)..(1331): n is a, c, g, or t
  misc_feature (1333)..(1333): n is a, c, g, or t
  misc_feature (1340)..(1340): n is a, c, g, or t
  misc_feature (1345)..(1345): n is a, c, g, or t
  misc_feature (1356)..(1356): n is a, c, g, or t
  misc_feature (1362)..(1362): n is a, c, g, or t
  misc_feature (1371)..(1371): n is a, c, g, or t
  misc_feature (1376)..(1376): n is a, c, g, or t
  misc_feature (1379)..(1380): n is a, c, g, or t
  misc_feature (1391)..(1391): n is a, c, g, or t
  misc_feature (1393)..(1395): n is a, c, g, or t
  misc_feature (1399)..(1401): n is a, c, g, or t
  misc_feature (1404)..(1407): n is a, c, g, or t
  misc_feature (1422)..(1423): n is a, c, g, or t
  misc_feature (1438)..(1438): n is a, c, g, or t
  misc_feature (1440)..(1440): n is a, c, g, or t
  misc_feature (1445)..(1445): n is a, c, g, or t
  misc_feature (1454)..(1454): n is a, c, g, or t
  misc_feature (1459)..(1459): n is a, c, g, or t
tggccttggactaattcctaacacacttgctttctgttgcagctgaccgtccacgcccaggtgacctctgcccaccctcgaaggatggggatgcatcaggcccaagggctaccaatgacttggttctgcgccgggcgcggcaccagcagatgtcaggggatgtggcagtagagaagaggccttctcgaactgggggcaaagtcatcaaatcagcctcagccactgccttatctgtcatgattcctgcagtggacccacatggaagttcaccccttgctagtcccatgtctccacgatctctgtcctccaacccatcctcacgggactcctcacccagccgggactactcaccagctgtcagtgggctccgctcccccatcaccatccagcgctcgggcaagaagtatggcttcacactgcgtgccatccgtgtctacatgggtgacacggatgtctatagtgtccaccacattgtctggcatgtggaggaaggaggcccagcccaggaggcaggactctgtgctggggacctcatcacccacgtgaatggggagcctgtgcatggcatggtgcatcctgaggtcgtggagctgatccttaagagtggcaacaaggtagcagtgaccacaacgcccttcgaaaatacctctatccgcattggtcccgcaaggcgcagcagctacaaggctaaaatggctcggaggaacaagcgaccctccgccaaggagggccaggagagcaagaagcgcagctccctcttccggaagatcacgaagtagtcgaacctgctgcatactagccgctcgctgtcgtcgctgaaccgctcgctgtcatccagcgatagtctcccgggctcgcctacgcacgggctgccggcgcgctcgcccacgcacaggtaccgctccacgcctgactccgcctacctaggcgcctcatcccagagcagttccccagcctcgagcacgcccaactcgcctgcgtcgtcggcgtcgcaccacattcggcccagcacgctgcacggactgtcgccaaagctccatcgccagtaccgctctgcgcgatgcaagtcggccggcaacatccctctatcgccgctggcacacacgccgtcccccacgcaggcgtcaccgccgccactgccgggccacacggtgggcagctcgcacactactcagagcttcccggccaaactgcactcatcgcctcccgtcgtgcgcccgcgccccaagagtgccgagccccctcgctcgccgctcctcaagcgcgtgcagtcgggcgagaagctgggagctctttgagtgcggacaanaanggcgcgctgnnaaanacancntcgaggngggcncccggatttcngcaagncttcatggngagtnggnntgcataccttncnnntccnnnggnnnngccccaggcgggggnntgggggcccggaagntncgccncggctgggngaagngtacctttacctggg

SEQ ID NO: 436192 - DNA, 1379 bp, Homo Sapiens
gcatctgcctggggcaaggaggggtttatagggcccccgaaaaatattttggaaagatggctttgaaacaagccccgcccaagggggtgctttcctcccccccctccaacacccagggttccggtccccgggggcctctcgggaccgaaagggccccagggttgcggttttctgccacccccctggagcccgcgccaaaggtttaaggcaccacactttaagccccgggccggcccagcctttcagacaaatgggaccaaggggtggggcccgcctcgccaaaaattgctgcgccggctttcttgtgttcctgcccggggctcagccccgccttgccacagccctggccatcccgccagtccatccctccgtctgcccgttctgatgccgcgtcaagcagacgtcccgctccagggtccggcccccggggttcgtcgcgcggggtggggtgcacgcctcggcgccccccggggattccttctccttgctcgaccctggtggcctggaggcaccctcgggcagcaacgggtccgcgcccaggctcaaaggtgactcctgtcggcccaggcggcggacggcgacctgccggggcgcgccaaggccctcgactgggggcgtctcaccgtcggactcggcaaggctatgcagcgccagctcgccatggaagtccttgcggaaatccgggtggcccacctcgaggctgtgtttgcgcagcgcgcccttcttgtccgcactcaaagaggctcccagcttctcggccgactgcacgcgcttgaggagcggcgagcgagggggctcggcactcttggggcgcgggcgcacgacgggaggcgatgagtgcagtttggccgggaagctctgagtagtgtgcgagctgcccaccgtgtggcccggcagtggcggcggtgacgcctgcgtgggggacggcgtgtgtgccagcggcgatagagggatgttgccggccgacttgcatcgcgcagagcggtactggcgatggagctttggcgacagtccgtgcagcgtgctgggccgaatgtggtgcgacgccgacgacgcaggcgagttgggcgtgctcgaggctggggagctgctctgggatgaggcgcctaggtaggcggagtcaggcgtggagcggtagctgtgcgtgggcgagcgcgccggcagcccgtgcgtaggcgagcccgggagactatcgctggatgacagcgagcggttcagcgacgacggctatgcggctagtatgcatcaggttcgactgcttcgtgatcttcgcggaagagggagctgtgcttcttgctgcgggacagggagggggccaagcgtccttgacctggacgccagagctcagggctcctcccatttcacggcctcacaacggt

SEQ ID NO: 436193 - DNA, 609 bp, Homo Sapiens
cacggaaaagatgagcgtgatattattcctctttgtggcgggcacgcatcagggcagtttgacaaagagcagatgttcctgtctttacgaacggactgagaccgctccagacatctgagatgaacatgaagagaaaggaattttcaacaatggagcaaacatacattctcagcagtgtaaagagcagagcgccagaggcaaccgtgtacttctggtgtacttctgcgtgcacgttggtgtacacaccctctggggaggtgaactagcaggcagcttggcaagaagtcgcctgcggtgttctgcgtctcagcccttgttcaccatagtgctctgtgtgaagttggacacatgcatctacctttctggacttcagtctcctctccactccccgaaggcagggcagagcagctgtatgactccttctcagatctgggcttagtccttacaagcttctgttgcattctccagctcctgcagtggccttccctcaagacgatgagaagcttcttggcctcctctttaacactgggtgctatttaatgggggcacctcaagatcctcccagttaccacgattgctggtggcatcgataaacaccgggtaccgagc

SEQ ID NO: 436194 - DNA, 727 bp, Homo Sapiens
  misc_feature (50)..(50): n is a, c, g, or t
  misc_feature (515)..(524): n is a, c, g, or t
  misc_feature (568)..(641): n is a, c, g, or t
agatcctgaagggttggtgaaatgtcatttaggaacaggggaagttaggncctgggggagtcctccaggcaatagaaaacaggatttatgaagatgagatggtgcctgacacaaagggcttggatgggtgcagattggaagccaccagaaggctctagcccaagagaagactggatacattggcagattcttctggctgccttgtggagtagaggacaggaggaggtcaagggcacggggtggggaatccagcctggaagtgactgcagcctacgctgagagagccgtggtggccaggaccagctgaggcagcagcgtggatggagagagaggagggatgcagagatgtttaggacatgagctggctggtgatggatagcatggggtaggctggtggtggtgagggggtccagggtcccagctgccactaggagggtgggtaggtttggggacaagcccttgtctttctgatccttgttcaggtgagatccccctgcacaaatttcacctgctgnnnnnnnnnncctgagccatttcagactgcctcctggggatgaggtctgcatgnnnnnnnnnnnnnnnnnnnnnnnnnnnnnnnnnnnnnnnnnnnnnnnnnnnnnnnnnnnnnnnnnnnnnnnnnncaagagcaaaactccatctaaaaaaacaccaaagaatgaaaaaagaaatgagtgctatcaaggaagttaccagttaccagtgcgct

SEQ ID NO: 436195 - DNA, 1822 bp, Homo Sapiens
ttttttttcacactgcaaaacaactttttatttaaaaggccaataatgagaataatgagttgcacaagaatgaaaaccttatcccttccaaaagatcggcctatacattatgtataaagttagaataattctaaatacaaaatgccaaagaccagcgggtccactccttcctctcctaagccatcttgacagtttcacatttcagcttccagacgtcatttctgttgcttttaagggtgcttacccagccgtggtctgtaccagacagggtagttggcacagcgtaggcactgccagcaggcccttgggagcttggcgaggtgggagccttgagaaatagctggctcggacccatggcggggtttgtgtgtcaactccctggtcctcagagaatccgagccacgggagagcaaacgctgcttccaaaaccaaaggaggaattttgcaatcgtttagacgggttataatagaatctcattcagatcttgaaggttatcggtgctttctgcaggtttttattcctcaaaaatgcagccaagctttgctgtgcttatcttggtggatctgagctaggttgggctatcttttcctaattcaattgccttttttttgcaaggaagggggtttctggtccatcggagggatcaagggcatggtcctcacgtctcgtcaggagacaaaaatagacattcagcagacagaccacagccagcgcatgcgaccagcgtcgtttggctattttagtctcttcttaatacacagacaaacgagcaaagaaaaagctactttgtccaacaccgggccctgggttggagtttagccctgcttggctctgcccgctagtctcagtcaggtcactcaccccaggcctgcgggaacggtggtcttggtggtcttctctggcccttccacctcttctgccttgtggggaccacccaagccctctcccgacttgcccagaggctgcacgcctctctggcatcacagtccgcacggagcctggctgtaaggctccactgaaatcccccccggcgctggcttcctgccccaggcacacccacctcacttctgcctcttttctgctggtttctggcctgtttggtcccagcccctccctgcactctctccgcagctgtctggtgggtgatgtgaaccaagggacacccagggtcatggcactgcctggattcagtttggtaatcgtcggcagtctgtccctggcttctgagcctggggcctcctcctctttctccccatcctggatgagcaggacacgctggggagacagcgtcctacaaaggcctcctaagagctgtgccctgtgccaggaaagcctcctgtatttccaaggatgtccctggagccctccagctggtgcctctgctgaggtctgtgagcagcgggaataggcctctaggggaggagttggggacaggcctctaggggagagcacacctccgggtactgcacctgtggctcaccagccacctgcacggggccagcttcagcctcagcagtgtcagctcaacagacgtgactgctgtcaacacagtggggccaggccctggagactgacatctcctgtggctgcttgtttaaagggcatgggatagagaaagagtgtgttattttaaagctggactacctaacagcctctgatagcagatacagctttgctgctgttcttgaagttcaaggtgatgtggaggtgttgcagtgacaatcagtacaccgtgaacaactcctgccaccaacgtcgaccctgaagtggtagatggggcctgctttggcacttgacgctggggcaggagtccctttcttg

SEQ ID NO: 436196 - DNA, 448 bp, Homo Sapiens
  misc_feature (25)..(25): n is a, c, g, or t
  misc_feature (35)..(35): n is a, c, g, or t
aacatgactgcctgtccaaacacantggggcccangcccctggaaaactgaacatctcctgtggctgcttgtttaaaagggcatgggaatagagaaagagtgtgttattttaaagctggactaccctaacagcctctgaatagcagaataacactttgctgctgttcttgaagttcaaggtgatgtggaggtgttgcagtgacaatcagtacaccgtgaacaacacctgccaccaacgtcgaccctgaagtggtagatggggcctgctttggcacttgacgctggggcaggagtccctttcttggggactcactctctcttcgtctcccccgggagttgtctactttcctagccctgccagcagcccccaacagtccgcccagcccactccaccagcttgctgctcccatgctcagccccactcacagctcacccctcccatgctagc

SEQ ID NO: 436197 - DNA, 459 bp, Homo Sapiens
  misc_feature (67)..(67): n is a, c, g, or t
caaggcacactgcaaaacaactttttatttaaaaggccaataatgagaataatgagttgcacaagantgaaaaccttatcccttccaaaagatcggcctatacattatgtataaagttagaataattctaaatacaaaatgccaaagaccagcgggtccactccttcctctcctaagccatcttgacagtttcacatttcagcttccagacgtcatttctgttgcttttaagggtgcttacccagccgtgggtctgtaccagacaggggtagtttgggcacagcgtagggcactgccagtcaggcccttggggagcttgggcgagggtggggagccttgaggaaataggctgggcttcgggacccatgggcgggggtttttgttttcaactcccggggtcctcaggaggaatccgagtccacggggagaggcaaacgtttttttcccaaaaccaaggga

SEQ ID NO: 436198 - DNA, 310 bp, Homo Sapiens
agcagagaagagggccagccacctccatagaggcagggagagcagccgagctggagccggaggattcctggacatggagaaggcctgcagttttgtcaaggaagcaagcaaagggtctctttctactcgatgaagttcgctcccaggaccccgggcagcggcgggtgctggaccgggctgcccggcagcgtcgcatcaaccggcagctggaggccctggagaatgacaacttccaggatgacccccacgcgggactccctcagctcggcaagagactgcctcagtttgatgacgatgcggacactggaaa

SEQ ID NO: 436199 - DNA, 1058 bp, Homo Sapiens
  misc_feature (65)..(73): n is a, c, g, or t
  misc_feature (115)..(189): n is a, c, g, or t
  misc_feature (237)..(275): n is a, c, g, or t
  misc_feature (288)..(303): n is a, c, g, or t
gcaagccggcagatttcctccccagaaaaaaaagggtttcccaggaagttcctttgggatccccnnnnnnnnngccccgctcctttaggccgggtaaattccccgggtactgcannnnnnnnnnnnnnnnnnnnnnnnnnnnnnnnnnnnnnnnnnnnnnnnnnnnnnnnnnnnnnnnnnnnnnnnnnnacccactttgtacaagaaagctgggtcaggaaacagctatgaccatgnnnnnnnnnnnnnnnnnnnnnnnnnnnnnnnnnnnnnnngcctcgagttttnnnnnnnnnnnnnnnnttttttttccggcacgaggctttttattctaacagcactggggggcccagcctacctgccagacagttcccaggagtgaggctggtctttcctggcagataagacacagttttgttgggtgaatgagcggctcctcccttggtccaggaagagctccccctgcattgggtgatgaaattctgtctttctgaaggccgggcagtgcacagcggcccttcctctctgggaatgcccaggctcacacagtccacttcagacacctggtctcctggtgggtccccagacagcgcacagtgcagtaccgggcaccgcagctgacacaggtgtagggggatgggaagccacagacagcacagaaggggcgctggggccgcgatgggggtcccgcacaggccgtcaggtagttagggccctcggccacactcaagttctgctcctccaacagggcctgaaagttttttcggaagcgaagtttaaaatgatcacctcgggttttcttctttttctttccagtgtccgcatcgtcatcaaactgaggcagtctcttgccgagctgagggagtcccgcgtgggggtcatcctggaagttgtcattctccagggcctccagctgccggttgatgcgacgctgccgggcagcccggtccagcacccgccgctgcccggggtcctgggagcgaaccgaagttttcttctccaccattggcacaacacaactgtcggaagaaaccctcgtgccgaattcgccacccagc

SEQ ID NO: 436200 - DNA, 1722 bp, Homo Sapiens
  misc_feature (79)..(121): n is a, c, g, or t
gtgtctggggaggtcagcgtcagagcacgctgctgagaggtctgagtcctgctgatgcctggagtcgcggtctcggggnnnnnnnnnnnnnnnnnnnnnnnnnnnnnnnnnnnnnnnnnnnaggatgttctgggatcactgaggacctattaactgaccagttttggacagaagctgaagcattaacaggactagctctgttgacactggaattcccgttaggactcgacatggaactgcttggcgtgtctttcaatggtccagtcccatttaagtgaggtggattctttatcatgtgagagggaatctgtggtccgataaagcctggcgcagcctgtttgttggtgacaacccgctgactgatgacggggcggggagacggactgtccggggctatgggtgggatgagtaagttcacctccatttttcacatcatgggacctgatataaaagagcacataggcttgttggctgagtaccgatctaatatcactggtagatacaatggagtcattcatttgataccagaggccattgctagcttttatgtagcagaagtaatggccagcatggcaattaaagccaggtgtggaccagcactgcatccaagacgtagccaattggctctccgttgggttgagacatatatggccgaatatcaagatactcaggggtatttcacatccttagcaatttttccaccggtaaaatttgcaaaacgtttcagagaaagtgtaagaacattagaggatctatggatagtgaacctctttgaagctggaaccatctttttacacttgctgcacttgtacgagttttctccatcaagctgttccggcttcacaaactgctccaatgccttgttgacactctgagcagcctttatctccaatgttatatcaagatatggatcaaaagtatctgaaacgcccttgcaatttaaacatttgactctagatcttaggtatcctccaaatatctgacaaacaagagtggtggcctgggtgtgtctgtctaatttattgctgccattcaagcatgctttctgcatagcatcaacagtgtattgaaggaattcatgggcatcttcttggtttccaaaacggaagtgcctagctatacgccgcatctcattgatgacaaacattggtttaataacgtccccaggattactgagtgcctgggtaatatgtgcttgcattgtacacatcatacaaaagccttctgcatgacatgttttggagtgttcatgtgatagcatgtaattggcaagaggtggtgtgtaggttaaacactgcagtgctgcattggcaaaacaggtattgcccaaattctggagcccagctccaactctatgagtttgttgccacttaagacaaatcttctcagatgggaaaagaactttctgtggaggagcgatgccatcacctagggcttgatccttttgtggtgatggttttgatttatcaggtacagatgaactcgaataaactacagcaccaggtactggtcctaaagaaagtgtgtgatttgacacatcattcaatgaagacacagcaccccagctggcagaacctgcatccatgtctccaggtgagactgcctcggagctgccaggctgattctgataggctgatgggtctgaagattcagaagctttgtcaactatggtcattgttcaactctgacccggctcggcgctcgctccatccccctcggccg

SEQ ID NO: 436201 - DNA, 405 bp, Homo Sapiens
  misc_feature (62)..(112): n is a, c, g, or t
cgtcagagcacgctgctgagaggtctgagtcctgctgatgcctggagtcgcggtctcggtgnnnnnnnnnnnnnnnnnnnnnnnnnnnnnnnnnnnnnnnnnnnnnnnnnnnaggctcttctagaggatccttctgttcgctcctccgggctttcttttcaacatgactgtcactgttctccacactgtcgtgtctccgtttccgggactttccattttcgtgttcgtgaaaccgatcagagaggttacagttgtctccggctacaagtgcagttctgtcgtgggagaagcggtcggggtgcggggcgagggcgtggggcgcgcctgcgcgggggctgctggggcggtgccgctccctctcccgggccggctcgcagcccctacggccccggttgtggtccttgt

SEQ ID NO: 436202 - DNA, 306 bp, Homo Sapiens
  misc_feature (278)..(278): n is a, c, g, or t
  misc_feature (290)..(290): n is a, c, g, or t
gagacatgatggagaggaaggcatcatcatggtcactctctgtctcactgtccagccggggctctcctggggggccggaggcctcctcctccgtggtgggaggcggacccttaccagattccaccacccccaaagggtgtggggggtccgggtcctgggctctcagggcatgtggctccagggggccgctcagggtcagcactccctatcccacctggtggccgttcatgagcaacagctgccgactcagcaggttctttgctctggttggaggccantgggtggctggnaggttgctgggcctcg

SEQ ID NO: 436203 - DNA, 295 bp, Homo Sapiens
gcacgcatgatggagtgagagagggctctgtagacatcgggcacgcatgatggagtgagagagggctctgtagacatcgggcacgcatgatggagtgagagagggctctgtaaacatcaggcacacatgatggagtcagagagggctctgtaaacatcgggcacagatgatgtaatgagagagggctctgtaaacatcggccacacatgatgtagtgagggagggctctgtaaacattggccacacatgaaggagtaagagagggctctgtaaacattgggcacacatgaaggag

SEQ ID NO: 436204 - DNA, 235 bp, Homo Sapiens
atggggacatcagaaggcggtgaggggacatcagagagtaatgaggggacatcagaaggtggtgaggggacatcagaaggcggtgaggggacaccagagcgtaatgaggggacatcagaaggtggtgaggggacatcggagagtaatgaggggacatcagaaggcggtgaggggacaccagagagtaatgaggggacatcagaaggcggtgaggggacatcagaaggtggtgagg

SEQ ID NO: 436205 - DNA, 477 bp, Homo Sapiens
acgctctctctgtggggtacacagcctggacggcggagaagtagaccgtcaggcgctacgggaactgacgcaggtggtgtctggccctgcatcgtactctggcccaaagccttctactcagtatggagctccaggcccctttgcagcccctggtgagggaggtgccttggcggccactgggcggcccccgctgctgcccacccgagcttctcgttctcagcgtgcggccagtgaggacatgacgagtgatgaggagcgcatggtcatctgtgaggaggaaggggatgatgatgtcattgctgacgatggcttcggcaccactgacattgatctcaagtgcaaggagcgggtgaccgacagcgagagtggggacagctctggggaggacccagagggcaacaagggctttggtcggaaggtgttttcacctgtgatctcctcctttacccactgccgccccccacagagataacgtcg

SEQ ID NO: 436206 - DNA, 686 bp, Homo Sapiens
cacccgcccccaaccatctgaagtgaacaaagctaccagcctcggacccaaggaaggggttgtaggcaagaggtcaaagtatccgtgctggaaggaccacacagccgcctggctttctaaatcaagtccattttatttgaaattttccacatgccacacatgtacatgaaaattcccatccagaatgtagtttgctacagtgaacaccaatgtcaggagcaggcatcaccgtgagacgccacgggggcaggtcagcgggacggggacagggaggttggtcatcgaaaggcaggtgatgcatgtcgggtcatttagcacctggtcatgagatacggcgagacccccaggtccagggaaaggtctccccttaaaaccacgtggagctctgctgtctctgggcagtctcacgtggacagacaatgctcagaaggtggcgaaggggctggagggagataccaccgacggctgcaggggaggggcacgcacacacacaggcacgcacatgcttgcccatgaacaccccccgggcacacacacacccttgcacactccccaccctccctccaccccagacacatcagcacagcggtccaggctctggctcactccccgggaggcttctgtggccagggttcccatggcgggtctggtggcaacagcttggagaaaagcctcccgggaccccc

SEQ ID NO: 436207 - DNA, 559 bp, Homo Sapiens
  misc_feature (544)..(544): n is a, c, g, or t
ggaggccacactggaagcctctgatcccccagctccttcctttcccaccagcagcctggtgcctggaggtgagaggaggtgagaatgccagtggtttggagtgaggctttgggtccccgcctctgaatcttggggaggggaagctaccagggtcaggcctagcaagcctctccagctcagatgcatgcctcgggctgaggacggtggtgtgggcagtgccccttgaaggagggcggtcctggagatgcccatggaggaaggaggtgcagagtcagcaatgcccagatctttgctgggttaggacgacgggctgagggaggaaggggtgtcttgggaatccaggggagccccacgacgaggcaggacttatcagtggcagggaggggtggtcactgctctgttcctccccatccttcagctcccactggtactctgagtgcagcaaggggagagggtggggttgagactatctgagcttttcttaatggagaaccacacaggggccaagacacacactccaggagctcaagtggcagccccaggntcacctgctcacccc

SEQ ID NO: 436208 - DNA, 296 bp, Homo Sapiens
  misc_feature (16)..(16): n is a, c, g, or t
ttccactttccagcgnatccacctttcatcccccatttgctgttcggcgggcctagccttggaaatgaccttgcatgcttgaggacaccctttggatttaagctgcacgggctggacctgtggcagccctctagagtgcatgcattcagagctgttggcctggctccgtcacctttgtgattcggtacatcattctctccacacacaagatctttcctgccccagtgtcaagggcgataaccacgatgaggagaaagcacgaggctaggaataagaccatgtgcatatggacccac

SEQ ID NO: 436209 - DNA, 278 bp, Homo Sapiens
gggtgtgccggtgcccagtcaggaaacagccacatctctgggaacagggttattgaggccttcccagctgtaaacattcaggacagccagccaggaacttcccccaggaggggatggccacagcattcacctgaggggggagaagtaataggtcccacgttcatctgcttcctgtcaggcaaagtctgacactgcctctagctgggaagcttcaccctctgggagttcacgtgtgcccctctccatgagggcaagggcagccttcatgtggatcttgc

SEQ ID NO: 436210 - DNA, 1314 bp, Homo Sapiens
  misc_feature (129)..(129): n is a, c, g, or t
  misc_feature (140)..(140): n is a, c, g, or t
  misc_feature (316)..(316): n is a, c, g, or t
aaagcaggacgcctggaattgggggaaattgcggttgttccccaagatcttggtaagccggttgggtgcccctgcatttttcatgccgtccaaggccccatccaggagatagtcccgggattctgaggncatgctcctgnaaaggcagtggaggcgggcccgttccacataccagcgcacaagcatgttgatggttttcgagatcgggccgatgctgatgctcttggtgaatcggtcgtcggccacaatgtgttcatacagcttctgcacggcccgctgccgcaggtgggcactgtggtggtgctcatacaggtgnaggagcgcatataccacgcggagcagccagctgtggggcgtgtacagctcgtcgggggccacgttgttcctctgcgccagccagtcaatgctggcgaagtcctccacatagaggtcctggcggaggctctggaccagcgggtcttccgcggcactacagccgaacggcgtagcagtagctcatgggcaggtacacctgccggcagtggcaccagagtgtggaggggtgtgccggtgcccagtcaggaaacagccacatctctgggaacagggtattgaggccttcccagctgtaaacattcaggacagccagccagaacttcccccaggaggggatggccacagcaccacctttcttgtgaagaatgttccgggctcgtaccaggtcaggatcgtcaggcccaacacccagaattctgagagacacatagttgagcgcagtcccaaacacggtggacttatcctcaatgtgcaggccccagccaccgtcagggagctgcactgaccgcaggtaccgcacaatctcttctctgtatccggctggcagagggatgcgtgccacgtggcaagtgatcaggaggcctggcaggaggaaaagtgggccaccataatcacccgtccagtgcccatcctcagcctgcagccccacgtaaaatgtcatcccgttcagagccccctcaaaggcggtgtgggctttgggcaagtccttaaagtaattcttggtgtccagccccagggcgtaggcttccaggccggtctgctcgcggccggcgcgctcgtcctgcaggtaggtccacgtctgccggcccctctcgcagttgagtcgccagcggccgaggtcggtggcgggctcggtcttgtaggggccccctcggcgccgcagacacgctgaggaccaccggccatcagcgacccaggccccgccccaacgccggccgccggcccactgccccagtcgcgctctcctcagcacctaggaccaccccgcatccgtccgct

SEQ ID NO: 436211 - DNA, 990 bp, Homo Sapiens
ctgcgccctccttcccaggtggacggcggctctcctcgccatcctctccacttccagcctatcatctgtctgcctgttacatgtttgtaacttttgacctttaaattggtataaaaatggtactgtaagttcactgaaccaagaaaatctgctgaaggaagggggtcagtcacacccttttggggtttccagtgtatgaatggagggggtggcggtggtggagggacagggagcaatgagagttgccagccttattgctgtcctgacccctggctggggacgactcccctgtctccacctgaattgaagctgggctgtgaaaagtagtaagaaccctcggtttttggttcctttttcaaccagcaatcagccatgaagtgcctgaccacttgagagctacagcaggtgctgtctcggagagggcacaggaaactgggcccttcccaattttagcccaagggtgccgaaaagtcagggagctgctggcctccacactccttccccattggtgtggtccgaattcccctttagccagacatttccaatgtccagaggcccaggaggggacagctggaagccagaagcccacctgacgccatcaggaatttccatgaatgacctggaaacctctcagactaaaccaatgccgcccaatctgggaatccaggaggggctggtcccatagagtggtggggacatggtgctgagacggaccagcctctgcttcatgccgctctttccccacttgccagccgggaggcctggggcaaaattcattttctccccaggtgaagtggaggctcactgtgcagtccacgcggagcaatggggtgaagtttccagagcagggcagggcatgtggggaggcttcaggaatgccacccttgccctcaggcctgggcacagcatagcccccatgacgcttctctcattcctggacccatctgccccgaaaactttcccaagcaatatgtggcccggtaattcgag

SEQ ID NO: 436212 - DNA, 363 bp, Homo Sapiens
gctttcctggtggctggcaatgtggcacacgccccagtctccacttggcagtgagggttatttccagttaaacgccctacagagggccaggtggttctggcagatccctgcacttcacatactggggaggccgcctcccgccaggctccggacacagccatccttccttcctgctggtgtgcggcgccctgtagggaccagtggctctgggctgcaacgggcctgccacccgtgtcctcggagccaggaaacatggctgcgaaacccgtgttctgacttcactggctgaggtgggggagccaggcgccctgatgcacgcttcgtgaagaacattcaggaacgaacagagtgggagagtggggc

SEQ ID NO: 436213 - DNA, 584 bp, Homo Sapiens
tgaaaaactagctagagactgaaggactcaaggaatgaacatggatttaaaatttttaaccttatacatcaaaacctcagaagctgaagaagcctgcaacccagaaatgccaactggttcagaacaaaaaaaccaagttccaacgaaaaggctgttctctctagtcaaaggaacaagaaaggggcagcctagaaagacagaagcaatatcattttgctctcgttgaacaccacaaaaagaattatggtcccatccccatgtacacctgcaaaggcaaagtggcaaggcccagacgctgataccttgccagggtattccaacaccctctccttccagcacccagagtagtgttaaaagaagttctgagcaggaatctaggagtttcatccctgccgggggttagcaagattctttcttcttaccctcacatgcagtgtctatgttgactcaaatgggcagtctagaacttccaccccaaactcaacaataatgaggtatccatctccctctccactgaggtagtatgagaggaggtttggtggagattgaggaatcatttgaaactgtccagctgtaatgaggct

SEQ ID NO: 436214 - DNA, 506 bp, Homo Sapiens
cggaggctggcgcctgccacctcccacacgtccgtaggacacacctgaagcgacacttccctggcaagggctgcgcggcattttattttctgaaccccccacagcaggggcggccagtcctgctgcaggcagagtttcagtcttcggagtttgaccttctggcccaaggtcatcacagccacaggcggaggctctggggaaaggtccagttcctgggatgctggcccctaatgatgggcccatctctccagtgccgcccttccctcccgcctggcacaggagttctggagccacggtcctgagtctacagaacagcccggtcagcctcgtcccgcggtgcaagcgaggcctggcctccctccctgcctgtccttggcccggccacatcactccctgcgtttcttcttcttctccggctcctggacattggccgcctttgctcgggcactggtcaggggccgaggtgtcctccttctttggcgagcccctttttggccacgggccct

SEQ ID NO: 436215 - DNA, 161 bp, Homo Sapiens
ggaaaacgttacttccttgaagtatttgttcagtaagtccgggcacactttgaggatgtttaccacaaggtcagctaccagatcatcatcagctgcagttttcaaacccagcaagaggtcaagggacaccagatgaggctacagcagtagacaagagccac

SEQ ID NO: 436216 - DNA, 882 bp, Homo Sapiens
tttttaccattccaacaaagcgctttactgagggcacccactccacagtcccaaggaggcagacacaggcctgaactgtccaccctctatgtcccgagtggtgactccactccccactgctcagagatcacaccccttctggagagcttgcatcccttctggagagcttgcacggatgagtgactgtcttcaccctgggcttccccaagtccggcgacagtggctgccccagtgctgcagctggctctggtgacggtggcacggcatggccccgagcttgggagaacagcggcctgcacacacggtcacgcatcaccgctcggcggaggatgggaatatctcatggagatctggatctcaaccccacatgggacaagggcccagggacctggctttcctacacaccagctggaaggctgactccccatctcacgtgaatgcttccttggttttggggggcactaggaaggtccccagggccacgggtcactgcccagattgtggcatcctcataagacttgcgactcttcccagaggaaagaaaacccctctcagatgctccaaggactcccctagtctagctgcttcctgtgccaggcccggaccccggggcgaacaggcctgttcatccacaacctcacagctgagggccctcctgcggttcttcacaggagagagaaaggaaggcgcacctgcccagcccggccaagaaaacaaaactctctcccatgggtgcgggaggctgctgctcgcacttctgccccttcccccggccaggcccccgttccttgaggccgtaccacaaggtgcgttcatttttccacaccgtgagctgggctttgcagagctccaccttgtgccagtattcccagtggccctttt

SEQ ID NO: 436217 - DNA, 219 bp, Homo Sapiens
atcgatacgactctttatatgtttatttggttttctttaacgaagcgctttactgagggcacccactccacagtcccaaggaggcagacacaggcctgaactgtccaccctctatgtcccgagtggtgactccactccccactgctcagagatcacaccccttctggagagcttgcatcccttctgtcgtcttctcgcagccgtatagtagtagtaggc

SEQ ID NO: 436218 - DNA, 376 bp, Homo Sapiens
tgagggatactgcagttcccgtgaattaatggtcacccctaactaacattctcaggaaaaccagtagggttgccccagaagcccctcactctgctgcttatttggaagagcctttatagttctgctgtgtgagaggcttctgagccaccatatgttcctaaatgaagagaagccgttgcccagacatggatctgtttaatttaatatgatttaccacaaattacgaagcatgacttcaaaattgaatttgtgcaaaattactgatggccaattcagtggaagggaagggaaatcttgttattcctattccagaatctcttcctgatttccttcatttgattctttcacgccttggggtaggggaggggaatgcatt

SEQ ID NO: 436219 - DNA, 985 bp, Homo Sapiens
ttttgttttaaattgacacatatatacataagagaagctacattcatcctatttaaaaaacagaatatgggccagccttactgacttccttctaatgagtagaatgtagtgaaagggataccatgtggcttccctatctcagactgttttcccttggaacccagcccctattgtgagagccatcaggccacaaagagagcctgaaagtgcctgtgtcagtgttcatgctgcctgtcccaaccaagtttacagccgatggccagcatcaaccatcaaacaagtgggtgaccaaagctacagaggattccatttccccaactgatcagctgttcctagggaaggctgaagggagcagagacaagctgttctggccaagtttttcccaaaccacaggttcatgaacaaaataaatgtttttctttcaagccacaagactctgggtaattgttagaaaaataacttttaaaaagagacaacaggaaacataacttatgcagcagaaaagtctcctttaaagtaggatctaataaatgttgagatttatttattgatgtcaaacattattgagaagcagcagataaccaggagagagacataagctgctgaggaggaattttcctaaaactccttcaattatgaactctgataacaaggcaaggatgtctccttacaatttcccctcaagttaggaaataagattgggaagcaagaagatgtatgatttgaaaaacaactagagatacttggtgacataggcaaaatcagacatttacctgatttcaattaactaaaattctaaaagaagaagctttgagtgtttattaatcaacctagtattcaattttcattttcttttctaaatgagcaaataaggagattatggaatgatttttagtcttcacagaagtaaaataagcatagtgtgttttgagtgttaagacatcaaatggcaatttctcctttaccttactccaaagcttgtttg

SEQ ID NO: 436220 - DNA, 1151 bp, Homo Sapiens
gtggagtctcacgtggagtcttgggctggcacggctgcatctgacacgcaactgtccacacgtcctttgggaggttgttcaggatctttttctggggcttttgttggctgcatttccagtaactttgtctgtttttcaataaaagattccatcgcagacatggatagagtctcagactccacactgccttcctggagacaataaagaatcttgtcttgtgcttcagtcacacttagtgctggagaaattttactggatgagaacctcagcctggacttgctagccttcttgccttctgtctggggcttgctttcggtctcggcctcactcagctcctctgtggggctctggggttcagagcgaggaaacgctgtcttcaaggtgtccacaatggcactcaccaccatcttgtctattctagagaccataaatggtttcttgacaaaggcaatacgagcatctgtgttcagagcaaggaactcctgcacctcctcactgttagcgatctctggaatggcacagagttgctttaggaatgattctaggaggctcttacgggcttctactctgtcactgtccatgtttccaaatggaagatctggaaagagctttttaggacccttcacatttttgatgaactttcgtagatctggtttctcctccagacgggtctgcagattcaagaactcccgatagcgacgattcacagtgtggtaggccagctgctgcaggccgctgctgttttcaccgtcaagggctgtctcgtacttcacagtatagagtgtgtatgggtggaatccagtgccactgtgctctcgggctgtaatggtgccagtgatacgaaggttctggatgataactggaccatcgggactgcttaggggctcaaagctgaaggtggctgagctgagaggaccaggtggagaggaggaaagcagaactggtggcagagtaggatcaagggagctcacatcattggtgagatccttctctaagcatgacggccgtgaggggcaggtcttttctggcccctccagcaaagctgtaacagaggcggtaacatctccttgttctatctccttgtctgctgtgtcaatatggatctctgggcaggaattcagtgtggagaccggcaggccgtctctgttctg

SEQ ID NO: 436221 - DNA, 1270 bp, Homo Sapiens
catatttttcccacagcagaagtatatttattgtgctgaaatcaggtagcagggaatgaatagctcttgggaaccagtacagaatgttcacaaagatttacaaatctcagtcattacacactgagcaacaaaacaaaggtgttgaatcctcttagatcaaactactttatatgttgcaaattttctgtaattctcatgactgcatgcctttggggaaaaagtatttaattttaatgcacaataaatatgttatagcttacaaaatattctgaaatagtttgtacaaacagcatacatcctacacatcgcagctttgacatgttgttgagatacttaagaaatattcatgcttttttttggtcacattttgtctttctctagtaatccctttgcaacatcccttaaaaaattaacctatgtagtaaaacatgatacaaattctttcctactttatttccagttgttcacttatattacatgaaatacttcatttgtaaatagcaaattgaatgttatagttctgactactctcacttttattcattttgtgttttagcaacaccttgtaacatcaagcattgaatttaacaatctttagcaccaaggagtcaagaatattgcaccaaaatgggtttatacttcatacctagttaataaataagatcttgcaacttagtcacaaggaaaacgttactccaaaattaaacacattgaaagagaaggatagtttcacagaaatgtttggtgtatgctatttgtcataaaagcaaaaaaaatactagtggatttgaaagttaacattaaaatttacattagaagactccttgattttttaattaaaatttatttaattttaaatgttctttccaacggaagaggtaggtatatttccacatatgaaaaatcaggaacagccataaatcaaaacaaggaaagcctgataaaaatcaacatattctaacagcacataaatgtaactatcttatgatgttactaataaagacatgagttgtttcatgtttcaatcagacaataatcttaattttcataatatatttctgctactaacaggagtattcaaatgctgccttttcatcacaaaaaattgtttccccacagtgatttgtgcctcgagtcatggtgatctctgggtcaccagacaagactttactgcaattctttcttattttcaccaacaccatcatcatcaagcctctaagattctacagagatcagcagattttaaaaatttaattacaaccaaaattcc

SEQ ID NO: 436222 - DNA, 1194 bp, Homo Sapiens
  misc_feature (159)..(164): n is a, c, g, or t
  misc_feature (166)..(167): n is a, c, g, or t
  misc_feature (170)..(171): n is a, c, g, or t
  misc_feature (173)..(174): n is a, c, g, or t
  misc_feature (177)..(179): n is a, c, g, or t
  misc_feature (182)..(182): n is a, c, g, or t
  misc_feature (185)..(185): n is a, c, g, or t
  misc_feature (1096)..(1132): n is a, c, g, or t
  misc_feature (1146)..(1146): n is a, c, g, or t
tttggggtggggggattgccacgcccttatgtcccaagcccaggggtttcctttggggacccagttatggcccggttccactttcctctcctgggcccggcgcgcccaaggaaatggtttatgaaagcttttcgaggggccgggggcggccgaccaggnnnnnntnnggnngnnggnnnttnttnttagaagtctatgacaaagctttagttgtgaaataagcaaggatgcaggattgtacatcttttcgtcgtgctttccccgtcattagacagcaattaaaatcagacagaaacaacatgacacaactgttaaattttcttatgtcgaaaaattgcaacaacaaatattctaaataatatagaaacataaaagattgcttaactgattttaataacatgacatgaagcccctagacttgatataatcgttatgcaaaatacataggtgaatactgtcttcttttaaaaatataaaataaataagcagacatgtgaaaatgggcaagtttccattaaataaatgaaaatttttaaaaaagaaagttttgctttccatgtcatttgaagaaggaaaattatcattttaaacaatattcaagtttattaaacaaataaaaaaagtattataaaatgtttaactttcatcagcttcaaggtttatgttgctcccgaattttgcatacaactgaactttcaaatctgctaacactcgctgaattgattccactctggattctaaggcgtcaatttcttcttgcaaatttttctttgcttcttctaacatttcttgcgtttcttcttgagaatggctaatgaagacatcaccaatttgataaggtatcattaagcaatcatcatctgcaagcatgatgtcatcacaagcatcttctaggttttggagttgtttcttttttacttctatttcttccttcagctctgtgattctacttgtattccgtgcaaatttgtttatcttttgttgatcttcgaaagtaacattgacatcttctgcagccgccttcttcatggtggccgccatcttgggactgggctccgctctcgacgaattcgagctcggccgatttggcctgatnnnnnnnnnnnnnnnnnnnnnnnnnnnnnnnnnnnnncgccgccaccgcgntgactccgggtgcccatagatgttcatcccccgctctgtgccgcgtgg

SEQ ID NO: 436223 - DNA, 272 bp, Homo Sapiens
  misc_feature (262)..(262): n is a, c, g, or t
aaaagtatttattatagtaaaggttactgttgtaaaacattagtgactttggtccatatcttatttgccatttgtctttaaaacattttacattatttgcatcataaattgtaatttttatgactatacataattggtttttttcctgacccttggaatgttagtttcatgtaactttttaaaaaattaaaacattgcagactaaatgtactgataagtacatactggacacattattaccacagtaattaaaggtcctgancttacttctt

SEQ ID NO: 436224 - DNA, 1504 bp, Homo Sapiens
  misc_feature (563)..(571): n is a, c, g, or t
  misc_feature (795)..(795): n is a, c, g, or t
  misc_feature (1392)..(1427): n is a, c, g, or t
aacattttaaaaattgctgtattcaaaattaataataaactttggggtaaataagctttaaaacaaaagtacataagcaaaaataaataatttacaccaacccactaacctaattttcagagtaaagccatttccaattacagtactgttatcccgggcaccagcctgtggttaaactttgatgattcattatttttaaaaaacagtaataaaaattgaatactaagcaaaatctttaacaaaaccactggatttaactttttaattttaaataaccaaattttataattttgtacataattcaatgtaatgccaatataattagcatttcagcttgaagagctggtttttaacagggatgggaaactataaattattcaaacagtctgcaaaccatgagatacaaataaaaatggacaagcatatagtagaacaaaaaccgcagacactctactaactggggaaatatctgaaggctttacaccctttattatccataatggcttttggaattacgattgtgtgacatatagaacctttgatattttagatacagcctttannnnnnnnnccacggggaagttaaaaatccatcataagactccataagactttactagtcttgcatgtagactctaggagtttgtgatctgataaaagagtaacatgaaaatttactgtattgccctaatttcatacttccttgtacacaatgaatcactctgagaatttattccaagggttatatacacaaaaagtgtcaagaataaattgttctccactctcgcataaaanatgtgtacagtgtatcaggaatgggaaacttctgattttcctgggcccgggcttcatggattttctgctgccagaagatgaaagactccttctgctttattgctccattgttctgaggattaatcatccaaccctggcgtttctccttgttggattctagacgctattctgatggcttcttccagagatggctgttctccaagctgaactgcaatctgggtgccattggatgttgctactaaggtcagaggtctggtttctgtggttactaagtgatggctatgctgctggtgccccatttctgatgaggcagtatggaatgctgccaagtcttgagctacaatatgcaacctgttgcccttctgtaccctcagcagtaaccatagcaacagagtgcgttcctgctgaggagatgactgcatcatgggcggggactgtgatgggcgtgccatcctgcgttaccattgtgatggtgttgccaatggcctgcatgtcaggttgagatatgttgacatgctgagtcccatcctgggatatgagtgtaactcccggccgtaatggccgaattcccgggcatatgtccgctcccgtcgactnnnnnnnnnnnnnnnnnnnnnnnnnnnnnnnnnnnnccggccgcttcctcgctcactactcgcgcgctcgttcgttcgctctacaggctagggcctatgtgatatcaaggttt

SEQ ID NO: 436225 - DNA, 824 bp, Homo Sapiens
  misc_feature (447)..(459): n is a, c, g, or t
aggagtctctggcttatgactcctggttcccattagtcttaagtcttctggttcccataaaagactcagttttattgaggtagatacaggtttagaagagaaaagagcaacagattttcagcgttgcagtcactcggttatctatgaagggttgtgcaaaacaggaaggtctgggaatgaccagatatcttgttggcataaatgttatgaaaaggcagaatactggcaagaaatgaggaagagagagaaaaacaatataactttcttgagtgcaaaggtgctagacaactaggagcccagctgggattggtgtagggagggccgaacgctgactagtgtggcctcactgccccaggcttcctttcagaggaaggcctgtcctgctggaactggagccaaggggaggctgcctatgaaggcagaagatgttgatgaattcaggcactnnnnnnnnnnnnnttatttataaacacaaggtggttggtttaagccaaaaggagataccatcctgataagctctgtgaaagagaagatgtgcctggtgtgtgtaatgcggctggggtatgaaaacactgagaaggagatgaaggagtgtgtgtagcatgggggtgtgtacaacttaacacctggacttttactgggggagtgggaaagtgattctgtaaccaacattagaattactttggatttgtaatcagattggttctatgatttgtctttgactattcacagataattgtaaatgctggttttataagcccaagtcattttacatttgcttttccaaaatgtattaaattggaattttttaatcctttatatac

SEQ ID NO: 436226 - DNA, 493 bp, Homo Sapiens
  misc_feature (460)..(460): n is a, c, g, or t
gaatatagccaagtattccatttattaacaaaataagtcttaccaagggagagctctgttcgtcccaaacaggccccgcagcccccgcgctgccgcatcagaccagaaggagggaggagtggggagaagaccccagtcgctggggggtccactctgggggctctgccgggccaggcctaggagagggcgggggctgctgtgatccgagagctccctgacgccccaaccttccccgaacgcagctaacgagctcgtgacatccgctgacatcgccaccggtctgctttggagggatctagcgagagtcacctaccccacccctactgccaggggagggggtcgttgcccccacgagggagagaaaaacaaggactataatgcacttcgcaaaatgtaaggggccggcttcacgccagcggggccttctgggactttgaattcaaccaggtgagcgctccangtgccccgacaggcgcactgttaccactgggtg

SEQ ID NO: 436227 - DNA, 2299 bp, Homo Sapiens
  misc_feature (304)..(331): n is a, c, g, or t
  misc_feature (514)..(535): n is a, c, g, or t
ggaaaaaaagggaacggggtgcctttccaaaccccctaagccggcccaccatcacccatccaccattaattaaacgggcccctaggcttttagggtctgcctcacattttcctcatgtttttattagctcctcatcaagaaaaccaaaagaaaatgggatacaaatcaatgcatggataatatcaaattacaaaatctagggtccactgggctggtaaatatgtaagtgtaagcaaatcatgtagtcatctccccatcatcccctacagtgttttcaaataatctaaaacccagagagtgtttnnnnnnnnnnnnnnnnnnnnnnnnnnnnccctcacctgcacttgattctattgtcagcttgctgtgaacaatttttgctttaatatatgaattacattaatacctcacgttacatatatgaagccaaattacactaacttagtttgcttacaacctcaaatcttactcccagtacacattccaataaatttattctgtaaaaacaatacannnnnnnnnnnnnnnnnnnnnnacagtaaacttttcaactacaaaccgtgaatacgcgaaagatgttccaaggacaagcattaacaggattgataaaacccaaactgactaaatgtgttctcacaatataagctggcataaaaataaataaaattctctattatcacaatagcaacaataatgtacacataataatggtttaaggatgaatattaactattctaattgtagttccaaaagaaaacagtttattttaaaagtctacatttaaaagtcaatgctttgtctggtttcccatagggctgttgctgattccagctttaaaatgtaaagtatccaccttgagtgcttagctcaaaattgtattggcactgggaaaaaaataaatcattgcctttattttggagtaacacaaaaagactcactaacttcacatatagaaacttagtttgtgtacataacaatatgaattttgagaagtataagctgtcaactagctatttctaatacggaatagatattttacaatatggttaaactttacacatggcctcaaaactgaaggacaattttaatttcgtcttcaatataccaacgttatgtatttaggaattaattcctgggttctgtcacagagaggaaattccattcttcagcattatgttgagtggtcatctaaaaaatgttaatttatatttaactgagtgtttgatgatggtggggtcaaggcaggaaaacgatgatcataactgccttgataaaaggatcctagacatgtataagtctgcgcaaaaatcttgataatccttagtggttaagggcaacttcatgcaaccaaataacatgaaattaaatcagtaacttttaaaaaaggctaaaatgtcttttccccccgaaacacaacagagaggaatatgaataatgtacatacaaactggggttctgtcaatgacaacaaggactatgtgttggttcatatcaaatccaagaatattagacaaccaaacatataaccttcttgtggtttctcttaatatgcagcattcattatggtagttaggtcccttcactggttttctgcaagtctgaagttgtgtttcttgtgtcgttgcccgcatctccaccctcagagctgcttttgttttcctcttctttgcagtctttgtcatcttcatctcctggagatttccgggactgtttagaggatttctttgaagtatatgactttttccgttttgagcctgctttttcattctttcttttgccttttccatcttcttctactctatcaccttcttcctcactgcttgcatctgcagtatttccaccttctccctcagtttctgaagagctctgttgctgaattgcctggtagccagtaaactttactcctgggttattttctatttcccacaatccttcgttaaatcctttccgtttgtttgactttccaaacttgtctttgtactccttatatggaaaaaggtctttgggacctagaaatgcagtttcatgggtgccaaaaaagaagataggatacttgtttgctggaggcttcacagcgccctctgggagttcatcaatccgggccggccagtgcgggtagcccttcatcttggcgaagaccaggtcgcccgctttgtactcgcggggccgcggacgcgccatcccagccgctccccttcctggtagtccttggtcgccgcgaagatgccgggaggccgcccccccgcgggccgacgaattgcgccgcgctccccgcgggcctcaagccgggcggacgagc

SEQ ID NO: 436228 - DNA, 940 bp, Homo Sapiens
gggagtggaagccagttaggaggtttgaaggccctttggaggaaggaagcaggccagaaaaagggtgggattgaatgcaagacaggaccttcccacatggggaaatattttctctagataggtggtacggtgctgaaggcagccacactctcagcactatgttcctcatattctttgaaaactcttccttcctcataggtgtctggccttgacatatacctctacttcttttatccatttcaccccagctatttttgttctaggtctcacctggtcagattctaggtctgctaactaagccaaattagcattgaaataagctccacatacagtgggcatataagttctgttgactgagataaatacattcatgttacagtactgctttgaagaaagactatttaatttgattctcagtctccagagggatataatagggaaacacagtttacgttgacggccacctagaatagattctgattacataaattaggtaacttaaaactcaatctgagcagaggagccacgactttcagcctgctgttgaattgtgctactaagcaaatgtgatatactatttacataacaaacattattgttatgtactgtttagtccatgttaagaccatctctttgcataaaagcagttctattaaagagaagaatttaaggtcttgctttccagagaaatgatttagaattgtctttaaaatacaacctaaaacaccttattttgctaacacagtgcaaatcatttttataatatgcactggaaatttattttttccatgaggaattgtccttagagttcaaaagaatcttaccatcatataggcatgcaccctccctccactaaaaatggtgtactattttaagtacagatctttaattgttgatcattttattttgctgtggcacagaaatctaagattttggattt

SEQ ID NO: 436229 - DNA, 305 bp, Homo Sapiens
ctgcttttgtaaattttatttagaaattagagttaaaacagttatgtattgttgaaatgtaataaagttaagccatttttgttactagtgtgaagctttatgcccattaactatgttttaactttaatttggaatagaaacctgcaggaagttacaaaaatagtacagaattcaatgtagccttcacacagcttcctccaaatgtgacacctcatataactaactgtaatgtaatattaaaaccaggacattgacatagttatattactattaactagatgacagaacttaatgtcttcaccatt

SEQ ID NO: 436230 - DNA, 423 bp, Homo Sapiens
  misc_feature (152)..(152): n is a, c, g, or t
  misc_feature (188)..(188): n is a, c, g, or t
atgaatagttggctgttttatttaaaatataatgaatcagcaaatgtaacattttttttgggtggtaaaacagactcctggagataatttctctattttaagataatattggatcagatagatttaatcttccaaagaatacggtgtaaaangttgctttgcagttatattttatcatgcaaaaatanacctctacttaatttctgcagtgaatgtatttaagtgtatattaaacatctcctacactctttcatgcaaataaatatgtcaactgaagtaaccaaacattgatacttggcaacattctataggttcacaaattggcattgcacgtatttactatcctcttatcctccccaaccctatcatccttgggggaggtttgaaggcccagatttttatagcacaccatgcatctaatat

SEQ ID NO: 436231 - DNA, 789 bp, Homo Sapiens
  misc_feature (366)..(374): n is a, c, g, or t
acaataaacatgtttttttccttgtagaaattaacatgttttattgtaaaaagaaaataagcattatataaaagtacaaagtttaaaaatcattcaaaagttcatcagccagaaagaagtactatctggtgaacttcattcattccaaccatctctcttaatcatacaggcacatatatccaaatagttttacaaaagtgggctcatatgctatatttaacaaatatagcaaattaacaaaaaggaaaacaagtgtgaaactgaaaaaatgctcaatttaaatacttttttccccacaagagaatctagtcttgtaagatttctcctaaaattaaggacaattacggaaaacaataaagaggctannnnnnnnnctagcttcatgtatgttttaattagagactgtacgtgattcctgctatgaaagatgaaaccagcacactctacttgttatttctatatagacagtgttcataatatttgactttataatcattgcccattatttttaaagtttctgaagtgtttactaacactccttttactgattctttgttcctaagtccttaatttgattcatttcttctttagttgaatttcattattgggcggttttttcccaaagactcatgatttgtacttttaagttcttacaaacttgagaacatctatagcctttgtattttaagacaactttggcaaagtataaaattcctggcactttttctcaaacctttggagccttttgcttcattgccttcttgttataagatctgagaccatcctgac

SEQ ID NO: 436232 - DNA, 908 bp, Homo Sapiens
  misc_feature (847)..(855): n is a, c, g, or t
gattaaatcattcattcattcaacatttattgagcgcctactgtgtgctaggcaccgtgctaggcgcagaaatacagagatgcataagatacagtccatgcccttaaggattcacagtctagaaggggagacaaacatgtaaacaagtaaaatacagtgtgataagtgccacaagagaagcattgacaaagtgcagaggtagcctggaggggaggggcacaggggttgccttcctggaggagggggcctttgaggggatcgtgagagatgaacttgccaggcagacaaggcaggaggagcaggggaaggcattccagtcggaagaaacagcatgagcgaaggcacagaggcatgaaactgcatgtcttgcttggtgattggggaactctaactagtctggtggtattgctaaagtgtactagaggctgtggctagagaagggggcagaggccagatcatgaggggaaactgagggcaggggcatcttggagggtcaccagaggtgagcagagcccgagggcaggctttgacacaggaaaagagggctcctggctgactcaaggtacacctgcctgaggaccacagggttcctcgctgtggctccaaagggatctcgacccaagattaagaggagccacaaagcttgaagtgaaccaaagggtcgggcccaattcttggacccaaaggtggcatgcacttccgcgctcttaaagacttttgatttcaaacctgcacgctatagccccctctttccatccgtttgggggccgtgactcattgggaatattcatgggaatttggttggcaaattgtaaggcccaaatgaattttaggtttaccaaataannnnnnnnnaatttaaaaaaataaagggtgtgcctttaaaacatccaaggtttattattggg

SEQ ID NO: 436233 - DNA, 1799 bp, Homo Sapiens
  misc_feature (72)..(72): n is a, c, g, or t
  misc_feature (1234)..(1234): n is a, c, g, or t
tggcccagccaacattcccaaccctttcaatgttcttaggaaatggctctgtctgaaaaaatggctttgcanggatgggtggggcagggaggctgtgggaagagggcagagtctcaggacaccagagtccagctgcccatctgagtggtgcttttgtaaggcatcacacttgaggccactgtgaggggctgagcttctttcccaaccatggatgggggaagggcaagatggaccctgggttccagggctacagtgagatgaggcctcctgacggagaagctaacagcagcccccatgtccttgctgccgtcccaggagtagggaaggaggaggggaccctcccagttggtagggtctggagatgtcccgagacccctcctttcctcttgccgttgatgaggcagcctcgcgctgcggggttcccagcctccaacaggcccgcttcttttggcctcacagtctcatcgcctgatccctcccctcccctgagcagtgtggggggatgatgcccgcttgggtgccgatggaggtggtggtgttagcgatgagaaggatgatgaggtgttggtggtggcggcctccccatgcggggagtgggctgggctgggggcgctgggggcatcacttgctcttgtgcatatccttcagccggcggagctcttccaggagctgggcccgggagtagtcatcatccccagtggggcccggccccggccccagagcctcctgtagcgccaggcagtgggttctcaggaacgggttgtaggagcgctcctctcccagggtagatgggcacgtgcccttgcgctccagccgctgccgctgcacccactgcatcttcctctcccgggccaggttctcgggctccaccacacctgcaaagcccaggttctcctctgcatactcatgaccaggccacagaagggtgtcatcccctagccccagcacagtgtccagtgagctcagcatggtctctgcattgccctcaaaggtccgcccacagccagagaggaagagcaggtcccctgagaagaggcaggagggacccttgtagggctccccatccagtaggtagaccagatggccttgtgtgggccaggtgtagccagggcccggatctgaagccgtcccacgctgaccacatcttgatgacacaggggatgggtgaggtaggggatgccgtcctgagggctcccgtacacccgacagtcccggtgccgccggctgaggtccnggttccctccactgtggtcccagtgcttgtgagtacacagaatggcgaccaaggtgaccccttccttttcaatgggaagcctgcacagcccgagggttctgaagggtccacagccaccagccagctgggcctgggtgtcgatgatgaggtagctgtagttgtccgagaggacagggatgggaagcaccttcactccattgaagaggcggggctgggttttcgagtggcctttagggtagcgattccgagccctgcgcagctgctgtcggtagaagaggtacccgagccaggtgcgggtgtacaggctgtaccaggccagtcccacagctttcatggggttcttgcccctctttctgggaatgtattccagctccggggataggggttcaggttcctccttgccctctggggagctgtggctttgcagggcccgggtcctgttatgagaagccttgttagctgtggctcctgcgagaatcccccggaggacgcgggcatttctcgccccccgggccttcagcgccgtagcagctaccaccgccgccatgttcagatcccaatcccg

SEQ ID NO: 436234 - DNA, 1009 bp, Homo Sapiens
  misc_feature (153)..(154): n is a, c, g, or t
  misc_feature (925)..(961): n is a, c, g, or t
ggaatcccaccccctttggtcagggcccggggttctccttgggaaacccgtaatggcccccgggttcctttccctccggggggccccgggcccccacacagaatggtttttgaaaaagtctttccaggggcccggggcgcgccccacaagacnnaaaataacgctggatgggatatggggtcccacgcggtgatagcgtggagtatgggcgggagtatgtaacgggggatattgggaatgtattttttccctttctactaaacactcaataactttatttgcctttggctggctccttggtgtggggcagggtagggtttggcaacagcctgggcttcatgcgccctctggtggacctcagaggcacgaactggaatctgggccaaacctgaggacttaacagtcaatagcctaggagggtcgcagcgctcctcaggtctgcaccccagacccaacatcaggggacggggcactctgggaggaagccctgaacctctggctctcatactcgcccgtgttggacaaccgcatgttctgccgagccttcatctgcttcacacggtccttgtccacttcccgcttggtgaggatgaagaggaggataccacaagggaagccgatggcccaggccagtcccacagctttcatggggttcttgcccctctttctgggaatgtattccagctccggggataggggttcaggttcctccttgccctctggggagctgtggctttgcagggcccgggtcctgttatgagaagccttgttagctgtggctcctgcgagaatcccccggaggacgcgggcatttctcgccccccggcccttcagcgccgtagcagctaccaccgccgccatgttcagatcccacccccgcttccacgctctcgacgaattcgagctcggccgatttggcctgatnnnnnnnnnnnnnnnnnnnnnnnnnnnnnnnnnnnnncgccgccaccgcgtgcagctccgattcgccctatagtgagtctataca

SEQ ID NO: 436235 - DNA, 894 bp, Homo Sapiens
  misc_feature (169)..(221): n is a, c, g, or t
  misc_feature (808)..(843): n is a, c, g, or t
ccctttgtttaacttaagcaatgtatagcactgagtaatctggcacttggataatctccgaaaagataccacgtaaagagataatgataacagacccacatagtgcacattcttctctggttctgatgtaggttagagagtctcattctgaggtagccttctagatacnnnnnnnnnnnnnnnnnnnnnnnnnnnnnnnnnnnnnnnnnnnnnnnnnnnnnacaaaagtgctcaaatacaatgcttgcaaatgtttggtctcttggatttcactctgctagcaatgggaaaatgtggaaaacaaaaatccttccatgcagaacatccatgaagctaaaattaaaccaaagtagtatactcataccaaaactctttaagagttccttgggtattttgaggattatttaaaatcatgtaatatgtggcaaacttatgccatcatccatggcttcctatagaaattctgttggaagaattgggggtaagatacatatatatatatagtttatttccccttttagaaaaatcctaatggaatatcaaatatattccaaagttgccaatgatatttgttactaaaataagtttggtgcagttactgcatgttccagagcggatttggaagggaatataaataaaacaagtagctttttctgatgttgatgattgattataaaaggaagaagggccctgattatccaagtgctttgggctggtacaatcactaacatccccgacttggctgaaaactaggaatgcatattatcccgctctcgacgaattcgagctcggccgatttggcctgatnnnnnnnnnnnnnnnnnnnnnnnnnnnnnnnnnnnncgccgccaccgcgatgagctccgattcgccctatagtgatctatcagtccg

SEQ ID NO: 436236 - DNA, 1602 bp, Homo Sapiens
  misc_feature (617)..(629): n is a, c, g, or t
ctttcttaatgtttttgatgttggatgcatttacaatggaagaatttttttgaaagatttggccctctcaccaatacacacattcagacttgagctgcacgcatttagatgaacaaataggaaattcacggtattttttgttttagccatccaaaattcataggattctaccaaaaatattagcccctgactctagttattctgagatgagggaatcaactttatcttgaaagttaactagctaaaatgtctttatttaaatagcaaaaatatagtttacctgacaagtattaaaagtctcactttcaaattgtgttaactctcagaccactgatgaatcttttggtaaatcacaggcagattttaaaagctaaatgaagccttagtgccttgaaagttaagatacttgtgcaaaatggatttagcaagattcaggattggcaccagtgagttggctagatacacatcacctgtgactgggaattcaaagtttagaaagcctaacgaatagtagctactaacttcatatggttcaatgtaaatcagttacttagtcattgactgtgacagatgacagctactttcactatattttcatgatgtggtattcctcctannnnnnnnnnnnnccaagtatgaaatggaaaaaaatgtagttaagaaaattaagtgtgagactttaaaatttagttttgtgtaaactagagattctagtgaacagtgttagttttatactgtagtacagggcacacactttaacctttagaaatatgtttaccatcagggatttatttttaactatagaaatactaaatgtactgtgaagcttaaaagacaggagaataaatgttggaggggtaatacacaaaaacaaaggcatatttgatgaagtaccctgtgttatgtgaacacaatttccccttctgttaagactataaactatatgagtatgtgtactgcatgtttacataaaacagtttaattttgaaggattattttaaaaactatgtttatatataatacctaacaagctgtaaatattgtatattattgatttttaattttatataagcaattttttatttcccaattcatgtacaaatctcattatgtatatagcataatttcctggagaacacaaattttgcagtgaattttaagtaattttaattgcagtaagcatcagtttagcctagagatgttgatctttattttaaattatttttcaccattctcattttcttcaaagggcagcaataaacatatgcaagttatttttaattatagaaagtaggtctacaaagataagatctaggttccaattcattgctttaaggaaaagatgcacaattactatcattcagtgtctaatcacaggaccatttctgaggtccacatgtggctctcctctttgtaatatacagggtgaactctttactgatacacacaagacaactgttaaaaagtgaatccagcacttaaatgtcattacacagaatttattggattaaaaatttgtaatatacagtattttaataaagtttctgtattcaatttcatgcacttatatataaataaacctgtctttgaaagcttaaaaaa

SEQ ID NO: 436237 - DNA, 470 bp, Homo Sapiens
cacttcaaaggttggtacttccgccatttgcagcggtaacatcccccagttgatgacgttagaacgatagcgtttagtcgcgtactcctcggcaatattcgccagaccgccaatcacacgctggcagctcgccgcctgttcacgcgcagaaccatcgcctggtttcaccgcatagaccatgctgccaatttcagtttgcagcggatcaatatgctcctgaccagcaatctgcttaatgcgcgcaaacacctctgtcagctcgctgacattccccgccagacgctgattttccagctcagcagtcgctttacttctgctaacataaccgggatcgcggcgagacagggtaaactccgccagaccaatcggatttgaacgataagaagaggtttcaccggaaggaatcagttcgtcggtggtggtcacttcgtcgaggatcttcgagcacactttcaggacgatattttcag

SEQ ID NO: 436238 - DNA, 129 bp, Homo Sapiens
caaaactcgttatcaatttttatttcctaccatacaccaaatgtacagcactgaacacaattttgttgctttgatgtaagaaatattaagtgtttggagaaacagtatacaaacaaactacctcaaatt

SEQ ID NO: 436239 - DNA, 561 bp, Homo Sapiens
gagcgttctttttttggttttaaaggtttttgttaatgtaatattttaatagcaaagatatcatgactctagccacagcctaaccaaggattatcaaaggaggtggacactcaaggaagggccacgccaggctgcgtttcctgcaaggactcagatgttcagtaccttatgatacagggaagatagttttcttacaagtagtttggtaatattttttttcttaagttgtacatttgactcagctgtcaaatttctcacacttgtatatatctacacacaactaagttaaaatgttgatgtgagttttatttcacatggatggaataaacttgtggttgtcctttaactggaggtcccagcacatgtgttttcaagaggccactaggcattcttcactgagtgctgctgacttcaacgttcactttatgcaccaaagtgaaagaattcagtgtatccgttattttaatgcactacaccacagaaatgttaagttggtcaagggcttaatttatggaatttctattatttcattggttgggatgctttgccaggtcatgtgct

SEQ ID NO: 436240 - DNA, 447 bp, Homo Sapiens
aagaagtgaatcaactagttttattttttcaggaagtttaacagcgaagaggaaaagacaaaagggcaaaaatgtaaatggaaagcagaattcatgagatgattcaaaaatgtttgtgagttgagtgggaaaaaatcaagtaaacaggatagactgaagactagtacttggtaaaacaaaaccctgtaagaaatataaaagaccacatcagaaacacaagtagttaattccacttaaacactaccacctctccttcttgaaacgccaaatgacaactgagataaatggcataaagccataaatataaaaaagaatatccctggaaactagaaaggacatatgacaagtggtaaatgactgaggaccgaagaaagctgctgtagtaagacaagcccgaaaagcaatgcatcagagcaccagaaactggaggaacgttagacaccaggc

SEQ ID NO: 436241 - DNA, 758 bp, Homo Sapiens
  misc_feature (202)..(245): n is a, c, g, or t
ctgttttagaatatcactggcctaatttatttaggtgtgtacatgttgctcatacatacacacacatataggattacaaatgtggaaaatgttataatgtcatattctagcattggactaaatatcaatttctgactcttaaagtagttctgtgtataaattcaacatgatgaatcaaggcaataatttctcaaatgttctnnnnnnnnnnnnnnnnnnnnnnnnnnnnnnnnnnnnnnnnnnnnctagtacgcaaatagtgtaaaattgttttaatgcctggactttgaaacaagtaacaagtgtttgaaagtatataatctacgagcgaatttgccctccttggactaaccacatacaaatatgaatctggctgcaagaacaggatatccaggtaactagagagtgggcattgataaaaatatctggtggagaagcctaggatttcaactttttgtcagaggattcctgttgggacagctttaccagaaaagaataatagcggatatgttcatccaaactaagaactttcatgcatcttgcattgttacatagcctgtggaatgaattcattttttctcccttgagtccaggaatgacttccctggaaaaactcaatctatatacagctgtgccaaaatgaaggatacctgcctctccgaaactttcactgctgcttctgtcattgttcacttgtcagataaaattttattatctcaggatgcaaatttaaaataaagtgtaaatctatgttaatg

SEQ ID NO: 436242 - DNA, 280 bp, Homo Sapiens
  misc_feature (65)..(65): n is a, c, g, or t
aaatctgggttggtagttattttttcagcaatttgaccatgtcattcccctgtgtcccctggccntcctgtatactggatgtgaatggatacgattatatattgtgtttatagttttcctgtgctataggaacagtatttgaatttgatgcaaagggcaaccccccctagagattgtaacagtgagatgaaccaagtgattggatggggtttttagttgctggaataatggagttacagtgttcaatgcataagcaacataataaattatatatttggtg

SEQ ID NO: 436243 - DNA, 979 bp, Homo Sapiens
ggcagcacgttgccatagccaacgatctccagattatttgaaaagcaaacagtagcaacaatattcttttaaaatggcttttattgagacacttgtagggattctgcaacatttccagttgggaatctttatttccaactcttaggggggctaaacccttttctgaatgccaaaaggcacactctcaccaccttaatgaggaaacacacttatctgtgtctgttccgatatccaactgggacctggaccccaagccccgtggtgtcttgtacaagtctcattagtcctccacgtacaactcagaagcctgttaatcagggagggtaatttccaaataaatgtgagctggcctaaatccagctggttatttctgatttggtaatctgtagtatcttaatttggggacatcctgtcctaagttttggctggtgcatgtagaacttataatctacctgtataacaacagatgcaacatagctccgttccagccccaaattccttaaaggttctagtctactcttgcacttcttcctgtactgttgttgagaagcttacattttagggagaggctggtcaaatctctactctctggtaacagcattagcaagagtctttcttttggaaacagactcagaagttatggacatcagccacttcagacttctttaggccactatccttgaggtgactgaccagcctcctcatggattggagtttcccatcattgttttaattgctggaaatgttggcctaattctgcttccttgtaactttctgctttttagtacaagttctcttgggaatctacgcatggtaaaaataccagctccttccatctttacagccctgtcagtgctgtgctcttcaaagcctttcccttaatagcaagagggccaagagtggcaaatagagcagagccgcctgcactacagttgttcccatcgtaaggtgaaaacgaacgtttaacttcatctagaag

SEQ ID NO: 436244 - DNA, 1207 bp, Homo Sapiens
  misc_feature (688)..(698): n is a, c, g, or t
  misc_feature (961)..(961): n is a, c, g, or t
  misc_feature (1047)..(1048): n is a, c, g, or t
  misc_feature (1084)..(1084): n is a, c, g, or t
  misc_feature (1133)..(1133): n is a, c, g, or t
  misc_feature (1143)..(1143): n is a, c, g, or t
  misc_feature (1150)..(1150): n is a, c, g, or t
  misc_feature (1174)..(1175): n is a, c, g, or t
ttgtttcatcacactgaatcgttggccaagaaatgcttgaaaatcaaaacattaatatcatctttcttcttttttttaaaggtgacttaagagattaaaattaatttggttgctgttggttctgaacaaataatcgagttcttttatttgaggtatgccattttgaagactgagacgttggagttttatcctagaggataaaggaaatctttgggaaagtcagtattttatatagcaaaaatatgaacctcaaactgaatcctctaaaggccccatacaatgaagtagacattggtggaaacatttacacccagtcagcttgaagagtttcaaatggaccctaccactgagaaatcaagatggcagtctactatggggaattgaggaaaaatggattaatacaagagtcctgtgataatatacaaccaagacagggttcttttaacatggattccatgcagtgaatgaagacataggtttcttacccaacacaaatggacagtggatttgactttctaaagactttttttgtggacattttgacatttggagaagaaagatggcacactaacccagataatagtttttatgcctggaattttttgcagtttgatttgtatacgtatgacctcttgaaatgttaatttttaataaaatttgtaacacttaaaaatttctcagtttgggnnnnnnnnnnnaagtggaagtttaattaaatgtttagttttattttagtaatactttggcctttgtagttgccgagtggtaaagtgtactgaatatgaataaagctggtaaattggaaatggtgtaatcgaaaacattttacttggtttatgaagatttacgtttttcacaaagttgtgctcttagatggtcatttggtttaaatactgttttgtttgtgctttcatgaaacacctttcaaaacaactcaatgggtaataatagaatctgattntaatctgccacaagattttaatgaacttgaaacaaactgcttgttgctcgaaaattcaggatgagtgatacacatatacttctgannatatttgtgttgattgaaatggtttcttaagctttntaatactataaatacatctggctatagaatattcatctgaatatttaanataatgtctnctattgncttactattagaaggaagagtgtnngatttatggttaggggtctggagtttcacatt

SEQ ID NO: 436245 - DNA, 898 bp, Homo Sapiens
ccaaaatgtcaaaaaggtggcccaaaaaaaagttcttaggaaagttcaaatcccccggtccaattgtgttggggtaagaaaacctaggtcttcatttcggggcatggaatcccaggtaaaaagagcccggtctgggtggtatattatcacaggactctggtagtaatccatttttcctcaattccccatagtagactgccatcttgatttctcagtggtaggggtccatttgaaacttttcaagctgactgggtgtaaatgtttccaccaatgtctacttcattgtatggggcctttagaggattcagtttgaggttcatatttttgctatataaaatactgactttcccaaagatttcctttatcctctaggataaaactccaacgtctcagtcttcaaaatggcatacctcaaataaaagaactcattatttgttcagaaccaacagcaaccaaattaattttaatctcttaagtcaccgggtccgagcgcggccaccggcacctcctggtcgcccaaacccgagtcccgggccggaccgcccgcccgagcctcccgcccgcgccgggtccagccgccggggcccgggggagcctccgaggcggcaaccgcagcggcgctttcggcgtcgtgggcccggccgccctgggcgcctctgccgcgggctgtgacgccgacgcgcgcggcccgcctcgcctcagccgcggcagccccactcccgcgggcctgctggccgtccgggcgtagctccccgccggccggcgggcctcgcggccgcggcggaacgcctgacagctcggggtgctgctgcctctccggccatcctcgtgccgaattcgccacccaggcctcgcttcgtatgacctgtagggacgattggggggcggaagcagacgg

SEQ ID NO: 436246 - DNA, 408 bp, Homo Sapiens
gtccacccaaatggaatcccggtgaggtgggacgcatctcagatcgaatttaaaagaacaatggaaccctgactacgtttcaacaaaaataaaacttgtttttttccctcctattgggtgttggcttttaactctttcaaagccgattttgaaacggctgcagtgatacatgcgaaggtgacttaagagattaaaattaatttggttgctgttggttctgaacaaataatgagttcttttatttgaggtatgccattttgaagactgagacgttggagttttatcctagaggataaaggaaatctttgggaaagtcagtattttatatagcaaaaatatgaacctcaaactgaatcctctaaaggccccatacaatgaagtagacattggtggaaacatttacaccca

SEQ ID NO: 436247 - DNA, 643 bp, Homo Sapiens
atatttaaagtgcaaatggcttttattgagggcctactgtgtgctgggcaacatgtctgcaagggtcctgctttacctccctgtactttgcaccggccagggaggagggtgctggggagacccaaacatcaagctgggggagggtgctgaggtggaggtagaagggggcagaggggcccctcagctgagtccttagggagggaagggatcctggggtctgcccagcttgaaacagaagctgggggccacaaggccctgaatcaggccaggcagggtacaggggcctgggagtcctgctcctttgctgtgagacctttagggaatgggatccatctctgagtggtttctcccgatgaaagacaggtccagagggcagagtggccatgcccaaggtggtggccaggtctgacaggatctgcagtccctgccaacaacctcctcctctgctctctgggcagtagtggcctgctcctggacactgctttgcagtcatcacctggacctagagctcatctcggggctggggttggaggctgtgcccgctgctgccagtcaggtccaggcgggggctgcgcagggtcttttgggagccgctccagctgatgaggcggccgctgtcatcatcccatggagaggatgtctc

SEQ ID NO: 436248 - DNA, 2031 bp, Homo Sapiens
  misc_feature (1045)..(1071): n is a, c, g, or t
  misc_feature (1622)..(1660): n is a, c, g, or t
  misc_feature (1857)..(1857): n is a, c, g, or t
ggccaggagaaatgtttggaattctatatgtgcaatttttcaacaaatgcaaaaaaaatacagcacatgtattgacaagcttctgtcaagcagcttgagttgaaatttgatttaagaaaataaatcatgattgttcaaagctgctgggacgttagaattaggccatgatactggtctcattttaactacagtggtatttggcactagtgtaaacttccatataaatcactcttttggaacaacaaagggggagggagaaaaatcacggcctgttaaatgagtaccaaagccgcccaacagtaatgagatgttctcatccttgattctcccagcctcaaacaacacagcttactttttatttcccttgctcagaaagtacctgtaatttaacaaacagactgcctgtaggtatagtgcaattacaaatgctctaatcattgtacatacatctctcttgatattgcagcatccatactggctttgtaatcattaattttttggcagattgaatgtgctgtattgatatgtatctatgtaattgtattgtatgtctatagctaattcacgttttgaataatgttattttatttacttttttaagagaggagaatgtaaatttgtcagtttatttctgactagggatattttctttccatttagaaaagaagctgatcggtttcccttactgtcatacagagcggtactagcgtcgtgctgtataaaatcatttgcacattcctgagtagaggtatactgattataagacccaaaggtaatttcatagcaaaatacataaaatcagtcggagcttttatacaaacatggaaaccaactttgtagaacttttgccatttgatctaggattggaatatgagcttttatacaattcatattcttatttggcaaatgcacagtttagtattacctctctgatggcctttactagaaaggcagttttagaagctattgtgatccactaaggaaatgttttaacagctagagaccactgcttgcctgaaagggcgttcttaaatttggtgcagcnnnnnnnnnnnnnnnnnnnnnnnnnnntttaagacaccacctatttgtaagggccctacggcgtggtgtctactaggagaaaacccctctttccaagaagaactcataggttgttaaccgagttaggggaactcaagaattttctctatataatagaagcctttggttaacgtggtcgtctcaataaaaccctgtgattctcaagaagctttagaagagaaccgctgagtggcaaaacacgggggagacaagacttggtgaaataatttggaggcctttaattcagcaacatgggggagctggagaacttcggcgatattggcaagaagttggagggttggggggggctccgagcattagtaccaccggtaggggtgcgcattggacagagatccccctttttcttctggagaacaaaaacaaaaaagtctgtgtattccccccgttattagaggcactgtgtgatgtcatttcttaagaaacccccctgtaatttttttgacgcacccaacaacacagtttcaaaattcaaaggccttagaagaggaattacccatttaagaggtaccccatgaacnnnnnnnnnnnnnnnnnnnnnnnnnnnnnnnnnnnnnnncgacgggaacagggggaaatactttaacaaaggtcattgtgtatttatacaacaccaaagggtctttacacctccagatggggtcataaatagatttaatcacggtgggggggaaagtggcacaaggacgattctaataagagcgggtggtggtcaccaggatggggccccctccaattattgtggttggaaacagnctaagaggaaattaatggagagaggcccagtgagtgaggagaaaaagtatttaaaggaggggcagacgatggtggggcactgtctcattttatcacaaagaaaccaacaaaacagcttattaaaacacgacagaaaaaccatctttttttgtggacatactaccagagtggaag

SEQ ID NO: 436249 - DNA, 484 bp, Homo Sapiens
  misc_feature (378)..(378): n is a, c, g, or t
  misc_feature (412)..(412): n is a, c, g, or t
  misc_feature (471)..(471): n is a, c, g, or t
tttttttaagaagcaggagaatgtaaatttgtcagtttatttctgactagggatattttcttttctaaatggaaagaaaatatccctagtcagaaataaactgacaaatttacattctcctctcttaaaaaagtaaataaaataacattattcaaaacgtgaattagctatagacatacaatacaattacatagatacatatcaatacagcacattcaatctgccaaaaaattaatgattacaaagccagtatgggatgctgcaatatcaagagagatgtatgtacaatgattaggaggcatttgtaattggcactatacctacagggcagtctgtttgttaaattacagggtactttctgaggcaggggaaaaaaanagttaggctgtgttgtttgagggctggggagtantcaagggatggggatcatctcattactgttgggggcggctttgggtactcatttaaacngggccgtgatttt

SEQ ID NO: 436250 - DNA, 854 bp, Homo Sapiens
caatcccagtaatgaaggtttagtttccttgaaggaagctccagaaaaggaaagaagcagaatgagaaaggaatggtacttaggtgtttggtatgctgctcacgtgaagtcagcccacaccagccaaaccctcgtggaagatctgctgcaaccattatctttgttcttgagttcatcatgcatttaaaatgagatgcaagagcatttagcataccatgtaaatatggaccttttaaaattaaaatactattggaagtgctttcaactcagccacatcttagctattagttctttgtgttgtcttatcaaagtttaatggatacagttccacagttgttgatgtgtttgtgtgtatattcgatttttataaagatggtagtaagtcaatacatttatcctgatctgtgtattatttgttcacaaattcaagaagcttaaaggtcgtaaatatcagtatctcataaggtaaaccaatagctgattatgtggagccaagttacttcttttctttttgcattatcttgtataggttttgtgctgtaatagaagttcacttagctactttagataaccttgcattaccactggtctggccacgtttgttaaatccttatactgatattcttctaaagagtaaatctcatcatttttccagacaaattttgaggggtttctctgttttgtggacaggcagcagcctccgtaggcacccgcaccctgccttgctggaggagatgggatggggcgggaggtggcttcaccataactatttttaatatgggtcattcttagcatgatttgtaacaggtctcaggcaaacagttgttgaagcttgcttctgtggcatttctgaa

SEQ ID NO: 436251 - DNA, 784 bp, Homo Sapiens
  misc_feature (46)..(46): n is a, c, g, or t
aacatttggtattgttaaacaggtatagtattcaggacatacaccntctaccacaatttctttaattagggtactttatattttatcaaaaatgtgcatattaatagattgtagtttagcctttgtcaaaagacatgcaagtatttagtatttacattaaaaggattgcctcagaagaaacattgaattcataagccctcttaaaaagtcaaaaatatgcataaagaagactagtattgatattttctgatattttagatatgattaatattttggacctccattggtttccacactatcatgcaaatttccagacttgctttaacacaacagttctatcagctgtattagagggattacacattttaattgctctttttgaaaatatcgccagggcagttcagaatgtctcatttattgagaatattgtgacaatcaaagaccttaatatcagccagatgctaacaattgggaatagggcagaatttaataatggaatgtatgggattctcatttttactcaatcttgaatcatctgagaatgttttctattcaagccagtatttttagataaacacagatatagatatcgctactttgaaaaaaatcacttattttaaactcagaatttcttagtactaaatgctaaccaatacacattttatacataatatgtacagcactttgttaccaagcgccacacagactaggcacatacatattagttaccttggttttcacaggttgtcaacttctgcatattgtgtggcaaggagatactatc

SEQ ID NO: 436252 - DNA, 433 bp, Homo Sapiens
ggtttggcatagtttattacaattagtgtgcgcataaaaccatgtaaactctacaaagtaaaccacttcccctccacactaaccagcagctagtctgccatgaccttccagcacccccattattttaacatatatacatttcacaggatgtaataaccacacaaatagggttataatacattcttcagggaaaaaaatttttggtccatattttctattaaaaaaacacacacacttccctctttggcaaaagaggttaaatctcccatagttaactcacaaaagaaactcaaataaaaactactgagcatgaggtacagctgatgtctggactgttctggaattacagacgcctccttgaggggaaaatcatttcttataaaatgagatcagtttccaacagtttcatgtagtagaaaagctcgatttagac

SEQ ID NO: 436253 - DNA, 445 bp, Homo Sapiens
  misc_feature (361)..(361): n is a, c, g, or t
  misc_feature (399)..(399): n is a, c, g, or t
aacaggaatgtgtgggtaggaagtgggattgaggtagtagtggtattgaaaaatgcctcttttgtttcagaaataaataatataaggcagtgaaattcacaatctgcagttaaaatataaaagcagcaattctatgttcatagtcttgcaaatgttttccaactacttttgataactaagaaatattatattctgaaaaaagttcatactaaatatacaacacaaacatgcaattccctctctgcagaataatctgcaatttggtataaatgttagtgtgtctaaaacaaggaggtttaaggcaatatggaactgtatcccgttgatgcactaacttcatctacatggcttaaggtttgtnggttgttaaagagatgtatacgagcattctatgccccngcgtatacagagatagaagaggaagataagtaattgcaatggagtt

SEQ ID NO: 436254 - DNA, 954 bp, Homo Sapiens
  misc_feature (649)..(649): n is a, c, g, or t
  misc_feature (651)..(651): n is a, c, g, or t
  misc_feature (657)..(657): n is a, c, g, or t
  misc_feature (659)..(659): n is a, c, g, or t
  misc_feature (661)..(661): n is a, c, g, or t
  misc_feature (663)..(663): n is a, c, g, or t
  misc_feature (669)..(669): n is a, c, g, or t
  misc_feature (671)..(671): n is a, c, g, or t
  misc_feature (673)..(673): n is a, c, g, or t
  misc_feature (876)..(876): n is a, c, g, or t
  misc_feature (880)..(880): n is a, c, g, or t
  misc_feature (896)..(897): n is a, c, g, or t
  misc_feature (909)..(909): n is a, c, g, or t
  misc_feature (912)..(912): n is a, c, g, or t
  misc_feature (918)..(918): n is a, c, g, or t
  misc_feature (926)..(926): n is a, c, g, or t
  misc_feature (928)..(928): n is a, c, g, or t
  misc_feature (932)..(932): n is a, c, g, or t
  misc_feature (936)..(936): n is a, c, g, or t
  misc_feature (940)..(940): n is a, c, g, or t
  misc_feature (945)..(945): n is a, c, g, or t
  misc_feature (952)..(952): n is a, c, g, or t
atgatcaccagtgacaagtgttttaccaacaaacacatgagtcgggggaagttacatggtgaggtgggagggcgagggatagagaggtccccctggattggcctcagccaattacatcccgagtctgggacccagccccactgtcttcccgctggaggctgcaacgattcatcttcagctgagtcagctggatgtagcggagcacattggtgtctgcaggggaggtgggcagggcatcatctgggtgtcccggggcagcaggtgacttccacacctccctggctcacaccccattctccgaagtatccagcagctcgctcacacagccagtagagccagagcccttccccaaagccccagtcacagtcggcagtccccagtcacagcggagccatcgcacacctctgtgcgcctgtatttgcggcaccctctgccaggaatgcctcttcgcagaggctcccgtcacacttctcatcctccagcgacatctgcaagaagtctgttctctccgagccacttaacaggaaaactaatctcgtctcggctcccacaaccctgcacctgttgtaatccctcttccttcttcattggctcttaatacaaaactgagtgttgtgtctgccctcctgcactcatgtgtgtaaagtgnanacatgnangnanatatanananatttctatttcctgtcatcgcccacccgattggatgagtggatggtgcaggaagtgaatgaataggtgtgcgtgaatgggtgagtggaggaatgagtgtgttcggtaggcaggggttggacggggtaatggagatgacagtgggttgatagggaagtgacttagcaggtgaataggagctatcagatgtggcaatgacggtanatgnaaaatagacagggganntttataggagtnatngtggangatgtttnantgcnggtnaggntgggntgataantg

SEQ ID NO: 436255 - DNA, 1661 bp, Homo Sapiens
  misc_feature (48)..(84): n is a, c, g, or t
  misc_feature (559)..(592): n is a, c, g, or t
  misc_feature (1622)..(1622): n is a, c, g, or t
atgtatagatcactatagggcgaatggagctcaccgcggtggcggcgnnnnnnnnnnnnnnnnnnnnnnnnnnnnnnnnnnnnnatcaggccaaatcggccgagctcgaattcgtcgagagcggagcgcggcgcgctgtccccggtgctgatgctcagcgctgccccggtagcctccgccgcgcccgcctcccgccctctccccaccgggctcgggcccaggctcgggctcccgccatggctcggctcgtcccggtcctaccccagagccgtcggggagcctgggcgcggcgctcgacagcagcctgcgtgccgccgtggcgttcaaggcagagggccagcgctgctatcgagagaagaagttccgggaggccatcggcaagtaccaccgagcgctgctgcagctgaaggcggcgcagggggcccgccctagcgggctgcccgcccccgcccccgggcccaccagcagccccgggccggcgcgcctcagcgaggagcagcggcgcctggtggagagcacggaggtggagtgttacgactccctcacgggtacgccgtcnnnnnnnnnnnnnnnnnnnnnnnnnnnnnnnnnncaatcgggagagcttggcgacttgggggccaggggccctggggctgaagggtccagggctgtgggcttctgggggagccttcagagcttgatcaaggaaagggattaggggtaggggatgacaggggtctgtggctggagggagctgggatgcacggaaatggtctttgggtcgggtattcagggcctcgcttcccctgagtcattctttccaccccctggccgcacgtggacccaaggtgaggaagtctgccctgagccaggctctcgaggtcccggccctcgcccccgcgcggggcccttagtgctcttgcccaccgacagctctgggtggatcgcccagtggcgcctgtccgtgttttggcgccccctagcagcggcgcagttgcgcctgtttcgataggcgagcggattggcgcccctggttgccggagcaatcccttaggcctggttccctgccgcctggagcctcggctcctcgcagtcaggtgggttctgggggtgccagcaggctctgagagtgccggtcgtggtgcccttgctgtttgcctgctgcagtttgagctggtaaactacgagcgcgtgcgcgagtactgtctcaaggtactggagaagcagcagggcaacttcaaggccacctaccgtgccgggatttgcttctaccacctgggggactacgcacgcgcgctgtgctacctgcaggaggcccgcaaccgggaacccaccaagtaagtggctggggcgggggcaaaaggtgagtgcctgggcccaaggctcgggaaaatggcctgtagctgtggggaacacgtctagtaaaattagtgcgacattatagatagccctctcttctccgggggaccttctttattgtgtagggggtgggcccaccaccctcctcctctagacgccctctccttgctatgacttttaccctgcccttttaacctccatgtcaatcatccttgcccccattgtgtctcttggtcatatttacccggtctttctcgtattaccctaaatggccatttctnctattttctttccctcctgtttatgctctacctttctcc

SEQ ID NO: 436256 - DNA, 879 bp, Homo Sapiens
gtttcccctccaagacaccacacaagttatgatcaccagtgacaagtgttttaccaacaaacacatgagtcgggggaagttacatggtgaggtgggagggcgagggatagagaggtccccctggattggcctcagccaattacatcccgagtctgggacccagccccactgtcttcccgctggaggctgcaacgattcatcttcagctgagtcagctggatgtagcggagcacattggtgtctgtgggttcccggctgcgggcctcctgcaggtagcgcagcgcgcgtgcgtagtcgcccaggtggtagaaggcaatgccggcacggtaggtggccttgaagttgccctgctgcttctccagtaccttgagacagtactcgcgcacgcgctcgtagtttaccagctccgactgcagcaggcaagccgtgagggagtcgtaacactccacctccgtgctctccaccaggcgccgctgctcctcgctgaggcgcgccggcccggggctgctggtgggcccgggggcgggggcgggcaggccgctagggcgggccccctgcgccgccttcagctgcagcagcgctcggtggtacttgccgatggcctcccggaacttcttctctcgatagcagcgctggccctctgccttgaacgccacggcggcacgcaggctgctgtcgagcgccgcgcccaggctccccgacggctctggggtaggaccgggacgagccgagccatggcgggagcccgagcctgggcccgagcccggtggggagagggcgggaggcgggcgcggcggaggctccggggcagcgctgagcatcagcaccggggacagcgcccgctctcgacgaattcgagctcggccgatttggcctgat

SEQ ID NO: 436257 - DNA, 777 bp, Homo Sapiens
ttttttttatcttgtcagttatttattatgtgtcattctaaagactagcacatttacagcatacatggctttgaatgacctaagaatatataaaacagtaactgtatgtttatatatatatagtaatactgcccaaaacaaataaataaaggtatcataatgcactaagcttggcaaatacaattgtgtagggacaaaactgtattatacaatatttttacatctttaaaggaaactaaaggcaactgtgctctgtaggagctctgacagaatccacattacattcccagttttccatagatctcttttctttttaaatggggaggcatcataaggaacactggacggaacctctgttttacggtaacctgtaaaactgccttccctgcacctctgaaaacccaaagctcctacagaagagaggagctgcttgcctctggtgccacacaccctcacccctgcaggcactggaagcgtgtgatgctgccggaagccccaggaatgatgccttcagagagaatactgaaacctgaaccttttctatagcatttgcccaagtcttacagttttatggtgacccattacatagagcaaaaattgggaaaataattcatataaaggtgtcacatgcaaaactgctgacagatgatcaacatttgctatattccctttgatgagtgcagatatttaatgctctccagacaaaaaagatctgaaaactatgtgggtaatatttatttttaaaaagcaaggagattttttaaaagttaaaatgag

SEQ ID NO: 436258 - DNA, 468 bp, Homo Sapiens
gcatttcaaatattttaatagttttatttcgcaaagagaagcctaagaatttttttaaaaacatttccagagagaacactttataccataaaataaacttgtataatttgggaggacaaatcatctcaaatgtatatttttgaattatgtgccaattttataattagtacaaaaatgacagctgaaatattttaaaaatgtaaaaaccagtccaggcaacataactataccatcttgctgtaaaagtacttatatcgaattccgcacaaaatatttttgcaatatgctaaatttagttcttcaagtcactcttcactgccggctggcttttccattttctgttgtctccatcccattttcctctttaagatgttgatatagttcagctctgttattaacagagttcaaacgtccagcaaattcctgatgttttctggaattggcagtattgattctattactccacaa

SEQ ID NO: 436259 - DNA, 557 bp, Homo Sapiens
acattctatctaaattgtgtgtctgtttttgaaaggtgttgctttcaagtaggtggtttttatttaaagtacttatttttttgaggttaaaatattcagaaactacttttatgcattgtagcagtaatcatttatggaatgcttttgacatgttttaacagggtaaccaaaacttttaggcctgttttttttggttgtccttgttgttatatttttaatggaaatctgttactcaggctggtagcattaaattagctttttaccctcaactcaagtagcaaatatcatggagaacttcagtgtttagaggctgttaatttcccatctatgaatagcactttatgatgtaggctaaactaagcaaataatgcagcgttatgtggatcattatgcaataaagctgctaaagtcacatttgtggttgatactcaagccttgtacaagcacatatcatgtagacatttttaaatgtgaagctttaacaggaataggatagctgtttcaaaccttgtgcaattgtaaataaattgtttagctgtgtttctttcatttttaat

SEQ ID NO: 436260 - DNA, 1200 bp, Homo Sapiens
  misc_feature (799)..(822): n is a, c, g, or t
aggactttccaatattccagcccttcctttaatttcagttcgatttcccataacaatttttggtaatttggtaaggggtcctaaaaaatttaaaaagaaattgtatttctatatatagaactgcctgcataaatccactttcacctttcataaaaatggttacattagtgtgtgatctgcaaaaactaataattttcaaactttggaacttagaatgaaatgtaaatttaatacaaatagtctgactatgtacaagagaaggtaaagttttcaattctcgtattatcagaaacatcataaagaaagctagatttataacacacttctattcctatgtgcatctgaagtatgtacaataaaacaccaacacagctttcatgtgtcaataggggaagtgcaagcaagaatgacttgaagtatccaataaagcaatctctatagaccccaaaatcaggctaaaaactgcaaacagctgactgcatccttgccagttctcaaagaaaaatttcatcactaaaaaataggtgtcaaattcactgaaaaactaagttgggttctttcattaaacctgggaataatgtaacatcaagtatttactatttttgcaagagaaataaaattggcagttccatttttacattacttaagaaaaatttaagagtgtttgaagaactgggacaagacattccaaacctacgacctaaaaatgaagcaagggatacatactgtccttcagcacatttccccacctgatacagagaaatttaccattagaatattagctgtgtgtggcaaggcnnnnnnnnnnnnnnnnnnnnnnnnaatcagacactgtcccagtctgttgacaaggacaaaaaggctctgaataggtcaccatcttcaattctgaataaatttcatatttaagaattctcaaatgcttaaaatggtggtcttttcagctacccatcctaagaagtcaagtacaagcatgcaagctaaattcacaggcacagaggatccatgttaaaaacagttaaggtagctgtgatgcaacaccaacaatttgaatggccctgacacactcaaaatattatcttaattattcaacaaaatcctgaagcaaactcttgctagtcttggtacactgctacacactgaagtagcatgtttcttccatggttttagcttagctcagggaatttttacactattaag

SEQ ID NO: 436261 - DNA, 565 bp, Homo Sapiens
  misc_feature (487)..(487): n is a, c, g, or t
atcttttaaaaatacactttaatctaaccatggaatttcacaaacatttatatacaatcagagactaatttgaagtatgttttccattcatttcagccatgagaaaacacattgcagtaaaaattaaagatatccatccataaattacttttatttctcattaaatgagcacagagtcattagtatattaataacagatatgtttattattacatatccatcagtgcggctttcaataccacttgaaacatgcatatcatcctagagacgatcggttttccagtgcttcttatctgatacacattactgcaaagccattataaattactgaggaggtatttggttaaaaaaataaacaataaatcatactgtccatatgaatcaactcttgttactggacaagagtttaacagtatttatctggtaattcctatgttaactgggaaacatcatgggtgtattgccatatttccctttttatgttggngcaaccttctacattttttgcagttttataaagtcattattgtagcaggtaggtttgatgcaaagattggactcaatt

SEQ ID NO: 436262 - DNA, 1124 bp, Homo Sapiens
  misc_feature (604)..(604): n is a, c, g, or t
  misc_feature (736)..(983): n is a, c, g, or t
  misc_feature (1022)..(1022): n is a, c, g, or t
  misc_feature (1026)..(1026): n is a, c, g, or t
  misc_feature (1051)..(1051): n is a, c, g, or t
  misc_feature (1065)..(1065): n is a, c, g, or t
  misc_feature (1072)..(1072): n is a, c, g, or t
  misc_feature (1085)..(1085): n is a, c, g, or t
  misc_feature (1099)..(1099): n is a, c, g, or t
  misc_feature (1101)..(1101): n is a, c, g, or t
  misc_feature (1103)..(1103): n is a, c, g, or t
  misc_feature (1110)..(1110): n is a, c, g, or t
  misc_feature (1113)..(1113): n is a, c, g, or t
  misc_feature (1121)..(1121): n is a, c, g, or t
gacgaaagacagaattttatttccttagtttattaaagatgacaatgaactgccaggctgcacaagcaccacagcaggtggaaacgcagttcagagcacgggcggcacacacggaacatctctactaagactcgcactccttttatgttagttcaacgaaagctctaaatccttggcagagaacgtcaaaaacagcctcatttaagtggaaaatatttgtcttccactcttctgctatgtcttgaatcttgtctccacctggtaagcaaactatgttttttttctttccctttacttacagaaagaacactatcacctgccttcatttagaaggaattctcttcagtgcattcaaagcttctccccgcaacagcaggggattttcagatagtggtaacttgcaaagtgcttccaaaacatcccatcctctacccacttcccccctcttgaataaataactgggtatttggaaggtgaggacggcatcgtgtcagagtcactaaaacagacgcacgatctaaagggatggggtgcggttgagggagctagggaaaaataagtgacaagtgaggagcctatgagactgttgagttcggcttcagangctgtcagcattgtcatcctttgatcctatgctgatgtgaaacaggcaggacaagacggcacatctgtcctccagcgcagtgacctggagaaagagctggatgtgtcacctttttgttttttgagacggagnnnnnnnnnnnnnnnnnnnnnnnnnnnnnnnnnnnnnnnnnnnnnnnnnnnnnnnnnnnnnnnnnnnnnnnnnnnnnnnnnnnnnnnnnnnnnnnnnnnnnnnnnnnnnnnnnnnnnnnnnnnnnnnnnnnnnnnnnnnnnnnnnnnnnnnnnnnnnnnnnnnnnnnnnnnnnnnnnnnnnnnnnnnnnnnnnnnnnnnnnnnnnnnnnnnnnnnnnnnnnnnnnnnnnnnnnnnnnnnnnnnnnnnngtgtgagcactgtgcctggcctggatgtgtatttaaacnaaantgggagtagagctcatttttataantcctggggctgatntgggacnaaccctagttaanttgagtctgtgggncntnttaaacnccntgaagacntgg

SEQ ID NO: 436263 - DNA, 515 bp, Homo Sapiens
  misc_feature (446)..(446): n is a, c, g, or t
  misc_feature (453)..(453): n is a, c, g, or t
  misc_feature (463)..(463): n is a, c, g, or t
ggaaaggccactttattgatggagataaaactgaatggagttccccacagccctcccctcactcatgttagtggcttcactgggcatctgagaccagcgtggcctgtcacccacatagactaggctgcttagcccacccagcctatcacactgcccgctccacgttgggcagccacataaaaacacgtcacagctcaagaagatccgtggatgcacctctgaatcccccccaatggtttctgtgcatttttttaatattgtacaaaatatgttaactaggaaaaattagctgtactgtgacaagtgcgggacgtcctattaggattaccgtcccccaggcattacttcttattgcagtaagacctctaaaaggtggagctgtacaaacgagggaaaatctaaacgattttaagaagagcagcaactcaatactgctttagttcatntaaattntctttcccanaaatacactcctaaatatacaaactatacaatcttattattttaatgctggg

SEQ ID NO: 436264 - DNA, 494 bp, Homo Sapiens
ttcaaaataacataaatcttttattgaaagtcactttactaatgttacaatgggagtaacatagaaaaccatggtatcttattagcttccgaagtgaatactaataaaactgtgccagaaatttgaaccttaagttacagtgacctttaaaaacatcaagattttgtttacctacaatgtaagaacaattttataacttgaacagccataaaacaaatcacacttgctcaggaaagcagttgccatatacatttccattggtgtttgccataaccccagtaattattaaaatagcttaacgaacctgaagtgcagagtagcagagaaatgttaaaataatgcgaatctaagtatatacacatggattacctgattaccaaaagtgaaaccatgctggctattaacacctcctcatggggtgggcttccactatctatagatgcacatcacctgtcaaaggtgataaccgtggaaaacactagtgccgacctaca

SEQ ID NO: 436265 - DNA, 1338 bp, Homo Sapiens
tttacaattagaaggactgtcttagtccagtcattttatttcaaatgaaaatatactctcgttttatctattttacttatttaataaagaacagatggcccaaagcagttttctttaagtttttctgcttactccttctcttaatataaagaccaaaaaaatactggtacctaatgagagcatttattatttgacatagtaagaattagtacagatcctatgttgtaacgtgttccactcatgttgcctacccttctttctatataatctaacagccttcattgcacagttcatttaacttatgaacacttcagttccaaaattgttaaatcaagattttaagactagaactaaattgtttaatagagaatagaagaaaaagtcatttacttgaaaatgcacatattttcatcttacatttctctcaacaggaaatataatgtgtatattcatttttccataatacctaacaagaagaaatgcttaattttaaaaaatacttcagctactcactaaaaccagttcttgaaaaactttccacatttgttaatgctgaaaaaaatgttcacgtttgttaccagttcttaagaatgagggagacgtgagttctcgtttctactgttaatctgcatcatgttagaaagagggaatgggcaggggttccaggaaggtgtgatgtctctgaattcggtttagaagctgctgtgccacaggtttgaattctgtttcccaatggagtttgtgatagttttttaggtctggatcaaaactgccatccagtgctagttcttcatctcaaaatgatgagagcaagagtaagagtgtgttggtgtcttcatttcctaaacatgacgaagcattagtgatgttttcactgaagttccataaagttttacaaaccaagcaggccagctgccaatcagtaggacccaaatctcttaaacagtccactaactttttaatgccacctccttctttcaagatgacacgcttgtctttatccacagtgagattgaggagaacaccacaggcagaaaagcagatatcctgatgctgagcatccagcagcgccatcatgaacctgtggacattgttctgcacaatgaaatcgcagacatcatggtcctgggagagatttccgaaaacacgcacagcctccaggattccatccatgttgttactgacaagaagctttaagagcaattcagcaatatatagctttttgtcttgaattatggaattcttcacttggtagtaagataaattgttgattgtcgctgtagcattgatcaccagctcctcacatcatcaagtgacttgtattctggcagctccagg

SEQ ID NO: 436266 - DNA, 821 bp, Homo Sapiens
  misc_feature (11)..(11): n is a, c, g, or t
  misc_feature (54)..(54): n is a, c, g, or t
acaaataaagnttattgctgaatttccccattaacattatagaaaacactgaantttcacaaattattgagagcccaacagttaaacatactttatttaaaaaagtacaaaagtgacattagaaatttttttgaagaaatgtgtatcatctaacagaaaagaaatatgaaccagataatgaatggcacaaatatagcactaaaggggtactcactaaaggggtactcagtcaccacccagaaattgtccgagttatgaaatagattcattttgagaagttacacagtttgtttatgaactagcctgtcttgtttctgcctcttgtaagaaaagagctaggtctttatgctgctaggacaaaatactgtacatgaattggagaataaggaggggtcatccttctccccggtaccggaacaagagaacagttagtacagaaatggctttggcactttaacccttaggacattgtcccaaaccttgttacttgagttttgtagccttaccattggttttttttaacaccgtatcattttcatactttttatttactaattatttatacccacatttttacattgcctttcattctaaaacaatagagaccccaaacaggtttacattaagttttctgtattagcagttaacttagatagcttccgtttggtggttggggtttccccaataacgtgtttgattattgccattcccgtacaatttttatcgtgtaatgcctaccttctgagaattgacttaagggcttgttttttatgccaatcgggtttatctcctaaatgtatttccatcgtgagggcttaaat

SEQ ID NO: 436267 - DNA, 345 bp, Homo Sapiens
  misc_feature (120)..(120): n is a, c, g, or t
agcacaaagaaacaatttgctttacttttcttacgaatattttcatatagcaattgctttttgttttattacacattctgcatatgtatgtagcagttgttttactcattaagatctttngagggaagatttggaggggcaagattctaaagcaatgtcttataacccacttttttgaagtttatatgtaataagccaattatttatgagctttttaagaataaaggatgtctcaaaaggcttagtgcagttttagctttaataacttcagaagtagaaatgctgcacacacttatttaagtttaattctttaaatgtcttttacccttagttttgtgaaatttt

SEQ ID NO: 436268 - DNA, 642 bp, Homo Sapiens
  misc_feature (594)..(594): n is a, c, g, or t
  misc_feature (617)..(617): n is a, c, g, or t
ttttttttcaatacaattgttttatttaacacacatatgtacacaggaacattcagcacacatagagtctattaagtggaatcattaagaaatgtctggagaggcagacattttaattcactcgctgtacacagggagttcaatcatcacattttcatacaggtgtcacgtcatgtcatcttttgcttgtaaattaccaatgaagccacatatgtctctacatatacaaggacaggtccaaatacagtgccagtgaaatcaataaaacattaaaggtgtacgctgggatgacaatgcagagtttacctcagtgctgagaaatctaagctgggatgaagtttgggactgtggctattaaaatagccaaggagagatttatgttaacaagaatgcagatattagtttagtagttagagatgaccgtctaatcatcaaacatcgtccaccccagggttttgcagccatagctttctactggccttggttgcctgtgcagacggaatacgtgaaaggcctacccacgcttgtggcccagggctattgctcctctgggcccctggctttgttctcaaccttcgtggcggggggagccanccgtgtgtttgcggcaggctgcntaccgctctcacacctctttcctcc

SEQ ID NO: 436269 - DNA, 402 bp, Homo Sapiens
  misc_feature (385)..(385): n is a, c, g, or t
ttttttcaatacaattgttttatttaacacacatatgtacacaggaacattcagcacacatagagtctattaagtggaatcattaagaaatgtctggagaggcagacattttaattcactcgctgtacacagggagttcaatcatcacattttcatacaggtgtcacgtcatgtcatcttttgcttgtaaattaccaatgaagccacatatgtctctacatatacaagggacagggtccaaatacagtgccagtgaaatcaataaaacattaaaggtgtacgctggggatgacaatgcagagtttacctcaggtgctgaggaaatctaaggctggggatgaagtttggggactgtgggctatttaaaataggcccagggagaggntttatgttttaccagga

SEQ ID NO: 436270 - DNA, 363 bp, Homo Sapiens
  misc_feature (49)..(49): n is a, c, g, or t
  misc_feature (51)..(51): n is a, c, g, or t
  misc_feature (336)..(336): n is a, c, g, or t
  misc_feature (356)..(356): n is a, c, g, or t
  misc_feature (359)..(359): n is a, c, g, or t
atagaagtactgatttttattgttatacaacacatatatataatttttntnccccaaaatatgcacaattacatgtgtcaattttaaaaaatgaatgaagactataatgtaaaacctatagctgtaaaattcctagcacaatacagaagggtgaagcttcattacaactggtcgtggcaataatttgggggacgtagcatcaacggatgagaccacaaaagcaagggaatacacatggtactgaatcagtgtatgacaaatatcccaaacagacaaagcagaacatggaatagatatatgcacattgtagtattactcacaaacatgttacctggnagcaaatgtacccttaaggntgngtag

SEQ ID NO: 436271 - DNA, 979 bp, Homo Sapiens
  misc_feature (534)..(534): n is a, c, g, or t
  misc_feature (884)..(884): n is a, c, g, or t
tgatggaaaattgctttattcaacttcacctgccgctcgagaaactcacccttacgaagattccagcactttatatgaattacccattatggtttcctcccaccacatcactgcactattttagcacttgttttgcaaaccaccaactgcgtttacaagtagaaacataatcaggaggcgaatgaccttttgtagcatgtatctgaagctggtttatcagacacttcgtcagccaactgtccaggaggcaaaatgactatctatgatgatagatagacagacagatagatagttagattaaaaggtggggaaacatcccttttccctttttcctttctatataatctggttttttctctttacccccttttctcgcttcttcccaccccgttcccaaacctgttactagggaaacttgaaaaagaatcagatacattaagactacaaatcgaaacaaaagtttatacccctaaaccatgattccattgtcaagcacaaatcattgcaagagcccaacgtcggtcgccgcaccgngatcctgacaaagcctgtatggagccagaacaaataagatgttaattgcagcctcgcagagaaaaaaatactattgttccagccagagacactcagcagctcggtagctgggatgtgccccctccgctgcggactggatcaattctgaatcccggtactgaaatgacagctctctggctgcgacaggtctgcgctgaaagaaagagaaagacgatcaagtccagcattcacttcccacccttcagagtcgccttcccatcctccgcacccccctgcctcgcctcccagtgagtttctcttacagttggtcgccgccagccccagcggtgggaactgaggatgcaaaaacntcccagacgcagaaaataccgctttcgggacgtgcttgggtttgagtagccgtgacgtgcaggcgaaccgcggccctggctggagctccgtggag

SEQ ID NO: 436272 - DNA, 2222 bp, Homo Sapiens
  misc_feature (41)..(42): n is a, c, g, or t
  misc_feature (810)..(810): n is a, c, g, or t
  misc_feature (815)..(816): n is a, c, g, or t
  misc_feature (823)..(823): n is a, c, g, or t
  misc_feature (834)..(834): n is a, c, g, or t
  misc_feature (844)..(844): n is a, c, g, or t
  misc_feature (856)..(857): n is a, c, g, or t
  misc_feature (859)..(862): n is a, c, g, or t
  misc_feature (876)..(876): n is a, c, g, or t
  misc_feature (883)..(883): n is a, c, g, or t
  misc_feature (896)..(896): n is a, c, g, or t
  misc_feature (1020)..(1020): n is a, c, g, or t
  misc_feature (1047)..(1047): n is a, c, g, or t
  misc_feature (1054)..(1054): n is a, c, g, or t
  misc_feature (1065)..(1066): n is a, c, g, or t
  misc_feature (1069)..(1071): n is a, c, g, or t
  misc_feature (1087)..(1087): n is a, c, g, or t
  misc_feature (1089)..(1089): n is a, c, g, or t
  misc_feature (1102)..(1102): n is a, c, g, or t
  misc_feature (1170)..(1170): n is a, c, g, or t
  misc_feature (1178)..(1178): n is a, c, g, or t
  misc_feature (1338)..(1338): n is a, c, g, or t
  misc_feature (1551)..(1551): n is a, c, g, or t
  misc_feature (1679)..(1742): n is a, c, g, or t
tgtggcttttttttggcctataatttgaaatggtgattttnncatgtattcagtcataaaagtggaccaacatcaatagaaaggaaaggacagagagctgagggtgcgtaaactgctgctctctttttgctgttgggtcaacatgtcagcaatgctttcatatggagcaggttgcagacatgaaacaaaggtggttcctcctttctttgcctttggattagtgctgttgccttagtgtccagagacatagcctgttcaatatagggttctttttggtgattctttattataatcccctgaggaagtcagacgagcctggggttacttggagacagtgtcttgcttggcgtagttatcatccacaaatcatctgctataactatatctcagaaggatcatcatcaggccagctcagtagcctgcaatttatgaaggttactgagaaacaatgctgaagggtgaagcgctttattaagggtggctcttctgtttctgaccctgccctgacttctacttgaatataaatgatcctgggagtaagtgaacctttccatttaggatttaggcttttaaattgtccctttcagctgttattcttatgccactgtgtcatgactttaagaatttctaagaaacatcaaaatctagtgttacaagataatatgagaaatcactagatgcaaaatagaggtataactgaacctcacattacattctttccttttgtatgtataaaccatccaaagcattttcttcctccgtttttattccacatctgtcatgctttttttcctctggataaagtaacanaactnnccaaatncccttcccccncccataattncgatctctaggnnannnnaaataaataaaacntttttcncctttgtgttgcncaatgttctttgtttttaaaagaaaatgtgttgcttaaacggtgtttcaaaatttgttctggacataaaccctaattatttccttttaacatttccttaaatgaataaaaaatattgtaaaganccaaaatgacacaaaaccaaaatgccncccaggntgctctcttgnnggnnntttgttactggggaantngttaaggcctgcnggggaattattaactgtttccccttacagtgtttatcccaggcattcgtttaagacgggaaagccttnaagagggncactctattaatatgcattaagaagtaaaggaccaattttaatatttcaaacaactccagtggataacagaccataaacttcctgttttcactatcaatctcttttaaaatggtgttcttggctatccataatcgccccagggggagagaaacaagcggnggaaaaaaatgcaagagtgaggggaacaaatgatggaaaattgctttattcaacttcacctgccgctcgagtaactcacccttacgaagattccagcactttatatgaattacccattatggttcctcccaccacatcactgcactattttagcacttgttttgcaaaccacccactgcgtttacaagtagaaacataatcaggaggcgaatnaccttttgtagcatgtatctgaagctggtttatcagacattcgtcagccaactgtccaggaggcaaaatgactatctatgatgatagatagacagacagatagttagattaaaaggtggggaaacatnnnnnnnnnnnnnnnnnnnnnnnnnnnnnnnnnnnnnnnnnnnnnnnnnnnnnnnnnnnnnnnncccaccccgtccccaaacctgttactagggaaacttgaaaaagaatcagatacattaagactacaaaacgaaacaaaagtttagaccccgaaaccatgattccattgccaagcagaaagcaatgcaagagcccaacgtcggtcgccgcaccgcgatcctgacaaagcctgtatggagccagaacaaataagatgttaattgcagcctcgcagagaaaaaaatactattgttccagccagagacactcagcagctcggtagctgggatgtgccccctccgctgcggactggatcaattctgaatcccggtactgaaatgacagctctctggctgcgacaggtctgcgctgaaagaaagagaaagacgatcaagtccagcattcacttcccacccttcagagtcgccttcccatacctccgcacccccctgcctcgcctcccagtgagtttctcttacagttggtcgccgccagccccagcg

SEQ ID NO: 436273 - DNA, 1530 bp, Homo Sapiens
  misc_feature (441)..(599): n is a, c, g, or t
  misc_feature (620)..(630): n is a, c, g, or t
aaataatgtgggttggagggggtgcaaatgttgaaaggggtggggagggatagctcagtgaccccatattagaaagaatcttgtggaggggaggcggccgctgtgaaaggcgatggaataaaattctggggactttccgtttattgttgccggtttcacagggcttggttccctttttctgtgtaggggaatgggttccctttcagaagttttaccgttagtggtaggggtttaaggacccccaagggaaaaaggcttttaaaaaggggagggacgaagctgggagggaaggaggggttatccaaataaatttttaggaggtagggctggggcatgggtgggtttaacgcccggtaaaatccctagcacttttgggaggccagaggccaggtagatcacttgagccggagttttcggaaaccagcctgggcaacatggaannnnnnnnnnnnnnnnnnnnnnnnnnnnnnnnnnnnnnnnnnnnnnnnnnnnnnnnnnnnnnnnnnnnnnnnnnnnnnnnnnnnnnnnnnnnnnnnnnnnnnnnnnnnnnnnnnnnnnnnnnnnnnnnnnnnnnnnnnnnnnnnnnnnnnnnnnnnnnnacagagtgagataccatctcnnnnnnnnnnngtttagaaagtatttggggggaaaaaaaggtatttggagatttttttaaaccacatactttatttgatgtcaacatcaaagaaggaatattttaaaaagcacatagaaacccttaagttagtaatattttaaactgcatgaaaaacatattattttacatcttgtcatactgtatatacaactgtacataaacttctgcatttcaaagcacttgtcatttataaagtgaaaagtttgaaagtgctaaataaacatttcctaattattatttttaaaaacagcactcttttggaagttatctcttctttgtgcttatagttgatctgcaaacatttcaagtcaaagtttctggaaacttctttaggaaacatctggaaaaaatcatagtagacaagggctaagtgcagacataagcagctccattttataaacaaaatttcgaccttccattttattccactgaacttctttgaatggcccacgaagatgactccatttgttatcttgtaaaacatcactttttggaaggtctttacattggttacgaggaaactgaaccataatcttgctgccactttcaggtccattacgaactgaaatagcatagtcaccacttggggaggccaccgtgatggcagatgcattaccaatgctctctataggtccaagtcccacatgattactgaagctcagtacttgccagcccataaccttggcgagttgctgaactgcatgtacctggtgctgtgacatctgagacagaagaaaatcctgtagctcctgctcctgataagacagtgtaattactcttccatctctatgtacaactcgaatctgctcaactccaatattcaattgcagttgaatggacttgcatatttgttcatagccttgtgatcc

SEQ ID NO: 436274 - DNA, 607 bp, Homo Sapiens
  misc_feature (204)..(237): n is a, c, g, or t
  misc_feature (593)..(593): n is a, c, g, or t
acaataaacatttattaagctgtaattttcacaatattttaattctgttctgagatctacaaatatctctacataacaccaaagccagtgatttaataaataagaggaatgtatatatcgctttgcaaaaaaatgcctgatacatttatctctatataagatatttgtagaatcagtttcccaaggctcacgaaactaaagtgnnnnnnnnnnnnnnnnnnnnnnnnnnnnnnnnnntattcaaatcaaatggatttatattaagtgccaaattaaatgctatacaaaatttataaccagatacacaaaatatgaagtcaatcatgaatccactgttgataatggataccatacctcacaagtgtgatttccagttaagaagagggagacaattgcttcattgggtttttagtgtgtgctaatcaccatcaccatcacaagttaatcagtttaattacatggtattcagagattaaacacacatgcagatattaaatggacactacaataaaacctttaaatctgcaaaaagacatgagaacacatggtcaataataccactcgctgccacagcttttcagtagacaatgcanatggcaatcagcgt

SEQ ID NO: 436275 - DNA, 408 bp, Homo Sapiens
  misc_feature (66)..(67): n is a, c, g, or t
  misc_feature (144)..(144): n is a, c, g, or t
  misc_feature (397)..(398): n is a, c, g, or t
aggtggcacattttatagtcaatcatagtggatccttctttctagttaattgtacatttcctaagnntggacaaacttttatgatcaactgcctaaaattccgtcctactggtgtgattgaaaccagggcctgggacgtctgtntgctaaaggaactttcacattatcttttcaactttgccatatatctgtggctttgataaagtggatccacttcagaacaatgccagacaaatcaagttactcagaatctcatgatatggtcaggctacttacaatatcaaagcttagtcattttagacattacattcatatccatcaagttggtgcccttgagctggtgagaggattcatcatcggaaatcgagtaacatggtaccagctctcagacccaacnnttattctatt

SEQ ID NO: 436276 - DNA, 970 bp, Homo Sapiens
  misc_feature (914)..(914): n is a, c, g, or t
  misc_feature (929)..(929): n is a, c, g, or t
  misc_feature (936)..(936): n is a, c, g, or t
  misc_feature (946)..(946): n is a, c, g, or t
tcccaactttccaaaataagtcctttggaatccgtaataaagaaaacttcaaataatttcctagtcccctattttaaattgaccttctactaacaatgtatttgcacaattcccccatcctcttgttcagttcaacccagttcagttttgctaattttatttgccataaatttgtcctagacaccagaagcttgtataagacacttgggtaacacagaagttcagatatttgaggattaacaggagaaatccatctaagaaaacaatgtagctgacaagacgcatgctttcttgatataaagattattggaaagcttcagttgaatatgtttgtttgtggccaaaatagattgagaaagtcttttgattgataagcaattctagctttctgaagtttctttcattcactagttgaagagcaatatatattttttcttatcccaataacccagaacagaaaattctacatgaggcatatattgtgttcatacatttccatttataaggcacaaaacccacaaatctcacaaaaaggaagaaaacaaaagatttgaagacaataaagtaaactcggaggaggttcatcaaactggagttaaatcatgtccctttttagtaactaagggacctcatactgacaggaatcattgcctctgaaaagagggcttctgagcccttcttttgacacagcctccttcactggattagtgcagaagtcaatcctcagggagggctgcatggccacaacacatcaatcccaagcaccacctatcccatagaagcttctggggcagcaatgctccaaacaaaccagggtgcctggttcacatgttctcacccaaaggagccttcagggaccaatccacagtaaacacacatgcttgcctatcccagtacttgagtatttttgggtntgtttaaggtgaagnagaactncttcctgagnaccctgacctggttgttttgtggg

SEQ ID NO: 436277 - DNA, 1218 bp, Homo Sapiens
  misc_feature (155)..(210): n is a, c, g, or t
  misc_feature (1018)..(1018): n is a, c, g, or t
  misc_feature (1212)..(1212): n is a, c, g, or t
  misc_feature (1214)..(1214): n is a, c, g, or t
aatgcttcgcgggtggcccaaggggtgggaggggacaggggttcgatgatatggaaagggcgaggtggcaaccttcggcaagttttgcgagtgttttaaagtgagtttggggatgggctaaagacctgcggggaaaaggctgaggagatgggaannnnnnnnnnnnnnnnnnnnnnnnnnnnnnnnnnnnnnnnnnnnnnnnnnnnnnnnagaacgggggttcgcggccatggttgggcaagaacgggttttcacaattcctgggcctccgggtagatcccgccgtccctcgggcctcccaaaaagtggtggggattgcgagggcgtgaacccgccatggcgtggcggttcgtcgcgttttggaaccgaattcaatgaccatctaaagaccagaggggacccaaagtgttacaaatgtttaggcattttgtaggaatgggctctgtgcaggtcgcgcatgggttcattgaccccgcaggctgtgaacttccttatcctgtaggctgcagttaggtaggtttcagcaactacgcgacccaaaagactaaaggaggacttgtttaaattagtccctctcaaagattgtttccaatcttataacaaacagatttaatatgcttgtgggttaaattgtaaagtagttatgaagccatttactctaatataaatgaatgaaatgtaattaagagccatacttaaacgagtacttaattttaatgaatggtatttttcatttatatacaaaggaatagccagcagcatttaaatatagaaatagtcccatctcttctctattcccttttataaagtgccattttaattgggtagatttactacccagattttcagtaactacaggataggtatctaattgtcaagaaaagcttggaaaattaagtttagcattttaaacatttgtaaaacattgctacaagtcatagagactaccaatgtattaaaataaaaagtgtaccttacataagaatcattaagttggtttaataattacttcacaganacatgggctcatgaatacttaggccaatttgtgctaattatttaaaccagaaacagtttctgtaggtaattcagctctaagcaccattaaatagggttatgccaaatagaacaatggttaaataatcctcagaataaacaccccagcaaattcaaacttttagaatagtaacaaaagttagtgagaatccgaangngagg

SEQ ID NO: 436278 - DNA, 1103 bp, Homo Sapiens
  misc_feature (1015)..(1015): n is a, c, g, or t
  misc_feature (1031)..(1031): n is a, c, g, or t
  misc_feature (1059)..(1059): n is a, c, g, or t
  misc_feature (1066)..(1066): n is a, c, g, or t
  misc_feature (1076)..(1077): n is a, c, g, or t
  misc_feature (1080)..(1080): n is a, c, g, or t
  misc_feature (1084)..(1084): n is a, c, g, or t
  misc_feature (1088)..(1088): n is a, c, g, or t
  misc_feature (1097)..(1097): n is a, c, g, or t
  misc_feature (1099)..(1099): n is a, c, g, or t
tttttttgggttgaagcacttttaatcacaaacaatagtataagaccgtgaacagctcacccagtggctgttgccctcctccagccctcagctcaccctcttcccatgctccctccctgggtaccattgagtaaagagcagggtattggcagctgtccctgttgctatcaggtgattgataggaaggggatctagctagggaccacggcaatcctggccatccatccatggttctgtttctatacaacttcatcatgtgacatattccagctgtgaaagaggaacagtacagaaatgtgggactgaacttggctgctccattcagatggtccaggggtttagagtgtcaagagccaagggcaaaaaaggaggagaagtctggagtcggcataattcaagatgcagccaaatgtggaactaaggtgggttcagtggggaccagggaaggcctcatggccccagtccacaattgtgccccaaccccggcaatgaaactcacgcatatgcacaaacgcacatcaacaaacacacaaaaacacacagagcaaataacattactgaaagaacctggaggctattaaatacaaaatggcagttttctttcaaagtgaaaatatttgcttctttgatactcctcagtgccttgcagtctcccaatcacagaagagtagatatgggaagggccaagaggagtatgttgccagtggccctacaagtccatgtgtgctgaagtccctatagcaaccaccttactcttcagcccagtagctgcctcccatgtgaccattcacccgattggcaccattgctggagctactgtcacagggactttttgtgcaggtggtcacatcttcttcctctgagctgctctccacatcactgcgatcatccttcgatacatgcaagagatgaaactgtccagctcccgccaggcatagaaaaaaggaaggaggtgaggaaagagtggaaagtacagggtctaatccttcctggacaggtcacctagtcaggaaanaaaagcaggagagaanagagatgtccagtagctacagcaagatncccaggnacactgggcnngtnctgngccnatggcggcncnaagg

SEQ ID NO: 436279 - DNA, 371 bp, Homo Sapiens
  misc_feature (36)..(36): n is a, c, g, or t
  misc_feature (40)..(40): n is a, c, g, or t
  misc_feature (70)..(70): n is a, c, g, or t
cggtggttcattcatgaattcatcacattctcagcntctnccactgaaccatctgctttggcatacatcntcagctgtctgtttcaagatctggtatgtcacctcatattgttcaaagaacttgctattttctataaaagacacgtagttttgtagaagctgctccactgactctctcctcccgtacttaatgatccaagacttcagctttgactctgcaagaaccagcagtgagagcagacggtactttaattctaaaaattccattttcattaggtgtagctctgatgtggaggaaacaaaatgaaacctctcggccatgtcctctaattgatcaggtggcactggaatcccgttaacagacctggtcc

SEQ ID NO: 436280 - DNA, 446 bp, Homo Sapiens
  misc_feature (184)..(184): n is a, c, g, or t
  misc_feature (215)..(215): n is a, c, g, or t
  misc_feature (218)..(218): n is a, c, g, or t
  misc_feature (246)..(246): n is a, c, g, or t
  misc_feature (272)..(272): n is a, c, g, or t
  misc_feature (283)..(283): n is a, c, g, or t
  misc_feature (309)..(309): n is a, c, g, or t
  misc_feature (313)..(313): n is a, c, g, or t
  misc_feature (321)..(321): n is a, c, g, or t
  misc_feature (348)..(348): n is a, c, g, or t
  misc_feature (362)..(363): n is a, c, g, or t
  misc_feature (370)..(370): n is a, c, g, or t
  misc_feature (385)..(385): n is a, c, g, or t
  misc_feature (391)..(392): n is a, c, g, or t
  misc_feature (413)..(413): n is a, c, g, or t
  misc_feature (419)..(419): n is a, c, g, or t
  misc_feature (433)..(433): n is a, c, g, or t
  misc_feature (437)..(437): n is a, c, g, or t
  misc_feature (445)..(445): n is a, c, g, or t
gttccttctctacacagcccctgtctggctttaaaatgtcctgccctgctttttatgagtggatacccccagtccctatgtggattagcaagttaagtaatgacactcagagacagttccatctttgtccataacttgctctgtgatccagtgtgcatcactcaaacagactatctcttttctnctacaaaacagacagctgcctctcagataangtngggggcataggaggaatgggaagcccgntaagagaacagaagtcaaaaacagtngggttctagangggaggaggtgtgcgtgcacatgtangttncgtttccngtcttggaatctcagcaggtcagtcanattgcagtgtgtcnnttcaccnggtccctcttttaangatttnncttccctctttccaactcccnggtccnggatcctcaacagngtcngggttagnt

SEQ ID NO: 436281 - DNA, 756 bp, Homo Sapiens
  misc_feature (339)..(433): n is a, c, g, or t
  misc_feature (475)..(475): n is a, c, g, or t
  misc_feature (624)..(624): n is a, c, g, or t
caagttctcaaacctttcaagatctgaaaagtgagatactgtgtctaagggaatgtttcttttaattcacgccgaagaagttgggggtttgatttctttcgccggggtttcgatcgagtcaacagctcactctgctgggctgctgtttgcacacgaagtccgtcataaaatcaaactcgttttgccccagccagagttcgggcagctccttgatgcggtccaaacccatttctatcaccaaggacataagaacttcctcgtcgatgaaatcagtgtctatgacattgggcggcagcattgcagcggggacgtgggccacggaggcgggcatgttgccgnnnnnnnnnnnnnnnnnnnnnnnnnnnnnnnnnnnnnnnnnnnnnnnnnnnnnnnnnnnnnnnnnnnnnnnnnnnnnnnnnnnnnnnnnnnnnnnggtgctgctgccgccgctgtgcttggggttgcaatctcgganagtgctggtttgtcccgttccatctggtggcctgcagcagggtgcaaatccggcatgtagtggttgtgggggtaggggtgatggttgaaatactggttgttgagcttctgcagctgcatgctggccggcagggagcctccctggctggnccaccgggggacccatgaactgggagttgttaaacctggccgcgggggccagcgcgctcggggggtgccctccgttcacagtccccggccccatcgcatgcgtgatgccgctcgtggcattcatgatccggg

SEQ ID NO: 436282 - DNA, 561 bp, Homo Sapiens
  misc_feature (372)..(496): n is a, c, g, or t
aaaaccaatttgtacaagtttatagtttactttgtttccaagttctcaaacctttcaagatctgaaaagtgagatactgtgtctaagggaatgtttcttttaattcacgccgaagaagttgggggtttgatttctttcgccggggtttcgatcgagtcaacagctcactctgctgggctgctgtttgcacacgaagtccgtcataaaatcaaactcgttttgccccagccagagttcgggcagctccttgatgcggtccaaacccatttctatcaccaaggacataagaacttcctcgtcgatgaaatcagtgtctatgacattgggcggcagcattgcagcggggacgtgggccacggaggcgggcatgtnnnnnnnnnnnnnnnnnnnnnnnnnnnnnnnnnnnnnnnnnnnnnnnnnnnnnnnnnnnnnnnnnnnnnnnnnnnnnnnnnnnnnnnnnnnnnnnnnnnnnnnnnnnnnnnnnnnnnnnnnnnnngggttgcaatctcggaagtgctggtttgtcccgttcatctggtggcatgcagcagggtgcaaatc

SEQ ID NO: 436283 - DNA, 1661 bp, Homo Sapiens
  misc_feature (364)..(364): n is a, c, g, or t
  misc_feature (449)..(449): n is a, c, g, or t
  misc_feature (807)..(866): n is a, c, g, or t
aaggatacacggcggggagcgctgactacctgctatcgcctgtgttgagattgttcttaggtgcgcgtgcgatagagtagagaacaacgcagctcattccgtcctgtgcactagcgtacattctttttgttttagttcattaaatgccaccgcccacatacgtttgggcacatccccaacgcggaatttttacaagagtgtgtaatattaccctgctcagtcatactagtcaacagagctctagtgaataccaataacgcctcttgtggctgcataaaagattttatcgcggccacatcaccagtgtaaaacgcggctgttacctcttttctgtctcccgacagagggggcgtgaaaaagaatntctcctcgtgtatacgaccagaagcgtttcccgatgtcggctagtgaaatggggtaaaaacattgttcggccgcctcgggggctnaacggtctcctttttattttattgttctcgcactccgtgaggtattctcttcaccgagatttcgagacgttcctcaaaagcaaggcgcgctattctttctcggctacgggtggccttgcctattttctaccttatcttggaattatttcgggtacaataaaaaattacaaaatcttagttttttgcacccccgaccaggaagttcgggaccagctttcttagatggcggtcccagaacccatttttttattctctcaagggacatatcggactttcctcgtcggatgaaatccaagtgtctatgacaatgggcggcagcattgcagcggggacgtgggccacggaggcgggcatgttnnnnnnnnnnnnnnnnnnnnnnnnnnnnnnnnnnnnnnnnnnnnnnnnnnnnnnnnnnnncagagccgccgggggtgctgttgccgcccgagccgccgggggtgctgctgccgccgctgtgcttggggttgcaatctcggaagtgctggtttgtcccgttcatctggtggcctgcagcagggtgcaaatccggcatgtagtggttgtgggggtaggggtgatggttgaaatactggttgttgagcttctgcagctgcatgctggccggcagggagcctccctggctggccaccgggggacccatgaactgggagttgttaaacctggccgcgggggccagcgcgctcggggggtgccctccgttcacagtccccggccccatcgcatgcctgatgccgctcgtggcattcatgttgcccgcgccgtagtgtatgtgctcgcccattagggcgttgaaggcgtgctggggctgctgctgctggtggtgatgggggctcgggaactgccccatgcccatgcggtgggcagggtgatggtgcagcccattggtgccgtcggggaagcgcccgtggttcatggccatcatatggtctgccatttccagtccttccgtttttgcgatttctgctccgaagaccgagggcgggctcgtcgcgtccaggaccggctcagcagcacatagaggggaccttcctggcgtgcaaagcgcttcgctgtcgcgatgtcggcgccgaggtctcgcagcggccgctggggcagattcggagccgttcccttttatttcccctccgttgccctcacagctcggcaggaccgcccggccctcgtctgaaatcgccacccaggcctcgctac

SEQ ID NO: 436284 - DNA, 887 bp, Homo Sapiens
  misc_feature (610)..(610): n is a, c, g, or t
ggctcttagagcatatttttaatacaaaatctgtctttgtgaatagagaatagggacgtattttttaaaattgctaccaatcccaaggagcaaggagcatcgatgctttgacttttctgcagggcaggtgacttggcctagctggttttgggtggtgagtgcagtgagtgggccatgacacagtacacgccatgttcacctgtttcccaaaatgtttaggtttttcccctccagtaaatgtgactgtctctccccgttctgaagaaagccatacaacgacggtttctggtggcaatgggagcgtgttccaggcgggcccgcagcttcaggcactggctaacttagaagccaggagggggtctataggtgctgctctctcatcccgggatgtcagtgggctgcctgtttatgctcagtcaggagagcctaggaggctgacccaggcacaggtggcagcgtttcctggagagaatgctttggaacactcttcagaccaggacacctgggacagcctgaggagcccgggtttctgcagccctttgtcatctggtggtggagcagagtccctgccgcctggggggcctggacatgcagaggcaggacacctccngcaaggtttgtgacttccacctgaaccaccagcagcccagccccaccagcgtcctgccctacagaggtggcagcccctccgcttgagaaaattttgtctgtggatagcgttggcagtggactgtgcctacaggactgtgcccaagccagggcctcagcctggcccacatggatcactattgacctgaaagggtgtctcaaaagccttttcgggggacttgaacccggttcccccgggtggaatgggaggggcacttctggcccggagagaactgggc

SEQ ID NO: 436285 - DNA, 481 bp, Homo Sapiens
ttaactctatgaagtcgtttaattcttgcatgtgaatgtgcttctgggggtgtgtgctgtttgggtgaagtttattctcttggcccatttcttttcaggttgctgagtcattaggaatcacagaattcctacggaagaaagaaatacacccagacaaccttggacccaagcacctcagccgagacatggatggggagcagctagagggagctagcagcgagaagagggaacgtgaggtgggcatggctgaagtgggtgccaggtgactgtgcacggtgaattagcgtggtttggcttcttctgttcacaccaggaagaggaggtagcggtttgcctattccttcctattctagctgattgggtcttctcttcacaggctgcggaggagggactggcctcagtgaaaaggcccagaagagaagccctgtccaacgataccactgaatctcttgctgccaacagcagaggccgggagaagccc

SEQ ID NO: 436286 - DNA, 458 bp, Homo Sapiens
  misc_feature (2)..(2): n is a, c, g, or t
  misc_feature (27)..(27): n is a, c, g, or t
  misc_feature (43)..(43): n is a, c, g, or t
gnaggtaggccagatccattttcttanaaaccagatttgggancataacccactatgggagtgtcctgggaaacctcaattactgtgatctccacagctttaccgtaatccagccttggaaattcaggaatgagagagatgttctcccccttttataaccctgttgagtgccatccctaagctaactaaaattagacatgactatgaattccaataatttgctggtaggagaataaataaagactttgcaagtttatgcaggttatgaaagcaaaggttagctgacagaacagcagcaacatctttattgagcataaacaaatcatttatccctccttctgctcccctgttacatgtttaaactcagggaaaccacgataaaaccctgcagatagagctaggattattcaccccaagcgatcctaaatcacacaaggcttgtatctcacagcttatag

SEQ ID NO: 436287 - DNA, 1228 bp, Homo Sapiens
ctggaacccggaagcggcagcgcggcgcgacccggcgggcgggctctgggcgcgggaatcccggcggatcccgggcgggcggatgacccccagccctacccttggtgccgcctcctcctctctcctttctcctccggcagccagcgcgcctgtgtcctctctaggaaggggtaggggaggggcgtctggagaggaccccccgcgaatgcccacgtgacgtgcagtccccctggggctgttccggcctgcggggaacatgggcgtgctcagggtcggactgtgccctggccttaccgaggagatgatccagcttctcaggagccacaggatcaagacagtggtggacctggtttctgcagacctggaagaggtagctcagaaatgtggcttgtcttacaaggccctggttgccctgaggcgggtgctgctggctcagttctcggctttccccgtgaatggcgctgatctctacgaggaactgaagacctccactgccatcctgtccactggcattggcagtcttgataaactgcttgatgctggtctctatactggagaagtgactgaaattgtaggaggcccaggtagcggcaaaactcaggtatgtctctgtatggcagcaaatgtggcccatggcctgcagcaaaacgtcctatatgtagattccaatggagggctgacagcttcccgcctcctccagctgcttcaggctaaaacccaggatgaggaggaacaggcagaagctctccggaggatccaggtggtgcatgcatttgacatcttccagatgctggatgtgctgcaggagctccgaggcactgtggcccagcaggtgactggttcttcaggaactgtgaaggtggtggttgtggactcggtcactgcggtgggtttcccccacttctgggaggtcagcagagggaaggcttgggccttgatgatgcagctggcccgagagctgaagaccctggcccgggaccttggcatggcagtggtggtgaccaaccacataactcgagacagggacagcgggaggctcaaacctgccctcggacgctcctggagctttgtgcccagcactcggattctcctggacaccatcgagggagcaggagcatcaggcggccggcgcattggcgtgtctggcccaaatcttcccgacagatttatcatgtgggcaacctgctgcaactggttctgcctggatggacagctgaagaggtcccac

SEQ ID NO: 436288 - DNA, 652 bp, Homo Sapiens
  misc_feature (404)..(404): n is a, c, g, or t
ttaggacgtttgctgcaggccatggccacatttgctgccatacagagacatacctgagtttgccgctacctgggcctcctacaattttcagtcacttctccagtatagagaccagcatcaagcagtttatcaagacgtgaagtgctgaccgcagtgcctcgttcatcgaaagcattcagcgaaagtccatctgttcctccatgcccaagtcgtgccttcttcagagcattcctgaccccactccacgatctccctgcggggacctgaggcagctgcagtcctcccaggttcccacttgagtgcgccctccatgtctgccaatgccagtggacaggatggcagtgggggtcttcagttcctcgtagagatcagcgccgttcacggggaaagccgagaactgagcncagcagcacccgcgctgagggcaaccagggccttgtaaggcaagccgcatttctgagctacctcttccaggtctgcagaaaccaggtccacgggtgtcttgatcctgtggctcctgagaagctggatcatctcctcggtaagccagggcacagtccgacctgagcacgcccatgttccccgcaggccggaacagccccagggggactgcacgtcacgtgggatttcgcggggggtcctctccaacgcc

SEQ ID NO: 436289 - DNA, 419 bp, Homo Sapiens
  misc_feature (19)..(19): n is a, c, g, or t
  misc_feature (342)..(342): n is a, c, g, or t
  misc_feature (359)..(359): n is a, c, g, or t
  misc_feature (376)..(376): n is a, c, g, or t
  misc_feature (403)..(403): n is a, c, g, or t
  misc_feature (408)..(408): n is a, c, g, or t
gaagaacacagttgtaccnctttattggcacagtaacttttcaaaggctggtatgaataaaaagttccaagtagcaagacaaggtggtctggagccactgctcagaactttccgacagccgacgaaagcacatcaatgaacaaggccttgcattatgggagggttgaggatatacagcgagggaatcatgcagtgtaagtcccgggggacgagcgctgtgcgatgcagcccctactgctcaaaccagtacatggcagcgtgctcatttgtactgtgtaggcctttgaatgaatatgatcattttacaccaccggctatggatttgaagccatacgtgtttanccgtgtgccatgtgatntcctgtgatctatgctngaagtcgggaggtgaaatttaactaangggtngcacaatccac

SEQ ID NO: 436290 - DNA, 982 bp, Homo Sapiens
ggtgctgtgcactatggccttagatggtcagttctgaaagttgattagaccatttctctgggagaatacattttatatcaatcgttgtaatgtgcctaaatttgtcaaattgtttaatggtacttaatactcaaggacattatttttgtatggcccctacatttctgcatcatcgtcgtcgtcatcatcatcatctttggctctgaaatgcatttttctgaactctcgtctgctcattgaaggacaagatgaagacgcaggtgggaggtcctgcatgagctcaacgtttccaaagaaccggctcacgggcattggctgattgctgtcgtcatctagaaagacgctgttgtccatctgaagtggtggcttctgcacatcctctgtctgtagccctggctcattctgcttctgcacagtggagctgctgttggattcttctgctccggacccggcactgtgttttggcacggacaggccatctctagtctttgctaagcgagagtcactcacaactctgcagccaccgagaggaagacttgcagccccctgctgcacagaaacgccagcctcgctgcctggaagcaaggcactgccttcagcaaactcattttcacaaggggtctcaggtgtcacttttggcaaagaagcgctgtcattcttagggacaagcttctgtaattctgacttcacaagatgtcctttgtcacatttgaacttcttggacgttcgcctgtctgtggctttgtgggatgaggaagtcagacatgctgtcttggcagacgtggaaccagcaacttcctgggcagaggccaacctggctgccgaacaacttcgtgctttcaagcgcgctgaagaccgcactgcacctgtgagcttccggctcctcatgagtgtgagcaccgcagccaagcaccgcgcgccccggccaacgcgtcccggcggagcggcgacccggagtctgcagagcacgccgcggcggcgt

SEQ ID NO: 436291 - DNA, 1132 bp, Homo Sapiens
  misc_feature (5)..(5): n is a, c, g, or t
  misc_feature (10)..(10): n is a, c, g, or t
  misc_feature (12)..(12): n is a, c, g, or t
  misc_feature (20)..(21): n is a, c, g, or t
  misc_feature (23)..(23): n is a, c, g, or t
  misc_feature (37)..(37): n is a, c, g, or t
  misc_feature (41)..(41): n is a, c, g, or t
  misc_feature (56)..(56): n is a, c, g, or t
  misc_feature (59)..(59): n is a, c, g, or t
  misc_feature (61)..(61): n is a, c, g, or t
  misc_feature (124)..(124): n is a, c, g, or t
  misc_feature (159)..(196): n is a, c, g, or t
  misc_feature (421)..(421): n is a, c, g, or t
  misc_feature (944)..(944): n is a, c, g, or t
  misc_feature (1008)..(1068): n is a, c, g, or t
acaanttacntnccagcagnntngggtgtttcttttntttntctaaaaaacacatnctntntataatgacaatccaattgtggaaaattaccaacctcagaagacttaaaggtcaccacccccncccctactacctttccctttagcctctccccagcnnnnnnnnnnnnnnnnnnnnnnnnnnnnnnnnnnnnnntggaaggggagagagaaaaggccatgtttgtgaggctgcacactcaaagcacacccagcttgcggatttctatgttattagtgaatagctctttaaggcagagaagaaacattctgtggatccggtgctgttggctcatctcactcacgtggtttcggtggccgaggatgaggtacttttcttcctgaagcgagatcgaaggattctaggcggtgcctgaggctntagcgctctcagaagcactcctggacatcttaggctggccgtgtttgccgctggcccgcccagaccccggtggtggggggcccgagggagcaggggcgccgtctcccctgatggtggtgaggtcctgcatgctgaagctccgcagtctctccgataaggcaccctgtcccttggaagcagccatcacagccgctgtggcggccacgttcaagccccgcttcccgaagtgcacaagggcatcgtaacttcggtcttttgcttggaccagacaatcatcgatttccttttcttttgaagatagcgtgggatgtacaaacttcctgtacaggaggctggagccttttgtgtagggagacagcagccaggctacaaatgctatttttagttcataatagaatggaaaccaacaaaggaagatgtctgtgaatgtctctgctgtggtgaaaagtgcaaatataatccagtacatcatccatttgacatattccttaatgtcctttgatttcacagccttgtaggaatnatacgcagggtaaagggtgccaaatataagcaccaccagcctggagatgatccatgacaccatnnnnnnnnnnnnnnnnnnnnnnnnnnnnnnnnnnnnnnnnnnnnnnnnnnnnnnnnnnnnnggctgctgcggcgttcccggaacgtcagtcagctcacggcagccgccgccagactgagcgcgcc

SEQ ID NO: 436292 - DNA, 632 bp, Homo Sapiens
  misc_feature (625)..(625): n is a, c, g, or t
gttttaaaataaataattttttaattggctaaaggacattcaagcaaagaaatgctttctttacttaaaatgtctatctcatttgctgctttttcactaagcctttactttgttaataaaagtgtcccattgtgtgatgtttttgattttacagtttgctaaatcttattttcttggagttgctttttggtaacagccccattgctactccccattttattgttttacatcaatgcatgcttcgttgtgatccctcaagatgtaacacttggtatgctcggttgaggatatgaaaaaatacttccgaaaccaggaattcagtgtatgtttgttttatactgtttgataagaaaagtaggtccagccttaagcagcacagatgcgctggtagatgcatagtcaggaactttttttatttcttttaggtctagggacaggagtgaatagaaagggaggagagctctattatgttctatacacagattaggagatgaccttactgggtacacccctctaaccagtgcttacaggttaatgcatgttaatgaatatttttgcagttgtaaagcataacaattacaactacacatctatttctaaagaataaaacaggaccatatttatntacttct

SEQ ID NO: 436293 - DNA, 1425 bp, Homo Sapiens
  misc_feature (79)..(87): n is a, c, g, or t
  misc_feature (297)..(312): n is a, c, g, or t
  misc_feature (995)..(1050): n is a, c, g, or t
tcactaatgttgaaaattgtgaaaaaaccccaaccattaagcagttgtctactatttttatacgattacaaaatggccnnnnnnnnngagtcttctcccccctccccctttttggtgatgtgatcatacaggagacaggcacaaggttaacaaagaagggtgaagggggaacaatgggaaccacagctaggaccagacaatgttccacaggcaaggggagcgtgaaagaccaagagtggaactaacaccgacagggatctggatgtgaaggaaacatggcaaagtgaatcagagggnnnnnnnnnnnnnnnntcacacagggagatggctgctcacttcccacaacccccagtttgcaggggagtgggaatagaggttaagtagtcctaaccctaccttcaaagatcaggataggtggtaaaaatattccaagtggaaggacgggttgtgggtgtgtacatggcatgggagagcagacagggaagggtaccaaggggcatgaggaggggaacctgagcagccacagccaggttactgcagtgaaagagtcaaaacagagaagaccaaatgcagatgaaacaaaaaatcagtctcttaagttctgggtgagaaaggaaaggtgttctgccagctgagcactcggggagagcagctgggagttatggcagagaggctctggtggggatgttccagcacgaaaacccagggacccagccaaggaggccacagcagagcccaagccaacagatgggaggggagggggtaagagtccagagcaccctgccccattccaccctagctcaagaaggccatgctaaactgtagcccgccaggctgttctgccctgcccacaggtgtgagggagggggtggtcatctaagatcagtaagtccagtgattcaacagtgcagaggatgtgccaggaccaggccagcagggtctcatcctgaacttctgtttgccaacgggaggaagtgctcaggtgtgtgacaagnnnnnnnnnnnnnnnnnnnnnnnnnnnnnnnnnnnnnnnnnnnnnnnnnnnnnnnntaggatctaaattccttaagttcactaaaaactgtgaaaatttccggcatatgatgtttgaatatcaaacgcagagatttctgaagctttaatgccaatagttagtgagtctgtttagatggctgtctcccgctcatctgtgagtcgggcgctgagctgtggctgctgccaccagatgccgactcttgagggggacaatgggaggcgaggtgggcgctgcctctgtctcccggccagtcttgctgcctgaggtgcgtcgagtgcagcgggctgctcgctcctgtgcatccagctggtcctcacactccgcctggggactgtgcgccagggggaaggtccgccgctcccagggctggacagactgttcatccagcc

SEQ ID NO: 436294 - DNA, 300 bp, Homo Sapiens
  misc_feature (57)..(57): n is a, c, g, or t
  misc_feature (232)..(232): n is a, c, g, or t
cgtttgtctttgtaataagtgagctcatttgtatgcatctatgaagtactgtatagnaaaatgtttgcaagtacacaactgtaatagaaaattttgtttggtgtcccatttataatagacagcacatatggtagctcattttttaaaactgatttttaaataaacacgcgtttctacctaagaacagacagttcatcttcactaaactaaggttcaagagttcaaatgaacnccaaaaccaaagataagccccacttaatgcataaacaaatgaccaaagtttcatgggagtggaattac

SEQ ID NO: 436295 - DNA, 635 bp, Homo Sapiens
  misc_feature (61)..(61): n is a, c, g, or t
ctgttttgggaggcaaggatcccccagttcacttccggcactttccagatatatttcaagngtgtgggtgatggcgttcacacaaactggtcagcgtttccctggagaggaagaggcaaggtttgtgtatttgggggataaggaaaggaagtgggcgtttgaggaaaacaaagttctgccttaggtaaaaagcagaggtaggggcacagagggctgtggggaggaggcaggaatctgaaaaggtgcctgggggttgaccccattttctgaagctccagcacacagggccccgtgttcacgtcccatccttcactgaaaaccattcacctaactggcttttccttcatgattgttctctcccttgtagctctctgctttttggcctgtatctctcctactcctctgagatggggtcccctacattccagcctgggcaacaagagtggaactctgtttcaaaaaagaaagaaagaaattcagctcccacttaaagttcagttgtactctgttattgacaagtaaagtcgattgaagcccagtcatctcctgtatgttgtgtgacttctcataattatctgatcaagagtcttgaagaaacatttacaatttgatgggcaataaaataatttgaaagc

SEQ ID NO: 436296 - DNA, 1073 bp, Homo Sapiens
tttttttcacgctcactgccgactggccaagcccagcgccggcgtttacttcacctcagggaccctgcagtgggcagcagtgaccctcacagagaagctgggaaagctgctggtgacacacagctgggatcagccctgggctggtgggacccctcacagagaagccgggaaagcttctggtgacacacagctgggatcagcccagggctggtgcgacaccctggactcccggccaggaaggcacggaggagggcatgggtgtggccgggccggggtgggggctcagcctttggtcaccaggggcgtgatcatctgtgggaaggcgtagtagcggcagtcggccggtgggaccagcgccatcacctccgtacggatgttctccctccggaagccggcctccagcagcgcgggcacctgcgtctcctcaaacatgatggtgatgtctgagtacttggacttcatcagctccccccaggaggtgaggttgcagtaggtgaggacgccccccggcttcagcaggcgaaaggcgtggttcttgatgaagttgaactggtgtgtgtgccaggtctcctccgagagtgggtacgtgtcgtacaggatcccatcaaagtgaccgtcaggcagggtgggtgccacatcctcccacaggcctttcaaggggatgaccttgtgtgtctgccgtggggcccagtcccggagccgctggaagacgccgtcattgcactcgatgatccaatgctcatcaatgggcgcctcctgcacctttgacgctgcgatggccatgccaaagcccacctccaggacccggccccctttggaggaggcggcggcggccagcgcgtgcatatagggggtctcccagcgctccatcaccggcttgcccaggatgcgcaggtgcgtgtccgctgcgtcgtaggccgcgggcgccgccccccacgcggggctgcagttctcgccgggcgcgaagatgggggtcgcgctgggggcgctcatgctgcaggctggacggcgacccgacctcgatcgcgcgccgcccgggccctcgtgccgaattcgccacccaggcctcgctt

SEQ ID NO: 436297 - DNA, 1221 bp, Homo Sapiens
  misc_feature (43)..(43): n is a, c, g, or t
  misc_feature (876)..(886): n is a, c, g, or t
  misc_feature (1072)..(1111): n is a, c, g, or t
attctctttatccccacccatcggctgtttcttataccccccnccgcagcgaccggtccggaattcccgggatggcggcgcgcgatcgaggtcgggtcgccgtccagcctgcagcatgagcgcccccagcgcgacccccatcttcgcgcccggcgagaactgcagccccgcgtggggggcggcgcccgcggcctacgacgcagcggacacgcacctgcgcatcctgggcaagccggtgatggagcgctgggagaccccctatatgcacgcgctggccgccgccgcctcctccaaagggggccgggtcctggaggtgggctttggcatggccatcgcagcgtcaaaggtgcaggaggcgcccattgatgagcattggatcatcgagtgcaatgacggcgtcttccagcggctccgggactgggccccacggcagacacacaaggtcatccccttgaaaggcctgtgggaggatgtggcacccaccctgcctgacggtcactttgatgggatcctgtacgacacgtacccactctcggaggagacctggcacacacaccagttcaacttcatcaagaacccctccttttcgcctggtgaagccgggggggcgtcctcacccttactgtaaccctcacctcctggcgggagccgatgaagcccccagtactccgacatccccatccatgctttgaggagacccccgccgcccgggcttgctggagggcccggctttccgggtgggaaaaccattccgtaacccgtatgtggaatggttacctgggcccccacccgagcacgactggccggctaaccaacgccatttcctccagcataagtaatcaccgccccctgggctggcccataacgggttgaatnnnnnnnnnnntcagggcccgcggcaacatcccaatgggccacccccgtaacagaggcttctcgatgcggccccggtaacccctcaaatgccccggaccctaaccgacggccccccggcgattgaataccccagcagttggcaggggccccgccacctagacgtcttccccgagctcccccattgcgccaatgaagnnnnnnnnnnnnnnnnnnnnnnnnnnnnnnnnnnnnnnnntctattgatcgtggcccctactcccgttgccattttttccacaacccattctattccagtggggggtgctttatcaaccgcaccgtcaccacttagataagtgagtgtcg

SEQ ID NO: 436298 - DNA, 490 bp, Homo Sapiens
  misc_feature (489)..(489): n is a, c, g, or t
gttagtatggttttatatttaatcaaaataacagaaaagcaaatttttaaatactaacctcaatccccttaactcttaagattataatgaaatatgaaaactcagcttctaaactgacatagtattaagttacagtaaacatttacatttctatttttcaaatgtaatgtcttttacaattagactgattctattaacgattccttcaaattaatgagaaaatttgcattgcttatattacttatcctgaattctaatagaaaactcagaagcattcaatatgatcaagacttaaaagtaagaatgaactaaagaataaaatacttggatgcatttatccagaaaaatatatctgctatccacccaaacatttactgaataatataaaacagaagactttcaaaatgtagttagctctactaagtaccttaaggatctaattagaaaactaagtttcttggattttaggaattaaatggtcagtatttnt

SEQ ID NO: 436299 - DNA, 2325 bp, Homo Sapiens
  misc_feature (268)..(306): n is a, c, g, or t
gaggggagaatgacgcctttttattaaggttaacaccaaggaaagcattgagaaggaatacacaaaggagggggagggcacacaaagtcaccacttgaggaggtggaagggcggcacatcagtaaaagaacctcaggacagccacatgctccatgccctggttgggggaagagggagagaaaagcgccattgatagcttggagctcgtagaagggtctgaagcccctgaacctaacaccagagccacaagccctgcccctgagggctnnnnnnnnnnnnnnnnnnnnnnnnnnnnnnnnnnnnnnnagacattatgaaggcaacaccgagaggcagtgggcaaggacatattgacagaaaaaggaactgaagttaagcaggtgtagccaggagagacagtttttggctgcggccccaagagtccctcaaatgtcccctaaatctgggctgctgctgagcacccccgagtctctgcctgtgaaccgggctctttgttctctaagccccagggagtggaaaagcaatcccagatgaagtcagtgacaaggcaggatccgctctgcatgcaaaatcctagaggttgagctattatgtcttcatgcacattcatagccagctcctcccagcccaggggcccttggaaccccattcacccagattcctagggctgcagttccctcctcaagcttcctttaccaatcagcagccgcagagatctgtgagggggagaggcttctgcagagcactgaatatcttggatttcagcagaagggtaaatttcctgttgccagaacaaaatacccccaattccttaatttccaggtaaattgttagagattatttgccatggtcctaggtaagtcctttttcagaatagaaaaagcagaattttatttacacaattcacgggttctcctgttgtctgggaagggggaaaggacaggatagggatggatgggagtccagagatgggcgcttcctctcccggagcctcacctttccgcagttcgctataattcgcttagttgggcagaaagaattctcgatgctcccaaagtccttcaccctacaaatccttcctcgagggagtctctctctgcctgacccacaagagcagctgtccaagtgaagcatgccgcaccgcgccgttcagtccccctcgcgtcatgcactcggaaacccaaagacagcccgggaaggtagtgccccacggagtcccctcacagggaggcctcgccctccagttgcagcagggtaatgtcgggcatgtcgaggggctccacaagtggcccgtcccccccaaggagaccagcacaggggctttcggggcgctcacagtgactggagggtgtggcggggctgggcatctccttctcttcttcctcgtcctcctcgtcctcgggatcgcgacccagcaagccgctgtccccgatcccaggcgaaggagtctccggctcttgggggtcgctctggaagctccccttgccgccgaccacgcccaagccgcctggcggggcgcagtggtcataatctggcacatggagacgatggctcgctggttggcgcacacgtcgtccgagagcacctggatgtgcgaggcctgctcgtccagggcccccctcatggccctcacgtcctcaaacagggcttgcagctgggctttcaggtgctccatcagttccttcatgccgccgttgtactccccggagatcacgtcccccactgccggcacggtggacacctccaggggcgccggcatgtcgccgccgtccttggtcatgatctccagcagaccgtcctccattgagtggcagaagcgggtggcggaggctctgggtcgcgtccagcccggcctccgggtttgtttatgtggtggagggggagaggttccggtttgtgctagcgggagccgagggaagcggaggctcccgagactggcggggagccgacgtgagagacgagtcctgggcagagggcgcaggcaggatcgcgggaggccgagaagaggctgcgggacgaggacccggcgagggtcccagagccggcgtctcttgggatcgccccgggacgaaagtgccctgccctgcctcgcctcccggatcgcgcccgtgtcagcgccgccctctgggcgccacaagcagagagcgcctgccggttccgtgggtcacagacgcgctcgcggaggggtccgcgtccaggctgaggccagcggcgcgtcggactcgggactcccccaggccattaccgggcagcgcccgcgagtgtggcagcagcagctggggtgggtctcccgggggtgtcgcggatcccgggaattccggaccg

SEQ ID NO: 436300 - DNA, 1286 bp, Homo Sapiens
  misc_feature (70)..(70): n is a, c, g, or t
gaggggagatgacgcctttttattaaggttaatttcaaggaaagaattgagaaggaatacacaaaaggangggggagggcacacaaagtcaccacttgaggaggtggaagggcggcacatcagtaaaagaacctcaggacagccacatgctccatgccctggttgggggaagagggagagaaaagcgccattgatagcttggagctcgtagaagggtctgaagcccctgaacctaacaccagagccacaagccctgcccctgagggttcacacactactacacaagtagacacacataacacacacaagacattttgaaggcaacaccgagaggcagtgggcaaggacatacttgacgtgaaacaaggaactgaagttaagcaggtgtagccaggagagacagttgttggctgcaggccccaagagtccctcaaatgtcccctaaatctgggctgctgctgagcaccccacgagtctctgacctgtgaacccgggctctttgtactctaagccccagggagtggacaaagcaatcccagatgaagtcagtgacgaggcaggatccgctctgcatgcaaatcctagaggttgagctattatgtcgttcatgcacattcatagccagctccgtccacgagcccaggggcccttggaaaccccatgcacccagattcctagggcatgcagttccctcctcaaggcttcctttaccaagtcagcaggccgcagagatctgtgcagggggagcaggcattctgcaagagccactgacatatcttggatctcaagcacgaagggtacaatatccatgtagccagaagcaaaatagcccaagtaccttacatatccaggtaacatagtacagattactttgccatggatcctacggtaagtccttagtcagaatagaaaaaaggcagaaattctgactttaccacaaataacacagagttgctaccaggtagccatgggaacagggggaccagggacaggaccacgggactggattgggagtccagagaatgagcgcttacacatccgaagcctagacgatatcgcggaagtcaggcacagaataccggaacaatgtggaggaagaaagtccggaaggacccagagtcataacggagcgagaccatcgcacagggaggccgaccacgacctgacgcaagagaagcagggtcaaagggagcaagcgagaacgagcggatagaccccacaaggacgggaacgaaacgcagagacacaggaacgtaagcacgagaggcagcagaggagcagacaca

SEQ ID NO: 436301 - DNA, 766 bp, Homo Sapiens
aaagtctgaatagcatgaatttattataatgatttaacacttctagcactcgagttaaaaatgcccttccataaataactgtccctggaaaacatagcaaatttacacagtttaccatttcccaatgttatataaatccaacaagcttaaatcacctgcagctgagagaagaacagaggaaaccagagctgtgaagttcatcccatcccaatgggcagcaatgaggagtgagagccagtctcccctcctccagctccctcatctcagcatgggactggccaatctcagcactcaaagaatggggagaagaacagggtggggcagtacctggaaggatcaaggagggcaaacaccacagtcttacagctgcagaacaggtgaagggcacgggcctagggcatcctggaagacgtcaggccatgggccattgtttgtgtgctggtgccaaggaggtgtcagttaaggctgctcagctgtggcctgcaaggaagaagggagggagaggccagctctgatgtcctggtcagatcttgaacagggcctgtcctctggccaaccacctcttctactttcttacaaatgccaacgctgctttctactcctgggccttctggatcctccgtgttccaaggacctccctcttggcactccctctggctccactggacaccctcctcaccctactttcatggacactgtggcctcatcattcttgctttcatctgggctagtttccagatctaggtcagcattccaggcaccaaac

SEQ ID NO: 436302 - DNA, 960 bp, Homo Sapiens
  misc_feature (764)..(841): n is a, c, g, or t
caggctggtgcggtccggaattccgggatatcgtcgacccacgcgtcgaagaaggtgggggccaaggctgcccagcaggacagcgacagtgatggggaggccctgggcggcaacccgatggtggcagggttccaggacgatgtggacctcgaagaccagccacgtgggagtcccccgctgcctgcaggccccgtccccagtcaagacatcactctttcgagtgaggaggaagcagaagtggcagctcccacaaaaggccctgccccagctccccagcagtgctcagagccagagaccaagtggtcctccataccagcttcgaagccacggagggggacagctcccacgaggaccgcagcacccccctggccaggcggtgtctctgttcgcacaggtccggagaagcgcagcagcaccaggccccctgctgagatggagccggggaagggtgagcaggcctcctcgtcggagagtgacccctgagggacccattgctgcacaaatgctgtccttcgtcatggatgaccccgactttgagagcgagggatcagacacacagcgcagggcggatgactttcccgtgcgagatgacccctccgatgtgactgacgaggatgaggtccctgccgagccggccccaccccccaagctccctctccccgccttcagactgaagaatgactcggacctcttcgggctggggctggaggaggccggacccaaggagagcagtgaggaaggtaaggagggcaaaaccccctctnnnnnnnnnnnnnnnnnnnnnnnnnnnnnnnnnnnnnnnnnnnnnnnnnnnnnnnnnnnnnnnnnnnnnnnnnnnnnnagcaaggacaaggaggagggcaaggaggagcggcgacggcggcagcagcggcccccgcgcagcagggagaggacggctgccgatgagctgaaagctttcctggggggaggggcccccgg

SEQ ID NO: 436303 - DNA, 1461 bp, Homo Sapiens
  misc_feature (825)..(899): n is a, c, g, or t
gcagagtgaaacaggagtgctttatggtctgagtggagtgtttgggaggagtgcctcccggctcctgccttcgggctcacctgagcgggggcgcagctgaggccactgtgggaaacacaacccccactcccaggagaggcctcacatgctgccttcggtctcgccagccttctagcgtggggcctgggccgccctttagggtgagtctgcacacccgtgttcagggctcccggccggaagcggaaccataggcatgctgcggccccagatgagcgcggagggcaagcaggtgccggggcagcgcacaccccacagccaagcggcccctgcccagcctctgtaaacagaccctcacaggtccctcctgggcctcagtcacatccctgagaaacactggcggctctgccccgagagggccagggtgtccaccgagcctggctgaagccagctgtcccctcccttcttgcagagcaggctcacactgggcctgaaggcccagcacctgcagggcccagcctggggaccaccaatgcccggcctcttccagctcagaagcgcacacggcagccacggggcagcggcaaaggcgatggtacagaggcaaatgcctccccaggcagtgacaggcacgccccccgccccagggcggccactgcccacgccggcctagagctcctcgtagtcgccacccccagggtggcggccgcccggggccccgccccccaggaaagcctccagctcatcggcagccgtcctctccctgctgcgcgggggccgctgctgccgccgtcgccgctcctccttgccctcctccttgtccttgcnnnnnnnnnnnnnnnnnnnnnnnnnnnnnnnnnnnnnnnnnnnnnnnnnnnnnnnnnnnnnnnnnnnnnnnnnnnccttagagggggttttgccctccttaccttcctcactgctctccttgggtccggcctcctccagccccagcccgaagaggtccgagtcattcttcagtctgaaggcggggagagggagcttggggggtgggggcggctcggcagggccctcatcctcgtcagtcacatcggaggggtcatctcgcacgggaaagtcatccgccctgcgctgtgtgtctgatccctcgctctcaaagtcggggtcatccatgacgaaggacagcatttgtgcagcaatgggtccctcggggtcactctccgacgaggaggcctgctcacccttccccggctccatctcagcagggggcctggtgctgctgcgcttctccggacctgtgcgaacagagacaccgcctggccaggggggtgctgcggtcctcgtgggagctgtccccctccgtggcttcgaagctggtatggaggaccacttggtctctggctctgagcactgctggggagctggggcagggcctaatgtgggagctgccaccctcgtctggaaacgccacccaggcctcgctac

SEQ ID NO: 436304 - DNA, 570 bp, Homo Sapiens
  misc_feature (480)..(481): n is a, c, g, or t
  misc_feature (487)..(487): n is a, c, g, or t
  misc_feature (498)..(498): n is a, c, g, or t
  misc_feature (501)..(501): n is a, c, g, or t
  misc_feature (504)..(504): n is a, c, g, or t
  misc_feature (507)..(507): n is a, c, g, or t
gagatgccacttgtataaaattttttgtctcccttttcagacaagtatgggagagagatggaagggagcagaaactgaggagagagcccttgtcctgctaatcaatatatttgcctgggtaaacctcagggtgtctgtgcccacagggggctgtgaggtactgcaagccctatcataagcccctcagccaagcctcagcaaagatatgctctgtccctccttgggcaactcatgctacctatggccacagcctgacatcaatcccttcccagtcttgggcacagggtggggttgagggcagttggtgctccatagggccctgccacctctgaggtccaataaatcccctctggaggcagagagaccagtcagcagctctggctctacccaccagaccaggagctctaatgttcacaaattcttggtggccagagctaggaaggcccattgtgatcatctggtcaaactccttgctttccnnaagtgngaaactgaggnccnagngtnggggaaggaacttgccgaaaagtcacacagtaagttattctcaaaggccaggcaaaagaggat

SEQ ID NO: 436305 - DNA, 441 bp, Homo Sapiens
  misc_feature (14)..(14): n is a, c, g, or t
  misc_feature (319)..(319): n is a, c, g, or t
caaattttattggnagtttacaaatgtattacagacatcagtaaaacatcatatccattttacagggcacggatctcaagcaaagtgttcagaacagtctctggcagagcccacaccaaaggcctgttgcagaccttcttaacaaatagcttgacactcaacacagaacacagactctggcctgcctcaccttcccaggccctttgaggttttgtttatgcacttgaaatgaaagcaggagatggacaaagcaatcctgtggaggaaagaatgagtttaggagaggaaaacctgccgaagtcctaatttgctaaaaganaattaattaaaaaatggaggactcatagtccttacaatgttaagtcagggtctatgatagaatcatgacactttatggaaagatatgaaaatcaactaggtaggtttaagaacagaccttat

SEQ ID NO: 436306 - DNA, 889 bp, Homo Sapiens
  misc_feature (84)..(84): n is a, c, g, or t
  misc_feature (102)..(102): n is a, c, g, or t
  misc_feature (104)..(107): n is a, c, g, or t
  misc_feature (154)..(154): n is a, c, g, or t
  misc_feature (201)..(226): n is a, c, g, or t
  misc_feature (542)..(563): n is a, c, g, or t
gactttaaatgataaacttttattctgaatatactgtttttgcacaagatttaacacaacattttctgggattataaatatttnataacagtattatacaantnnnnacaaaatgtttttatcaggctaggtaattttcacaaaagtgtcaagngaacaaaataaaggggagaaaagatctattgttcacaaaagtcgagnnnnnnnnnnnnnnnnnnnnnnnnnnattcaaattttattggaagtttacaaatgtattacagacatcagtaaaacatcatatccattttacagggcacggatctcaagcaaagtgttcagaacagtctctggcagagcccacaccaaaggcctgttgcagaccttcttaacaaatagcttgacactcaacacagaacacagactctggcctgcctcaccttcccaggccctttgaggttttgtttatgcacttgaaatgaaagcaggagatggacaaagcaatcctgtggaggaaagaatgagtttaggagaggaaaacctgccgaagtcctaatttgctnnnnnnnnnnnnnnnnnnnnnnggaggactcatagtccttacaatgttaagtcagggtctatgatagaatcatgacactttatggaaagatatgaaaatcaactaggtaggtttaagaacagaccttattggtaagtaactctctctgaaaaatttagaaaagcttggtcagtgacctgttgaatatcaatggccaaatgccaagcagagtgaagggatatctcagagaactctcagaatagaacaagcagatttttctctatcctatggattcatcgtattcaaaacacaggaatgttttcctaacactatgtgactttcccctcctttatatttacctgtgaagta

SEQ ID NO: 436307 - DNA, 881 bp, Homo Sapiens
ttgactttaaatgataaacttttattctgaatatactgtttttgcacaagatttaacacaacattttctgggattataaatattttataacagtattatacaaatttttacaaaatgtttttatcaggctaggtaattttcacaaaagtgtcaagagaacaaaataaaggggagaaaagatctattgttcacaaaagccagttggccttttgcatgaatgcacaccattttaataaaagtattcctaaaagcatgatccgacactcatacaacacaacaaaaaggacagctttactaggtcacattataaactcaactggcatctacacaagacagtatcccattagtttcagtggaatttgaggataactgtgtgaactggaaataaggtaggatgaagagttgtctaattcttcaaaaatctggaatttttttcaacactcaaaacattatattggtttgctctttacagaaatgtactgtgaatattgacattctgctatgggaaacaatacaagtttagatgaaaaaatatttaaaattttgggcaagtgaaatagttatttcattctattctttaaaaaaagtaacaacatccattttgtttcactaggtcagactataccattaaacatttgaacgtctaacatgatcaatggaatagattcagagttttaaatgaagacaaaatcttaagctttgttggtcacagacaaagatttaaatgagatttaaaatacaagagagcatcaaataagcaagtaacacttgggttgcaaaggtcacttaaaagggatactgcctatttgaacccgataagtccagttttaaagttaataaaaggaatattataggaaaacttacaaatggcaggaacactg

SEQ ID NO: 436308 - DNA, 551 bp, Homo Sapiens
  misc_feature (78)..(78): n is a, c, g, or t
  misc_feature (549)..(549): n is a, c, g, or t
  misc_feature (551)..(551): n is a, c, g, or t
aaactgaagaattcttttatttagtgggaaagaagtaggtaaatgacagacagctcatattctgttaaacagaaaaanaaaaagaatacaaacatcacagtgatgaattttcacaaagctaacagatttgaactacagagcaatggaatatttataagcaagatgtcatggtattaatgaccaaattgcatctaactgggttttctaagctcaaaaacatttaaaatctcagacttaaaatttaaatctagacatgacaattgtaagcataccactcagtcatttaaaactattcagtgagtgctactcttcctgcataaatattttttcctaacattattttttctcccaagatttagaatgtcacatctcatgttcctactagtaatcacacacaggattaaaagcccaaccaagaaagtattctttttataatatgttcttaaaagaagaaagaaaaattaaatgtgaacattttgtacaatagttgctgaagaacagtaaaaccaattccgaaatatcatgtgtactatacagaaaggcatggcncn

SEQ ID NO: 436309 - DNA, 912 bp, Homo Sapiens
tttataaacattattaaattttattaacaaaacattttgtacattttaatacatgtggaattttacatctaggtaaaataacaacacattcaaaatttaccatttatacaaactgttacagaataacaaccagtgggttaaataagtaaaataaaccacactgattttttaaattatctacaaaagatttgactttaaaattcccctgaacatataaaaataaattaattttacttttcaattaaatctaccaattagaaatattacaaatcaaaatatcaatgttatcttatgaatttgtcacaatacaaaacagattcacaaaactttatttacagaaatgaggtaagaactgtgcaatgtttaaccaagaaacatattgcagaattaacatgttcttccagctaagtacacagtggaggtctaattacagctgggtcttttccactaataattcacacaccaaagaagagtttgatgatgacatcctcagtgggggaatcactctgcggtactgtcacatcaaaagcgtggctccccaaagtggaagggctgtcatacaggtttcacctgtttcaggaactctagtggtgagcttttaatggtcagtaatgggaagtggtttaaataaaacaaatctctattcttaccaaatccactccttttcttgtgactcattagtggataaatacccaggtaatagttttgcctgagctatctacagtggcacagaaagttctgaataaaggcggaagcatgggaaggctgcaggtgacgggatgattcctgctgctcggaggactgactgtcccaccctgctgtctacagcccttgcagcacaatggaggcacttgatcaagggcaaaccccaccagcactttccacagtggcccctttctgaaagaagtatcc

SEQ ID NO: 436310 - DNA, 365 bp, Homo Sapiens
atgtgttaattttttattaaatagcaataagatacttttataactcaataaaattattcaatgatacattcggaaaataaatgtataaaatatgaaaaagtactaaaaagcatttttcagtacttttaggtaagattaatccaactaaacactagcatatgttatacagtaataataagtggaaaatacaataatgttgagaaagcaaactcaaagcatagatcaatgaaaaaattgagaaatggacataaatgatttagtatttttaaagagagtgaaaaatcattattttatgcttttgtgtagcgttagatgaattaaataacatatgcacatatagctttgcgatacaaatttcctcgtgc

SEQ ID NO: 436311 - DNA, 209 bp, Homo Sapiens
  misc_feature (193)..(193): n is a, c, g, or t
  misc_feature (206)..(206): n is a, c, g, or t
gccaagtgccgggaagatgtctattttttttccttgtgtattgaaatgtaaaatcatgatgtttgttatgactgctgatgcgattgtttttgtaaattttattgtggcatatacagtattgtcatacagttgaagagaaacaatgtttcctaatgtaagtgctctgaaaatgttgacactgtatatatatatntgcgcgctagtgngtg

SEQ ID NO: 436312 - DNA, 285 bp, Homo Sapiens
  misc_feature (24)..(24): n is a, c, g, or t
caggaattcggcacgaggtttttntttttcctgttttgagagttagataacatggttaccagaattaacagaaactggtttccccctggcataatgaaaaggagaaaacttagacatgtctgcctttttcttacctcaagggaaattctgcatatatctgcagtcaagactgaatagagagggatcccgcagaagggaaagagctgcatgctatcatactaataaatactcaatggtgagagaattaaatgtcagagctgcaattgcagacagcttttgagaaat

SEQ ID NO: 436313 - DNA, 129 bp, Homo Sapiens
  misc_feature (128)..(129): n is a, c, g, or t
actagggaaaatataagcattttgaacaacctcaagttaccgatatggtgacattatgtgtatatattcatgggtgtgtttgtattgtttgtatatctcatgcacttaagacgattctatagccaaann

SEQ ID NO: 436314 - DNA, 421 bp, Homo Sapiens
  misc_feature (389)..(389): n is a, c, g, or t
  misc_feature (402)..(402): n is a, c, g, or t
  misc_feature (405)..(405): n is a, c, g, or t
  misc_feature (409)..(409): n is a, c, g, or t
gcctcactgacttttgttactgatgaacttgcttccctgttcattggaggtggtatcatcacctctgaattatttttctccttcttcctaatgtttgcaggttgcttttcctcatcagctattgactgaatcacatttctgggcagaaggtggagtgctggtggctttccaggaatcagctctgcagaaagaagctccttcctgttctgagccctgtggttctgaagtcattggtctaacctgagtagcccacttttttggcatgacacaccacagcagcattaggcgggagacttagaatttttgttgttgactggagctgggatgttgaatcaacctcaggcagcagcctagctcaagctcgtgccgaattcctgcagcccgggggncccactagttctnagngcgncccccaccgcgg

SEQ ID NO: 436315 - DNA, 428 bp, Homo Sapiens
  misc_feature (317)..(317): n is a, c, g, or t
tttgcaagttcatgctggtgatttttcttttttaaaatgtaagccactaatattttaagacaaaaatttaaaccaaaaattgcatattaatattatacacaaactgaaacatgtgacttttagcacagtgtatacatgcttacataaactcaaacacatttaaaacaatttccatttaacatatgaaagttttgaaatacataaaagcattaatactttctataaaactacagttagaacatcaatttgctacaagcatataaaaacatcaagtgctttcttggagtttcaagtttcctctctaaaacacaatcttngctcacatatatagtccttttccaataatcagtatgaacttttctttttctcaagaggtttattttccaggtacattataagctcagaaaaaagacccaacaattaggcca

SEQ ID NO: 436316 - DNA, 446 bp, Homo Sapiens
  misc_feature (398)..(398): n is a, c, g, or t
agtttgtcaacatgtaatgccctgggtttattttgtgagaattctatcacaatttttccaggtgggattaaaaaccttaaggataatgtatgccattggactgggcattcagacttcggtactgacaaagcactagtagtagtctgttaagtaccattctcttcacagaagagaggtcaaatatttccaaaggaaggcacccgatatttgtggttctggccttgcagccttctggagaatcttaaaaggaaaaaagctggctggctgtttttagaaactggaatgatgatacacgtacagcaattactgcattcttctcccttatatccttttcgtaagaacaagtaaagaatgaagtcttttaaacaattcgacaataaaaaagtacaatttttttngtggctaaaaaaaggggcaagacaacataaactccagtttgtaagggt

SEQ ID NO: 436317 - DNA, 1433 bp, Homo Sapiens
caacccactccctctgccagggccccgggcttccggctccactacttcaggcagccagaaatgagcacacaacccaggcacttctgcaaagatgtttaatgcacttagattacagagaggaagagggggcaagaaggaaacgacatctaagtgagtcacccaaaaattcttacaaaagtcccaggctggctgcagccccaggaaccgagtcgccactgacattaaaaactaatataaaattttacaaaaatctgcttgtcgcagcattcaggtacttgtacaaaaggaggggtctccctacagggctcctgacttgtaacagggacccaggcacctcacctggcatggatgtcctagaagccagaaagggaagaccagacacaaaaatacagtaaaggaaattctctactggtcagccccataggggcaccgaccttcaggttttctccctgcttgcaactcaatccgaaaccccagtcccaagaccctgtgtctatttttaaaaatgctctagcccttttagactctccccttggcttctccagtccctgccttggagcactgcccttggaagagaaagatacgggcaggaagaggcaccagctccccacacaggcctgagacctcgcacaagcctcccaaacccccctcagaattgcagctgagtctgcagtcctcctgcagcccacactgagccagcagagccacaggagcctgccttatatagcaggcaaagaggaaagggaaaggcccttctcagaagctctagcaccagggacctggaggggtgggtacaactaggcaagtctccaagtagcttgcagaagaggcagatttagggagggaggccccttacctcctccacccactacaaggtcaggggctccctcagagctgcagggagggaaagaaagggtacattcaccaagcatcctgtgccagaagctgtgctggacagggtccaaggtcagcttggcttgatcttctttaagggtcctctctcaccagccagcagcccaagaaacctctgggaggcaccaatgcccataggaaaggaggcctggtgagaaatgtgtgataccctgtcctgccctcagagccagtgagatggagcctggcccctgcaggatcttgggtgagcgtgaggctcctgacatattgcaggtacgaaggggccacaggcttcatgtgctcatcatctcggagctcacccacttcctcctgccttatcctgctcccccagaacagggccaccatgctggctggtgtctaccttcagtccacaaagaccctccaggtctggggcaggttgctgaccaggtgcttcacaaactaatgacaaagcttagctcagaaaatgccccatccccacccaaccaacgatggaggcacccagcagatggaagtacggcgaactgcagcagggagccccc

SEQ ID NO: 436318 - DNA, 377 bp, Homo Sapiens
  misc_feature (28)..(34): n is a, c, g, or t
  misc_feature (70)..(70): n is a, c, g, or t
  misc_feature (119)..(119): n is a, c, g, or t
  misc_feature (147)..(147): n is a, c, g, or t
  misc_feature (261)..(261): n is a, c, g, or t
  misc_feature (296)..(296): n is a, c, g, or t
  misc_feature (301)..(304): n is a, c, g, or t
  misc_feature (320)..(320): n is a, c, g, or t
  misc_feature (371)..(371): n is a, c, g, or t
  misc_feature (373)..(373): n is a, c, g, or t
  misc_feature (375)..(375): n is a, c, g, or t
cactagctgttgtttcggggtggccttnnnnnnntcttcttcttcagcaaaaccagcttttatgtttttnctgaaccatttcagattcactcttccacacagtggatgtttacttggantttggcaggctgagaacagctggttgtntgctaacaaatggaacatgagaccatatgtttcaccatttaagcaattttgaaccaaccagaggtataattctgggtgtcttttgctgaaactgtacattaaatacccaaaggntctgagctacacaagagatataggccctcctttcnccccnnnncctttttagcactttnctcttagcaacaaaaccactctacaccacttatatcatagacttgcactgnantntg

SEQ ID NO: 436319 - DNA, 647 bp, Homo Sapiens; identical to SEQ ID NO: 121292

SEQ ID NO: 436320 - DNA, 833 bp, Homo Sapiens
  misc_feature (92)..(92): n is a, c, g, or t
taaaaaaggggtaaaaaatgttattttaattacccaaaaagtttttcctaaaggtttaacctttgtggccaccaatggcacaggaccacttnttgggaacaaatgtattggttaaaaaactaaatatttctacccaacaggtcccatgctggtcttagatcatcctgaaggaaaaaagtaatgcaaaggatgctgggtctccaagtcccaggactggctgatagcctctcccagtggatagcaggtcctaattctcttcttcgagcagattctctgatttcagctgggccttccttgtgctctccaagttcagttgttgatattttcttttgaaaaagccacacttgaacaggatggctataatcacgatcaagaccaggagtcctccgatgctgcttttaatgatgataggcaaagagtgtgtacttctcctctttcaggaagatgacagtgatcttcgttctgtggttctctgcattcagtccctcatatagagatttgttgaaagatatttcaccaaggatctgcagttcagttacatcttttagtaactgcttagtgtgatcccacggagatctctgcggccacggttacattttctttatttgatgtgatggcacagctcactgaatgccattcttttacatgctgcacaggatcgcttccacacgcaggctcttgactctgggtgcactcagtgtggtcctgaaaagagagcctttgctgagccaccctgagctccaagtcccgctaggcatctgccccctgccggcttccgggaggtcaggcaggctgcgcagccgagggccggcgctaggacccagcgggccccc

SEQ ID NO: 436321 - DNA, 1433 bp, Homo Sapiens
  misc_feature (121)..(129): n is a, c, g, or t
  misc_feature (195)..(203): n is a, c, g, or t
  misc_feature (307)..(445): n is a, c, g, or t
  misc_feature (454)..(590): n is a, c, g, or t
gggcccccggcgtttttctccaccgggggggagaaaatttattttctccacaaggggccgccaaggggggtggtgaatcccccggggggggtatcaaagggttgtccaacacccccgtttnnnnnnnnnttctcccgcggggcgcggaaagttttttaaataattatccaccactctccccaaaaattcgccacnnnnnnnnnaagatttatatataagagccccctggggcccccctggtgagaaatcccgaaaagaccccccaaaaccccctttgggtttttttaaaaaccccgggttccccccnnnnnnnnnnnnnnnnnnnnnnnnnnnnnnnnnnnnnnnnnnnnnnnnnnnnnnnnnnnnnnnnnnnnnnnnnnnnnnnnnnnnnnnnnnnnnnnnnnnnnnnnnnnnnnnnnnnnnnnnnnnnnnnnnnnnnnnnnnnccccaaccnnnnnnnnnnnnnnnnnnnnnnnnnnnnnnnnnnnnnnnnnnnnnnnnnnnnnnnnnnnnnnnnnnnnnnnnnnnnnnnnnnnnnnnnnnnnnnnnnnnnnnnnnnnnnnnnnnnnnnnnnnnnnnnnnnnnnnnnnattaaataaaagttttgcttttatttaaaataaaatgcatttatacagtctttgaaccatggattattgaacaatactggtaatccacctctccctcgcacccttttgggctatgtgagctaggaattttctgactagcaccaatacagattgtaacagcgcaacagactagaacatggccagtccaggcattagagttaaggacattgtggcaaatcatgatcataatgaagtcattcttaatttagtagatattaaaactgcacgttaattatatctcttaaaggcatttaattaacgcagagattgctacatttaagccatctgctagttgtgagtagtttttaaaaaactgtacaattttataaaatttgtgtttttacattagttacacaaaatgcatacttcatagaactttacttcatattgtaatgcaaagagttgcatattttaggcagacagtgattatgctggtgaatactaaaagtgtaatacaatatggtgtaaaaataaaaacacgagacaatatacataacatgcttattcaaggacaaaaacaaatcaagcacgacggactaatagcattttccttcaaggtcaaacacaatgacattactaaatatcaggcctcctgcatgcctgatttatttgggggtagggggaggaattaaatggctaccagaagtaggatattttaaaacatgatatcaaattaaacatacattaaatcacatgcattagacatgataaatagagttcatataggttaagccctggatagctttaaaatagatggcttgtttcttacagtttggctagcttaaatcagtaaatcagtgatgg

SEQ ID NO: 436322 - DNA, 442 bp, Homo Sapiens
  misc_feature (172)..(172): n is a, c, g, or t
  misc_feature (180)..(180): n is a, c, g, or t
  misc_feature (396)..(396): n is a, c, g, or t
  misc_feature (402)..(402): n is a, c, g, or t
  misc_feature (417)..(417): n is a, c, g, or t
  misc_feature (422)..(422): n is a, c, g, or t
aaataaaagttttgcttttatttaaaataaaatgcatttatacatgtctttgaaccatggattattgaacaatactggtaatccacctctccctcgcacccttttgggctatgtgagctaggaattttctgactagcaccaatacagattgtaacagcgcaacagtactagnaacatggnccagtccggggattaggagttaagggacattgtgggcaaatcatggatcataatgagggtcattcttaatttaggtaggatattaaaactggcacgtttaattatatctcttaaagggcatttaatttaacggcggaggatttgctaccattttaggccatctggctaggttgtggggtaggtttttttaaaaaactggtaccatttgtattaaancttggnggtttttttaccttngggtngccccaaaaggccttacctc

SEQ ID NO: 436323 - DNA, 505 bp, Homo Sapiens
  misc_feature (41)..(41): n is a, c, g, or t
  misc_feature (49)..(49): n is a, c, g, or t
  misc_feature (98)..(98): n is a, c, g, or t
cccctcacgagttatagacgggcacccctggggcctccatncagttcancccccccaggagcaggacagaggacaccgtgtgcatggcgcaggcctgntcttcaacccctcaccccctacccctcagcccttctgtgacggcccaggtggacccacctttcaccaactccttcttctcccacagttggctgctccaggcaggcctggcgctgacctgagcgaggctctggtgcacgctggcctctctgcccaccccctgctctggacttttccgatggagcacgtgtttccccgcagtgtgattgtctgtgtctggttcttccagcagactggggccggggccaggcacaggaggaattcaccttggcatcctcagctctgcccggcacagggccaggtcacaggcagtcttggaaaatgtgcatggggtgacttgaatgaatggatggatgaatgggcaaaggaatgaccagatggaatgagatgatggcacacagacatcccc

SEQ ID NO: 436324 - DNA, 950 bp, Homo Sapiens
  misc_feature (707)..(721): n is a, c, g, or t
ttttttttcctcttcatcgagtttattagacggggcacccctgggggaccttccatgcagtttcagctcccccaggagcagggacagaggacagccgtgtggcatggcggcagggcctgatcttcaacccctcaccccctacccctcagcccttctgtggacggcccaggtgggacccacctttcaccaactccttcttctcccacagttggctgctccaggcaggcctggcgctgacctgagcgaggctctggtgcacgctgggcctctctgcccaccccctgctctggacttttccgatggagcacgtgtttccccgcagtgtgattgtctgtgtctggttcttccagcagactggggccggggccaggcacaggaggaattcaccttggcatcctcagctctgcccggcacagggccaggtcacaggcagtcttggaaaatgtgcatggggtgacttgaatgaatggatggatgaatgggcaaaggaatgaccagatggaatgagatgatggcacacagacatccccgccccagctaggggaggggcctgctgcgtttcctcaatgcctgcgtggccccgtcagaacacagccccctctgtattctaattgtctggactacctgtccccccctctgaaggcagagatgggacagaagtggcctgagattgcagggccttgtacttggaagtcctcaggaaatannnnnnnnnnnnnnnattgatcattccttgatgctgtgcttgcttctgagtctccacgttgctttctatgcgaatctctgggtctttctccggcttacgtctccctatctctgtggttgtgtttttgttatctctgggacttctctgatttgtgtacctgtcagtctctctcctcctccttttctgtcttctctgtatcaccttcttgtctttgactttatttctttgactttctttctttctg

SEQ ID NO: 436325 - DNA, 403 bp, Homo Sapiens
ccgttaatattttcagtttattttccagatatattaaaattctgtatagttccatccaaatattggaatttaggaatcatcccagataattttccctgtcctttatttctctgttccacccttcctttggtaagtgttcacattatttatcatttttgtttctcttgcttataagctgttactctcctgtattaaaaccattcttctagttgctttacatatttacatattatgttaaaataaagactcacaaaatgctgcaaatatagtaccgtttacacataccactcaattttccccagtggtgatattttccattaacattgtacaatatcacaaccagcacattgtcattgggtgaaatgtgcacatttacatgacattttatcacatgtatacattt

SEQ ID NO: 436326 - DNA, 476 bp, Homo Sapiens
  misc_feature (241)..(243): n is a, c, g, or t
  misc_feature (421)..(423): n is a, c, g, or t
  misc_feature (445)..(445): n is a, c, g, or t
atgtctagttgtctttgacatttaatttcaattttcataggaattaatcatggctctaacatttacattgatactgaccatgtgtttatcttacacaatgctcataatgttagccactgaatgcaggcaaactagagaagtatgatgcttttatttatttagcatctatgatgccatatgagatcaatttcttcattaaagaaaaacaaaccagcataagaaaaacgaattaaaaaatttnnntttctcagtggcagaatcacatagctgtttcgatacagatttccagtaggtctaaaataccgttttgggaattgtaaagattccattacagaaatacacagaacagaggataaatacaatcacactagtttatcagatggttgcactacacatcctttgccttacttttcctataagnnnagttcgcaggatcaaataaaanttctactagcagcatatgcctctggtttggg

SEQ ID NO: 436327 - DNA, 1228 bp, Homo Sapiens
  misc_feature (270)..(278): n is a, c, g, or t
  misc_feature (1058)..(1072): n is a, c, g, or t
  misc_feature (1168)..(1183): n is a, c, g, or t
aagccccccgctgggtgttgtgcgcgtgtgctgctctcttgggggtgtgctgtgtgccccgtcgtttcggttccgtccctctttgtttcaaggttttaaaagcagcatttattgattgaaaataaatgtgtagataggctctcagtatggaatccatgttattttttaatgaagtacatgaagactccttagatcttccaccatgtatcttgtgtgtgcttataacaaccaccatattcaaatggaggggaattttcaacattttactgnnnnnnnnntgagaaattcttccttcagcagctctgcatagtttgacaaacttttggaaagagataaaaacacactccagtgtttgtacgttgaacgtttattacaactaattggcgatgtgataagacagtgctcacgtggcctgaatgttggtcacaatcacaacaaagcttaatccagcccagcatatataagtgaaaatataaaccatgaagacatgtttagatatgtataagtacttagaaaagtgacgctgaacaattacatagctttaaaaaatatagagccatctaatgccattttacctcattcaactcttttttgtaagaaatgtgtctttttaaatttttataagacttctgttaactaggcagtgccatggaaagaaaggaagctgctgtaaagtgtgcagcacttctaagtggagggaagcaaaataaatttagctttaacaagtaccccagagggaacattcgtgctttaaacaatgactttacacataatactgtgaagagagcaacacgttttttgtaagatactgttatgaagaattcctggcaaattaccattctcactttattttggggcatcaaaaacaactaagtatttgattatgaccacaaaaaattcatctcaggagtcaaatgtgccttggccttaaaaattatgtgcttactattgtgaaacaatcctgtttctcatcccagattcagaatgcctaagaaataatttttagtgtaagaagtatcactccaatttagtcattaaaaataatctgtagtcctttnnnnnnnnnnnnnnnggtatgtaatttccaatacaagtctttggagtaaatttgctttttaaagtttcaacaaagtttccattcatttgatatgtgacatgtcaattcccnnnnnnnnnnnnnnnnacatatgctgaaatgctgcactagtctttggtttcataaaacccc

SEQ ID NO: 436328 - DNA, 442 bp, Homo Sapiens
  misc_feature (19)..(19): n is a, c, g, or t
ggatgtttgaaacaatgantacctcttttactgcatttgctctatataagtctaataaatacagaagtagttatgagcaaatagatttttattgcctgcaagctgttatactggagcaggagaatatggtatcttgacggaagcacacttgctaccccacacctggggattacttatagttgaaagaagaaatgttgagaatggaacaaagacacaaacccattggataatctagtctatatttgggtttggcaatcctttcatcccaggaatatacctgtagaccaattcaaagtactaagaaccaagattaaagattttatacacatcacaataatagcaaattaagtacaaaacgaacctgggcacataaattataatttgtaaggtacacaccattttaacaaggatacgacagtgttggtgcagtggtccgaactga

SEQ ID NO: 436329 - DNA, 573 bp, Homo Sapiens
atacagcagaaactttattagaattttatcatctgtattcatcgtcttctttcataaatctccccctcagcttacacaccccgttcaacaaaaataccaggaaatttactaaagaaatgactgtagaagatggtgttcccatcgccaggttacccaacttctcacccaaaataactctatttctagctaccaggaaattatttctctgtattattacacctacatttctcatttgtccttacaaatgtaggagctactatcaacacctcatttgtcatttgtcctcacaaatgtaggagctactatcaacacctccgttataacagatacagtaacttgctcaaagtggtagaaataagtagtagaacgaagactgaacctagctttgcatgattccaaaggcagtgttctccatcactataagatgctcctagactgtactgtaaacaactcattctaatgcaggtgacattaagtaagtcccaactaggaagctcggagctaaaaacagggtttgaaaccagggtgatcaatgaccagcaggctggcctggagcaagttacttaacttccc

SEQ ID NO: 436330 - DNA, 684 bp, Homo Sapiens
  misc_feature (405)..(405): n is a, c, g, or t
  misc_feature (521)..(521): n is a, c, g, or t
  misc_feature (583)..(583): n is a, c, g, or t
  misc_feature (595)..(595): n is a, c, g, or t
  misc_feature (617)..(617): n is a, c, g, or t
  misc_feature (622)..(622): n is a, c, g, or t
  misc_feature (638)..(638): n is a, c, g, or t
  misc_feature (644)..(644): n is a, c, g, or t
  misc_feature (651)..(651): n is a, c, g, or t
aaatttttttactttaaaaataagtttattataactaacgaatataaaatctgacagatattttcaaacatttttgcaaaaaaagtaaaaccctcccctgtcacccctccccacaagatagagaataaggacttggacagagaaacaatacaaatctaaacatgaaactgtcgctcatcggttggtcccaagaggctccaacatattatattctaagtaaaggtccattaaattaagaagttaacaagccacttgacacttttatagtttaacttgccttctactctgattatgatgctcattcaaaatgctgagagacaagaacaggtaacattaacactgcacgtgacaagatattcaaagtgcataaatctatgaaaccacaaacattcataagaatactangcatgggattaaacagtgacttaaaaattaatccaagggaatctatgtacattttaacctttggatctggtcaacatgtttcctccttatgtagacattaatttggtaaagtctantaaccaagattaaatttatctggacacatttctcatctgacacaaattgtccacaagccaanttcacatgaggnaatttgggctgtttaatggcantctantggaaattctcaatgntacatnggaattnttcatttaacatgccaatgggactgggtcaaaa

SEQ ID NO: 436331 - DNA, 1066 bp, Homo Sapiens
ttttttaatgcttccagagcctttatttgcaaatcccaactttccagactatccccaaagggaacgttctttctttctcttgttttctgcttgatccaaggggcagcctcgccttcaatgcagtccagctgagtgaagctaaggtattttctgagccaacaaagatgatttcaggctctatggctcgaggcatttccctggatgaaataacacttcaaaaagacttaaggccacttgtgtctctctcttgggccacagactttcagtaattccaagagcaaagctccttatacaaggacacagacagtacgggagccttggaagccagggctggctgccccttgccccagcttggctctgggcaaaccagccaggcaccaaaagcgacttccctgacatggagttggcagcagttcaagcaggaccttaatcaccaaggagactgagcacccttcaggagccagcatgtgaatctcaatgtccacatgaagatgtggtagatggggctgcagcgacctcgggcagggaaaccactgaacaccgggctccagccaaatgcagcataattttgtggaagtctagaaatgctgactgtccttgggaactgctcaatattgggaaaatgttatcagctccgcacactgccagctctccccaaagagacatgagagcctccaaccggaagaggcagggcggtggggaacagctctcaggaggaggcagcccagggcaagggaaagttgctgagtcggctgaaagtctgaatggtgccagctccactgcacacaggctgtgtgacctctggggagcccctcaacctttctgagcttcaaattcctcacctgggatataagactcctacctcggcctcctaatgaaggctgagacgattggtacacagctccagcgtggtgtcaggcacacaacaggtgctctccctaagggcttcatgagagcgactcagcagcacaaagccatgggagaggcaccgggggaatgtgaggctgcgaacagcaaagggcttggcaaacccattggtcccgtttgtcatttaccccggcacgag

SEQ ID NO: 436332 - DNA, 2260 bp, Homo Sapiens
tccaattatttttacaaagttttattgaaacttgtccatcaaggtgacagtaattcactgttttgaaaagtcacaaaaaagggtacccccaaactcaggtataccaagtaaatactggaacccagggagctcactcctccctctcccaccaggagcaaagggcataacgggagcttccgctgactcacagcaacctgggctagtgggtacatctgtggcgactcccgggaaactgagctgcgtataaagaagtctgctttggtccaaaggacatcttcctgacccagactcagaaggctgctgtcaagttctacattcctttcagaataagcaacagcaactgctgcagtcttgctaactaggggcagaggtcctgagcaaggtgccacgggaccttgtaaaatcacgctgtgtgattttatagggaagagggcagagtgcctctcaagttttcacggttaacactgtcacctattatgactggaataaaaagctggacaacctgccagctaactggtcagtcctgaggatcatccagctgaatggagaaatccggcagcaggttgaaaagtctgttctgagaacagattattgctgagcagagttcatgtgacttctagacgtggtgacttaaaaaatggccttaaggctgcagagccagccacctctgcttacaaaaagagtacttagtgcacatgactgtaagaaacaattgtaaaacctcatctagaaatcagaaagcttctaatttctatagaaatgacacctccctggagccgagagacaatctgttgttgattttgaaggacaggcaagaccaacactgtatttagttccatagccaggcctcaacagggacaagtggctggccttaaaaacacacagatgactggaaatgatgtgtggcctcagtccctgtttcccagaattttactggcaaaggagttagcattcatttttggcttaagaaaaatcgagaatgtaggtttagaactgcacccagcctcatgcaccgcggggccagggctgcagatcctctgccacccctccctcttttcttggacttgatgagtccccgaggctcaaagccatgggggtgctaggaggactgtcacagaccgaggcgctgcaggagctgctctgcctggacaaaccttcaagcaggaccagggcaggtatgaaatgtcttctgaagagtgtgaaatgagcaatgtacagtccattccctcttggggaaagcatgcacgtgtggagcctggtggtgtgctgtctcctgggccaccatccgcccccagctcttcatatgggcttgtataacaaggtggtgacgtacttcttcttgtaccggtgggttgcgctgagcaccatcactccatccttgatagacagcgcgtataggtggttcagcatgacgtgattgggctcaggaagcaaagctggatcacaggaaatccccgtgtccttgttcaggatgacctggaggagatgtggggggagaatagggggtgcccgaaagcgctcttcgggtttgcagacgtagggctcctgatggtagggtcctgggggagaactggacagctcagacacatcggagcacttttgggaatccaccattaaagcatcaaatacttcaaagtcagttttcttcacttgaatgatgttgttaactgtgccaagctggctggttactatgggctcggaagggtcgtgcgtccactgaccatccacaaagaacttgtactgatgctctccttccggcagatccaggatggctacaaagttattgtggcttctggtgaggggaagtttactccagttgttgaaggacccagataagtaaacttcctttccgccccccgtccatcgaaacaccgttggccgagcctgggcgggagctttatcattcacttccagatcatgctgccaggccaggaattcctccttctctggtgccttgatttcctcggagtggaagaggtcggcgtcttcggggctgtccatcaggatcttgggcctgtccccgtccttggtgccccccgagctgtccctccggggcgtcttatggccaccatgccgctccagcgcggcgcgctcactgctggtattgcccatgatgggggtctgcccaggcaagccgcggcaagaacgcaaggggcgcgaagataaaccgacactttcccaaccgcttcaccacccctcagcgacttccgcttccggcgactccgtaagtcggcccggcctagggcgtggaggtggcggc

SEQ ID NO: 436333 - DNA, 1084 bp, Homo Sapiens
gaagcggttgggaaagtgtcggtttatcttcgcgccccttgcgttcttgccgcggcttgcctgggcaggtaaagcgcgattgcgagagctcggcaaccctgccgactcagccggaaccggctcccggcccgaggggcgtggtgtcctggtgctccgactccttccgcaggctccttgggacccgcggttccgggagtcccttgctcagggtccctttcctgcagtgaggcgccgtccgccttccctgtgtccccgcagacccccatcatgggcaataccagcagtgagcgcgccgcgctggagcggcatggtggccataagacgccccggagggacagctcggggggcaccaaggacggggacaggcccaagatcctgatggacagccccgaagacgccgacctcttccactccgaggaaatcaaggcaccagagaaggaggaattcctggcctggcagcatgatctggaagtgaatgataaagctcccgcccaggctcggccaacggtgtttcgatggacggggggcggaaaggaagtttacttatctgggtccttcaacaactggagtaaacttcccctcaccagaagccacaataactttgtagccatcctggatctgccggaaggagagcatcagtacaagttctttgtggatggtcagtggacgcacgacccttccgagcccatagtaaccagaccagcttggcacagttaacaacatcattcaagtgaagaaaactgactttgaagtatttgatgctttaatggtggattcccaaaagtgctccgatgtgtctgagctgtcccagttctccccccaggaccctaccatcagggagccctacgtctggccaacccgaagaagggcttttcggggccacccccctattcttcccccccacattcttcctcccgggtcttcctgaaccaagggacaaccgggggaattttcccgggaatccagcttttgccttcctgaacccaaaatccggttctgggtggacccccttataaccggctgtgttttttaagggaattgcaagtgtattggggttttaaacggaaaacccacccggggtaac

SEQ ID NO: 436334 - DNA, 1279 bp, Homo Sapiens
  misc_feature (17)..(17): n is a, c, g, or t
gggctaggtgcgaggcntgggtggtgcgcgcgtttagctggccgccgccacctccacgccctaggccgggccgacttacggagtcgccggaagcggaagtcgctgaggggtggtgaagcggttgggaaagtgtcggtttatcttcgcgccccttgcgttcttgccgcggcttgcctgggcaggtaaagcgcgattgcgagagctcggcaaccctgccgactcagccggaaccggctcccggcccgaggggcgtggtgtcctggtgctccgactccttccgcaggctccttgggacccgcggttccgggagtcccttgctcagggtccctttcctgcagtgaggcgccgtccgccttccctgtgtccccgcagacccccatcatgggcaataccagcagtgagcgcgccgcgctggagcggcatggtggccataagacgccccggagggacagctcggggggcaccaaggacggggacaggcccaagatcctgatggacagccccgaagacgccgacctcttccactccgaggaaatcaaggcaccagagaaggaggaattcctggcctggcagcatgatctggaagtgaatgataaagctcccgcccaggctcggccaacggtgtttcgatggacggggggcggaaaggaagtttacttatctgggtccttcaacaactggagtaaacttcccctcaccagaagccacaataactttgtagccatcctggatctgccggaaggagagcatcagtacaagttctttgtggatggtcagtggacgcacgacccttccgagcccatagtaaccagccagcttggcacagttaacaacatcattcaagtgaagaaaactgactttgaagtatttgatgctttaatggtggattcccaaaagtgctccgatgtgtctgaggctgtccaagttctcccccaggaccctaccatcaggagccctacgtctgcaaacccgaagagcgctttcgggcaccccttattttcccgccacatcttctccaggtcatcctgaacaaggacccggcggattttcctgtgatccagctttgcttccttgagcccaatcacgtcatgctgaaccacctaataacgcgcctgtctatcacggatggcagtgatgggtgctccaggcaacccacggttaccagaagaaagtacgttcaccacccttgttataccaggcccctttgaacgagctgggggcggatggtggcccaggagaactgccaccaaccaggtcccacacgtgcatgctttcccca

SEQ ID NO: 436335 - DNA, 1049 bp, Homo Sapiens
  misc_feature (807)..(821): n is a, c, g, or t
  misc_feature (907)..(907): n is a, c, g, or t
  misc_feature (909)..(909): n is a, c, g, or t
aattggcattaaaagtttttatttagtatttgatccacaatttatacaagttatttacaaggcatgaaaatggaaaacagcacaaaatacaattgaggtataagctcagagcacagtatgtcatgtttcaataaatataattcaaaatttgtaaactaggtgaccagatacatgagtcttatttttagtaaaaccatataaaatatttatttcacgtgaggtagaggacagttttctgtgtcatgtaatgcaaccaaccacagcaactttaaccataaaactgtacatcattggcaaaattttaactttaattatggtcaatgtagccaattatttgtttcaacagttgcagaacagatatttcatttactgccttcacagattagaaattcaaaagtaatttaagactactatgttggcttaaaattatcaggataaacaaatacttctaacaggatagtaaaaacaagtaaaattttatttctcataaactaattcctcaaaagatgtcctacatttagcaactgttttctaggacatgtttactagaactactttaagtatgctgtgctttcttttcaagtgaggtatctatattgaggaaaaaaatcttataaattccttttacattaaactaatttaatacactattttgttttctgggctgaatttttaaatttttttcttacatttgatcactttctaattcaaaaattgtagcactacataggacatttaattctattactaaataggctccaaattacattatacagtttagaaaccatttcaatgaatggatttacnnnnnnnnnnnnnnnctgtccttttaaatgaaatgcaatataaaatactaatacacttttcttccaaaagtggaaatgcttaagtaccctatactagaaanangaaaattaggctgtttattcaattccacaatgtataatacagcagttttatgtcccttattgctgacagcttcgataaaaactattaacaagtagttccaagcacagaaatagatgtacagtatgagcacgatttttctt

SEQ ID NO: 436336 - DNA, 531 bp, Homo Sapiens
gcggccgcctactactactatacggctgcgagaagacgacagaaggatgccaccagtttttccttgaggcctaggattttttattctgtcccgagcagaggtaattcctcacaacttagtgcaccagtagcaccagccattttgagcagagtacctctttggggagcttttcgttttgttttgtttttaattctctttccttagcagcaaggtcttttttcctagagaatctactccgttgcagaatcattgcaacctcaggagccctcactgattgagtgctgtcagcctgatatactactttggactctggaaacagatatgggttctattctctatttctactgtgtgtcgttaaacaaccgtcggagaccagatgacctgttagatggctagtcctgtataactcgactctgtatgtttcaatgtatgttactgcaatgcttcacctgctgtacagtgtttgtgagatgctctttgaagatggtacttttatattttttcattttcaataaaagtacattccttccc

SEQ ID NO: 436337 - DNA, 535 bp, Homo Sapiens
  misc_feature (67)..(106): n is a, c, g, or t
aaacctaggccaaggaaaactgtggcacctctgggctttcaagccttcatctaaaaacaatcttggnnnnnnnnnnnnnnnnnnnnnnnnnnnnnnnnnnnnnnnncaatcccccaccctaaaggaagaaaaaaattgatgtgaagcccatccacccttctacccaggtgccttatagcaaaggtgactgcagctgtaagtcagagctgaatgacagacaaaaatggaggccagacaccacggtctggaggtactacgctgaattccagaacccagactctctctgggttaatttcttgtttttcctgagattaaattaataccagatgtccactaggtcctaggagatccccaccaatcagatttttgccaagtcccaggaaataacctgatcaaataggagacttcagattccaagaactactgtattccacctctcccctccctcagatttttaggtttatatccattgcttgggtcaccactgtatacagccgggttgctggtttactagcaagaagattggcttcttttc

SEQ ID NO: 436338 - DNA, 641 bp, Homo Sapiens
  misc_feature (52)..(52): n is a, c, g, or t
  misc_feature (54)..(54): n is a, c, g, or t
  misc_feature (208)..(208): n is a, c, g, or t
  misc_feature (430)..(430): n is a, c, g, or t
  misc_feature (502)..(502): n is a, c, g, or t
  misc_feature (640)..(640): n is a, c, g, or t
tctggtctttcattttattgtctgtatcttgcaatgtgacaatgcatataancngcttagcacagagcctagtacaaagtaaaagctttaacttgtcaattattgttatactcttattattatcagctattacttgttactcttctagatattcaatataaaagtacattgcaaattgatgccatgaaagaaagatagtttaattttngcaagtctcatagaggaattaaagttcttttaacaggaaagcataaaatgacagttgtaatatatgtagatttcactcatgaatggttataataatgaagtagaagtcaaaactacatagacactctaggttctactagctgttttagttcctaagatgaactctttaattctctcctctgtaaataaaagttaaggtttccaaagtactcatgattgtttnctaaattatcttaattgtaagagctaaatgaaaattagagaagcataagaaataatccagaagaaatagagntatgatgtgatggtttttactgtagtgtaggcttgagttctggttttgattttgccttaatttacagcgtcatttagagacttggctaagaatttctttttttcaagagtcaggcttcatggcgacaaatggcccaanc

SEQ ID NO: 436339 - DNA, 589 bp, Homo Sapiens
  misc_feature (8)..(8): n is a, c, g, or t
  misc_feature (14)..(14): n is a, c, g, or t
  misc_feature (32)..(32): n is a, c, g, or t
  misc_feature (42)..(42): n is a, c, g, or t
  misc_feature (44)..(44): n is a, c, g, or t
cgcaagtnaagaantatatacatatatatgtntatatttttntntcaaaatctgagagctcagggaggccgtggaaatttggggaagaagaaacagactccctgagcagagctcaggtcagcagctccaggcatgcctgctgagcccatcaggccaccgccacctgcaggaagagcctctggcctgaactgctggggatgggctgcagaaagcctgagacatttgggccagcaccttcccaggggcacaggcccccaaggcggggacaccacctctgctctgcaggcctgcctccagggctctgaggagaagccgacttcacggccgcggtgccagtgagggctgcatagccagggccttgtctgtagtctgggcggcccgtggcgctgcccttcagcccaactactcattgccgctgcgtctttggcgaggctttcatttccaacctttcttccatctcagcccttttgttggcccgggtcccaggaggctggtgtcggtgagggcaggcccgctcctctcatcggggtggctgtggcctgtcccccagtccctcaatggccactttctataaacaaggcagcactaa

SEQ ID NO: 436340 - DNA, 406 bp, Homo Sapiens
  misc_feature (266)..(266): n is a, c, g, or t
tgacacgagggtttatttagtgatgtttgcatcctggcattgacagaatatgtgaggacattctatcagcagcacctccagcctcacagaatacagaaaagaatgtgcactttactgataactggaagtgagatttgacctccctctcccaactttcttatgttttcctccacatttctctaattgttacatccccattctttgcttttattaaaaagaacttgctaaaataacttccttgtatccaggaagttaatttattattntggtaatttcacgacatgtttttattcactttttgatgtctgtttgatgcaaacaaaaactacacagaatgttaatgttaaacagcaggtatctccttaatattatgtgtctgatacagtgctaacatccattcaccctt

SEQ ID NO: 436341 - DNA, 438 bp, Homo Sapiens
  misc_feature (383)..(383): n is a, c, g, or t
  misc_feature (436)..(437): n is a, c, g, or t
attttattggtagagtgggaatgtattaaaattctctacttccttgttacatggtctttcctccaccctacaaggtgtgtgcttgtaactcaaatttccatttgagtaattagcaattattatttaaaactaacctgaaaataaaaattgtattcaattcattcatagggagcatctacctatttattattaccacataggtgatgtgactctagaaacatcttggtattcaaatagccaattaaaatataaaatgtaatgattttctaaagctactcgttttccttctctcatctctatctactaattggaaagtctattctccacacacagcaaagatgattgacagaattctaaaaatacacaaatttccctattaaagngggtgaatggatgttagcactgtatcagacacataatattaaggggatacctnnt

SEQ ID NO: 436342 - DNA, 1575 bp, Homo Sapiens
  misc_feature (989)..(990): n is a, c, g, or t
  misc_feature (992)..(992): n is a, c, g, or t
  misc_feature (1080)..(1080): n is a, c, g, or t
  misc_feature (1102)..(1102): n is a, c, g, or t
  misc_feature (1177)..(1177): n is a, c, g, or t
  misc_feature (1253)..(1253): n is a, c, g, or t
  misc_feature (1257)..(1257): n is a, c, g, or t
  misc_feature (1299)..(1299): n is a, c, g, or t
  misc_feature (1406)..(1406): n is a, c, g, or t
  misc_feature (1408)..(1408): n is a, c, g, or t
  misc_feature (1410)..(1410): n is a, c, g, or t
  misc_feature (1413)..(1413): n is a, c, g, or t
  misc_feature (1418)..(1419): n is a, c, g, or t
  misc_feature (1423)..(1425): n is a, c, g, or t
  misc_feature (1438)..(1438): n is a, c, g, or t
  misc_feature (1449)..(1449): n is a, c, g, or t
  misc_feature (1455)..(1458): n is a, c, g, or t
  misc_feature (1543)..(1544): n is a, c, g, or t
tttttttccactccattgttttattatgtacaaacgctacagaacgagggggacagacacgcgtggggtaagaagggcctggtgggaggagttcacagagcagacggtgcactgggaccaggagagcagaacacaggccataactatagggcaggtggggcaggaacgggttaaaaacgagatccaagccagccagatcgcaggaggtgcgggggcgtcgtcccccttctgttctccccccaaggtcacagtgcatgcaataaaatatatatacaggagctagatccgtcctctgcaggggctctgagggtccagagctcccttcgggtggcgggaagccagtggcgctccctggcggccaggccgggctggagccacatgcgtcgggggagcgggggtcagtcccagccgttgtctttgatcatgtggttgagttcaatgatgtacttcccctctttgtacttctggctgctctcaaaggcctgttcatatttccagcccaaagtggtcttgcagttctcgcagtggatgtcggcgacagcatggaggccggtcagcagcacccgctcctcggctggcccgcagcccacgttcaccactgagttgaagaggtaggcacgcccctgactgccctggaaggacttggagatgaggtcgtcgtggttggccaggtgagcgcggcagtgggcacagctatacctccggtgacaatcatccaagtaggcctgaaacgtcttgggctttgaaatccgcaccatggcgggggccgggggcagtggccccacgcggggagcggcccacggggagcagagggagcccagtgcctgccggggagggagtaggtgggctgtcaggacctgggccacacacatgcgaggcactcccagagccgtggggactcgctctgtcacactgggctgctctctcctttccccagagccagcagcctctccggggaccagaggcgtctcggttttgactcagtgagnngncctcaggttgcatccatggggaaactgaggctcggaggtgcccagggtgagtcacccgcctgcttccggcctcacccttgttgacctngcagctgaagctggaggaaggngctttggaggggctgggctgtcagttcccagtttcgggggagcatgggcgggtaagcactggttggtccttgtgnactcatctggagagcagtggggttcactggtggtttagggggttcatcggggagagggtcccccacctggaggagntagnaggcctcgccgtgaaggttgagggttacctaggaggggaggngctctcacctgcgggcgccaaggcctcctctacgctcaggggctcttacctgcatcgcggagccttacctggactccggggctcacctggggcgcgggggtgggggntngngcnggggnngggnnnagtcctcgcgggntgggcaggggngcgggnnnncacgcagccctgacggcgcgggcctcacctcgcctgggcgcgcggggcccggtccgccggggtgggctggcctgggagtgggggnnctcctggcgggcgccgtcccccccgggcccg

SEQ ID NO: 436343 - DNA, 770 bp, Homo Sapiens
atcaggccaaatcggccgagctcgaattcgtcgagagcggagctgggctcggtgtaaacaagtccaggcgcctgcgaacccgggcccgggggggacggcgcccgccaggagcgccccccactcccaggccagcccaccccggcggaccgggccccgcgcgcccaggcgaggcactgggctccctctgctccccgtgggccgctccccgcgtggggccactgcccccggcccccgccatggtgcggatttcaaagcccaagacgtttcaggcctacttggatgattgtcaccggaggtatagctgtgcccactgccgcgctcacctggccaaccacgacgacctcatctccaagtccttccagggcagtcaggggcgtgcctacctcttcaactcagtggtgaacgtgggctgcgggccagccgaggagcgggtgctgctgaccggcctccatgctgtcgccgacatccactgcgagaactgcaagaccactttgggctggaaatatgaacaggcctttgagagcagccagaagtacaaagaggggaagtacatcattgaactcaaccacatgatcaaagacgacggctgggactgacccccgctcccccgacgcatgtggctccagcccggcctggccgccagggagcgccactggcttcccgccacccgaagggagctctggaccctcagagcccctgcagaggacggatctagctcctgtatatatattaattgcatgcactgtgaccttggggggagaacagaaggg

SEQ ID NO: 436344 - DNA, 1390 bp, Homo Sapiens
  misc_feature (142)..(142): n is a, c, g, or t
ctctctagctgaccttccctttccctcacgcctccccacgcccggcccctggccccagcaccctgtccgctgccgcctcagagccgggaaaagcagccggagcccccgccgcccctgccgcagcgcggcggtcagcgcgcanccggcacccgcagcctgcagcctgcagcccgcagcccgcagcccggagccagatcgcgggctcagaccgaatccgactcgaccgccgcccccagccaggcgccatgctgccgcttctgctgggcctgctgggcccagcggcctgctgggccctgggcccgacccccggcccgggatcctctgagctgcgctcggccttctcggcggcacgcaccacccccctggagggcacgtcggagatggcggtgaccttcgacaaggtgtacgtgaacatcgggggcgacttcgatgtggccaccggccagtttcgctgccgcgtgcccggcgcctacttcttctccttcacggctggcaaggccccgcacaagagcctgtcggtgatgctggtgcgaaaccgcgacgaggtgcaggcgctggccttcgacgagcagcggcggccaggcgcgcggcgcgcagccagccagagcgccatgctgcagctcgactacggcgacacagtgtggctgcggctgcatggcgccccgcagtacgcgctaggcgcgcccggcgccaccttcagcggctacctagtctacgccgacgccgacgctgacgcgcctgcgcgcggggccgcccgcgccccccgagccgcgctcggccttctcggcggcgcgcacgcgcagcttggtgggctcggacgctggccccgggccgcggcaccaaccactcgccttcgacaccgagttcgtcaacattggcggcgacttcgacgcggcggccggcgtgttccgctgccgtctgccgggcgcctacttcttctccttcacgctgggcaagctgccgcgtaagacgctgtcggttaagctgatgaagaaccgcgacgaggtgcaggccatgatttacgacgacggcgcgtcgcggcgccgcgagatgcagagccagagcgtgatgctggccctgcggcgcggcgacgccgtctggctgctcagccacgaccacgacggctacggcgcctacagcaaccacggcaagtacatcaccttctccggcttcctggtgtaccccgacctcgcccccgccgccccgccgggcctcggggcctcggagctactgtgagccccgggccagagaagagcccgggagggccaggggcgtgcatgccaggccgggcccgaggctcgaaaggtcccgcgcgagcgccacggcctccgggcgcgcctggactctgccaataaagcggaaagcgggcacgcgcagcgcccggcagccc

SEQ ID NO: 436345 - DNA, 836 bp, Homo Sapiens
ggggggccgggcggcccgcgcgcaggcgcggtcagcgtcggcgtcggcgtagacttaggtagccgctgaaggtggccgccggggcgcgccctagcgccgtactgcgggggcgccatgcaagcccgcagcacacactgtgtcgccgtagtcgagcttgcagcatggcgcttctggctggctgcgcgccgcgcgcctggccgccgctgctcgtcgaaggccagcgcctgcacctcgtcgcggtttcgcaccagcatcaccgacaggctcttgtgcggggccttgccagccgtgaaggagaagaagtaggcgccgggcacgcggcagcgaaactggccggtggccacatcgaagtcgcccccgatgttcacgtacaccttgtcgaaggtcaccgccatctccgacgtgccctccaggggggtggtgcgtgccgccgagaaggccgagcgcagctcagaggatcccgggccgggggtcgggcccagggcccagcaggccgctgggcccagcaggcccagcagaagcggcagcatggcgcctggctgggggcggcggtcgagtcgggttcggtctgagcccgcgatctggctccgggctgcgggctgcgggctgcaggctgcaggctgcgggtgccgggctgcgcgctgaccgcccgcgctgcggcaggggcggcgggggctccggctgcttttcccggctctgaggcggcagcggacagggtgctggggccaggggccgggcgtggggaggcgtgagggaaagggaaggtcagctagagagggagccgagcgatcccatgaattccgggccggttccccgcaactccggcggcgggaggc

SEQ ID NO: 436346 - DNA, 324 bp, Homo Sapiens
atctatccaaagatatttattgcagcgtggttttcaatactaaacagtgtaaacaatgcaaatatttaacaataaatacagtgattaaataagccatggcatatccagttgatgtaatactttgcaaccattaaattgatgtttacaaggagtttatattgacattggtgatgctaatagcatattaataagtaaaatgtatggcataaaattgtatttgtgtgaatacaattaaaattgaggcatgctttgagaggttaatagaggaaagtacacatatgtgaatagtggttttatatgagtagtagaattatagacaatttt

SEQ ID NO: 436347 - DNA, 364 bp, Homo Sapiens
  misc_feature (362)..(362): n is a, c, g, or t
gtctaaaccagtttcttgttatcatactgtggatgtttctagctctcactgtagcattccacctcttttctgtctcagtgacttagtcaaagcatctagttgaacactctgttatttaaagaaaccagcattcactggctgttcccagctccaggaactcaggtggattcataatttgttctgtttccttgctcttaggaaaagtactgacagctcataattggttgtatttcttaggatatttgcatttaaactagaagcaatgctttcttttcttggtataatttgtcttacatttttgaaagtaatagctattcattaaattacatttgaaaatgcaggaagaaagaaaaacttgtctnta

SEQ ID NO: 436348 - DNA, 667 bp, Homo Sapiens
  misc_feature (139)..(216): n is a, c, g, or t
ggggagaatccaagccctagtcatggccaggatttccttggaaacaggtatgcccatgttcccttaccttctggggccggcgcgccaaagcgaatggtttagaaaactttttcgaggggcgaggcggccaagcaagggnnnnnnnnnnnnnnnnnnnnnnnnnnnnnnnnnnnnnnnnnnnnnnnnnnnnnnnnnnnnnnnnnnnnnnnnnnnnnntaagaacaaagttttgggcaaactagtaatttatttacaattgtaatttataaacagtaacacaaacatctttacattaatattatgaaaaatgtcccatggctgaaatgggtgaaaaatgagacttcagtacatttctaaaggggtgccaagaaaagggaaaaaatgcaattacaacagttttaggggagagttatatcaagtaatgcacctaggtgcaatttcatgcagatgtcttcaaccactcaaactgtttttattagatattagaataaaatttcccaaattatgttgccttttattcacttgatttccataagtaaatcaaaatgactggctgttaacaggggtacatctaaatatttcctcccatcaacccccttagaggataatcccccttacattttagggacatggtcagattggtggggtattgcaacttccccaatgg

SEQ ID NO: 436349 - DNA, 858 bp, Homo Sapiens
cacagctcttgggttcacatttattgtaacttggaagcccacccttcttcctactcctggagctgtcgtccccaagggctcaggaattagccttgctccacagcaaacagcccagaggccccacctgggcaaaagcaaacaaaacagatacgttcctttccggcaggtgcagatgctctgcccaggcctgcggaagccagctccggtctgtgtgtaaatcctccccaggacttccggcccaccagctccattccagcctccactcggctcagctccgcggcttcctcgagccaggctggtcctgcatcgccatctgctggccgcgcggcacggccggttcctggagccagcaggagtcggaggctgcagggcttgaaggcctcttcaccgtgccctccagggagcctagctgccgaagtattcctgctggaacttctggaagtcttcctcggtgaacacggtgccctcagccttcttcttcttggtcttggccacaggccggtcacaggccttgcggccccggttctggcgcaaaatctgctggctcacagactcagccacggtgcttctcgtcctggtcagaaacttcaggtttactctgaggtggtctcgacactctcgcttccggtactcgtccagtgccgacttgggcacctttcccttggccgagttccgcagtttctgggcctgaattgccttcgtcttccggggccgtttcaccggagcccctctcggcttggcctgacctggagggtcccggggggcctcggacgccgccagcagctccaggccccgccgcagcagggcggcggacatggcggcgcttggctccgcccacgagcctcacactacttcccc

SEQ ID NO: 436350 - DNA, 2030 bp, Homo Sapiens
  misc_feature (147)..(157): n is a, c, g, or t
  misc_feature (172)..(267): n is a, c, g, or t
  misc_feature (283)..(337): n is a, c, g, or t
  misc_feature (377)..(392): n is a, c, g, or t
  misc_feature (400)..(526): n is a, c, g, or t
ccccccgtttttccccgggggaaatttttttccaaagggcccaaaggtggttttccccgggggaataaagtttttaaaaccccttggagggggttccctctcgggcgaaagtttttaaaatttcacacctttttccaaaaagggcannnnnnnnnnnaaatttattttgagnnnnnnnnnnnnnnnnnnnnnnnnnnnnnnnnnnnnnnnnnnnnnnnnnnnnnnnnnnnnnnnnnnnnnnnnnnnnnnnnnnnnnnnnnnnnnnnnggggaaatcaaacccnnnnnnnnnnnnnnnnnnnnnnnnnnnnnnnnnnnnnnnnnnnnnnnnnnnnnnnggggcccggggcccaaaaaaaggttttaaaaaattttttnnnnnnnnnnnnnnnnccaaaggnnnnnnnnnnnnnnnnnnnnnnnnnnnnnnnnnnnnnnnnnnnnnnnnnnnnnnnnnnnnnnnnnnnnnnnnnnnnnnnnnnnnnnnnnnnnnnnnnnnnnnnnnnnnnnnnnnnnnnnnnnnnnnnccacttttaaaccagtctttaattttcaattcaggtgtgaggcacatatatacacacaaacatattaatttaaggaagcaagaatgtagaatattaacatgtatggcagacactacttcatgtattttgtttaaaacttaactttgaaataacttcattgtttacatgtaaaagaaaaatatcattcacttatacttccacttccctttaaagtattctcaaattatatttcctgaaactccaatagaaagcattctctcttaatcatggcaacgggtcgggtactcattggtgaccaaaatctggtgacaccatcttttatgttctttgccatattcttaaatgcctggcaaacagtagatatttaccagatgaatatgacattaaaaaaataaatttcaagagattgagattctttagccaagttgagggactacatcattttgaagcactctagaagggggatgtgattaaatgtgactgcatgcctgggctggctgcttctaggtatagagctgtgttaaggcgtgggaataggagagcaatgccctagggaaaagagggcactaggggaaacaatggttgcagtgcactgcagaatgaccaatggcacctacttccagagttttccttcaactaaaaagagatggcattttcttatgattcagtaaccgcattacttacatcaacattatggttgctatagacaagcctaggtagctagcctctatttacatcatcccactaagggtatccaaacccaagtaaccaaattttagaacactatcagatagtttcctgcattcaagacttcaacgtcataactctttgaactcttattagatataaggaatctaagatgtattataggcattcctataattagccatatttacaagatacaaaatatttggataaaaagcaaatttcatcacatcgtataatgtacagataaggtttataaagtaaattaatttatttttagcaccatatatacaatccaaacactgcaaattaatttcttttcaaactcaaaagatagttttcattaatcatgatggcacatcctctctctcaataaacgcaaatgctgttttatgggctgtgtggtaatagtttaacatttagtaattgattatataaaattatgttctcaagactaggctgcatttcctttaaaagaaaaacaaaacctcaggttaaaaattagccaaaaatttgtgattactatcacaaataatccaagatttaaataaccaagggcctccagaggcccctgttcttccttttgccctgtctaaaatccaatgaaatatattaagtgttaaactggtatgaagaggtggaactaaattctttgaaacacaaggtggagtatcactttttacttaaactttgagtcctttacatttataactgctattcaaaaaaaattagacaaagacatctagatttagattaacgtgatcaaagggattattgtggatcattaaaggaaacttaa

SEQ ID NO: 436351 - DNA, 778 bp, Homo Sapiens
  misc_feature (109)..(114): n is a, c, g, or t
  misc_feature (687)..(708): n is a, c, g, or t
gtatttattttttctagaaaaagaaatttttgcaatagaattttattaacacctttctcaaacaaggtttccatgacagaaatcttgacagcaggagcactagattttnnnnnntttttaacatgttctttaaaacactgtgaagattaaaaaacaatcttggcaggctgatggctgcgtcagcacttccgggcctcctgctctagggagcatcaccagtattttgccaccactgagccagtcctcttggtagtagcagtagaaatttaattatttgaaatgaaaccagaaacatccctcgcaactaacctagttttcttatcaatgcattaatgaaacattcttttaataaaaatatttaatacaagacacattttgctgtgcataataaattcctctgctttgaatcattctttccttttgaaccaatcatttggttgaaaggttttctttctctgacataggtgattacatataaaatccacaaatatagaaatggggaaacagaatctcctggcaatcatatcacgggagttgtttttgtccttttgcattaaacgatactcaatgatagaatgattttacagatgctttggaggtgggaggggtagtgctgctctgatttcacctttaaaactgctgacagtgaaagcatacttttaggcagtattagagatcccctttacnnnnnnnnnnnnnnnnnnnnnnaaaggaaggggttttttttcccccaattgaggcaaagcaggttccggggggggagtcttcaaaattccct

SEQ ID NO: 436352 - DNA, 350 bp, Homo Sapiens
  misc_feature (250)..(276): n is a, c, g, or t
  misc_feature (281)..(281): n is a, c, g, or t
  misc_feature (302)..(302): n is a, c, g, or t
atttcttaactttttattgacattggcaaattaaaatagaataaattaacaagtattttttcaaaaaaatgttttgtacaaaaatactgtcaaaatttcctaaaaagctttcaacacagtagtatcttttcatgtactgaatataactattagcacagtgtcaaaaatgttgaagacagaaacaaaataaaaatctgtgaaatgtttgccactgacgacattccacaccctattatcatctgtacatatnnnnnnnnnnnnnnnnnnnnnnnnnnnaacanccaacttgaaagtgaacagtntgactttcctgatccagaacagtttggcccacatctggttaatcttcc

SEQ ID NO: 436353 - DNA, 747 bp, Homo Sapiens
  misc_feature (243)..(267): n is a, c, g, or t
  misc_feature (667)..(693): n is a, c, g, or t
aactttttattgacattggcaaattaaaatagaataaattaacaagtattttttcaaaaaaatgttttgtacaaaaatactgtcaaaatttcctaaaaagctttcaacacagtagtatcttttcatgtactgaatataactattagcacagtgtcaaaaatgttgaagacagaaacaaaataaaaatctgtgaaatgtttgccactgacgacattccacaccctattatcatctgtacatatnnnnnnnnnnnnnnnnnnnnnnnnnacagccaacttgaaagtgaacagtatgactttcctgatccagaacagtttggcccacatctgtttaatcttccagtttagcatattttaaaaattagtctgtactcaaatgcatagttaaaaaaatgaagcgagatggcagtttgtgcagtaatatctgcccttcgaagttcatgcaaccaactaatgcaatttttcctttcactcgtaaatctgaatgcagttcagtcatttgaaaccatctacaaaatccacaagattaagcagtttgccaagattaatatctaacagttgagcatctggagaaagtgagggaaaggagtaaaaacaaacaacgaaaaagaccaagttagctagatatttcaactacataagggaggtgggtgaatgtcaaggctacnnnnnnnnnnnnnnnnnnnnnnnnnnngtggcagcaatttttttaaaaccaatttgtacctgcccgggcggccgctcgaaa

SEQ ID NO: 436354 - DNA, 1030 bp, Homo Sapiens
  misc_feature (751)..(751): n is a, c, g, or t
ggctgtcggtcggcgtcgtgtgatgggagcgttaggcctcccaggtccttaggatcaggttgccccagaaccccttcccatatcctccattctccgccctgagttcctacccaggctgcctggccggggccactgcctcctcagcatgcaggaggctgccctgtagggaaccccagctctggggcttgggggtgagggtcagccctggacagacctctgcccagggaactgctccatggggtctgggagagcagccatcccctgctggcaccatagacccacacgaggagcctgcacagcaagccagcggtgacacacctgcaggtgtcaggcatggcactgggcacaacagggacctggcaggagaaacagaccacagagaggtctggagttgaggctgttgtcagcaaagccccctggtcccacacagctctgccctagagccacctctttgaccctttacccaccctgagaccagaacttgcaggccctctggagaatctcctctggccactgcagcccctccaatgggctttttctctcatgcattccctggcctggaggcgtcagggaccccacatcctccctgctcctcagactcacagcccctccatgttacctcccgcacctcctccctggggcagctgctccctgggcctctgaggatgtcagctcctggctccctgcctctctcccactccactcctggctcagtcttagagatttctatgccctcatggattctaccccntgccttcctggcctcttgattcttggcttgcctctcctccaattccaaacttagtgaaatggccttaagcattttaaactgtatgtatacattagcgcattcatgcctttctaaacgcatttcaaatgtcaaccaggaaggcacaccactgtattagttttatactgccgctgtaaaatttaccacaaacttagtgacttaacacaaatttattgcaattctgtaggctggaagtctgactatgggtctcactggactagaatcaaggctggcaggctg

SEQ ID NO: 436355 - DNA, 1447 bp, Homo Sapiens
  misc_feature (50)..(59): n is a, c, g, or t
  misc_feature (493)..(1006): n is a, c, g, or t
  misc_feature (1333)..(1333): n is a, c, g, or t
  misc_feature (1372)..(1372): n is a, c, g, or t
  misc_feature (1378)..(1378): n is a, c, g, or t
  misc_feature (1389)..(1389): n is a, c, g, or t
  misc_feature (1404)..(1404): n is a, c, g, or t
  misc_feature (1407)..(1407): n is a, c, g, or t
  misc_feature (1416)..(1416): n is a, c, g, or t
  misc_feature (1426)..(1426): n is a, c, g, or t
tggagaggatcagagtaggagcctgcatttattatttattattggcctcnnnnnnnnnnctattctactttaaaaacaatacatatataattctgaaaagataaaatttaaaaggaaaaattcaacagagacatgattaagtgcagcaatggtggtattgatgcttttaagttcagtttaatcagtagtacaatgttatgtatttgccactgaaaccatttagaaccatgcataatcagacagtttagcatgagggtttccatctaggatatggaaattactttagattgctaattttgagttggaaggcgtgagaatttgaataattttgtaaatagtattggaatatttaagataactgagattcacgattttgtacctttaatttatttgatatgcgttagtaagtcttgctttggtttttggcttttggttggagtgctgtggtcagcagaatgccacccttccccaacaaaagaggttcattccttannnnnnnnnnnnnnnnnnnnnnnnnnnnnnnnnnnnnnnnnnnnnnnnnnnnnnnnnnnnnnnnnnnnnnnnnnnnnnnnnnnnnnnnnnnnnnnnnnnnnnnnnnnnnnnnnnnnnnnnnnnnnnnnnnnnnnnnnnnnnnnnnnnnnnnnnnnnnnnnnnnnnnnnnnnnnnnnnnnnnnnnnnnnnnnnnnnnnnnnnnnnnnnnnnnnnnnnnnnnnnnnnnnnnnnnnnnnnnnnnnnnnnnnnnnnnnnnnnnnnnnnnnnnnnnnnnnnnnnnnnnnnnnnnnnnnnnnnnnnnnnnnnnnnnnnnnnnnnnnnnnnnnnnnnnnnnnnnnnnnnnnnnnnnnnnnnnnnnnnnnnnnnnnnnnnnnnnnnnnnnnnnnnnnnnnnnnnnnnnnnnnnnnnnnnnnnnnnnnnnnnnnnnnnnnnnnnnnnnnnnnnnnnnnnnnnnnnnnnnnnnnnnnnnnnnnnnnnnnnnnnnnnnnnnnnnnnnnnnnnnnnnnnnnnnnnngtggtgtgccttcctggttgacatttgaaatgcgtttagaaaggcatgaatgcgctaatgtatacatacagtttaaaatgcttaaggccatttcactaagtttggaattggaggagaggcaagccaagaatcaagaggccaggaaggcaggggtagaatccatgagggcatagaaatctctaagactgagccaggagtggagtgggagagaggcagggagccaggagctgacatcctcagaggcccagggagcagctgccccagggaggaggtgcgggaggtaacatggaggggctgtgagtctgaggagcagggaggatgtggggnccctgacgcctccaggccagggaatgcatgagaaaaaancccatngagggggtgcngtggcaaaagagatntgnaagggctgnaatctggtcnagggtgggaaaggtcaaaagg

SEQ ID NO: 436356 - DNA, 986 bp, Homo Sapiens
atggtgcccagagaggatgttcctaaggaacccatgtttctgccggtcttctctaaatgacaacgctctttggcaaaagaaaacattaatgcaactagaactgccttctgagagcaaagtttaatcctgacccagaattataataatttctgaaagttctattaatttcagcacactgtgtaggaattactcaggcttttcccatcctatagctcctaaaaaaccaaagtggctaaccatatctggcataacagaggaagtaaggtgcatttcctgatcttccaccatcacagaaaagcacacttaatttgcatctcaagtcgtctggagtaaagtctatgttgctggcaacagttgtgttatcctgacttctcttccccaggtcctgttgtcgtgtaacagagatgtgttgtgaaatgctgtcacttgcttctccctttctttcttttgggagcacccggccaatggaagcctcgcagatgcaggcagtcagcgacgttgtgggcgatgtagtagaggttcagcatggccgcggggctgagaatgtccacttctggtttcttctgtttcttcccatgagacttgccctggccttttccttttttccctttagctggcatggcgattctcagccgagcaggcaggcgtggtggactctcccgatcccgaagcccttagcatccaccggggccgctgcccccagcgcccgttcccctagcacccccggccccttctcggccctcctcagggaaccgccacgggcccagcctcactacgcctccccgccacgcctcgctgggaggagcgcggccggctcgggaggcagccagccgcggagccgcctggacgcgaggcacctgcttgccccacgcggcacctaggccgccgcagctgtgggcgctgggccggcgtgcgcctcgggggcggggccgcgcgcacagtaaccgggcgtggggcagccctgcgatcgcaggaattccggaccg

SEQ ID NO: 436357 - DNA, 1129 bp, Homo Sapiens
gtgataataagtaaaactatcttgttaaaggttcacattgattttaggatgcatttagattttctggatattaagacagaaaaaaaggcgttttgggttggaggacaggggacaggtttgtaagcagatcctttccaatccgggcttgtgaccattctgaaggcacagaaaccagcgtgggacctaaagatgagtcactgaggaagctctttattccagcagaatccccaccctggacgctaaggagacgagcattccactgactgtcaactgggagccgtgggtttgtgtggatgactctgtgtgagctgaaacagcctctgcagggtaaggagcccacagactgtattacagcccctgctcaccaagccccgacggccttccgcaactctgccctttggactacggaggaacaaaataatcgttcagttttctgggccacaaaatacaagatgggtctgggttgtacaaggagcttacacacggaggcaagaaagcgtgcaaacaggggcgggaatttttcaccccctgggtgagccagtgctcaagacatggaaggaggacctgagtcaccctcccggagtccacacgggtttgtgtttctggcttttatgaaccatgtccaactccagcttccgtcttctcctgagaggaagaagaatattctatgacggcaatgatttttttccctatcacaatatcataaagaggtccaggagcaggcctaagagaaggaccaacaaaagccaaagtgtctgagaacaacataatactgacttttctttgttggtaacagtccatgaaacgtgcacccctctctcctgagacatggtgaggcatgaggggaggcggcagaggagttgtgggtaggacattgtaccgtgtgacatcacgatcatgcagccagtgccgacgggacagagatgtgagaacaagcacgcagggctccaggctcacccgggagggaggtgggcggtttccagctaagtgcccagcctctcaggaacactgtctgtccagttcagccagggccatcccctggggctcgcaatctgggctcgcacctttagccctcatcttccctcagctcggtgggtaaaaactaatactgctgctggcggattcgcat

SEQ ID NO: 436358 - DNA, 1218 bp, Homo Sapiens
  misc_feature (96)..(97): n is a, c, g, or t
  misc_feature (167)..(167): n is a, c, g, or t
  misc_feature (172)..(172): n is a, c, g, or t
  misc_feature (174)..(205): n is a, c, g, or t
  misc_feature (208)..(285): n is a, c, g, or t
  misc_feature (1173)..(1173): n is a, c, g, or t
  misc_feature (1179)..(1179): n is a, c, g, or t
aaattcccaaaccccccctttgtttttttgggccccggggttttctctttgggagaaaccaagagttttgggcccccgggttccccctttcccttnngggggggccgcgggcgccacaacgaaaaggtttttagaaaaattttttggaagggcgcgagccgggcccncccangnnnnnnnnnnnnnnnnnnnnnnnnnnnnnnnnggnnnnnnnnnnnnnnnnnnnnnnnnnnnnnnnnnnnnnnnnnnnnnnnnnnnnnnnnnnnnnnnnnnnnnnnnnnnnnntttttggagttccagtgggcttttattgagataaattaacaaaaaccaagattttaccatatttttggaaccttataaactcagcagactccggtccatatatgcgtacatacaacataacacatcccaacaaaaacagagcccccccgccccactggaacatctgccaattaagagaaagccaattttcccttcccccaatgtttctgaaattttgagttcccactgttcacttctcagtggaactggtcccttgtggctagggacattggaattctctaccatttttactgaacaaaaaataattttttttcctgtttcaaaaaagggaatagtgactttgttttctccaggctccccttcccccacaaccaatgtaaaatacagcagcctgtatcttaataacccagccctaccccctcccttacccagcattgtctactggagaatttaaatacacttctgttggaatctgtcagctgtggatgggcagagtccaggtgccaggctagctccctctgacctcatgaactgtgacaacctttggacacttaactctttaccccaaagatgagtttttagatcagaaaggagagcagattttctttgggagttttaaaaaactatctttagatttagagatacaaagtacaactacaatctcacagaagtccactaaagttcaccaaaaagctgacttacttcagctctcatgaggccaataattttgataaaggtatctggcaggaaaatgattccacaataacaaatttaaagatacctagaacattgaaaaaaatagcaaattaaaataaatggcttaatttccaagaacttatttcatttttttgttactcatctagaaggtcaggagtgtggctaaaggcnagtttnctgatgaggttatgagcttccaaagtgtttctaaatccc

SEQ ID NO: 436359 - DNA, 549 bp, Homo Sapiens
  misc_feature (120)..(120): n is a, c, g, or t
  misc_feature (440)..(440): n is a, c, g, or t
accacagtcaccattaacgtcatatttattgttatttaactgctcaggaaaacatatacaggtatatacaatatgcaggaatacagaagactgcactttacatatttttttaaaaaaggnaggaaaaataacactcaatttcatgagctattgtcacagtcttccaaccaagcatttcagaaatgaatttcttttaagagtcaaaaaagattacaggattgcctaacacacagcagagttaagttttcatattttacatgtgcaataacattttcgttttctttcccaaagagtttgctatgcagtactgattaccagtgttcggagtctagtgtgtagggtgtgtttttcatttacttttattctttccattaaaccaaatttaatgaaataacatccttttggttaaggctatttttaaagctgtttcattctggggntcgtggggagcgagaaagtttttaaaacttcaggggtttgtgaggttgccaggaccatgagctaattggcaaagtgttgatgactcaacgctgggaaagtcaaagaccc

SEQ ID NO: 436360 - DNA, 638 bp, Homo Sapiens
  misc_feature (637)..(637): n is a, c, g, or t
gtttgcaaaattatttatttacatcttaagctcacattaaaatctttctaggatagaatggctaagatgaaatatacaaagctgatataaacacagaactcattaatctttatctgaacagaaacatagagatggctttagataatctgtttttccttcacaaaccaatgttcccttaagtcatgccatgataatgtctccccattaagaacttaacttgtattgcccaaaaaagctgagaagcaaaaagctaactttgatttgttaaacagctattcatatgccacaaaaccaaaactattttacagtgctgagaggtccagataggtccaaacatgatgatttttaaatgagtgctttggttaattaggctttgacttggtttttggcattacttgtataattatatcattccaatgagtcactacaggtaatccattcaaaacatgacttgcttaatactatcacaaagcacttagccttgccttgactggaaatacctttaagatgctgacaatagcaacaatttctcctttccttcactcagcaaaagaaatcacataaatcacaaaataagaaattcatttctcacatgttaaaaaaagcaaagtctgccataaacccttagagaagaaana

SEQ ID NO: 436361 - DNA, 2105 bp, Homo Sapiens
  misc_feature (223)..(256): n is a, c, g, or t
gggaagccaagcacgttagatttactagggtcatgtctgcaggtgaggtaacagcacacacatacagaaattcacgggcagagatgccaccgcagcatcaccgtcagacaccaaagcagcaggagggctcaggaagtggctttggaaagttctcgtgaaaatcaaagggcagctttggtgctcagagattcaaacagaaaactatacaaaaccaacccataannnnnnnnnnnnnnnnnnnnnnnnnnnnnnnnnnaaattgcaaaataaaagcccaagaaactaaccaccgatctgcacgtcagtggctcaaaaagtgttagcatagagaaaggcaaaaccatctgtgggggtgatgcatactcaagggggccggcatttcagtagcagaaagagtatttacatggaacccctatttgaaacctcacaatactaggaaaagctaaatacagacaatgtatgtacaagggaagacagtaagtactcttgcgtgacgattgtcagacacagacatttcactgaaaccatccatagctttagagaacactgcattctatctagactgggttcctgcttgcctgcaccccagccaggcgatctcaggctctggaccgtatgttctcccccacctggcctcttcccggagagagcaaacactaagatgttggttgcagcataaattgcaggaatttaaaggtggggcagtccttgggtatcaatcaatcacccacaaagcaggaccaacaggtgtgaggtggagtggaagtgtgggggtggggttccctgaaatatattcccattttataatgtgtttcaagtgtggccactctgcccttggtccaattgccatcctccttctgattcacgttaaaaggggagatctggcctttgggtttttaaacattatacaagataatttgctgggggagagaagagtttagggtctttctacagttattctcccaccaccccccaaactcttacgttttctttaaactacctagagataagcaatttgccgatcacagctggcctcagttcgggacacagtgggtgaggagaggagcccaggacctgactctactagaaaactgccagtgctttctcacactgagcctcagactccagctctgcctgaaccccttccctgcaccaataatgatcatttctcccccatctgcaggccccaatttcccatagcaatgacccaacttttgggaaaatctagaaggtaagtggcaccaaacatcaatatagccaaacctaatatcacctaagtatgaaccaatgcgacccattgtttctgtatacataagaacactcccagctggagattcttcctaattgttcctaagatgaaaagcctacattctcaagggaattgtctctataaaaatgatgaaaggtgttctccactaagggacaccccactgaagtccccacactgcttcccggtgagcgtggctgctcattgtgagaggtaaagggatgttgggcattccttggtgaccgagctctacgtgtggtctctcatttatgacagaaagtgtgccacatctgaataggttggttagacggggcttctggaagtaattacactccatgtacgctttcttatgttatggtgcaagtggaaatgtgcacagataaccaatgtgcacatttcatgagtttacagtcactacaggcctcttacttcttgcattaaactatccctttcagaacagatgtgaaacagatgataggctgcctcactggcttttagattgtagggtgccctgtcctttctgtgggagtggagagcttaaatttagcctctccctcatttcttttcagactctttgagtgctaaggtcttagagttcaactgagctccagtgatgagagagaatgtaaaaagacctgtttcctctatgctcagtcaactgcgactgtgccaaccaactctagggcttctgctgacctgcatgtgtaaaatgagtaaggggtaaatgttctctcatttgttcactagtcaagaactgcttacccttgtcccaaaactagaacataaaattcacacaaaagaaattttcgtgtcagcatggcacagtggctcattactg

SEQ ID NO: 436362 - DNA, 470 bp, Homo Sapiens
cataatcaaattcaatgtgaaatagtatataaacacggtgccttgactgggcaaattaaataattgctactcaaaagagtgttctgtttggactctcctactggtaggcaatggcaggactgtattacccttcccaccccccaccacccatttgtttaagttaacagtatgatggacacagagcttagactgaggttgttatgacctcagcaggagttaagggttaagaaaataagaaacaagaaaaatataaactcttgtttttactcaaccaaagcaatgtagtaacttattacataaccagtgctttctaatttagtagtaaaatacagaaagggaaactgaaaaaaatcaggcaaatagaggaatggagagggcaactatatcaaacagtccccactaaacacgttttatagggtcttagttaattaagcacagacacatggcatcagaatatgtgcagcagaatt

SEQ ID NO: 436363 - DNA, 271 bp, Homo Sapiens
  misc_feature (229)..(229): n is a, c, g, or t
  misc_feature (249)..(249): n is a, c, g, or t
gttttatttcttgtttttattttcaacttttcaaatagaattaccaattttgaagtcctcattttcatattaaggatcatttgcattctcttaatataatcagaaagctgattcagtgtttaattagatttaaatgttgatcaagaattaactgtaacttactagcactgaaaatacatgtttggtgtttcggctgcgttcagctcatggttggaaatttgaagcagtncttttcaaattaaacttttnctgacatcataggatgctaaaa

SEQ ID NO: 436364 - DNA, 586 bp, Homo Sapiens
ttacaataaggtgacattttattatttatacaataaggagacttttatgttattcaaaacacttttttaaatactgaaaaagttgagtacaccaaagccgaaaaatggctctgctatacactgcacagcattattttagtccctgtattttgtatctgtacagaaagcatcttcaaaatgcattctaatcacattgtacacctttaccaattagtgtcagtacataaaataaaactggagaatacagcttgcatttgcaaattaactgacagtaattaatttcactggttcagtaaatttaaaatatagattcataggacttctttgcacataaaatgaagcagctttcaaggttgttatggtctcatactgcaaaaaaaccagtaagtacattcacgatctatgttaataaagtagtaaatatgtcttcattcagttttatttacatcaatatgtagttcaactaaaaagtacttttaattgtgatatagtagtctttttaacacatacaaaaatgacaattttttatatataatttaagctcaaaatcacctggtgccgaattcctgcagcccgggggatccac

SEQ ID NO: 436365 - DNA, 1237 bp, Homo Sapiens
agctattgaaacttactttttattattttttccagttacccagcatgccacaatctgattgctgacctggatggaacagagtgaaataaatgatttacaaagagatatttacattcatctggtttagacttaatatgccacaacgcaccacgaccttcccagggtgacaccgcctcagcctgcagtggggctggtcctcatcaacgcgggcgctgtccccgcacgcagtcgggctggagctggagtctgactctagctgagcagagctcctggtgtatgttttcagaaatggcttgaagttatgtgtttaaatctgctcattcgtatgctaggttatacatatgattttcaataaatgaactttttaaagacttgagttgtaatgtttcctttttatcttgtagtgatgaacaaaacacaccaaaaaggcacatattttaactaggccaaagtatattaaggaccaaactttttttcctgccattcatttttcttttcatgatctatatatcaatcatccttcacctttaatcaatgtcccatcagactccattttatttatttatcgtcctactttgtgcacaatcaatcaggagacaccaggaagcactatgcattactctttccattctgttaaacaacgaaaacagacaaaaaagcatctttggctcggtggtgtcagatttttttcttcaatacgcagtatttgagaggagcctaaaaacgtacttagtgaaattagaaaatttacttagagtatatcaaatatctgtacacagataattatttgtcctaaaatagtatttctactatacacaattaagccctcaaatgctttaaagtaataaaaacggacactggacatactgtgttgtatctgagaatgacaaacactaaaggcaaggctgcagttagttaggacaggtccctgacttcggctgccctgcctggccagcgagccatcatcctcatcaccatctcaacacagagctgatgtcaccatatgctcagccttgcctctcagaagtgatgtggattaggctttggaggcggtggcatgatctacacacagagaccatttgaatctcttgagcatgtaaaaggttcaagcctgaaacagtagaacttctattcagattcagaagttttttatttcatcaaatgtgctagacataaaggctgtcacataagatattttaattgtccttaattctgttttagatatactgtgaataaa

SEQ ID NO: 436366 - DNA, 1035 bp, Homo Sapiens
  misc_feature (867)..(867): n is a, c, g, or t
  misc_feature (871)..(871): n is a, c, g, or t
  misc_feature (877)..(877): n is a, c, g, or t
  misc_feature (886)..(889): n is a, c, g, or t
  misc_feature (894)..(894): n is a, c, g, or t
  misc_feature (922)..(923): n is a, c, g, or t
  misc_feature (949)..(950): n is a, c, g, or t
  misc_feature (952)..(952): n is a, c, g, or t
  misc_feature (972)..(972): n is a, c, g, or t
  misc_feature (978)..(978): n is a, c, g, or t
  misc_feature (996)..(996): n is a, c, g, or t
  misc_feature (1000)..(1000): n is a, c, g, or t
  misc_feature (1003)..(1003): n is a, c, g, or t
  misc_feature (1019)..(1020): n is a, c, g, or t
  misc_feature (1035)..(1035): n is a, c, g, or t
gtatttagccaacaaccaaattttaatttttaattaggagacattaaaatataattagcgcaaataacagaatgacaaaggtaacagaatgacaaaggtacagaaattcataaaggtcaaaggaagcagcatttttaaccatagcaagaaatgttctaacatgaatttagggaattatggtgagtgcttcaccttccccacattcgcctcctaggcaaattttctagaagcaacatttctatttgacaagattataatgataataatacagaaatagctgtcaaaaccagacagtgtacattcttcacagtcaagagactctcaaacctcaataaacaccatgtataaaggaacatagtaaattccaacttagcacagacataacaaaattaattcatcgatcagagactgatacaattttgaatatgcactttccagaatgaagcagaggacaatagagaccatctgcagctgtcaaacctgtggaagtgaaacaatgaattacaaaattcacgcagtgtatgaattatcaacgaaaaacaaatgcttcgtcaaaaaaagttggtcattggcccaacacacagatattcttaagtatatatttatatatataatgataaaaatcagcttgcatgagggtcgcagtacatctactttgaagttatagcacacatactataagcaatttacagaatttatcaggtttgcatacacaggaattgcaaaatgaattaaaatacactgaaatataggacactcaaaatgtagttctataaacctcctaggattgacggagattggccataaccagcacttgccaccattgaacaagaactgtaatcaagaaaaagaagaaaaatcccaganaaanaggggnaaataaaannnnttccntctcatgttattccttaaagtaatgtcnncttgttgacttgcagtgttgatagtnntntcctcccctaccccgggggntttgtntgatgatagcttctgttntgtngcnttttgctctctgtttnnttcctggagatgatn

SEQ ID NO: 436367 - DNA, 328 bp, Homo Sapiens
  misc_feature (258)..(258): n is a, c, g, or t
  misc_feature (289)..(289): n is a, c, g, or t
  misc_feature (316)..(316): n is a, c, g, or t
ttttttttaaccagccatataatagtttatttaaagtccgtaatgaccttagccctccacatcattaaatgcgacaatatattatttactaaagttattaaccacctcctttgaatttgtacatatcagggacataagtgcttatgccaaaaagaatatagaaaatgcctgcaatctcattaacccatttccccctttaccatcgcagtctaacttccttcagaaagttccttaaagggaaaacaacaaatataaggnccagaactagtttgaagaaattccccaaggntctaattcaaacaggcatctaattcanacatatatatgt

SEQ ID NO: 436368 - DNA, 389 bp, Homo Sapiens
atgttttattttttgagcattttaaaattcagattcccttaaaatttcttaaaaacactaatttcatattatacggcttcccagtcctgaattacacattttactactatgtgaagctggatgcccttcagagaaattggcaaaggataatggcatgtaaaatactgttcatttctcatttcccaaccatgaatagtaatatccacattataaacataaaatatactcctcagacttcacatccacagaactggcttatctgcacagaaaatttcatgtttaatcaagaaggtctttaagctgaaaggagaccatgacatgctttaaaagactaaagaattttctggttctatcttcctacctttctttgcaaaaataattggggtctg

SEQ ID NO: 436369 - DNA, 333 bp, Homo Sapiens
  misc_feature (28)..(28): n is a, c, g, or t
gattcttcctctgccttcaccttttctncgtcttttttcttgcgttccttgtcttccttttttctcttatcatcttccagtctcttcttcttgtcttcaggggccttgctgacctccttcttggcagtgagcttgatatcgtcttttggcctctccttgctgctcactgtccgcctttcactgcagtctttttccttgttgtttggtaaagagtctttttcttccatacttgctggctttttacgctcagctggcattatgtgacccaggacaatctcgagcctgttgtcaacattagccccgggtttcccagcaccaactccagcgctcccc

SEQ ID NO: 436370 - DNA, 436 bp, Homo Sapiens
  misc_feature (20)..(20): n is a, c, g, or t
  misc_feature (27)..(27): n is a, c, g, or t
tttgtgccccccagagcctnctagtgncatagaagagggagctggtggtattgtaattgtatgttggtaacctgtagccaggcatgggcagaggtctttttatgatcaccatgtacatctgcatcaggcttgagcctggcatgtcatagagtcaatactgttgattaagcagatggatttgtaaataagtgattttccctgaattcacttttcttttcctatcctgcctccaggcttggttatagctccactctgccagctctaaataggatgtggataggggtttctccagggcccacacatggccggtagtttcgcttgcaggcatctctgatggattttgctgctgctagagtgtggtatatgggttggattctgaggccacactcaggcaagagtaccataaccaattcacagcctctacttttgatacaga

SEQ ID NO: 436371 - DNA, 650 bp, Homo Sapiens
  misc_feature (19)..(20): n is a, c, g, or t
  misc_feature (39)..(39): n is a, c, g, or t
  misc_feature (499)..(499): n is a, c, g, or t
aaagcattttaagtatttnnaatgacgtatatacatttnatttatcttgcttaatctactttcaaaagctaaaatatttcaaaggattatcttaaatgtgactctacctggaagtgcaaaactcagtttaataaatactttattttataaatcaggtcaatacacatacccatccaacaatacatacaaattcggcctaattatttaaattcaactccacataaaattaaggtattacaaaacatttttctggtaaatatatatataaatgggataaaaactaagatataaattatatgtgttaaatgtaaacatgaggataaaatatttttcaaatgagcactaaattaaattattcatttattagaatcttcaaaatgttcaagtctcatattccaatgtattatgttataaacactttacatagatcttgtgctttataaatatctattctagggctacgtgttttacaaatattcactcatttaatcctcttagnggttgataccactctccccatgttactgatgagcaatctgagttacagagaggtaggtaacgtgtacctgataaataaccagtaagtggtagaactgggattagaatcagacctccaaaggccaaagtctttactgccaagttacattaaa

SEQ ID NO: 436372 - DNA, 492 bp, Homo Sapiens
  misc_feature (23)..(23): n is a, c, g, or t
  misc_feature (41)..(41): n is a, c, g, or t
  misc_feature (75)..(75): n is a, c, g, or t
  misc_feature (362)..(362): n is a, c, g, or t
  misc_feature (467)..(467): n is a, c, g, or t
  misc_feature (478)..(479): n is a, c, g, or t
aaatggtgacccaaattttattnttagaactgccatttttngggtggtttttaagggtaaatgtaagatttttantccaaatatttatttttggcataattttttaaaaaaattccccaaaacggatgcttttataccacatcttccccaatagtagtcaagtttggagatgatttatactgtagcctcaaggatgcaagaacaatgaagtaaaatcacaattctgggtaggtttttacagatatctgctaccaagacgagcaaaaagctcagggttttcagtccttttaaatagtttttcatctaacgcaagagaaataaactttggaaaagttcaattttgaacccctcctgtggctttntacataaaaaggctttatgcatttatgcttgtaggactcaggcagttcatattagttgctgttttaggcactgctgtaagtactaaactacaacagactcaaganatccacttttnncaaatatgattat

SEQ ID NO: 436373 - DNA, 512 bp, Homo Sapiens
gggggaaatagagttaacataatatatttattttaagtgccattcatgcatatcagttctggcagcaacaatcctaatgacacttggaatatttctttacagcactaaacagttacaaataatggttgccgttcatcatagaggcaaaatatgaaatcgtgcaatagcaaaactgtagaaacattaaaacactgactgtccaacagcagtacagagagcaggttgtatctgcacaaaaagccaatgcattttcatcacatatatacaatatagatatgtacacatcaccctctgaatgaacaatatcaaaatactctattccatttgaaattatccccggattgattccctcccacttcaaaggacatctgagcgacacgtatttacaagaacacacatgaatacatttacatttcaaaaactgccacaaatgccagtcggattattctcctgaacagagtgtccccatttgtttacatgcatgtaaactgaaatgagcctgttaccgagct

SEQ ID NO: 436374 - DNA, 2016 bp, Homo Sapiens
  misc_feature (1490)..(1500): n is a, c, g, or t
tttactgttggaaaaatttttattcactggaaaaatgtttataaagaaatattaagtgaaatgttgagaaatatatagaactttacataaaatatattagccatgcaaatacatgagtgtacgctttctgtggatagacataaatattgctagagaaaaaaatagaaaagaatccatcaaggcattaactacacatttttctacgttaccagtatcttagtgttctaggtgtaggttattaaaatttccttctctgtactttctaaaattttaataataagaatgtgctttttaaataatttttttaacttgaatatctcacatgatcacctgaagttcccattttctcaacttaatagagagcttaaccgacctcttcttattcctttttttctattctggctcacgcagtggatggaagatggcattgaaggagctcttaagtcctctccaagcctcgctgtttgtgatgtgatcatggcagtgaagggacacggctctggagtgctgggctccgtttgctctgcactcagcctcccatctggatggggtttggaatgctgcctaggctctgccttctctcacacaggaaggacgtttggccccaaaccagctgctgaagggtttggcagaagcacccgatgcctgagctatcgcacagcacggtgccctgggcggctccacactcacctggctcaccaccaccctcttccttccttcccaccgggctgccctctcacctgcatttcctgtggtctatggaactgaaacgacatgagcagcatttcaggacgtcccccttaaaacccgctcctctgttcttatccacatggcttattactactttccaatctcatctcctgcggttctccacgtgactaccttccaggccagcagccttgtcccgtggcatccccagtcccaccattcccgtcccccacccggagcacccttcccccggccacacagtgaaaggctgggctgtgagagcttcggtggaaaccaggccttcaccacttcatctcccttcaagccacacacagctgttgcaagttccggataccaatcattttttacaaaataaattgctatttgcgtcaatatctgaacaatgtatgaaaacaatcagattttaggcccacttatttcctaagccccagatggcatcactcatgctcgaccactgtccttattcagaatactcaggttggaacagttcagctcctcagaaaataaaacacactcttcactgagtaagttttaccacgagagtagatcgtacaccattgattatggaggctgttttaaaaaaaggagttcaaagaaagcttaaacagcggtcagatcactgccaccagcaggtggcctccaagaagctccgttttcagttctcatttaagggcagatatttctatgttaaaaaaccaacctgcgctgtatagtcatatgttatacacctatctcccaattctaaaactgaccccttaagnnnnnnnnnnngaaacaggaattgaatcagcacaaatcaccagtgagacaaacctcaattaacatcatatgtggacattttctctttgatatttaagttccagaaaatggctaaggttttaaaattaaactcacattagtttttatacactgcctgtcgcaagccatgtacctggagatagtcacaactaaaatctggggatggtgagggggagagagaaaatcaaaccgtgcttcaaaaaccttcgctgggaagccgctcaggcctctcatctcccccgtgcacctttcctgatccccgggggtcctgcccactcggtcactgctcctcataatgcctctcctcctttggccatgaggcctttccaaacgagcgcagtcagcacgttctctgttcatctttgcttcttgggctttcccctggtaattgttttcctcagcccataaatattctatttattatctccctgttcttgaccacttgttctgcattttctccatcttccttgtgattagaaacctcaaaca

SEQ ID NO: 436375 - DNA, 617 bp, Homo Sapiens
  misc_feature (160)..(160): n is a, c, g, or t
  misc_feature (388)..(388): n is a, c, g, or t
  misc_feature (390)..(393): n is a, c, g, or t
  misc_feature (581)..(581): n is a, c, g, or t
ttgtgttttgacgttatcgagtagtgtatagcggtttcggcgtgagtgttatggttgattttgtagttgtgatgttcaaggtttacgcgttagtgtacattagtatagatgtagatgtctgaaactggctgcaataagtttaaattcaggaaaataattncttatgtgctattcatttataatcctcattttttactatctcatgtatcccagagattttaatagtcctgtttttagaaagacatggaaaatagatgcaatgatatccactgtgttttgcatttttctggccatcggaaaatgtgcattatgtgcatattaagaaaggctacaaggtaattagtaaggctgataatcactacattgtgaagaaactagaatatcactntnnnnttttataaaaggacaatttagaactgtgcagggacaatattcgtaacagaactatttaaacacccatgcaaaataaattaaaaatgctgtgaggtttaaattaaactataggcaactttgttgggattaattatgtttaaaatgacgatggttgaactcaaattattgaaccaaaaacaaaaacaaanacaaactgatggaactgtcaacttgcttcaaatggc

SEQ ID NO: 436376 - DNA, 406 bp, Homo Sapiens
taatttttaaaggcaatttagtatacatgatgagctagctttgaaatacagatttaaatgtttaaaaattaatttgagggcaagatttggtaccaaagtttcaaaaattttatttcactgcttataaaatactttatcagaacacttattttaaaaaattacatcttatttgaaaaactccaaatttgatggggatagttacaccatcatacaattttaaaggtagaattagctttctaatactttaaaatattttctgaaatgaacatttcacttggtttaggaccgtgtctgtaagtaaaagacaccaatgctaatagatatgacttacaaaaatgccacatatcgaaattgattgaggattgaaatatatatactttggcattgagaagagaggaagaaaaaa

SEQ ID NO: 436377 - DNA, 938 bp, Homo Sapiens
  misc_feature (157)..(385): n is a, c, g, or t
ccctgtggaaagagcaaccgcccagggttattaccgcggtgagggccccagcaagggggttttcggtctttgtttcgatcggtttgggggaaaattcttcactttgttgggccccgggttgagagttccagttggcgacaattttgggtttcaatgnnnnnnnnnnnnnnnnnnnnnnnnnnnnnnnnnnnnnnnnnnnnnnnnnnnnnnnnnnnnnnnnnnnnnnnnnnnnnnnnnnnnnnnnnnnnnnnnnnnnnnnnnnnnnnnnnnnnnnnnnnnnnnnnnnnnnnnnnnnnnnnnnnnnnnnnnnnnnnnnnnnnnnnnnnnnnnnnnnnnnnnnnnnnnnnnnnnnnnnnnnnnnnnnnnnnnnnnnnnnnnnnnnnnngcacatgggttttcaaatcagccatgtgcaggcctcatccatatctgtgcactatctgtacagcaagtaaagttacctgggacagtcagacttaagggttctttttaattgatctctttagttgctgtaaagttaactgacttactaaagttaacatgaggacttgagagcattctcctttgtgatttgaggaacccatgttattaggcattacccacctaatagcaaccgactaaaatgtgacgtggaggttcaggatcaacttctctgagacgaatcgtctttcaaaacttgaatttgctaaccaagttgaggaagtggcaacaaacatcaagtcacattttattcgaggtctgctgcagggttccttaaataacgaatgtatgcatttatagaacactgacagaaatgggttgaaaaactacagaaaccaagaggcaagagtacgaattagaaacaaacgttgtgtaagcacagttgaagccgataagcacagggaaggagatttttatactattcagaaaaacatcgcaagaattccggaccggtccag

SEQ ID NO: 436378 - DNA, 209 bp, Homo Sapiens
taagaaagcatcttttatgggtttattggtcctttaagttaattgaagtaaagaaactttaaatttacaagctaatatttatcaagcaatacaaattcttttgtttacctcaaaatgtaatactaattccatagtaaacaacaatttttttatacacagatatatgaaaaaagtggacaaaaacctcgtgccagcatcaaaaagtcaac

SEQ ID NO: 436379 - DNA, 332 bp, Homo Sapiens
  misc_feature (32)..(32): n is a, c, g, or t
  misc_feature (66)..(66): n is a, c, g, or t
  misc_feature (68)..(68): n is a, c, g, or t
  misc_feature (98)..(98): n is a, c, g, or t
  misc_feature (109)..(109): n is a, c, g, or t
  misc_feature (202)..(202): n is a, c, g, or t
  misc_feature (229)..(229): n is a, c, g, or t
  misc_feature (232)..(232): n is a, c, g, or t
  misc_feature (261)..(261): n is a, c, g, or t
  misc_feature (267)..(267): n is a, c, g, or t
  misc_feature (282)..(282): n is a, c, g, or t
  misc_feature (301)..(301): n is a, c, g, or t
  misc_feature (323)..(324): n is a, c, g, or t
  misc_feature (331)..(331): n is a, c, g, or t
gaagacttaaagaatctgctcaaatgatttantttctgagtctcttcacattaacttttatatgantntcaaaaaattattacctgcttatattcccngagtatctgtntcatataaagagatgctgcatgttcactgtgaagtattgctgaattaaattgaaaatgtcagataaaactgatacatgatgtagttataaaantgctgttatgaagaaaaaaggaatgcnttnctcctcggtggcctttgataaaatatgantgattnactctcagagttggnggataaactaatcatcttntagcacagccctgttgtgttgnnagggggng

SEQ ID NO: 436380 - DNA, 623 bp, Homo Sapiens
gagccttatttaatagtacttttaataaaattaagttcttaatagcacatttaatacattaaccctcccccttcttggtttctctgcattttgtgcaacatcactttgacttgattattcttgggtctgttttatttcccgcttttattttgcttttgaaatctttttccttggtggatttgtacgtgtcttcactagatgcctcaaattaagtctgaccacaatcctactctactttctacagtggagagaccatcctccctgccccagggctgtctccacccacccccccttccccacccgcaccctcgagtggggaaggggaagccctccccaccccagacgctaccatcccaaactagcggggtttctaggacaaaaagagcagggggaatctgtccctaggtggggcgagaagagtaaattgggtagagggagatgtgtttggggtctagggccagggagggggatggcagagtcattggtgtaatgaagcaggctcctcctgccaaaaggagagccaaggggcccctccaaccccttggataggaggggaaggcccagtgattgcaagctggggttggtagaaggcaagtgctttaaaaatgttatttctcacacgc

SEQ ID NO: 436381 - DNA, 795 bp, Homo Sapiens
  misc_feature (2)..(2): n is a, c, g, or t
  misc_feature (225)..(272): n is a, c, g, or t
  misc_feature (347)..(355): n is a, c, g, or t
  misc_feature (451)..(451): n is a, c, g, or t
  misc_feature (455)..(680): n is a, c, g, or t
gnttcttgtttatatttttttcaccttttaaacaaaaaattctttaaaatattttaatgcattcttttgaagaggtagatgtttggtacattttatggctcccagagcatatattcagttggtgcatgttgtggaagggggaattggaaattaaatgaaaacctatgactttggtcatgtcaatctgtaagacacatcagtaaaagggtattatgctctgttggnnnnnnnnnnnnnnnnnnnnnnnnnnnnnnnnnnnnnnnnnnnnnnnnggtgatgtggcttaaatgcaatagtttcttttttgggacatatttctgccaattaaagactagaagggcacaacnnnnnnnnnaattaccatagagaagatacattaaaaaaaatcttctgatgttttgtagccataactaaattatggtaaaaatgtgcactattgtgaaaaggaaanaccnnnnnnnnnnnnnnnnnnnnnnnnnnnnnnnnnnnnnnnnnnnnnnnnnnnnnnnnnnnnnnnnnnnnnnnnnnnnnnnnnnnnnnnnnnnnnnnnnnnnnnnnnnnnnnnnnnnnnnnnnnnnnnnnnnnnnnnnnnnnnnnnnnnnnnnnnnnnnnnnnnnnnnnnnnnnnnnnnnnnnnnnnnnnnnnnnnnnnnnnnnnnnnnnnnnnnnnnnnnnnnnnnnaaaaaaacttatcatcatcccgccggttgttgcggcggccgcgggggtcactcctagagagaggcgagccacacctgtcccctccttctgacacaaacaagacaaagagcccgcc

SEQ ID NO: 436382 - DNA, 1634 bp, Homo Sapiens
  misc_feature (20)..(20): n is a, c, g, or t
  misc_feature (225)..(275): n is a, c, g, or t
  misc_feature (355)..(356): n is a, c, g, or t
  misc_feature (460)..(501): n is a, c, g, or t
  misc_feature (861)..(873): n is a, c, g, or t
gtttcttgtttatatttttntcaccttttaaacaaaaaattctttaaaatattttaatgcattcttttgaagaggtagatgtttggtacattttatggctcccagagcatatattcagttggtgcatgttgtggaagggggaattggaaattaaatgaaaacctatgactttggtcatgtcaatctgtaagacacatcagtaaaagggtattatgctctgttggnnnnnnnnnnnnnnnnnnnnnnnnnnnnnnnnnnnnnnnnnnnnnnnnnnnggtgatgtggcttaaatgcaatagtttcttttttgggacatatttctgccaattaaagactagaagggcacaactttttnnttaattaccatagagaggatacattaaaaaaaatcttctgatgttttgtagccataactaaattatggtaaaaatgtgcactattgtgaaaaggagcaacgtannnnnnnnnnnnnnnnnnnnnnnnnnnnnnnnnnnnnnnnnnaagagattaaaatgtttctggataaggattagcttctcgaagtgtccatcattctgtgtagaagcttaaatatgtaatgtaaccaaactccagtattaaaaatctctcatgttgttttctttatacaaagcaagataacggcatataacactgccattacatggcaaaatgtttgctaccttagtttaaaaaacaatctcaaacaaaagacttgcttcaaggtgtttttaaatagcagtgattcagaattttttttaatgaaagtataattgcactaaccttcttcctgctgctctgattctgcatttgtggtacttgtgactacgttttttcaaatatagatagatttaagctgctaannnnnnnnnnnnnagtaatcactactatatcatgtcttttactctgtttataatatcaagtattttcttaaagatatagatattaaaccttgtgctcatgcaacttagagtaacatatacagacaaatgattgcatgaggccatgtttatatgtgtgactaataaggcttgtcatgattaacataatccaggtatgtcatttctgaagagaatagtcatcaaatttatatctcgaagattttaattaaggaattgcttattgttgagcttagcaaattaataacactatttctgtcactaattattttgaggccttttagtactaaaattttaacctgtgttctaagtagaaactgatttaacccaagtaatgcagctttgaatgatttcagcattcgttgctttgctattttacaaaacagcattgattgaagcaagtcttggttttactaaggtagggtagcatttgctattggtaaagagaataaatacacttaatttcacaatacattgttatatgtaccccagttgttgttagtggggactatgatactgtaataatatttttaaaaatttacatcaagagaggcagtcattcacgatggttttgtgccagctctttttagggttttggatcacattagagatatttagaacatattaccctgtgacttacgtaggaaacctaatatgctgagtatctggcacttgaattcctgcttttattgctggaggtccacatctgtggttgacctctgttattgtttaaaaaaa

SEQ ID NO: 436383 - DNA, 749 bp, Homo Sapiens
catttctcattaaccttttatttttaacttagttttacaataaacagaaaagaagttatcattaaaaaaataccatagctgtcaagtttaaatgaggttcttattaaacaaagcaggaacactatatcctataattacatctttacttttatatacaagaactgtgtgcaaagtgcttttcaaactataaaataagactttggaacaggatagaaatggttatccctaggagttagttatcccagactgcttgtaatgattcacaactgcttacactcttaatttgcattttatttatttatatactaagagaaaagacactttttactgataccaaattgatatctcatttttgaaaataatctttgatccacaggtctaaatgttatttttacatataaattcagttgcttgcttcactttttcctaaataaatagggaacacttttttaaaagcaaatagtagtagatccctttagacagacatattttaatcagtatgggattaaataattaaagttatttgaaagaaaaaaataaggaaaaagagtttgggaaaagtaaattgtattcttatacttttcaggcaaacaaagaaccatcctgtatactaaagacagattatttcttatttaaaacactgtgaacatatgatgttaaacccaacatcatacatcttgagaatgcttaaaaattatttgctacaggccaggtgcagtggctcacgcctctaatcccagcactttggg

SEQ ID NO: 436384 - DNA, 371 bp, Homo Sapiens
  misc_feature (181)..(181): n is a, c, g, or t
  misc_feature (187)..(188): n is a, c, g, or t
  misc_feature (190)..(190): n is a, c, g, or t
cctaatgggatccctttgggggagttttaagccagaatgtgacaaagtcacttacaggaagactggaatgtagccatagttgaactctaacatcgtctatagaaccatttcccgtctccagttaggttctaggcatactaagctgctcttgcttcctcaatcaaaacatgcgcttctattncccccnntnttttttttggcctctgggccttggcgcttgcagttcattctgccagacccattcccattctagttggctcctattcgtacttggcttaaggatcaccacctcctggaagtctttctagaaccagaggccggggcaagcgcctcttaggctccctcgtgccgaattcctgcagcccgggggg

SEQ ID NO: 436385 - DNA, 1105 bp, Homo Sapiens
  misc_feature (138)..(138): n is a, c, g, or t
ttctgtctgagcactatgtactccccataatgttgttgcaaaaggcagaggctggcatcccacttcagtagcatctttaaatctctttggttgattctgaattctattatttttcaagatgttggcagccatgccatntaacagtagtactttctttccatatttctagatcctgcccactctcctcaaagtgacatggtgtctgaaaagggcttaaaaacatttctaaactggttccacacggattttctaaagagctatgttccaggaaagattttttatgtttctcattttctccagcttctgatgctacaattgtctcttgttctaacatctttgattctgagcaagagctgtctttgttttgtaaagatggctctgtcattttgctatggcctggaccacctgattcataaatgtacaaaaatgcatcatttgtattttttctggtagcttctgaatccctagaactctgtgtgtttacgttttctgcagtagtttttcttttcacagcttttgactgcaaattaaacatctcataggaatctaaaatattattacatgcttcctggaaattgctcctctcatcggaagtcacacgcttctgaagagtagcatcaaataaactaaagccattatcttcactaaattccttaatatcctcccctgataattccacaaataatttttcttgctttaaaaacgttttcactccttcctgaatgcaaaacaagagagtgtcccagttctgaaattcaatcagagttttggctggctccatgcacacatcatactcacagaattggcactgcacattaattacatatatgccatagagttctggggtagaccggtgccgaagacttgaattcatttgcctactggtgggaccattctttggcttgcatataatactttctttccttaataaaaaagtcaatgagtttatgtagctgtgtcctgtaaaactagtctgtttgttcacaaacaaaaactgcatattcttgttgtaatgtgcttcagagctgatatagccactaagctcaaactctttatatttaaaacttatttctcttagcttttgggactttcccaatccataaat

SEQ ID NO: 436386 - DNA, 558 bp, Homo Sapiens
  misc_feature (110)..(111): n is a, c, g, or t
  misc_feature (113)..(113): n is a, c, g, or t
  misc_feature (266)..(351): n is a, c, g, or t
  misc_feature (406)..(418): n is a, c, g, or t
gggttatatgaatttttattgatagagagtatgtaagcttttggcatttttgtcactcagcaaattactcctaaggtttatatgagttgatgaatagttgttttattatnntnttttaccaccatgtatctaaccagatgaaagttgtttatatttgagagtagtatacatatttgatgtagtagtttatccattcacctatgagatatatttgcactgttttcctggttttaagtgctataaataaagatgctgtgaaatctacnnnnnnnnnnnnnnnnnnnnnnnnnnnnnnnnnnnnnnnnnnnnnnnnnnnnnnnnnnnnnnnnnnnnnnnnnnnnnnnnnnnnnntaccccgcgggcaacaaccccacaaaacacaaaaaaaaccccttgtgcgggccgnnnnnnnnnnnnnagaaaattttcttacaaaccacctcttttgggggcggggcggccccacaaaggtaaagggagcaacggggccaataatttttttccccaaaaaagaaccccggggcaaaggaacaaggggtcgtgggattttcccccccc

SEQ ID NO: 436387 - DNA, 624 bp, Homo Sapiens
  misc_feature (18)..(19): n is a, c, g, or t
  misc_feature (71)..(72): n is a, c, g, or t
  misc_feature (94)..(94): n is a, c, g, or t
  misc_feature (527)..(527): n is a, c, g, or t
caagttttgtaaaaaaanntttattgcttgtgatatcataatcatcacattatattacaggcactattttnnttaattcatgttctctcctcgngagggataaattcatgcattacctctaacaagaaacaatgtaagtagaaattatatatgccagtataataaaacactacattgaaccacacagacttatgataaagcaagtagaggttattaaatccagcacaattagttgtgtgggggtgttctaagtttggttttacaaagacaatgtccccaaaggggagaaacactcataaataaaaacagaatttagaagcagatgccagtctaaaacctctaaattctctccttagatcatgttttaccatgagaagtctatatttggacagcatttgtttatttccttgcagaaccgcctctatagggctgggattgataaggttctgcttttaattttgactgaggtcagtataagaaacagccacatgaaatctatgactgctttttttccttttctatcgtcncagtactcctataaagctcccagtgaagactttctttcatatgtttatgccaacagaaattttgttcccctgagaagtggtatttctgctcgtgccg

SEQ ID NO: 436388 - DNA, 995 bp, Homo Sapiens
ggtgatgcagatttcaacagtaactctggaaaactgtgaaaaatgttatttaaaaatatatatgtatatgctactgcacagtttcaaagatgtgattcataaataatgttggctgcactgattaattttataacaattactgcacttccaagttgatgcgaacacgcaggacctcatactcaatattaggcactagtaatatccttcaggcgtactacagttttatgttagctgtattgtacatatatatttttaaatgtatgcatttatacaaactgtgtatattatgtatggggtgtcagaaatgtacacatcactgttatataatagacacatcattgttgtacatatgaggataagttttagtgcagaaagtctcattgcattgcattccatgtgttcaatctagtacacaatttgtcaactcttcagattatttttccagtacattcctcattagattgtgggtttcaagtttccatttgcaatttgaatgtttccagaaatctctgtcttaaccaaacctctctctccaggcacgattctgcacatgagtctgatctgtgtagagtagtatcatcaaaaatgccaaattttgatcaggaatatacctggactactctctttcaaaggcaattgaacatcgtgataaaggatagcatctattcaggtcatggaaggatatggtcagttgaacttgtgttgaactttgggaggcaaatgtacgtcttcaaataaaaagacatggtaataaaaattatttgcttaaatttgagagtctctggaaggatatacatcaaactgtgagcagtggttgtgctcaggcagaagggacaaaccagggacttacactttctactttctacatttctgcactgtttgagtttttacaatgagtagatattacttttctaattagaaaacacaagaaaggtatttcaacttgaaacaaaactaaacaggccaggcatggtggctcatgcactttgggaggc

SEQ ID NO: 436389 - DNA, 298 bp, Homo Sapiens
  misc_feature (16)..(16): n is a, c, g, or t
aaaaaaaaggcatcanttttttttaaaaatggggaatgtactattaaatggggatcttcctggtctactatcattaggacaagtaacaagctaaaaatgaagtctcttgaatctttccatccccaacttgcccacaaagctgtgggtggtttctggtacttaaagcactaatattatgttgctgctctgcgaacagcccagtagtcccatttccttccacaccaaaaagtgttaaatcaagtatgcaaatggagtccttacaactggggtttatgttgtcttgccctttttttagcac

SEQ ID NO: 436390 - DNA, 973 bp, Homo Sapiens
aagggaaaagtatatttactagacttccataatccatacttactttaaattcaatctagaaataacatgactcatattaggcaatatactttgaagatctgtacaacatagtaatcacagcagggtcttgctaactcacaaatttagcatacatgctgcaaaaacatctctcctggggtcccaagggctttcaaatgttccaccaggggcagtcaagactagattcacggtgctctcttcatcatgcgcacaaaatgtgttttcccataacaccatattatcacaagtctatgaacaattctgggttagctaaggtagggcagtataggaactctttacaaataacagtatttcaattatgccatgtaagtaaacaatttgctgtgaactgtcctgtgtatctaatcatttaatacattgcttctataagaaaatactatttgttaaattttagtcataatttcattgtttctcatcatagactgcagatgcaaacatttaatggtgaacaaaatgtttatctcaatttttctttgacatttttatgctttgaaaattcagaatggataaaaacaaatgaagtacaaaatatttcagatttacatagtgataaacaagaaagcacttatcaggaggacttacaaatggaagtacactctagaaccatcatctatcatggctaaatgtgagattagcacagctgtattatttgtacattgcaaacacctagaaagagatgggaaacaaaatcccaggagttttgtgtgtggagtcctggggttttccaacagacatcattccagcattctgagattagggtgattggggatcattctgggagttgggaatgttcaacaaaagtgatgttgttagggtaaaatgtacaacttctgggatctttggcagacatttgaaggttgcattgagtctgggcttttactccgccgtttcctttcacactttaggttttatt

SEQ ID NO: 436391 - DNA, 511 bp, Homo Sapiens
ttgaactgagaaccccttttaattgaatcagtggtgtctgaaatcatattaaatacccacatttgacataaatgcggtaccctttactacactcatgagtggcatatttatgcttaggtcttttcaaaagacttgacaagaaatcttcatattctctgtagcctttgtcaagtgaggaaatcagtggttaaagaattccactataaacttttaggcctgaataggagtagtaaagcctcaaggacatctgcctgtcacaatatattctcaaagtgatctgatatttgggaaacaagtatccttgttgagtaccaagtgctacagaaaccataagataaaaatactttctacctacagcgtattaaactaggcaaatttggaaaggttttctgggtaactaaatgccagctgggacatacaacctattttatccaacacatttaacatatctactatatttgcttttaacaggcacctcttcatggtccaggttcccgacctggtgtagggg

SEQ ID NO: 436392 - DNA, 740 bp, Homo Sapiens
  misc_feature (509)..(626): n is a, c, g, or t
gttgactcagttgacttttgagtatctactacataaaaagcccattactattaagaaactcaagacaaacatgatttttacctttaatagcctaagatttcttgtgggccaaggaattaattattccaatcagaaatggaggccttacctcatttgggcaaagattagtgctagttattgaagatttactaataaatgatctgttaaggaatttagttttttttggatatgttgttttggttgttgaaaactaaggtataattataatagttattttttgaagatatgtttggctagccatcaattagaagttagagagtttgtcctaacagataagctataaccctcacattttaaaacatgcatagtgaacaatgaacaaaaacaaattcaaaattttactaatgtaaagctgtatattgtgattgttcaaacacttttttttgcctaggagttccagatttaaatcctggttctacacttcccaaacctcaggtaccttctgtggnnnnnnnnnnnnnnnnnnnnnnnnnnnnnnnnnnnnnnnnnnnnnnnnnnnnnnnnnnnnnnnnnnnnnnnnnnnnnnnnnnnnnnnnnnnnnnnnnnnnnnnnnnnnnnnnnnnnnnctgtatggttagtactgctaaaatgacttcttaagggctaccaaaaggaaaattccacaagctgaccacctttcctattgtgatggtcactggtatttcagctatgatcctttg

SEQ ID NO: 436393 - DNA, 384 bp, Homo Sapiens
agtttgtaggaaaagtttatttaatggggagactaagacgatgcaagatggttactagaaaaacatctttcagtctggataaatacacaacaaaggatcatagctgaaataccagtgaccatcacaataggaaaggtggtcagcttgtggaattttccttttggtaaccttaagaagtcattttagcagtactaaccatacagtatatgtcaggcactgtaataaactctttacaagtggtacttcatttagtcttcacgacactgaggtatactgttaaatgtccccattttacaagtaaaaaaattgaggttagagaggccacagaaggtacctgaggtttgggaagtgtagaaccaggatttaaatctggaactcctaggc

SEQ ID NO: 436394 - DNA, 448 bp, Homo Sapiens
  misc_feature (23)..(23): n is a, c, g, or t
  misc_feature (62)..(62): n is a, c, g, or t
tcaccatgtggctgttactaggntcaaattcattactggaaactgcaagggacgggaaattnccaggttttgtttgattgaggtcaggattcaaaggcacctgctttttacctgtgggaacttgccttattggacaacatacatcctttctttttttgtggcaaactttcacaagcaggacttccagggtaacagaattttgttcattttctgagtttggtgatggcttatcatttttgtggaagaaaccaaaaatgtaagctgcaaatgagctgacaagcttttgatgtttgttctggagtttcgatgagacatgtaagtaagagttctgtgcaaaaatattggtgctatgagattccgagttcaaagaaatctatagatctgtgttggctctgtccagcgccgctctggggtcggcccagcgtgtctctcctgcggctcggcgaac

SEQ ID NO: 436395 - DNA, 962 bp, Homo Sapiens
  misc_feature (587)..(638): n is a, c, g, or t
  misc_feature (647)..(702): n is a, c, g, or t
  misc_feature (820)..(898): n is a, c, g, or t
cattaactgggaaactgcaagggaccgggaaattttccaggttttggtttgattgaagttcagggattcaaaggcacctgctttttaccctgtgggaactggccttattggacaacatacatcctttctttttttgtggcaaactttcacaaggcaggacttccagggtaacagaattttgttcattttctgagtttggtgatggcttatcatttttgtggaagaaaccaaaaatgtaagctgcaaatgagctgacaagctatgagattcttgctctcctttcattttctctacttttgataacatatcatcaactttaaatgttttccttttgatgtttgttctggagttttcgatgagacatgtaagtaagagttctgtgcaaaaatattggtgctatgagattccgagttcgaaagaaatctatagatctgtgttggcttctcacaaggcctggaggaaaagctcgtggtcagcctggacgtgctccattttcggcttcttcaccggtaacgccgcagcccccgccgctgccgccgcggaggaggaggaggaggccgagtaactgccaccccctccacagctcnnnnnnnnnnnnnnnnnnnnnnnnnnnnnnnnnnnnnnnnnnnnnnnnnnnncccccgaannnnnnnnnnnnnnnnnnnnnnnnnnnnnnnnnnnnnnnnnnnnnnnnnnnnnnnngcttctgaggcgccatcgcggttcctgcctcctccccccgccagctacccgccgggcggccccggagagcaagcgcctgcaataccaaccgctcgccccagcaggctccggcggaccnnnnnnnnnnnnnnnnnnnnnnnnnnnnnnnnnnnnnnnnnnnnnnnnnnnnnnnnnnnnnnnnnnnnnnnnnnnnnnngtgtctcctcagagccccgctccgcttcggaggccgctcaccctacctggcctcgcaccccgct

SEQ ID NO: 436396 - DNA, 883 bp, Homo Sapiens
  misc_feature (51)..(51): n is a, c, g, or t
tcaataaagatcctctcaacttttcttgtgcaaagaactgagaccaatgtnactgaacctgttgtttcccatgccttctctggaaacccttgactcaaccaaacttctagaagctggtgctgtgctcgaggctctggtcatcagggtgcaaggtgctggccggcaggagtcaagcatctgagggctgcgctggcggcgtccttgcagagcaccacgatggcctcctcttcactgctcggggcatcatctgcggcctcacacaccatccggacgtgggttaagagggtgtccggccgctgagcccccagccagatgtcctttatgtagagagacactaggaatgctgcggaggcttgtgtggcttcatccttctcactcagagaagacagggagagggcttccatggccgggtggaaggggctccttgccgggccctgggcagccaccagctgcagcatgaccgtattgaaacaggcaggccacctcctgcacaggccctgccagcccctcagccccacagaagccggctatacagcctgaatatgctgctcctcacggcactgtccttaaggaggtcagccacgaccacagggtgtggcaaaatatggctcttaagccagccaatgagtcctgcagcctctgccctgctgagcgggtgctcggccaccgaccgcagcacccaactgactgcccagggaagcggcagcatatacggggcctggcgcatcgctctcggggctggctgagtccacaggctcctgagtggggtcaggaccagggatcactggtctccagtaagtcaagatggacctcaggaggcccttgcatgtctccaaggtagatgccatcagctcagggtcagcctcgtgccgaattactgggg

SEQ ID NO: 436397 - DNA, 368 bp, Homo Sapiens
aaatgtacgtttgtagttattcaacattatgaatttcaagatggccacctattttgaaacgcacacctttgccatgaagtctgttgttgcatatattagtgctgatgtaataaaatgcttctattaactatgtggttgttaataaatcttgtaaaaataaagttctgtttattttatggtgtcagaacaaaatagctgtttaaaatcacttattttagtcttagcttttaaatcaaaatgcctataagaatattaagttctaagattgttgagaatactaagataaaattaaaaattgtatgattttacaatttgctataatttaaaaatcttgtattgattaaatgttaaatcaggttaaatatttg

SEQ ID NO: 436398 - DNA, 967 bp, Homo Sapiens
  misc_feature (621)..(621): n is a, c, g, or t
  misc_feature (625)..(625): n is a, c, g, or t
  misc_feature (637)..(637): n is a, c, g, or t
  misc_feature (640)..(640): n is a, c, g, or t
  misc_feature (649)..(649): n is a, c, g, or t
  misc_feature (695)..(695): n is a, c, g, or t
  misc_feature (713)..(713): n is a, c, g, or t
  misc_feature (715)..(715): n is a, c, g, or t
  misc_feature (725)..(725): n is a, c, g, or t
  misc_feature (790)..(790): n is a, c, g, or t
  misc_feature (830)..(830): n is a, c, g, or t
  misc_feature (848)..(848): n is a, c, g, or t
  misc_feature (852)..(852): n is a, c, g, or t
  misc_feature (855)..(855): n is a, c, g, or t
  misc_feature (865)..(865): n is a, c, g, or t
  misc_feature (873)..(873): n is a, c, g, or t
  misc_feature (877)..(877): n is a, c, g, or t
  misc_feature (891)..(891): n is a, c, g, or t
  misc_feature (895)..(895): n is a, c, g, or t
  misc_feature (900)..(900): n is a, c, g, or t
  misc_feature (906)..(906): n is a, c, g, or t
  misc_feature (908)..(908): n is a, c, g, or t
  misc_feature (912)..(914): n is a, c, g, or t
  misc_feature (916)..(916): n is a, c, g, or t
  misc_feature (923)..(923): n is a, c, g, or t
  misc_feature (926)..(926): n is a, c, g, or t
  misc_feature (934)..(934): n is a, c, g, or t
  misc_feature (940)..(940): n is a, c, g, or t
  misc_feature (952)..(952): n is a, c, g, or t
  misc_feature (955)..(955): n is a, c, g, or t
  misc_feature (957)..(957): n is a, c, g, or t
  misc_feature (961)..(961): n is a, c, g, or t
  misc_feature (963)..(963): n is a, c, g, or t
  misc_feature (965)..(965): n is a, c, g, or t
acatcgagacttaatttctttctttttattatcgttttaaactaacacaaaaacatgtgctcggtatctttattttaattaagatttgtttctttattagatcttagttatttggagaaaccaggacgtcttctccactcacctgttttacacaaaggtttttcacttagatttgcaatttcgtatttccatataaaattcgagaaagagtggagaaatataactacagaaataatctgaaaacttcaaaacacggacttttcattatcctccagaatagaagataacatccaaggagtgctcaaaatcaaaatcaggtggccctttcaaaagtagaatatgatgagagcttttaaatttcacagattaaacgtttctaagagcttaatgtttcctccgcttattgccactgtgccatctggcttttgtaactggtgtcctgcctctttgaggcagcagagggcgctctggcattgttgacaccagatacctcccggtgcaccgcgctagcatcttgttcccaggaaggaaacatactatttccctggagggttgtccttgagtatctcaacgggtcaagctgttcctaaattattccgagaagctttaaatttcagaccnagangaaagttgagantgncaaaggacnctcacggcacgcgcgcaccgaagttctcccattgcgaagccgggtntgtttttattgcaaaacngngcgcgcatanaatttctttcatagcaggaaaatttgtaatgggcatcaaactggatgattattttccaaagaaanaggaagtacatagtcttaaaaatctagaacatcacggatnaatagccactcgatttcntctnggnaaccgaattnctaaattnagtntttccctttttaancagnatttnaacctncntcannnanggttttnatntctatttngaaagnattttaaactgntcnantttntnangg

SEQ ID NO: 436399 - DNA, 439 bp, Homo Sapiens
accagtttagaataggaatctgaattttattaaaaacaaaaataaatctaaaaagcttccttcagttacaaatatgcacaagaatttctgcattacatcatttgacataaaatgttctgaatgacagaagtagaagtagaacttactaccatttgaagacaggagttgagcgctgaaaaccacacacatttatagaaagaaaccaaagtttcacagggaagacctgtgatctctggctacaggagctgaaattaggaacatgaaagaaacttgaagagagaagacattcaatactctaaaatacttcagcaaaaatagtcaaacatccgtaaacaacttgtaacaaatctttatatgttgtgttgctatgcggtaaatattcttaactgattattattcaactcaaaaaagtgatttttattgctcacgaatacttccc

SEQ ID NO: 436400 - DNA, 704 bp, Homo Sapiens
taaattttaagaagatttttatttaaacacttttattacaatatttaggtggcacaataactaacaagcttctgagacaggaggtaacattctcatagactttgcaactcagccagaagtaaaactcgaaataaatatgtcatttaaagtaactatgaaggtaataataaaaggagtgttgttagtactaagaaggttttcaatgcagggtccaatagctatatttacatatacagaaaaaatgaaattagttactaaacataacaaaaaaaacttggtatacctatagcaatgcatatttaccaaaaactggtgaaaaatatattgagagatatgttaaatatttgctgaaaagaaaactacttgtctgtatgtgaaaccccatgaatcattttacacatcaggaccaaaaaactaactccttttattcctcaaaaatcaaaagtggtctcatctaacccaaaaatcacagacttgtcagttattgtcttctcattttgaacattatttactattttttctctctaaacagtaagttcttagtcaaaatttattattttgtcccatctagacaatatggtctatggtacttcactagggtggtctaggagtagattctagggagttccccaagctctggcagtacatgtgtcttgtatggggccatatgcacatttttggaggggtgatagtctatgtctttt

SEQ ID NO: 436401 - DNA, 2152 bp, Homo Sapiens
  misc_feature (259)..(363): n is a, c, g, or t
gtgtgtgcgaggcggtgtttccgcggcccgcgtgtgctaggtggtgtcttttgtgtgagtgtcattgcgttggtcacgttgtcttctctttggctttatgtctttgttctggggtcggttgtcgccgtccttgtctttggtggcggcgcctctcgttgttcgatgccgtgggtagtgcgtggttgtttgggttctggtttattgtttggggggctccctgctggggtggaatagttatatggggggcgggccgccgtcnnnnnnnnnnnnnnnnnnnnnnnnnnnnnnnnnnnnnnnnnnnnnnnnnnnnnnnnnnnnnnnnnnnnnnnnnnnnnnnnnnnnnnnnnnnnnnnnnnnnnnnnnaacaaaatgtagaggtttatttcaacaaaatgtgtaaagagtgcatctgaagctcctgctcatcacagtatgtgtccatcaaattctgagacaagtgaaggctgttttgtgaacgaagagaacagataatatggcggtctccgtccaagcaggtcttggtcaatatccatcatttatactcctcctgccttagtagccttgcatgtttgaggggctgtgggaatgtcagattgctcatgttctgtgcctccaacttgaaaaaatccttgtccagggtaagacctacagtaaggagctctggggatgggggaggaggcattacagggttctagagaggaaacatactcgtttgtgtcataatttggtggggagaggggaggtaaatgagtgtaacccaccctgcctctgaagacatgcctggacaggcctcctggggggtgcaggacttcataccacttgtagatatgtgggatttgatttattgcaaaaaagcatagaagaataatctggtcaaaaatgaatccaattcttactaggtaagcaaatagccagcaatggtcaatgcattttcctggactgagaattgtcccccaccactttatgcccttttctgaaggtgctgaacacctgtaccttccaccagggcagccgggctgaggctctgactcctgggggctgtccgctccatacccagccatacagtgcccacctgcaacccagaaccattgaaaagtccagccaatctatccgcacagattcctcctgaagaaggggaggtggagctcgttcttgtgtgcaaactacagggttaaggctcagaactgtggcttgtccaagaacgttcataccactgcttctcaaatgtcttagtgatttcctccttggtcatcagtgacaaatgcagttagctgcactaaaggaaccggatgctacaccagccctgatcacctgccactcttgctttaggaacagaggaatcagtaagttcttttcttgaataaactagttgttgaaagtaaactctctccaccacctgaggaagcccctgatgccagtcaggaggggccagtaagcctggaggacagcagcaccatgactgagttgtaaataatcttaaggtcatgtggattctgtgtttcctggaagcctccctcatcaggaaggccagctcctggtgctgagggtgtagctgtcaccagggtcctttcagagctgtggggagacctgctgcctgtctacactctggggaagagagtagaaccgttagctgctaggacagtaatcctggaactagggaagagtgagtgtggaggcaccattaacctctcaaaaccatccaagctccaggcttcataggaacaactttccaagtcctcaaaacaaacagactatctatctatctcactggctctccacatggcataaataactagtttccaccagtgcagaaagggcagttctcttctggctcctcctctgccaactcaggcttcaccacctgtggaactgctggggcccctcaagcactggccttgcagctcccagccacatgcgacagctagtccagcagtgacgtgcaggcgagaggcaggccaacaactacctttccctttgtcctcagagactgaacccaaggttgaggtcccctaaatcaagaataactggttctattttctttctctgcttcttggctcacagttttgccctcatctttgagttcctatggagcttgtagtagattttatgctctaatttttcttcataaaaggtaccgtagtgtggttaaacc

SEQ ID NO: 436402 - DNA, 677 bp, Homo Sapiens
  misc_feature (476)..(489): n is a, c, g, or t
cctatctgtggttaacaaaaatagattatttctctgctttaatattttaaatcttacatctaaaataaattctctccacatataaaacccatagcctttggagatatggaaaatggtatctttcagatttctagaagttcaagtgtcatacaacaaaacaggaaccccctttactcttatggacctcatttcaatatactgtttacagtttgatggaattgtataatttaatatttctcttgtactgtagtttatatttatttacagatttttttgtactgtgtgatttgaactttttgttccttgctatgatcaatgtttatgtagtagagcacttatgatcacaaattaagttttttggtttgattgcactacattaaattttttaatgcagttctgatttttgactggactaaaactgtgtcttaatgtatgtgatgagtacttaaaattttaatccatgtggtccccccccnnnnnnnnnnnnnngcattgtatgtcaaaagcgcttgttctttcgtgcatgtgtaagatttaatggttccattgtattatttgaccatgacattttggagaaacattcccagctgtaatgttgtgtatggtagttctcactggatgctagagttttcaaaaccactattcttctaataaattttgttgtgaaaaggctgtta

SEQ ID NO: 436403 - DNA, 568 bp, Homo Sapiens
  misc_feature (471)..(487): n is a, c, g, or t
tcgtgcgattcggcacgacgtataagttcttatggcttcacttaaagactgtctcaaaaatactttgctctcttcttcttttttgttcatgggacatggtacctaagcaaataggagttgggtttggtttttctcctaaaataatgctcaatacttacctaatcaaatggcatccatttgaataaaatgacaataactaaagctagttaatgtcagtgacattaaactaactccaggattcaggagttttaatgttagaatttagatttaacagatagagtgtggcttcatttgtccatggtagcccatctctcctaagaccttttctagtctgtcttcctgccttcgaacttgatgacagtaaaaccctgtttagtattctcttgtgcatttggtttgttggttagccgactgtcttgaaactattcattttgcttctagttctattttacagaggtagcattggtgggnnnnnnnnnnnnnnnnnctagctctgtgtttgaagtttcagtttctggtttctaggtaaggcttattattgattagcagtcaatggcaaagagtatcg

SEQ ID NO: 436404 - DNA, 476 bp, Homo Sapiens
atcagtaaaggtagatttattgacgatatacacatttgaaattgaaatgtttttaaaatgtgtaaaaccctgacagcaatttctttgtaatggtgcaaattataacttagattttgttttgtttgggaactaactttgttttctaacaagttaatttccaaaagaaaagtggaccaaagttaaacgggctttatttaaacacaagttctctgttttagaaccttatgatagtaagtttcacaggataaggatagggaaaaaagtactgcaagtcattgcaaattaaatagaatgtttggttctgaatttcctcccttctctccagcaaaaataacaaggataattctgtttcaaaaccaatttttaactctaatctttaagctctttaggaaaacaatcaattttgtggaattatttatatttttcttcattaatacaggtaagtaaataatagagttctctttcttttgtatttt

SEQ ID NO: 436405 - DNA, 1086 bp, Homo Sapiens
  misc_feature (65)..(124): n is a, c, g, or t
  misc_feature (434)..(513): n is a, c, g, or t
  misc_feature (904)..(904): n is a, c, g, or t
  misc_feature (955)..(956): n is a, c, g, or t
  misc_feature (981)..(981): n is a, c, g, or t
acgacagggttttggtgacagaggggatatataggagaatcaaagggggaataatattgaatgtnnnnnnnnnnnnnnnnnnnnnnnnnnnnnnnnnnnnnnnnnnnnnnnnnnnnnnnnnnnntaacagacatttagatagaattattaagagtaaagagtagatttagggaattgggtcaagaagtttttaacaaaaaacaaggtgcgagggtttttacagataaagaaatgggaaaagggggtattaggtcaaaaggattgagttatggtacaaaaaggattttacaaagagcaagatgtgaaaaaagggaaatttaattagaaagcaaatgatttaggaggattttggggagagagggaaaggatgagattaaattatatttatataaatatttgattaaattagttgtttgaacattattataagttannnnnnnnnnnnnnnnnnnnnnnnnnnnnnnnnnnnnnnnnnnnnnnnnnnnnnnnnnnnnnnnnnnnnnnnnnnnnnnnaggccagagcaggctttattggggccgtgtaaaccccagggagaggcaggacgtggaccacagagagtcatgtacaggctgcgctttcacttgtcttctctgtctcagtctcctgaagagcccgaggaagtcaagtctccccaccatgagtgaggggtctggtctgacagttgggccttcagagccaggcacgtggaccgtgtcagaagcgccacctggtggtgactgggatgctggcagggaggagctgagggcaaaactctagtggaaatttcccaggtcggtcccacgccccggtgacagggtgaaccctgagaggagcccccaaactggaggcaattgtctttgaggtaaccactcaccccagtttttcagagaccagaggcaagancatttttggctaagagcccatggatagttgtgcccatgcgttttgtggtgnncttatccccaaaagggcatgaagtncacagtaggcagtgacatggtaaacagccagggcctgagagggagtcctgatgggcacaccttgtctaaactgctttggcctggaagctgaattgctgtcctctt

SEQ ID NO: 436406 - DNA, 2061 bp, Homo Sapiens
  misc_feature (1040)..(1040): n is a, c, g, or t
  misc_feature (1069)..(1081): n is a, c, g, or t
  misc_feature (1833)..(1833): n is a, c, g, or t
  misc_feature (1837)..(1837): n is a, c, g, or t
  misc_feature (1845)..(1845): n is a, c, g, or t
  misc_feature (1847)..(1847): n is a, c, g, or t
  misc_feature (1849)..(1849): n is a, c, g, or t
  misc_feature (1852)..(1852): n is a, c, g, or t
  misc_feature (1880)..(1880): n is a, c, g, or t
  misc_feature (1883)..(1883): n is a, c, g, or t
  misc_feature (1889)..(1889): n is a, c, g, or t
  misc_feature (1897)..(1897): n is a, c, g, or t
  misc_feature (1912)..(1912): n is a, c, g, or t
  misc_feature (1935)..(1935): n is a, c, g, or t
  misc_feature (1938)..(1938): n is a, c, g, or t
  misc_feature (1943)..(1943): n is a, c, g, or t
  misc_feature (1945)..(1945): n is a, c, g, or t
  misc_feature (1956)..(1956): n is a, c, g, or t
  misc_feature (1958)..(1959): n is a, c, g, or t
  misc_feature (1963)..(1963): n is a, c, g, or t
  misc_feature (1966)..(1966): n is a, c, g, or t
  misc_feature (1968)..(1968): n is a, c, g, or t
  misc_feature (1973)..(1973): n is a, c, g, or t
  misc_feature (1983)..(1983): n is a, c, g, or t
  misc_feature (2016)..(2016): n is a, c, g, or t
agcttgcaaattctctaacagttaaacattttatcaaattaaaaatctcaatggtcaaaaacagtatcaaactaaaaactctaacaaataacatttatttttcttttacatatatatttcacagcctgaacatcacatcttcagagaaagttacttttatgccattgtatttactatttaccacacaggcattgaacattctcattaacatgataagacaatttgctggtaaacatttaaacacacagacattagtttcagtatctcaacatatttttggtcataaccaaggaaatacatcaaaataatgacaacattggctaatattttacaagcaaatatttaactctgcatagtttatacaataggctgtggcaataaataatgtcaccaatctcatcaactattaactggccacaagaagcctaacattcattttaattatgatatgaaatgctctattggtgtagtttcaacatatccttaaatgtttgggtgtttaaccttgaatacacgaaaaagaaaaagtactaaactggactaagaaggtgtgtttggttaactacaaatatgtcatgttcacatagtacattcctgaacatgaaggcaaatatttaaatagaaaaactagcagtccaaaaaatgtgaatgtgcaaattgtgagtaaaacattgcatttaaatttgcactcatttgcaagttacagtactagctcagtataaacactaacaggaaaaatattcagcaggaaagaatggaaacggcctctcacagcagagaactggtcactgcgcactgctccacagctaagaaagttttccaggtggtctagcgctcctaacaaacaccttatgattatccttcattcaacagaggaggagactgcaggcatgcttcagtcagtggtaagaacaggaagaaaaacccaaatcagcaacattttcttccttaatttggtataaacgtccttttcattatttcaagttactaatttgctaatctcaatgttttctgaatcaggtttgctaaatgctgtaaangaatagctatccttcatacaatactaggnnnnnnnnnnnnnagtatgtcagcataataaggtacatgcgcattcattccaccaacctgtttagataatactcagcttgggtcatattcaaattctacacagagattctctgttttcaatacaactgcttagaaagcagaattgcctagtgatgactgtagtgtgccttttaactgaaatgtatataaaaataaaaccccaatctttatagaatgtcaagaattctgttagggatgttaaaagcattgggcaaaaccctggttttcagcgtgccatctgcaccacaggagaagagccgattgccctggatgatgtcaatctgcatgactccagccccaatgtttcgaaatatggactgcttagcatgttcacttttaaatgaatgaattaggccatggcctgtcaatctccaaacctttatgttaccttctgctgaacctgtggtaaaatattcctcatagggatccaaggccagagccttaatagctgagtcatgggcctggaacgtgtgaatgagctgcctttgcctgatgtcaaaaatgcagacgtgtcctttcctaccccccgagattaggagttgctgtttgggtgcatactgcagtaccgtggcaccatgatcgtggcacgtgaaaccatgaatgaggctgtttccgggtgatattaatgtgtcccagaggcaaacatttctattgtcattggagtgtccagatgtggcaactagacttgaagaggtaataaatgcaaagtcacttgtggctttactntggnatctgccnantnatntataggtttaggatttgatgcagtttgnttnatcttntccagatnctcagataaaccctntccattccgcaacaccacacttnttnccttntnaattaaatatntnntttngtnanttttncattgccagnttgacgaaagcagatcaagttgctgaggccgcntccattcaaacattcgtacactgccgtcctgagcacctgtaagat

SEQ ID NO: 436407 - DNA, 455 bp, Homo Sapiens
  misc_feature (406)..(406): n is a, c, g, or t
  misc_feature (437)..(437): n is a, c, g, or t
ttctaacaaataacatttatttttcttttacatatatatttcacagcctgaacatcacatcttcagagaaagttacttttatgccattgtatttactatttaccacacaggcattgaacattctcattaacatgataagacaatttgctggtaaacatttaaacacacagacattagtttcagtatctcaacatatttttggtcataaccaaggaaatacatcaaaataatgacaacattggctaatattttacaagcaaatatttaactctggcatagtttatacaatagggctgtgggcaataaataatgtcaccaatctcatcaactattaactgggccacaaggaggccctaaccattcattttaattatgggtatgggaatggctctattgggggtagggnttccaaccatatccttaaatggtttgggggngtttaaccttggattaca

SEQ ID NO: 436408 - DNA, 884 bp, Homo Sapiens
gctttaaataaagccttaacttgcaattaccttgggttgggatgaggtaaggatataactttatttttttccaaataaatagatgtctcatatgaactaatttagaatatgatcatctgtccagtcttaaacacttttagccacaccaaatctactccctcgcttccacagtgaccagactggggctcttcctgggtggtctggcctcagttccctgcccagcagcatggatgctgaccaaggcaggggcttggagaactggtctgtgtaccctttaaaggcagctggagatagggtggcggctcagctggatagcaggtcccgcaggtcactgttgcaaggcagcaggtcacatgctagccgtgcctttcggtcccggatggccttcagggctgggctgtgttgcaggaggagggagcagatgtccccgtgacccctctcagcagccttatgcagactggtcatgccgtcgtcatccaccaccctggggttggacccatgtgatagcaggagccgcgcgatttcagtgtgcccgcagtagctggctcggtgcagagcagtggcacccccgtgggtctgggcatcacacttagctccgctttccagcaggaactggcacacagcgtagtgcccattgcggctggcatagtgcagcgcagtgtagccggccgagtcgggctgacttgggtcctcggccttctggattaaatgcttcactcggcccaggtctccattcagggctgccgaccagattcccctctcgaagtccatctcctccagcgtctgctgtacgccgagcaccgcgctgggatgcgagcagcagggcccgtccgcgcagggccgaggcgtcgccatcccggccccggcgtcagtcgatccccgct

SEQ ID NO: 436409 - DNA, 401 bp, Homo Sapiens
cagagttataagcaaaatcactcagttcacaattccaattggatggcatcccaagggcttagattcaagaaaaaaatgtattattgggaatccccaatttagtacgttatcaagtgaatcagggcttgtttctctaatcagtcttgaccaaaacttcttttttttggctgaggaagaaaagcaatcagaattaggatttagagattctgaaagcaaagccttctggcttccagtaggtacctttgttattcagccttcttagaaaggtttccagcctgtccagcttcaggtccgattctaactgcatatctggtctggcttcgatatctaggcaagcagaaaccgtcagtcagacagcatcactaaggcctcttctgatcaggcttggcgtggccggggcc

SEQ ID NO: 436410 - DNA, 520 bp, Homo Sapiens
ttttttttggtgctaagtttcattctttatatttaattgatagaaactgcatgcatcaaagaaaatgcatactgagctttaatgtgcataaaatggatattagcattttaaagaggaagattaacacattaatccaagtaattttcatatattgcttctaataaaatcttcacagtataaaactcttaatgaagctaatcataggcattccatttagtgggacgattagggataacataaaagtatttctttttcataggttttctaagatttatgcttttgcttattaaaaataaaaatgggaattgcatttcggttcttcctaagaaaatgttgaaaatgcaaatagactttctcacgctatcacgtaggtatcaattattgagaaggtactgcccgttatggagaacttaagtcctgaggggtggcagttatgagaaggagggaatagagaaataaacaaatgaaaaagtatactatacttcaacacttcaaacccaggtctccccgctcccagctt

SEQ ID NO: 436411 - DNA, 1246 bp, Homo Sapiens
  misc_feature (10)..(10): n is a, c, g, or t
  misc_feature (27)..(27): n is a, c, g, or t
  misc_feature (35)..(35): n is a, c, g, or t
  misc_feature (101)..(101): n is a, c, g, or t
  misc_feature (125)..(125): n is a, c, g, or t
  misc_feature (151)..(151): n is a, c, g, or t
  misc_feature (154)..(154): n is a, c, g, or t
  misc_feature (175)..(176): n is a, c, g, or t
  misc_feature (180)..(180): n is a, c, g, or t
  misc_feature (187)..(187): n is a, c, g, or t
  misc_feature (218)..(218): n is a, c, g, or t
  misc_feature (224)..(224): n is a, c, g, or t
  misc_feature (243)..(243): n is a, c, g, or t
  misc_feature (295)..(295): n is a, c, g, or t
  misc_feature (298)..(298): n is a, c, g, or t
  misc_feature (305)..(305): n is a, c, g, or t
  misc_feature (307)..(308): n is a, c, g, or t
  misc_feature (316)..(318): n is a, c, g, or t
  misc_feature (321)..(322): n is a, c, g, or t
  misc_feature (329)..(329): n is a, c, g, or t
  misc_feature (348)..(348): n is a, c, g, or t
  misc_feature (350)..(352): n is a, c, g, or t
  misc_feature (354)..(354): n is a, c, g, or t
  misc_feature (359)..(359): n is a, c, g, or t
  misc_feature (364)..(364): n is a, c, g, or t
  misc_feature (366)..(369): n is a, c, g, or t
  misc_feature (374)..(374): n is a, c, g, or t
  misc_feature (385)..(385): n is a, c, g, or t
  misc_feature (404)..(404): n is a, c, g, or t
  misc_feature (407)..(407): n is a, c, g, or t
  misc_feature (413)..(413): n is a, c, g, or t
  misc_feature (422)..(422): n is a, c, g, or t
  misc_feature (557)..(557): n is a, c, g, or t
  misc_feature (559)..(559): n is a, c, g, or t
  misc_feature (570)..(570): n is a, c, g, or t
aattacaganatgcataaatcataggnaacagcanacagagaagaacagaacaaaacattgtttggatcaaataaaaaacagcaggcaacaactcaattcntaaaaataccacgaattcccccgnaatgtggctccatttgatagaaaatnttncattttctggataatgtctgnngttncattaancaaaatggaaaacggcctttagataaacacnctatanagcagcttacacagatgtnttgccctcttcgccttggatgtagggaaaataaagttgtgaggttgcctgcnctngcctaangnntgggttgnnnttnnaattganagtgaccgcttatgagagngnnngnattangtaancnnnngtgtnttgagattgcncaagtgagagcatccaaanggngcgagngtcaatttnttcctatggggaaaagcatatagatatactatgttaaaacttccattcctcgattcggattatttgccctattcaaaacataaaaatacaaataaatatttccttacaaagttcacagtatgttgtttttaaaananagagataaagnaacttaatttgctttgtcattaaataaaaatgctaatatatagacatgttcaatatttatacaaattgtaggggccagtgtatcctttcttggtcataattgaagtttaatagtgctagtccatacacgacaaggctcagatcccaaatgtaagctcaattctactaaaagttgctcaagataattttttctctttttctgtttaattaaaaaagacatttttggaattttagaattacatttgagttgtctgaaaaaatacaatttcaatgaaaaatcatatcacgcattcaagagtatattgctggtgctataatctttttgcatgtctttgttttcatagaaaaaaatcagtaaaataacatgtctaagacttttaaatggttaaatgtaaccacatactattaatgatatgcctcatgcacacacacactcaaactcaaaacatgaaggaaacaggatcagacagctttcttttgcattagttctagctttcttctcagcagaccgtaattctccttagttcctgatgccgtggggtcaagctgcaaggagatttcatagtgtttcttggccaagtctagatgtccccaacgatgataaagcacagccaaattaccatggtaacttgcagcatttggatttgctctcgtgccgaatcctgcagcccggggga

SEQ ID NO: 436412 - DNA, 771 bp, Homo Sapiens
tttaaacacagcactttatttcttgatacatttcaaacaccagaagttacaatcactgactgaaacactacacagacctgcccccaacacgtgagtccagagaatcacattcctctcagtgtggatctactcgctctgttctctgaacttggaaaacactgtagtgccattctatgaaatggtccccaagtcacacagaagccacataaatgatgatttggtcagtttgatttcattttaaggtaaaggaggatacaaagttcactacttgaaaataattgattaagaaggcaatatgacattttcatgctagtttgtgtagtaattttactgcataagaaattacagagattgcataaatcattaggtcaacagcatacagagaagaacaaaacaaaacattgtttggatcaaataaaaaacagcaggaacaactcaattcttaaaaataccacgaattccccgaatgtggctccatttgatagaaaattttgcattttctggataatgtctgtagttacattaagcaaaatggaaaacggccttcagataaacacactaaaaagcagcttacacagatgtgttgccctcttcaccttggatgtaacaaaaataaagatgtgaggctgcctgctcttgcctaaagcatggcttgaactttcaattgatagtaaccgcttatgaaaaatattacattacataatctcctgtgtattgaaattgcacaagtcagagcatccaaaacctcgtgccgaattcctgcagccgggg

SEQ ID NO: 436413 - DNA, 283 bp, Homo Sapiens
  misc_feature (213)..(242): n is a, c, g, or t
accacacccagcctcttgtttatttagatctgctattgactctttttttgttcaaatttaacctcggttttttccggatcctttctcatcctgcctttcagggagcccttgcccacttcttgggtctccagtcactcctagccctcatctccttagcatgtaacactttttcccattctcatctgtgtgaccttcgtgcaacactgctgtacnnnnnnnnnnnnnnnnnnnnnnnnnnnnnngagacagggtcttgcctctgttgcccgggttgggttcagag

SEQ ID NO: 436414 - DNA, 771 bp, Homo Sapiens
  misc_feature (592)..(592): n is a, c, g, or t
  misc_feature (718)..(718): n is a, c, g, or t
ttcaagcagtattcacacttgctgttgaataacaagggaatcaaggctcccctagatggggctcccgcagttccagcttcacagcagccccaggtctttgagaactccagatgagttttgtggttgaaaagcctttcagttcttcctccatccctctgtcaggcagagcctattataccccgattaccagaacagactcagcagggtggcagaagcacacggcaaagccggtagaactacgtaagctcagaagaggccacactgttccatgttttcatacaaaaaaatttaataaatattacttttcaaaatttattgccaagaacaacacatcaaagatgcatttgtatgttcatataacactaataggacaatacaaagtatcttcacggtctcaatggtgaaccaacaagattactctgttttataagcctttttgatcttgaacttcgtaatagcactttgatttcctcacttaaggcaggcagtgtactctatggcaaatctaaacagtgatcttactggacattttatggttcaagtattcaactagcttattagaatactccctaaatgcagtagattaaaaaanaaaatcaaatctacaagtggttcagtattatgtacgaatggtgaaaagaaatcagaatttacaaagtaagattggtgtgcttccaagttcacacaattaatttgatatttttaatcatattcaacnactcacattttggctatgttaagtcatagctcaacttgttctgttcttcagag

SEQ ID NO: 436415 - DNA, 364 bp, Homo Sapiens
  misc_feature (11)..(11): n is a, c, g, or t
ctggttagganaaaagctgattgactgacatgaagactacaagagcaaaaaacagacttggagttgaaacttcagtttaggacactgaaactgaatgatgtgtcattcaagtggaaaggccattaggcagttagatatgtaggcttagagcacaggagaaaggtcttaaaaccctgggcttatgggacgttaccacggagactgcacagagtgagaagatccattttaaagctgatgatgaataatattttcgttataaggagagaagcaatgttaggggtgtcttcccattgctggagtgggtcatttgcagtatgcagtgcataaactcacaggctgtccttatgatgacctttttgttcat

SEQ ID NO: 436416 - DNA, 939 bp, Homo Sapiens
tttcttggtgaagacatttatttaatatggggggtggggtattgctgtctctgtcagtgtgtatagggtggtagggagacaactagagggactcctgtcctggggtaggctgttctggccccaggctgggggatggggagcagactgacaggggtggggaggtgtgtaagaagggtagggtgaagctctgcacacatccttgggaccacagtccaggctcacccagtcaccaaagcaagaaccgaataaataaagtgcaaccgtgggggtgggggtaggagagggagggcaccgggtgcacccatgcccacagcccacattcagtgctgccaggtctggcccacctcccagccagaccctcttgtccaatcaccccaatgtctgtccctccacaagccaggcagggcctctgtacagctactggaggtagcgataggctttaaagcagtggttgccagcatcagccaccaccacatggccatccgaggtcagtgccaggccctgtggaccatacagtggttctgcagatgtgttgatataggacaggaaggagccagagctgtcgaatacctggatgcggctgttgccccagtcagccacaatgatgtttccattggagtccacagctactcctgtgggggcattgaactgcccattgccctcgccatgggagccaaacttgaagaggaactctccatcggcactgtacaccttcactgaatggttatggaagtccgttactacaatttcattcttgttgttcacagccacaaaatggggccctgcaaagtggcggtcagtggccccacggcccccaaaacggccaaccagtttgccattgggctggaaggtaaagacgcagcaagacttgttgtcgaccacaatgatatgtccattccggtctacgccactccctgtgacatggatgaggccgactga

SEQ ID NO: 436417 - DNA, 462 bp, Homo Sapiens
tgagaagtctagagtgtttgctttattcatgttgtttatgcgttaaaatataagcatattgcatacataagcatatttacacccacatctaaaagataacatattatatatacttttccatacttctgaacaagcgtctcatatccataactaaaaattagatgagaaaggcaaagaactcttgtcttcgaattgacttcattgcactatatagcatttcacactgcggttccaggccacagggtcccttgggtagggggagacaaagggtgtggctgacagggagactctaggactaccattgccacttccaccagagcagccacacttctgttccacatagttggcatccaaatttgatttgaaaaacagtttccactactaaaagaaaaatcctatgagaaaatgaccaccagcccattaatcaacttaaacttgctgatcttggcctctggaagaggc

SEQ ID NO: 436418 - DNA, 290 bp, Homo Sapiens
  misc_feature (284)..(284): n is a, c, g, or t
aaagaggttaatttggttttcctttcaaaatatattttatttctttcttacatgtattttgcaaaatttccaaggtaaacattagctccacatacagaaataaaagagttctttaagaactagcattgaattcatcacaagaatcatcaaattatgataatggaaaacaaacttgcctatgaccaaagctactgagctgaagtgaagagctgtctttacaaagatccctctcattaagcccactgccctgcagctgactcaagccatcatcatgtatgtacgtntataag

SEQ ID NO: 436419 - DNA, 382 bp, Homo Sapiens
  misc_feature (364)..(365): n is a, c, g, or t
ctcttaaaatatagcacttttcaattctctctaaagaaatacttatgtactactatcacatgttgtaaattttcatgtaatagtgttttctgtgagtaaactccattttgattggcagctaagactttccttcctgtggcttttatttatctaagaggtctttgcatatagatgaaatgtatatttgcctggcggactatttgcgttgtgtggccttagtttgtttattgacattaacgagtgttttaaaaaggtttttaatgaatagtcttaaatctaaatttgtgtgaataatccttttaacacagtgcttttttgtagctgtctaagtgtgttaaattgttaagctatttctttgaaaaannggacaatggatgcatag

SEQ ID NO: 436420 - DNA, 1469 bp, Homo Sapiens
  misc_feature (235)..(235): n is a, c, g, or t
  misc_feature (352)..(352): n is a, c, g, or t
caaaaggttcccatggaaaagtggcgttaccagagggggggctccgccagttgctgtttcattcgggagcccatacagaggcaattcaggccagacccatccacaaatgtttggttggatgggatggcaagtgcccgtttgggcagcggaatcccatgcactttcttcttcacagttgactggatcctcatcggaaccatcctggcagtccgtatccccgtcacacgcccaccgntgggggatgcagtgcccgtttcggcactggaagttggaggcctcacaggtgtgatagatggcggtacagttggcttcatcagaccagtccctgcagtcgttgtccccgtcacatacncaggaggagcggatgcacatgccggaactgcagttgtactcgtcactccggcactggtgcatttcacaatgactttcatcactgttgtctccacagtcatcctcaaggtcacatttataggacagtgggatacaagtcccagactcctggcaacgaaactgggtgtccaggtcacagatggtggtagggcagtttctctcatcgctcatgtctccacagtcgttgtcaaagtcacaccaccaaatgctgttgatacagttcccgttgctgcagcgatactggttgcgaagacaggtgttctcttctttgacacaggtattgttcttgagctgatagccctgagggcagtcacacatcaggtcccctgatggaagcacactgctggacacatcctctggacacctgcagcttctactgttgttggccttgggcaggcacagcaggctgcatggcctgggcacacaggcattgcttccagtgttcttccccttgtagaaaatcttcatgtccatgagccccgtgagctggtttgccagaatctccatctgggacccactgtatttggaagctcggaatatgctgagctgtgaccagtcatcccagtagatttcattcttaaagacagcaatggcataggggtgcgggaggttgtccagaatgacagagcgctgctggccactgaacgtgatccgctctatgcactccaggtaggcatccgtccagtaaatccactggtcgtccacagagatgccattgggccacttcacatcctcagacaccaggtgataggcagcagaaccatccatattgctccgataaatcccaggcttcaggtctccccagtctgtccagaacatcaccccctcttggggcacgaggaccagagccctgggacgatcaagcacagaggaattgacgattgtgagtcggaagtcgccatctggattagctacctcaatctttttgaagcctgcatctacccagtaaagcagctggctgaggggttcaaaagccaaagcttctactgtctccaggccagaattgatgatcacctgttgccctgtgcttccattcaaacagaggcgctggatgacgtccaaggccaggtcggaccaat

SEQ ID NO: 436421 - DNA, 461 bp, Homo Sapiens
  misc_feature (17)..(18): n is a, c, g, or t
caactcttaagattttnntttaataagtgctctgtaaggaattgtgtgaggacctaaggagaaagattgcaacaaatagagttaagtgttaccaaacagcacaaagagatttgtcccaaagtcctgcttgtacctaggcaattaagtctattaacctaatgcccccaaaatactgacagttaatatgatggggcactagggttctcagaaagttaacagacattcctaactacatacctctaaccatataatcaaggaaatttcagtggagaaatcaaagtgaaatgttgcattgtttcatttagaagtgagactctcaaaaacctttggacagacagagaagtgatacattctttttggcttctctgaacactgaggcctgagggatatggaaggaaattagaaaagcaatagctttctaaagatgtttaatcaagtgttgcttctaagttaaaaagccc

SEQ ID NO: 436422 - DNA, 771 bp, Homo Sapiens
  misc_feature (9)..(9): n is a, c, g, or t
  misc_feature (599)..(599): n is a, c, g, or t
  misc_feature (644)..(644): n is a, c, g, or t
  misc_feature (693)..(693): n is a, c, g, or t
  misc_feature (740)..(740): n is a, c, g, or t
cagactctnggcggggtctcctagcgtccgagagatggcttatttttctacagtatttaaaatggatgcagccctaactgcaaaagtcagagaggctgacaaggaccaatgcttctttatctggtgctcagttctcagtcagacgtgcagcatggctgcagggtggaccagctgcctggcattcaggcccagatgcctgcagggctggggctctcgggacagatgcagggatgtgtgctgcagggctgctgggaggagagtggtgggggcctgagggctgagtgattctgtaaccacctgagaccttcacgtttgctgccgttgggggctcaggctgcactccccgggtcacctgacctgctgcccaggggcttccagtcctgtctgtgtggactggcacctgggctgctggagaagtctcctcccgttcggaccagcctcagggctgcacgttacctcaggaatggggccccaccatgaaggggccattctgtcagcagcgtcttctaggtccccagctcagggagccatccccagctccagttttctcatggcgaatattgcacagttttaattcacgttgttacactgagcctggnccgatggagacccagacacaggcagacctgggcgcttttgacccntgatttccagtgagggattgggccctggagggagttcctttgcagaacntgcttgccttgccccacggacagggcccaaagatgggaacccccctngggctttgttgaacagtttccccaagtgttt

SEQ ID NO: 436423 - DNA, 899 bp, Homo Sapiens
ggaacagataatgaagataaaattactactggaaaaagaaaacatgaagatgatgagccagtatttgaacaaattgaaaacacagccaatccttccagatgtcctgtgaaaatgtttgaatgctacttgtctaaaagtccacagaatcttaatcagaggatggatgttttttatttgcaaccagaatgctctagttctacagatagccctgtctggtatacgtctacttcactggaccgaaacaccttggaaaatatgcttgtacgggttcttctagtaaaagatatttatgataaagacaattatgaactggatgaagacacagactaaaaaggaacgttgcagaagcaatcgggataaaacagcattagatagtcatgctgctagatctttattatggaaaacatttcaagtttactccttctgttttgagttttgtagcagtgtacccacgctgggtattaccatgtaaataatctgtgagtgaaagttgccattattctatgtagtggttttaggatacttaacaaatacattcaaattctttttttattattatttatttgattaggtatgtttgtaactttttacattacagaatatgaatgagaatgtgccatgtataatttttttcttgtagtaagaaacatccatattgcacaactctactgttgcaaagcttccttggaagggggctcttttactgggttcttaaccagatggttgtgtatgggtagcactactaaaagtttagaacttgcagtgtctttcggaatttttaaaataaactgtaaactaataggctggggtttatgtttcgttttggggttttgttttgtctggttttacattttagttactgaagccttacaaggtaatgtttgagatacgggtaccga

SEQ ID NO: 436424 - DNA, 1083 bp, Homo Sapiens
  misc_feature (509)..(509): n is a, c, g, or t
  misc_feature (859)..(893): n is a, c, g, or t
atatcatattctaaggttctgtatgctgaaatccaggccacctcctggctttttttcatcaactaaagtatcacaaaagatgttttgcattttttgcctttgctgattaaagctaattggaaagatattcttctcttctacaaaattttttatcgttcttttagaaggtattcaagtaatgcaaccaatttttactgaaacatcaacttgcaatgtaataatgcattttttgcactaccttctcatattagtaatttattgctgtgaacatcattgaataatatgcaaaacaagtgtataatctatacttttccactacttaatgtgttaaactaaaactatatttaatgatatatatgtaaaaccagaaaagttaaaacatagtcaataattaacagagaatgattttttaagtgggtagtaatacagaatcaaaaattactgaaaaatactttcttagtcgagagaaagtgtttactttccagaaatgttcatcatgcacatcagantcagagatatatatattattttattagaaagaaagttttcaattgcagcagccagagttaaggtgtagattaaccaattttgcttccataacctgcccacataatggttcttattcatgcagcagtatatcagtgatattctatttgataaggaaaggttcatttctttagggactaaaatcttcttaaggttacctgggagcaagatctcaatgaagcaaatcaccccatttgtcatcaataccttggcacaaccctcttccttcctgcttttcaatttgtcaataaatatttgctactgtatgcacgtttggatcttccagcatatctgatggattgctgtggattcnnnnnnnnnnnnnnnnnnnnnnnnnnnnnnnnnnnaaaatagtgaatgtatgtgggaatgtgagtatttcagggagaaaagattataagatacatatgtatatatgtgactttctaattcacacctttcatacaagtactaaaacttaattgcaacagaatgaaggctgtacatataagaaaagaagtagctgagtctttgtatatacattcatacatatcttcc

SEQ ID NO: 436425 - DNA, 359 bp, Homo Sapiens
  misc_feature (278)..(278): n is a, c, g, or t
  misc_feature (307)..(307): n is a, c, g, or t
  misc_feature (338)..(338): n is a, c, g, or t
aataatgcagcatacttttatataagacatttgtatataacattacaattatccagtataattaaggtaccaatgatcttacacaacactttacatgcatatgtatgtacacacagagttatttctctcacagaatttttaagggctaatttgccatttgtatgagtcaaaatgtgtcagtttgtcttagtacacaaatttctgtgaaaatgctttgttaaaactgacaggatggcacatggtaagaattataccacatcttacttaaagtgaatganaagacaattctttttacttatttactagntactatgtttttagaagagaagtaatcaccntattatgggtgataaggtccc

SEQ ID NO: 436426 - DNA, 512 bp, Homo Sapiens
tcccctactgtgaacattttattttcacaaaacaaactttacagattttacaatctcccaaatttcacttatttaaaaataggagagacaaggcaacctagactccaagattgcaggcgtgaaaaaactagtaccagatattcaagttatatatgcaaactgcattttatataccatgaaagtgaaatgtgacaaacactcactagtttcaagtgtaccttataagaaacacatggacatacttgggttttttaaccacatagtctcatatcaataaacatctaagtatctgacatgtatttttccattaaaggtaggcacaactctatgaatatcaaattatatcaatcatttgctttttataatcttgactggaaactgaaaaataagaggaatgtaaagttaagtagccgaaaatgctacttactgcacaaaagcacatcatgaaaaggaatgctagaagtagttctcctcaggaatgggtttttgaaaatttaaaatattattttatc

SEQ ID NO: 436427 - DNA, 1381 bp, Homo Sapiens
tgctgcgtggaaccgccgagttcccagcgcttgagaaggaaaattctggatctgttatctgtgaggaggccactccgttgacagttgtgtaaaactctgctgctttccccagctccaacctctctggtcttcaacaacactatcatcagggaaaacgtgggggaagatgaaccagccgtgcaactcgatggagccgagggtgatggacgatgacatgctcaagctggccgtcggggaccagggcccccaggaggaggccgggcagctggccaagcaggagggcatcctcttcaaggatgtcctgtccctgcagctggactttcggaacatcctccgcatagacaacctctggcagtttgagaacttgaggaagctgcagctggacaataacatcattgagaagatcgagggcctggagaacctcgcacacctggtctggctggatctgtctttcaacaacattgagaccatcgaggggctggacacactggtgaacctggaggacctgagcttgttcaacaaccggatctccaagatcgactccctggacgccctcgtcaagctgcaggtgttgtcgctgggcaacaaccggattgacaacatgatgaacatcatctaccttcggcggttcaagtgcctgcggacgctcaggctctctaaggaaccctatctctgaggcagaggattacaagatgttcatctgtgcctaccttcctgacctcatgtacctggactactggcgcattgatgaccacacaaaaaagcttgcggaggctaagcaccagtacagcatcgacgagctgaagcaccaggagaacctgatgcaggcccagctggaggacgagcaggcgcagcgggaggagctagagaagcacaagactgcgtttgtggaacacctgaatggctccttcctgtttgacagcatgtacgctgaggactcagagggcaacaatctgtcctacctgcctggtgtcggtgagctccttgagacctacaaggacaagtttgtcatcatctgcgtgaatatttttgagtatggcctgaaacagcaggagaagcggaaaacagagcttgacaccttcagtgaatgtgtccgtgaggccatccaggaaaaccaggagcagggcaaacgcaagattgccaaattcgaggagaagcacttgtcgagtttaagtgccattcgagaggagttggaaccgcccaacattgagaagatgatcctagaatgcagtgctgacatcagtgagttgttcgatgcgctcatgacgctggagatgcagctggtggagcagctggaggagactataaacatgtctgaacaggaacattggttgacatggtaggactgcttatcgacaatgtccaaagcctgatggctcag

SEQ ID NO: 436428 - DNA, 157 bp, Homo Sapiens
aggaacaaaatgtttattttcttaatggtgaaactttgctttgtatgaaattcacattgaattatgaaagtgtacaataattgggacttcccttacatatttacaggtaaatctacttatacacattagtttaggcaacctttaattatttagagct

SEQ ID NO: 436429 - DNA, 230 bp, Homo Sapiens
cttatcaaaagtttgttttattttcaatacaagataaataccatgcttgttactagtgcagttttaggccgacaatggccatatatcaaactgctgaacagtcacctaaatgctaaagaaaggaaagacaaagtaaacattaaacacaaaattgcaattacaaacattttaataaaatggaatgagctttttaattgaagctaatatgaagtctaattctcatggacagc

SEQ ID NO: 436430 - DNA, 347 bp, Homo Sapiens
ggtaactgcatagtaaatactaccaagagtttttttcacgtgggagtatcctaaaactctgccatgggtgtaaatgttttacattaatttcataattggacagaccctgcatttagcgaaaacattttgttttgaaagtgtgttctttttgtcgcactgttactgcgtaacacttctcaacattctgtaagttaaattattttaaaataactatggtgaattcatgtttatttttttactttgaaaattgtagtactcaggtggtatttaatgggaaaggctcctttgggtataaatcataattgtattttagggcatgcatctataacattgataactttagcctt

SEQ ID NO: 436431 - DNA, 782 bp, Homo Sapiens
cacgttctttgcctcgtctgtctcttcttgcctctttctcttgccttactcactggtgctctttttgttcctctgtcactatcactgtctctacatctctctgtctttttgtcaaaccttctcatctgcaaacttcaatacactccccaccctgactatgcccctgcttccttgttctcccctcttccaccctgagctttggggttaggagactaaaatgtcccccttccagaatccttcccaccttggtctgctggctctattccctagcccagagcagtgatttggattcaaatgccctgtaaccttcagcctccttactgctcctttcttgacctctcctaacgctttccagacccaggggactctggggtctctatactctctctaattgacctgaagatagaggctgggagcagggccattccagaggctctttggtctctctcttggctgagggaatttgggcataagcaggctgcaccctctggctaaataactcagcatcatgagggtggacctgagggtttaaagtagctctcattatatagatcctggatgttgagggttctctctcccacccccgcatccccagctcttaaaccctaacctcttactatttccatgacaactggcttcaattcaagccatttggctcagaaaaggttgagttagggtgatgatgggttagaaactaaacttcatgtgtccgccctcttgccctttactcccattcccaaccctggaggctttatacaagtgcttaagtgagtaggtgttgg

SEQ ID NO: 436432 - DNA, 393 bp, Homo Sapiens
gtggggctttcatttattactccatttcagtctctttctcagtgttttgtctctgcctcgtctgtctcttctgcctctctctttgccttctcactgctgctctttttgttcctctgtctctatcactgtctctacatctctctgtctttttgtcaaaccttctcatctgcaaacttcaaacactccccaccctgactatgcccctgcttcccctttcccccaaacccctcaccctcaattcccacctgcctccctctgttgtattgcacacggcttggtcggggaacggtgtgatgttcgcgggaagagtggagggagctctagggcttggggggatggggtcagggctaggggtcttgtggtagggcttcgctgggtttcctttccctcccc

SEQ ID NO: 436433 - DNA, 1968 bp, Homo Sapiens
  misc_feature (503)..(511): n is a, c, g, or t
  misc_feature (1215)..(1223): n is a, c, g, or t
  misc_feature (1780)..(1794): n is a, c, g, or t
cagaccaatggcattctagacttgatgatactaagttttagcagacactagtaagtggtttgtatttaaccatactgatgaagcagacagattgaggcacagattttagtggctttgtggcaataaatagggcatggtgtgccttaggaaaagaatgtttataaagggaattataactgaaattaaaggaggcggcagtgaagaggaaataattctcttctatctaaatgatatacatatgatattttgagatttttataacagcagtggaacacaattctaggtagagtagaaaaaggaaagttttaaagacatataaaagattcttgttgacaaattatttttggtagcaaatctcaaatggttacctgctattaaggtctgccatattagagttttgcactattttgctaccaagtttgattcatacatctaaaacattttgtagttacttgtcaaggacttaatttgaaaatcatttgccaggccacatagttatcaannnnnnnnnctatcagctattctgttgtatttctaaaacattttttagatgactttttaaagtatatttagcagtaaccttatgaggttcaaattggtaaatctcttgtaatttagccttcatcgaataataggtaccagtgtattaaaaatgtgtattttttgcagccccttgaaccagagtaggttcagagaaactcccaaagtttgtactttagacacatcatgcttgattggtaacttccctccttttttggggaacatgtttgtgtcctattaacttaattggatagatttttaaatatttcttatttttggcacacggaaagggtagttcgagtacagaactttgatttttggtgtagatgcagagggaatgatgggtaaatttcctaggtttatgtgaatttagggggtgtatgcattttgaaacaatctactaacagatggtgctgaaatctattacctacatgttttctagttgttcagcattatgttaatgaagcctccatataaggagtgtttctctggcacagttggtaagttgactgctaacttcatttaaatgtgttactggatatgcagtatactgaaattattaatcagtttgtgtataggaaaagagaactgggttaaaagcaaattaacttgttctgaaaagaaagtatagattaattttgttttctgtttaaattttatctccttggtaaagannnnnnnnncctgggcagaaaacttggcatttttaggcgtagataccttaccttacaatgccaaaatgaatttaattccagtactcaggtttttccctttaacagactctatgtgtatcagggctttctaatgggtttttcctcttcgtttttaaatgtgagtagcatttgaccaatttccagtgctcttagcattttacttaaagaacaaccactacaaaagaaaatctttgtaatttgattgtcttttgctttgcttcattaatgcctaagactttaagaatactcctacctcattagctactcaagatgctgtgacgatcaaatctattctacataatgcgtttagaaacaaagacttgggtgaaaaatgaaataagtatattctgacttggctattgaggggaaaattcagtattaagtgttcctcacaggagatatgttagcagaatactataaaagtttgaaatttttaaaaagtaaaagtacttaaatttaggtatctctcctgaaattctttgcagttcattttttatggcagttaatccagtgaaacactcaaaagnnnnnnnnnnnnnnnaaaagtgtttttccagataaactgtagggtgaacattcacataatcacaaatatgtaattctgtaattgtggaatgcttgtatgctttgttttcgtacatcttccatggagatgtctgaatataatactccatctgtgaatattttaaatgttgaaataaaagtaagaaatgtg

SEQ ID NO: 436434 - DNA, 949 bp, Homo Sapiens
attctcaaaatttatttggtaagattttattaagactctaagttcaaacacccttcttgggaaaagctctacaggataaccacacatgctcaactacggggccagctgctgcagctgtgggaccccatcctgtggaagaggagagaggcactaaaaagatgaggtagccaggcctgtgcccacactacgagacctgcatcaccatggtgtgaggagcagcaacgtgggtcaactcggggctgggacgagatggaagagtaaaaggcctttcttcataggcctgcctattttatgaccaccagggtagacttttgtaattaaattaaggtccacatgactttagaaagacaaactaaaaaaccccaaccaaacgagtcctagctgtagctaactctgatttctgtaaattggatctgactttttctgcttacattcacttaaaatctcaaagactcaatgggtgtgaagtgctaacaccttgcggcaaaatctcaaattcatctgtgccaggccctctgcacagcagggctcagcagggcaggccagggctctggtccctggtcccttgctgggggaggtgttccatccggccagcgcccggccatgcagccacgtgactcaagcacgggaagtgcaggggcccagacacatccaggctaaagggcagtgactaggggagggctgaccccaagctgaacagggttctaaccaaacgctcaggagctcccaggtgacagcaaccacgccaccatgaacacaccactgggtctgtactggaatttgggggcctcaaggcttccaggtggcagcataaacagggaggtggggcaggataggaatgcccccctctgaggctcggcagccgggtggaatgaaccactccctctcattcagtgacagcacaggcaccctcctcattctgggctacccagatcttccagccctgtcc

SEQ ID NO: 436435 - DNA, 411 bp, Homo Sapiens
  misc_feature (22)..(22): n is a, c, g, or t
cattaatgttttattttttagngaatcactttaagcaattaaataaccatttatctaaaacactggataatttatttcaaatatattccaaatacttaaacactgcataaatattaaggtttaacacacatcttttaataaattaaccaaatataactaacagttcagatatactcaaaacacaccacacaaaactatcaaggctaatgctagatattccaaaagtggtaacagaaatgattgtgtgctgtgtatctctaattcaaacttggacatgggcacaataatttcataaagatctcaacaatgacagctttcaacattgagtattttttccaattttacactaattcttgcaaaggcaacatctggggacaacaatagatatagactcaccaatataatttgaca

SEQ ID NO: 436436 - DNA, 2551 bp, Homo Sapiens
tttttaaggcaaaatacttcattttatttcttaaatgcctgaatatttataatcatataaattttcatgcattatataatttatgagctactgtactttcacattaattaaaaatattaggagactctaatttaaccacttctgaagaaatgaatggctgatcagaaaatgtcaaattactatcataagcccaagattttatcataatcatgaatagcatttaatcatgaatatcattatttaacttttaaaaccatacttacagttttagattaaaatcccatattgagtcaacaagactttactccaaattatagtcacatatggaagaaaggttttaattcaatattttattatagtccacgtataaagataattttcatgagggttacatgatggatagctagcaaaagaaatatgctagcacagggtggtaactgccaactaagcatgcactgaaccaacagactacttcagtaagtccttgattattgccagcttttctataatgttcaggttctcaaaggtcactgaattttataattatctccaaacaattttcttcatggtcatttaaagctttgtctaaacagactggggtgtgttgcccaagggacatctaccatctcttgtgctttaattctgctatccaaaaataacttcagctggccccagaaaaatcagcataggagtgaagcctgttatcgcctgtcagttctacttgtgctgtatcagatcgcaatttccattctactgttccagtctgaaaagtttgactacttgttctaatagaaatgctatctacttttaggccaactgacccacactcaaacttccaggaaatataagcaaaagatgatccttcctttcgggccaaatataccatgtgccagtctgtttcaacttttctgaatatagattccattttccacacgccattctcccatccagaaatggtttgattgttatttgaaactcgaacataacgatctttcacaatattgtaacaaaggtggagctgtttagaaatcttctcattttcacagggaataaacaaggtttcttttctctgtagacccatttcacctcgggctactctccaagccactgacccagatattcttcccccaagttctccaggtttaggggttttgggagatataaattcaacaagctccacaattatcctctggagaagttctttccttctgttttctgacaaaaacagttgcctctgcttattaagcccattaatagtgtctcgaagtaatgcttctttaaccttagttcttctggcaatcacctcttcatgtttgcaggaatatcgccaagtgacatcaactacctcatcttttgaaaatgctatgacataggaaagcttcttgccccatcctatttcataaaggagtggcttgtcacagacatcttcacatgcatcacagtgcagccaccgctgctgagaaggagaatagacttctgtccagacatggtctgtgtaatcccaaacatggcgagcttcaaaccctacagctcggcagcacagtgtaaaacaattggcccactcgccacaccgtccacatcttgtttccaaaagtttctcagggttattatatcttgggaatcgattgctgaactggcaggcatcacagtaatgatcttccacttcctttgcaccccacttcagctcatcatcactgggcagtaatgatctatctctagacctagtctgtccaccacatttgctgcacaaaacgttattcacccagtgaaaaaattcttccttaaaccagtgcaaaagctccagcaaaaggaaatcctcatcacttatattgatacctttatccaattttctagctctcgataacttttcttgtgatttcctttttagttcttggaccggaatacaagccaacgctttctcctgaagagcaggattttcatagaccagcacatgctgaatgttggactgaagaacttctagaatggctgagtcagcagcaaccgttgaagcagatggtggatctgatgactgcccttgacggttccttgtgtgctggtttaacccactgggatttgaagatggtgttgtaggaagctgggtactggctgcaggttgctgagatgactttactttgtggctcttatttgagccatccagtctgctacttctctctatggcaatcaggtcacgaattttttgcagctgctccactgaagcttttttaggaaagatgagatgtgtttctccctcttcaaagcccatttcaaataaacattcaacagctcctctgacaggcaagagtctagtagaaaaggctgtgtttccaatccggatggatctatatttttcatcattagggtttctgaggatgttgtcagcataggtgagcagcagcttggaggcctccaaaaaggtctccggggtgttctggcagagctcagccacggccggggacgccgagcctgaggagctgcccaatgccgccgccgccatgcttgagcgccagcgggcgccgccgccgcccctcgctctccgcgatcccgggaattc

SEQ ID NO: 436437 - DNA, 1401 bp, Homo Sapiens
  misc_feature (1155)..(1164): n is a, c, g, or t
attaaataattttgggctaattctccaggccaattttaaaaatgttccttaaagcttaaaatttttaaagggctggtaatcctttttagttagaagttgtcaccggcgggacagataaaacttttcatgtggttatcctgattttcagtcttatcttgtaaagctttttctttagtatataaacagttaacaagctttaccaattatacttacaagtcttaaagaaatgtattaagagtcctaagtatgaagaacagttatttaattataactacttaatatagtgttcaccaagaatctgatgccctaatactaatgtggaaaaacaatgctccattattccattttcttttctgcttggggtttgggccagaagccaagatgtaccaatactggaaaggttttaaacagtcttattataaaaccatttttaaaggaaaagtaataactttcacggggagtaacacaatcctttgggattactatgtcagaaagagacatagaaagatagagaatattttaagaaaagggttaacgaggtagtaaaattttgctatctgtacttcacttactgaccctcagaggctcaaggctagaagacaataaatattttacagtaaaatgtaggaggcaaacaaaactgggcaggacactgcatctataaatataattcgagagatctataactcacacatagtacttcactctcaactataatcctctgaccacattcatactatttcaatagtcattttacccagtagatggaaagcagtaattttatttatcatgaattgctttttgccaattaaacatgtgcaacagagatgattagctggtctctcaagtaacctagatattagatatgctatttccatgtaatggaagactgcaataaaattattccaagttctaaagttccacacttttatattttgggcacaatttttaagagtggcaaaaggcaggttttcacttactccacttcagcctattatactgaattttacctagtgctaaaatccttaactttcatttctgaaggctgaaaaacatttgctcccccaagtctcttatttagtataactttggctggtaagaatagctcagtttgcttcccaaaattgaaagtctcctaccaacatttttaaatgnnnnnnnnnnccactgatctttaagtttcagtaatactcatttatttcttccctctcaatagaaggataactaccactccgcttcatgaatgaaataatcaaattactatttctctcaaattctcaccctctagagactcgctcagagtgataaattcactgacaagtttacaattcaaatttcactaatatatagaaataattcccccgctctcgacgaattcgagctcggccgatttggcctgat

SEQ ID NO: 436438 - DNA, 440 bp, Homo Sapiens
  misc_feature (407)..(407): n is a, c, g, or t
  misc_feature (410)..(410): n is a, c, g, or t
aaaggtgggttttggggatgtttaccctattgttttttatttggatgccctaaggcatataaagcgcatagtgaattacctactggaatgtaaatggttctaaaattaaaactgttaaaatagaaagagggaaaaggaaggcccaagaactcttaaagagaggctgagaacaagaacaaaaaaacccagaagtgtaggtaatacgtaacagcgcagacagaaccgttgtaggccatgtataataaataatgcatgccccaaatttcagttaatcatataatttcaacttgagttctaatactggaaccagccaaccacttgggcttcaacactgtactagatgtcagtagaatcgcttgatggaattacagccttgttacagttgagatcaagagagggtgcttttnttntcccttcttttattaaagctatcatccagg

SEQ ID NO: 436439 - DNA, 201 bp, Homo Sapiens
ggcggggagactcgggtctttattagcaagcccactgcggcaccctgccccgccccggctggcagtgagtcggggtctctgtgcggggcgggaggggaatcactgcctctcctcaaaacgtgtgcaccagctggactgcgggtagagtctggacaatctggatggagggcaggccctgaggggtcataacaccaggcccaa

SEQ ID NO: 436440 - DNA, 240 bp, Homo Sapiens
agtaccccattcctttattaggtgtcctcaagtcatttagcatccagatttatccaggcatttccaaaggcaagtcttagtctttgactagaaattcatctgaaaaaaaagtttctgggaaggaggccccaggtaaacattcttccccaaataacatttcaatgaggactcagtgaggatcagaattcagaagatggcagaaccctccacatgtttttctaagtcacagatttggtgaac

SEQ ID NO: 436441 - DNA, 565 bp, Homo Sapiens
aatggtatgggaagaagttctttattttatcatgtgacaccacataacagatgcctaaccacacaatgtagatatgaataaagaagatggctcagaagagtgtactagtatttgtgactcagctagtgaccattatgataaaaagaataaagttttgacttatttacagttttaaaatgcattttatattgagtagttatttcatgttttcttaaaacaattattgtattgaactaaaaataaactaggtagtttgttcacataacaaatctacattcaaagtcatgcttacaaattttccacttagtccatttttctgttctcagcattactacaaatgcctcattctgtcatcacattgaattcttcaacatcctctatatcatttccaggggcatctctgggaagtagtgatgcctatcttccctcggaagcactaataaccctaatatacccacaattcacaccttttcccttctttgaggtgtgctgctttttggcaagacagaaaaaacacactactaggatttgaaaaactaaattctgggcctgtttaagtcataac

SEQ ID NO: 436442 - DNA, 395 bp, Homo Sapiens
  misc_feature (388)..(388): n is a, c, g, or t
ttatttcaggtggtatgacatgaaatctgaaggtgaggtatcgctcatctaagactggttaagtccatggctcagctgttatcaaggatccagcttcttcccaactttcctctctgttttcttcagctagcaccccttgaaatcttaagacagctgtctctgttctggtgtcataatccctattataagactgtaataaagattaaaaatagatttaaaatgcatagacacaatcctagcattcagcaggtgctcaacctgagatattctgatcttgccaaactccaaatgtgatgtctttgcttataattggcaggaggagccccatgctctttaggcgcattaccaaatcacctagtattttgagttcagcaagcacaactcaagngcacgag

SEQ ID NO: 436443 - DNA, 1701 bp, Homo Sapiens
  misc_feature (322)..(322): n is a, c, g, or t
  misc_feature (1276)..(1276): n is a, c, g, or t
  misc_feature (1279)..(1279): n is a, c, g, or t
  misc_feature (1318)..(1318): n is a, c, g, or t
  misc_feature (1443)..(1443): n is a, c, g, or t
  misc_feature (1445)..(1445): n is a, c, g, or t
  misc_feature (1570)..(1570): n is a, c, g, or t
  misc_feature (1581)..(1582): n is a, c, g, or t
  misc_feature (1596)..(1596): n is a, c, g, or t
  misc_feature (1598)..(1598): n is a, c, g, or t
  misc_feature (1606)..(1606): n is a, c, g, or t
  misc_feature (1611)..(1614): n is a, c, g, or t
  misc_feature (1641)..(1641): n is a, c, g, or t
  misc_feature (1668)..(1668): n is a, c, g, or t
gtgatgtggtagatccttatgtctatgttgaaatccatggaatccctgctgattgtgcagaacaaaggacaaaaacagtgcaccagaatggagacgctcccatttttgatgaaagctttgaatttcaaatcaacctgcctgaaactggccatggtgcgctttgtagtgctggatgatgactacattggggatgaattcatcgggccagtacacaattccctttgaatgtttacagacgggctaccgccatgtccccctgcagtccttaactggagaggtccttgcacatgcttctttatttgtccacgtggctattacttanccgaagaggaggagggaagcctcataaaaggggcctttctgtgagaaaagggaagaaatccagggaatatgcatctttgagaacactgtggattaaaaccgtggatgaggtattcaagaatgcccagccccctatacgggatgccacagatctgagagaaaacatgcagaatgcggtggtgtcattcaaggagctgtgtggcctctcctctgtggccaatctcatgcagtgcatgttggcggtgtctccccgctttctggggcccgataacacacccctagtggtcctaaatctcagcgagcagtaccccacaatggagctgcagggaattgtgccggaggttctgaagaagatcgtaacaacttatgacatgatgattcagtccctcaaggcgttgattgaaaatgcagatgctgtatatgaaaagatcgtacattgtcagaaggcagccatggaattccatgaacacttgcacagcataggcaccaaggaaggtttgaaggaaagaaaactacaaaaagcagtggagagctttacctggaatattaccatcttaaagggacaagcagatcttttgaaatatgctaagaatgagacattggagaacctgaaacaaatccattttgctgctgtttcatgtggactgaataaaccaggcaccgaaaatgctgatgtccagaagccacgccggagcttggaagtcatacccgaaaaagcaaacgatgaaactggagaatgaggaaacttacaataaaccattatggagtttataactctaggaccaattgtagtcagatgggacatttgctttgcactcactaatgagaataatattcgggattttaaaagcacaactgggaatagctaatttacagtctattaaaactgtgaatgtatgtagcaatcctgcgtgtgaaggcaaataaactctttaacaggcaattatattgctgnccnaaatatgctatatttgtatacaaagacattctaactcanccccagtatgaagaaagattattcactctagctccactgagaaacattttcctaagtgaaaacaatttcttaagatggaaatggattggattgtcaaattattatttattggagaaaaaaacctnanctacacatttttacttatatggggttgccagagtctctgggttctagatgattttggtggcatgcttgctgagccataattactaaagagaatgtaagtggacgggccccccgaacccccggggnccttggagagnngtcgaggggaatgngnaattggantgaannnnctggctgaagatacatgccgagtcagnacatgggtagagatgatgtaaaagcanctaattctggaaacaatacattgtaaatagttt

SEQ ID NO: 436444 - DNA, 704 bp, Homo Sapiens
  misc_feature (663)..(663): n is a, c, g, or t
  misc_feature (681)..(681): n is a, c, g, or t
aaagatttttatgtctttcagctttggctattttgtaataaatatcataccttctcacataaacctacttgggtaagaatgatttctctgcacatgcctttttttcttttagcagctgctgagtgtttgttgagtgacgtacaaggcacacctccaagtgttctgtacagcatttttattgatgtacaaaatagcctgttcaccattcaaaaacgtaatctgcatagtaagagtttctcttatccctatttacagagaaggtttttagtgcaaaaacatgaaattgtgtcccagcccaccccttctagcacacgcattgatcagttttgttccatgctggccgggggttatttggctatattttgggcctccagccattaatgaattgcattatcttcttcacctgcaatttgctcaatttgaaatcctctgagaggatttcttccgttagctgaacaagcaggttcccatcaatcttttcagtaacaaaggaatggatatggacatcttcgggaccaaaccaatggaaccgtaggtggacttgggacacttccctctataggggaggtcctggataggggtcaggcagggtgggctgccctgggggggaaccgttcgccacagggatctgggggggccagctgggaggatgggagccggagntgagggaaggggtagggnggccagaggaaggttttcctgct

SEQ ID NO: 436445 - DNA, 364 bp, Homo Sapiens
  misc_feature (4)..(4): n is a, c, g, or t
  misc_feature (28)..(28): n is a, c, g, or t
  misc_feature (41)..(41): n is a, c, g, or t
aaanactgagagcgcaagggaaggatangaggatataaagnaaagtaggtccagaatacataaggaagaaattgaaatggaaaagtgaaaaaaagaacaataggtggacaggaaggagaaaagatgcacaacttaaaatgttagtcaattttttattaatttttgtaactttccactagtctacctgatgccatatcctagctttttggccaatattaaagtagttatccaaatacacctcttcttaattaacttccattccatgaaaaaattgaaagatgaattatagtaattaatgtgtgttctttacatttgtttttcagatagattatttttacatgatagaaatctacctttaaatggc

SEQ ID NO: 436446 - DNA, 1058 bp, Homo Sapiens
  misc_feature (555)..(569): n is a, c, g, or t
  misc_feature (1000)..(1000): n is a, c, g, or t
tgacagaaaagagaattatttaattttattaaaaatctccaatttataaccaaaatatacaaccactacatttaaaatcagtttgtacactcacagttaaagtgctaagaaaaaacatttacaaaaactgacatcagtctactgtaaacaaaataaatctacaagagcagagtgcaaagcacatcagagaatgtgaaattcccagttcatgctctaaccaagtgcacttgccctgtacatcccaacaacagcaacttttccactcatttggaagtgaacaattttaataaacatataaaaaagaaacatgaagaactaatgccacaaaatacaagtctttagcataaacactttctaattagatgtttatatgataaatcaacattagacatttagaatcacctcagcaatttgatttcagaataaagtttgggaaactaaactggctaagtggccagctatttaaaaatgggcatattttttagaataatgaaaggaatactttttctacctttatagctcttgaaaattgtaacagtaaaatggggaaagacnnnnnnnnnnnnnnnaacaagcatggatagtattcatatgtaaaggtagtatcaatgagaaagagctggaagacagacctagctgtctgtcaggtagaatgagggtgaaggagatctaggatgcttcaggcattgcgcttgaacttaaaaaacaggatcagcaggccctgacttcataaggcccataaatacaaatgactagctccctttctcaaggtcattgaaaatatacagtagtttcagacatcacatgggtttgggcaaagggggcagatttccaagctaggtcacttaatggtatctcttgcctcaaaatagtcccatcaacactaatttaaattatttccacttttgttttaaagcttaagattctactcactgacattaatttgagctaacagcaatgtgtttgcttttaatgcagatttctctttaggggggataanagggctatgtcctacctttaatataattgttaagcaattctacctgggtggttttttg

SEQ ID NO: 436447 - DNA, 325 bp, Homo Sapiens
  misc_feature (41)..(55): n is a, c, g, or t
  misc_feature (238)..(238): n is a, c, g, or t
ggggaactgaactaacatttttctttaaaaagcaaaacttnnnnnnnnnnnnnnngaggagagagatagaggaaggtgaattagactccaaaagatgaccctgctgtagctgggccctgacactgtcaccctccaccgactttgttttctcaggatggatttttgctgttttggctctcagcacctacctcagccggaatgaatgtcctggggggcagtggggcggtggcctcagccncccttaccccacagagcccgaatgcactcctacctcaagtccccttgctggggaccccctctcccttcccacactgttgtccagagt

SEQ ID NO: 436448 - DNA, 1355 bp, Homo Sapiens
  misc_feature (58)..(58): n is a, c, g, or t
  misc_feature (996)..(1017): n is a, c, g, or t
gaggagctgtgattcaccccagtttttccctgccaaaaggccacagtcgcctaaactnaaattgggtgcaaattcacttccctcttgccctcctctggttcattcccacccaattgtggttgagaaacacatccttagggaagaaacagtatctaagcattaaagagaaaatatccccactttgctcctcttcctccctaaccccgaacttctcttacatacaagataatttttaaattataagattggtattaacacaattattgataaagagaaacaatgaccaactcattagctaacgatgctagaatacttatgcaagccctagagttaagggtcttagtgtggacacctttccagaattggaaggaaaaccaaccagaaagcttattaccctgcatcagctgaaaagctaagccacagccattttccctaaagttctgtttctgggagaatgagatcttcgaagaataacttcttgccccttgatgaggcagtcgaaattcaaaccagtgatggcaacaacttgcaaacacgtaattcctgccctaattttccagcacttaaaacaaatccccactcgatacaaagtttctatgtgcctcttgcctgaaatcaacaagaaacagctcacctccccaaagactcctctttctctgccagggcaaaagccatctgcagcccagagattcaaacctagacatacacatccacaattgtcttaatctcagcagtactgggaaagctttgtactcaacttaacctgtcatttaaccctttccactagttctcccttaaccagactgcttcctgtcttgaaacaaagaaaaaaccccatataattccccactaccctcatccccagaacacagcccctagaaaacctagcttgtacagtttgcacatagcatgctgtcttcaaagaccctgcacacaaatacacagacacataaagacagtcaagaggagagaggggactgttcaaggggataaagnnnnnnnnnnnnnnnnnnnnnnctgtgtgggccagggctatttgggggtattagatcatctcttagccttgtagtgtgatctctcagctggatatatgtatgtgcaggatgaagggagtaggaataatgggtaaaaaggttattttttcagcaggtgagggtgagaggtgatgtatatactgctgattggcataaggaagacagacccacacatgaacaaggtctggcccccctggctttcatatggataaaaaagggggctctggatgcctgatcactatctcttgtttccttgttactctctaacccagtgttcaccagagttttcatatcacatcccgggaatccggaccggtccag

SEQ ID NO: 436449 - DNA, 521 bp, Homo Sapiens
  misc_feature (519)..(519): n is a, c, g, or t
atgaataatgtaatttaatataatgtctgcttcacacatgttgaaggagagacatacctgtgtagttccaaagggagtttacttatgctaacaggaaagcagaacaaacagaaacacttaacttgcaactagtagaataactttatttctaacactgagccttctacataggaatttacagaaatgaataacactgtgctgcttattctccatttctcttcccagattctctctccacccttctctgtgcccacctgggctctccagcagatgtatctggttggtttctccaaagagagacaccagcaatttggcaccacagttctggtagtaatgatgtctcttacaaggtggcccctccttcatgacagcagttcttactgggctctggtaacactgtttccctccttgcccttcaaggctcagaatggcaatggcttcctgctgatacaagtctctgggtgtttcactgtcccttgtttctgggccacaccactgtaatcagtctgccactcacanct

SEQ ID NO: 436450 - DNA, 408 bp, Homo Sapiens
  misc_feature (333)..(333): n is a, c, g, or t
  misc_feature (369)..(370): n is a, c, g, or t
ttgtcatgctgcttcctatcaactttatctatcataacctcacatcttcttctggtttttatttctcttctccagatcagtaaaaactcctttaagtgtacctcccagttcaaaattagtctgtactcctattatacatgtgctactacagcagtttgctaacatgcattataaaatattcaaaaatggaaattttagctatctgataatatatttaacatgttaattttttctcactaaaactaagacttggggaaacaatatgattgcatttcattttaaaagttaacttttttattactaaaacatttttggtaaaactacatgattaantgttcttcatgcattttttattttcaattttatacnntctgattcagtgattgaaaggtctgatatcatgggcag

SEQ ID NO: 436451 - DNA, 447 bp, Homo Sapiens
gtaaaaactggtttatttttttaaaaataaatacaaaaatataaatataaaacattagcagatagaatttgatgaaatgaaattgcacaaatgtctgtataccaggttgcatatcacacctactaacatcacatgtacatttttgtttttttaatttaatgtacagaacaggatatactgtaaaatttttcttcacctttttaaaagcttcatttgcaagggcaggacatgtacctaacagaagcggcttgtttgtgaggttgcttaagggagaactatcctgttcatgtttctgaaattatcttttatttactaagatggacaacactgtatttccatagctttggctcttgggaagtgattaaattaaaatgtcatatatattccatgagacatcctacaggaaagaattaatgtaattaatgaacaaattaagaagtaaatgag

SEQ ID NO: 436452 - DNA, 423 bp, Homo Sapiens
  misc_feature (388)..(388): n is a, c, g, or t
  misc_feature (402)..(402): n is a, c, g, or t
ataaacagaaattgatctatcttttgaattaaaataagaacagaattaatcttaactaaattagtactttctctaagttttctgtactaattagcatactttcttctatttgaatttaaccttattacatattggcaaattatactgcatatctgcttatctctatgcctatgtcagcaaaacggggttttgtaaataacaggaaaatgtagtatgctaatcagcaggtttaggtttacctttacaattataaaaatgatgtattctgtcatatatattctaaaatctaagaactctaattactgttatatatttgaaagtacatttctcatactaataatatgcaaggccatttcattaagttgtcatgaaaagataaacctgtgantttttatctcagangattgaaataggcacttttta

SEQ ID NO: 436453 - DNA, 530 bp, Homo Sapiens
  misc_feature (23)..(23): n is a, c, g, or t
  misc_feature (26)..(26): n is a, c, g, or t
  misc_feature (85)..(85): n is a, c, g, or t
  misc_feature (109)..(109): n is a, c, g, or t
  misc_feature (169)..(169): n is a, c, g, or t
  misc_feature (187)..(188): n is a, c, g, or t
  misc_feature (222)..(222): n is a, c, g, or t
  misc_feature (281)..(281): n is a, c, g, or t
  misc_feature (293)..(294): n is a, c, g, or t
cagagtgaacaaaagaatctttnccncgttatatttcaggtatcttggcttgggacatttatacataaaaggaaacaatacattnctttagttttagtttttaaaaatnttatttttcattgtaaaaggaatacacattcatttatagaagagattaaaaatacaaaantttaggaaggaaataaannttcactactcagaggcaaccatgtatgtctgagntttctctgctgtttacttagtattctcgcatgagcatttctccatgcttgaaaaaaaantgtggggtgcgnnttttatatatgtctcgtttaattattcctcattgctgatcattttccttccatgaacattttaatgcatagattcctgttaaaatttctgattacttcgttagaatagattccaggaagtaatattactaggataagtaatttaagacattaaaggtctttatgtattgccaggaagaatgtaccaactcatgttattaccagtctgcccttctaggttgacttcatgaataatgg

SEQ ID NO: 436454 - DNA, 1549 bp, Homo Sapiens
acatattttgttgatttctttgttgcttcaggttagttaaacaactttattaacatagtcaagcagtgattaacattcacatctattatgtcacatcatacaaatgtaaatacaaaattactacagtacaatatatattctctgcatgatccaaaatatttggtggccccaaaaaactctctttaaaattcagcagcttatcaaaaattaaaaccgtattctatttaaaatggagatctgttagcacagagttagacttcaagaaatatcaatttagtacagtttgagaagttgcaggaggatatgtttgaaggacacattctaacatagtgtggcaggtacaggaaacatcagatttaaagcttttaagcataactcatacaacctaagttgtcagcagaaagatccagttatatttgtaactaaagctaatgctactaaattattgcacccaatgttaacatattaagtgtaaaactgttttgtaatatgaagtgatttaccacgtttaaacatctcttctcacaagatgataatctattaagtaaaactaattatacagtattgtctaattattgtctccataaaaatcacccaagctcaatttgcttatatatccacaaaggaaaacaacaacacagtaatatgcggaaagtacagtggaacccctttatgaggccaatattagaaggggaccaacactgccttataggctaaccatgttataataggcttttaaaaagatgtaatacccagcgaaattagctaatcttgaataataccaagccacagtataaggaaattctatggcagataaacaaaaactgcaataaaaggaaaaactgcttttcttattagtgatacactgcttggcaaatagatttggcctggttttaaaaatggtacaagggggtgaaaaaaaatcaccattttaacttctttcaaagtcatgcatacattcagctattatgcatcttttaaaaaacacaacacattctgggatacaaaccacaatgaacaattgtgtaatttaaatgtataccttaaaaattaatatgtataataactaggcataaagaattatctacgtaagtaatgctaatgggtgaaagatctatgtaagattgaaaaaattagtcacaattcacttggaaagcctaaaggtgaataaaactaacttttatgtaaaatttaattttagagagggcattaggaagtatcttccatatttaatacagtataaaatgcactaagttggtatacaacgctatattgcatggtattattaccagataatattgttaacaacacagctcattactgatctcacttttcacttaaattatcccaagcccttaactatctgaagaccagttttcttaaatgttccaaggcctatacttcattaacaacactagtagcaagttagtttcccctccttgtattatttgcaaaaataattcagtaagcaaagctgtgtatgttttgaagtattatcaaaggaaggacttaaattgcagttatgcatgatacactcttcccctgggcc

SEQ ID NO: 436455 - DNA, 1503 bp, Homo Sapiens
  misc_feature (356)..(405): n is a, c, g, or t
  misc_feature (1385)..(1393): n is a, c, g, or t
tttttttgcagttatcagccacagtgatttattgagtgctttaataatacaagtgtacatcaactgatccacagtcaaaagtggcaggtccctaagaaatttacaagcactttaagtaaatcaaaatacatattattttgttcaatccaacagtcttctgcgggagggacagaaggctagtgataaacagagtctcagtaatgcacagtgattctgattgaagcttttgtacaaaaacttgttcccagtagcatgcacccaccaataaagacttcagtacaaaaaattaaccctaagcactacatttaagtagaaacgagatataattctgaatgtgttttcccaaagatcacatnnnnnnnnnnnnnnnnnnnnnnnnnnnnnnnnnnnnnnnnnnnnnnnnnncacacagtaatacaaagctttgtaagaaagctcttactattacagctccaacattgtttgcactgaaaacaaaagttcccatctatgatgaggtgggaaaaaatcccaaatctttcaagttaacagaaatcaacaagggaataaaatgagagataaaagagagcgtgggagagaggaaggggggcaggaagaactgggatgggaagatggacaacataccatcacaaaatggttccaaatttaataaaaataggaaaataagaaccgaggtctggaggggtgggcagggctaccgatgcacttggtgaatgttgcttgcacaggtcccgcggggcggcatggcagcaggcccctatgtggcgtaccgccttggtccactgtcttgtccatccggtcaatgctctgcttctgttggtcatgtactgtgtggcgatgtctgcccaccagagggtcagcagggttgcaatctgtaagaagtgagcagatggagaggagtactttagaaatagttaaagccggactccagttgtcctttaagatgtccagacagatcacaccttggctgttcaatattacagtcgatagattcttgttcggaaggtaaccttagggggtttacacggatagtctggtgaaaaggtaatgtcaagaaagacacccctccttcatagacagatcctgggggtcccaatatagttgacctccattcataaatgttgtctcctttgggtccagcactacagttgggaggagggtccaatgtgatttctgcaagttccttctgaattcttttagcactagttgacaatttagcagcggttttgctggatatttttccctccgttttcttgggctgaacttgttctctttctggttcttgctgaacacttgtcacgttgatcatccatcggaacattcctccactagtgcttggactgtcatcaactctttgtgcctcagtggacattttagatcctgannnnnnnnntgtccgtgcaggtcgcaggctcgagccgaagccctgggagagagctgcccaggcgcgagggggagggagactggggaggccccagggacggatgtccctgcggaccgtct

SEQ ID NO: 436456 - DNA, 1401 bp, Homo Sapiens
agcgggctcgcgggtgcgcgcgcggacggccgggcggcggcggctcccggaggtggtggcttcactttccaggactcaggggcagccacagcgacagccgcgggcagcagcctcaggagccggagctggaacggccgggggcggcggcagcggcggcgctgagggatctaaaatgtccactgaggcacaaagagttgatgacagtccaagcactagtggaggaagttccgatggagatcaacgtgaaagtgttcagcaagaaccagaaagagaacaagttcagcccaagaaaaaggagggaaaaatatccagcaaaaccgctgctaaattgtcaactagtgctaaaagaattcagaaggaacttgcagaaatcacattggaccctcctcccaactgtagtgctggacccaaaggagacaacatttatgaatggaggtcaactatattgggacccccaggatctgtctatgaaggaggggtgttctttcttgacattaccttttcaccagactatccgtttaaaccccctaaggttaccttccgaacaagaatctatcactgtaatattaacagccaaggtgtgatctgtctggacatcttaaaggacaactggagtccggctttaactatttctaaagttctcctctccatctgctcacttcttacagattgcaaccctgctgaccctctggtgggcagcatcgccacacagtacatgaccaacagagcagagcatgaccggatggccagacagtggaccaagcggtacgccacataggggcctgctgcctgccgccccgcgggacctgtgcaagcacattcaccaagtgcatcggtagccctgcccacccctccagacctcggttcttattttcctatttttattaaatttggaaccattttgtgatggtatgttgtccatcttcccatcccagttcttcctgccccccttcctctctcccacgctctcttttatctctcattttattcccttgttgatttctgttaacttgaaagatttgggattttattcccacctcatcatagatgggaactttgttttcaggtgcaaacaatgttggagctgtaatagtaagagctttcttaacaaagcttgtattactgtgtggtatgtagatgtagtagttatttgatttgattttattgctttaatgtgatctttgggaaaacacattcagaattatatctcgtttctacttacatgtagtgcttagggttacttttttgtactgaagtctttatggtgggtgcatgctatggggaacaagttttgtacaaaaggcttcaatcagaatcaggtgctttacttgagactctgtttatcactagcttttgtcgtcccggagaagaatgttggatttgacacataattgtattagg

SEQ ID NO: 436457 - DNA, 951 bp, Homo Sapiens
  misc_feature (867)..(903): n is a, c, g, or t
ctctgacgggttggcagggttaccgattgccttggtgaatggtgcttgcacaggttccgcggggcgcagcagcaggcccctaatgtgcgtcccgcttggtccactgtctggccatccggtcatgctctgctctgtttggtcatgtactgtgtggcgatgctgcccaccagagggtcagcagggttgccatctgtaagaaggtgagcagatggagaggagaactttagaaatagttaaagccggactccagttgtcctttaagatgtccagacagatcacaccttggctgttaatattacagtgatagattcttgttcggaaggtaaccttagggggtttaaacggatagtctggtgaaaaggtaatgtcaagaaagaacacccctccttcatagacagatcctgggggtcccaatatagttgacctccattcataaatgttgtctcctttgggtccagcactacagttgggaggagggtccaatgtgatttctgcaagttccttctgaattcttttagcactagttgacaatttagcagcggttttgctggatatttttccctcctttttcttgggctgaacttgttctctttctggttcttgctgaacactttcacgttgatctccatcggaacttcctccactagtgcttggactgtcatcaactctttgtgcctcagtggacattttagatcctgaggggggggtgtccgtgcaggtcgcaggctcgagccgaagccctgggagagagctgcccaggcgcgagggggagggagactggggaggccccagggacgggatgtccctgcggaccgtctagtcaccgccgctctcgacgaattcgagctcggccgatttggcctgatnnnnnnnnnnnnnnnnnnnnnnnnnnnnnnnnnnnnncgccgccaccgcgtagagctccaattcgccctatatgatctatctttc

SEQ ID NO: 436458 - DNA, 502 bp, Homo Sapiens
aattatcaaacatgaatttatttagaaacaaaataaaaacatgctatttgaacaaacttttttataaagaataagttgactgaaaagcagttttaaataacatcaactcacaaatgacttttagaagccaaataaacatttctattttagagaatagtatgtaatacataacttaaaagcatatagaacacatattcctacattcttaaaaataagagattgtgattccacagagaatttttcaaatatctaaagtatgtcctgttaaaccaacaatttgcttccaaacaggagtctcttttgagaagctaaatattaattttcaaacaactatttctccatttgttaactggaatcattcatattaaaacaaaggtctttatgtcaatgtatgttaatatggctgaaggctccagccctgagttatttttttacttccttaaattcataattacaacatatatcaatttgaggtatcatgacaaaaacagaaacaaaagac

SEQ ID NO: 436459 - DNA, 1209 bp, Homo Sapiens
  misc_feature (724)..(744): n is a, c, g, or t
  misc_feature (775)..(783): n is a, c, g, or t
  misc_feature (1005)..(1031): n is a, c, g, or t
  misc_feature (1034)..(1042): n is a, c, g, or t
  misc_feature (1077)..(1077): n is a, c, g, or t
  misc_feature (1104)..(1104): n is a, c, g, or t
  misc_feature (1110)..(1110): n is a, c, g, or t
  misc_feature (1114)..(1114): n is a, c, g, or t
  misc_feature (1122)..(1124): n is a, c, g, or t
  misc_feature (1153)..(1153): n is a, c, g, or t
  misc_feature (1158)..(1158): n is a, c, g, or t
  misc_feature (1163)..(1163): n is a, c, g, or t
  misc_feature (1170)..(1170): n is a, c, g, or t
  misc_feature (1181)..(1182): n is a, c, g, or t
  misc_feature (1189)..(1189): n is a, c, g, or t
  misc_feature (1195)..(1195): n is a, c, g, or t
  misc_feature (1203)..(1203): n is a, c, g, or t
taaacacacaaactacttttatttttaatcaaaatgtgaatcatcatagtgaataaaaattcatgagtcagaatagcatgcaattttttattgttttctaaatctatttgtacacttaatatgctagtattaatttcacaaacagtataaagaatgtactccaatgatattacgcggcaactactcacctgaaaaagaaaacattgtctctgaaataattcctaattatacaattttgcaaataagcactataaatgttaaaatgttaagacttcagtgtataatgtcaataacatcctgcctttttaaaattgcttaaaacatttgttaaagatcatgcaaaataaacactgtattaaaatgctagattacactcaaacatcaaggcaatgaaacacaaaagagcaactatttagcacaatgactggcccagtaaataacttaatcagcatattaataaaaacccactgagtgataaacatcgaaaatgtaacactgaatctagataatagcgcatctgcgatctcaccatctaccgtcctaactgtgacttggggtaaaccaccagaattcattctacataaatgagctatgttaaaacgataacaatatttcattgcatgatgacagggtacatttctagtccacacagtacttcaatgtgaccattctcttaactcggctaataattaatggaaagtacacttttacagtcacagcactnnnnnnnnnnnnnnnnnnnnntttacccttgctttgttacatgtttccaaannnnnnnnnaaaaagtatttcctttcttatgatccttccccagaactaacatgctgacttaggaacagatgaagtagataaagtctatcctagtatagagagcaatgatttagttttacctaattaaatatttccttgtcatttatcaattgtcactgacctttttgatgtaattatttcctcattcactcatctataaatatttattagtacctattattacccatgtcnnnnnnnnnnnnnnnnnnnnnnnnnnntgnnnnnnnnncttctcattgctaagctcacttagaaaagttgggnaccatttaaaagagttggagaacagancagggngggntcttgggnnnactggatggtgctggagccaggctggggnttggngaganagtttcnacatataaccnngggggcncagccncccgcatntctctc

SEQ ID NO: 436460 - DNA, 2248 bp, Homo Sapiens
  misc_feature (28)..(28): n is a, c, g, or t
  misc_feature (251)..(259): n is a, c, g, or t
aaaaagtatttcctttcttatgatcctnccccagaactaacatgctgacttaggaacagatgaagtagataaagtctatcctagtatagagagcaatgatttacttttacctaattaaatatttccttgtcatttatcaattgtcactgacctttttgatgtaattatttcctcattcactcatctataaatatttattagtacctattattacccatgtctccctgattttccagaaaaagaattcatgnnnnnnnnncttctcattgctaagctcacttagaaaagttgggcaccatttaaaagagttggagaacagaccagggtggcttcttgggcacagctggatggtgctggaagccaggcctgggatttggagagaagagtttccgacatataaacccacggaggtcaccagccctccccgcatctactctcctaacagctcaggacagccccgtcacactactgccagccctggtgactcactttgttggcaatttttaaagccctcttcattatgtacttcctactcttcagaacctctgtgataagcaatacccctgccatacagaacgctggatctcggtttactcagcctctccctgtagcgtcacaggctgtgcactcacctaggtgagcccctaagagcagggtttgcttctgcttcacctaacgccacgtcttccctcaaatgtgtggtcaccaaatgtttgcaaaaagggtctctagcttttgtttctttttggcacattaagccctttaaaatacttctgacctatctttatactcagatctcacctcgtctcaaaaagttttatggggtaatgcgccaatgaaaggtacagtagtattagtgagttctgaagcttctaattacaaagaccacagaggctggctggtgagccatgcttctcatgctcccttctgtcacactgcagatgtctcttttacctcggcctcatcatcggttagttatctgtcagcaaaatgtagaaaggtgatgggcgtggatggagtcaaaatccaggacaattctgtcataagggtacagtaacactcttctcctttgcttgtttttctcaaagaatgctttctctttcttctccaaagcctgtgctctcagaagaggctgctgcatggagctccggaggatctttggagagccttgtgtaacttgaacgttggcttcgcttatgtgtcatgctttttagattctcattctgaatagtggttgggttgggactggaactaggcctcaaaatgacttgagaagtctccctaattccctccatctcatcgaaattttgattggctctgttggctggagcactattgttgttcagagtcacggtgctgggagttcggttcaggttgtaggctttctggcatgcaggccagttttcttcagggctgctggctatcaagctgcattcggaagggcttttcttgtcttctgaacaaatggacatccgagctataattggatcttgcaggccactcaggctatgtgggattccccgctttccgctgtgactgtcatcttccagctctatgagatttgccttttcaagctgggagtcatccgccacttcattgtgcagagagtgattgggagaactttcactggatctcactcctgaatccgatgaatcctttttgtcaaggagcgcatccgataaatactctttggctttaatgaaggttctgatcggctcagcactgtgttctggagacttcggcactctctctactttcccttcggcttttctgtctttgtcatctttgagcagtggagtgttatctgattcttctgtgccagattcatcctcgtcacttgggagtttttgatagcgcagcccacttcccttaagcttcaaatctgtctggaagaggcttgacctttcggaagatttcttgcctgggagaagcttactgcctgactgatctgatttttcatcttcttcagtgataggaaccaggggggaagcatcgttggtggaaacccctgatgatgaataatcgataacatctcccctcttcattagaaaggacttcctcccatcatcgggctttggttcactatccttccccttttcttgctctaggtttgaatgaatagagccccctgatgaactctgacccatgtaatatgtgctatgtggagaagatctgccactaatggttgtagacccggggcccccttctaactgggacatctgagcaatgtattctctataggcatctc

SEQ ID NO: 436461 - DNA, 894 bp, Homo Sapiens
  misc_feature (162)..(162): n is a, c, g, or t
  misc_feature (613)..(613): n is a, c, g, or t
  misc_feature (700)..(700): n is a, c, g, or t
  misc_feature (702)..(702): n is a, c, g, or t
  misc_feature (713)..(713): n is a, c, g, or t
  misc_feature (739)..(739): n is a, c, g, or t
  misc_feature (759)..(759): n is a, c, g, or t
  misc_feature (796)..(796): n is a, c, g, or t
  misc_feature (807)..(807): n is a, c, g, or t
  misc_feature (820)..(820): n is a, c, g, or t
  misc_feature (827)..(827): n is a, c, g, or t
  misc_feature (830)..(830): n is a, c, g, or t
aagacgaaatgaaaaccttcgccggacaacagattgagccctctctttccagttctcatggcctcatagtgtttcttaccctgctactttgtggagggcttggtttaattgtttgccttcacggtcccaccccaaatcttggaatagcagtgtcactgagcnttcttggctctcttatatatattctttattgtcatttacgtttggtggacgacgagaaggagagagttggaattgggcctgggtcctcagcactagattggcaagacatattggatatttggaactcctccttaaattgatgtttgtgaatccacctgagttgccagagcgagactactaaagctttacctgtgaggtttttgtttacagattacaatagactgtccagtgtaggtggagaaacttctctggctgaaatgattgcaaccctctcggatgcttgtgaaagagagtttggctttttggcaaccaggctttttcgagtattcaagactgaagatactcagggtaaaaagaaatggaaaaaaacatgttgtctcccatcttttgtcatcttcctttttatcattggctgcattatatctggaattactcttctggctatatttanagttgacccaaagcatctgactgtaaatgctgttctcccaatcactctctgcacaatgaagtggcggatgactcccatcctgaaaangnaaatctcatanagctggaagatgacagtcacagcggnaaacggggaatcccacatancctgagtggcctgcaagattcaaattataactccggntgtccaattgntcaaaaagacaangaaaagnccnttccgaatgcaaccttgataaccaacaaccctgaagaaaactggcctgcatgccaaaaagccta

SEQ ID NO: 436462 - DNA, 399 bp, Homo Sapiens
tgtcattttcctttgtctttggttggccttttatactttctttgtcctctaacataatgtttacagggttggaagtaaaaaagaagagattttaaaatgttttcagtctttcattttaatcagaggtgttgatgtattctttttgtttaaaaatacatataattaaacaggtatataaaagtgtgtacaattaacacattctcttcacctattgtactccatctaatatgatagtcttttggcaaaaacatttaaagtagaatgaggaagtatcattttactatcatgttatttttgtcttagtgtatgctttcagactggcactcctgccttcattcccctccaaccctagcagaactcaagtgtggcatagtgagtgttcgacttacttacttgctg

SEQ ID NO: 436463 - DNA, 350 bp, Homo Sapiens
  misc_feature (227)..(227): n is a, c, g, or t
  misc_feature (313)..(313): n is a, c, g, or t
agccaatcaggctttttgcccccttctccccatacaaactggtaaaagcccctgggatttttgagctgtccttaccacacactcttatttcatatttatacgtgttttctaataactcagtttgtctcttcttcaggccatgaaactccagtcatgcaactggagccttgggcaatggccccttctcgtgggaacccttggataggcccctgagggcaatttgactngccgttttcccaaaacagcacccccctgtcaacaggaagcagttaagatctgtcttcatccttatccttatccttattctaatggnagttagatgtacttctttagaggagggaatgatagat

SEQ ID NO: 436464 - DNA, 673 bp, Homo Sapiens
  misc_feature (14)..(14): n is a, c, g, or t
  misc_feature (485)..(505): n is a, c, g, or t
tgtggcccaaatcnctgtttgagtggaggaatgttttctagagcagtgactggaaggacaaacgtggtgttgcagaacaaaaattccttgcctttggtatggaatggtggtgccttttccatgtgatgagaaatgcttcatagacagtggcatgtgggagagctgaaggaggaggcgtgttccatattccactcattcaaaggacagcttggtgttttcacactttatgcaggttaggggatctgattaatgtttcctttccttacaacagctagagaaaacatctcatcacaattggagacctctacttcctttgagctttcctactcaatggtaggagataggaatatgttccgcaaagaatgtctactgctcttgtccttggctgtgatccctatacatagtgtgaatttatatccaggtttcccaggatcaatattgacaagacgactttggcatctgaattgttttaatatctttactcnnnnnnnnnnnnnnnnnnnnncccatggaagcaacaaaagagttaaacatgagggatttatttttgtatgtttatatgtcacttgtgtgctatgtgaatagctatgtttgttatttaaatatatttatagaagttcaaattactagtgtttaaaagatgatatactattatatattgtgcttagtatat

SEQ ID NO: 436465 - DNA, 390 bp, Homo Sapiens
  misc_feature (1)..(1): n is a, c, g, or t
  misc_feature (330)..(330): n is a, c, g, or t
  misc_feature (370)..(370): n is a, c, g, or t
ngctttttaaatagcttttaaagtatctgtctatctgccccatacaaagtcattcccataatctaggcagaaatgggagtatgttggcatggccaacaaaaactacgaacatatagtaaaaaggcaatgcagattatgtaacatgtaattacagttaggcttaacaaacatgaacttcaagtggtgtatttttccaatgctaaaaagcaaggcctttaaaattccattatcttaggatgtttttaaatgattactttaaatgtgattatttcctaaaccacacaagagtaaaatagagcatttattgatggaataacaaaagtgctttgntcttaaatattcttcgaaaatacatttgtacgaacttacnaataatatatacagttattt

SEQ ID NO: 436466 - DNA, 372 bp, Homo Sapiens
aactgttaaaaatgtttttattttttagtaagcaaaattttacgaaaagtcagattcacccgtggagccagaaccttctttctcacgggaagactgtggtaccagtgcgtgttggtcgggtggttcatcattagtaagctcccgtgggccagcggcagcctgaccaccgccaccctcctggaggggcttttcccacgggaatccttatgccggaagacaaagtctctgcaggcaccgaaggagacagaggcaatggggctcccaggggccagttctctttcatcatctcggtgctccccgatgtggtcacagccatctttatacctgtaaaatattctacttctttctccaactcttggaaaatctcatctg

SEQ ID NO: 436467 - DNA, 1185 bp, Homo Sapiens
aactgttaaaaatgtttttattttttagtaagcaaaattttacgaaaagtcagattcacccgtggagccagaaccttctttctcacgggaagactgtggtaccagtgcgtgttggtcgggtggttcatcattagtaagctcccgtgggccagcggcagcctgaccaccgccaccctcctggaggggcttttcccacgggaatccttatgccggaagacaaagtctctgcaggcaccgaaggagacagaggcaatggggctcccaggggccagttctctttcatcatctcggtgctccccgatgtggtcacagccatctttatacctgttgatgagcacaaagttgaaggtctgtccagtcaccccagagacgtgatcccggatgcgctctagaactgggatccagggctttggagacagcgtgaggcctgaaaatgtgtaggtcagcccagcgtcgccatacgtttgcctgcttcctgggcacactgtgccacttcccgaatacctggactctggccagtgctcctgtaaaatattctacttctttctccaactcttggaaaatctcatctgcctcagctttgccaaacaggactgtgtaactgcagtccaggccctcagcccgaatgtgccgccagctagggcctgctgagtggcctccattccctggggcctctctcctgggcctcttccttgtgctttctttgtctcctcccaacacagctggctcttctccagttggctcttgctcctcctgcttcctcaaaaggcccccttgagcccctttcaccaggaatctgtccatcctgtccccacaggaaagaagggacgtcagtggcgaggccaagacagaaattgctcaagttctatccccagtgcaaaaatctgtttgtccaaggggtctcacagcaacattcctagtttcacattttcattttaaagtttaaaaccatgtcctcgctgccccccaccagtgttaaaatagatcagtctagtgatgctcaagtggatacgattcagaagcgagacgcaaagaggttaaacacgggtaaaccgcacgcaaaattctgatatcactgcaacacgtccgtggggtgggggtggcaagagtgctctagcatcgcagctccggcgcagatcggaatcccgcagtcacctggtggcctcgtggtgggaaagacccgct

SEQ ID NO: 436468 - DNA, 2218 bp, Homo Sapiens
  misc_feature (165)..(165): n is a, c, g, or t
  misc_feature (281)..(281): n is a, c, g, or t
  misc_feature (2126)..(2162): n is a, c, g, or t
atgtctaatttcccttggaggcttttttggattttagaaatttagtttataataaaaaagtacttcttggccccagaaggcccccaacatgtgcggtgggtcctcggggccactcccttcagtcctcccctggctggaggcaggggaggaatggagatacatggnaaggttgttcaggctctgttttagaaatgaagtcacgactaggaattgggagcgagggggcagagacccctgctgcaatcacatgctgaatcattgtccttctgagagcaggctcntacggttccttcagtccacggaagtgctcagagcagggcaggccactgcggccatggagctgccgccccctcactgcatgccgaaccactgctcctggtcagcccactgggccgcctcactgtcgctgccctccaggtccccttcttccccactcccttccatgtcgtccacatcctcctcctgagtggcatccgtgggactctcctccttttccatcttctgcatcccctctagagacttctggtcattggggtccaaacttagtgctatactatactggtccattgcctcctgatactcattgacagctacaaggaaatctcctaggatccgatgcaggacacagtcactctgattagccagtgcgttcctcagcaaagcaattccatcttcatatttctgttctctgctaagtagttctgcttttttcaccacagccttaatgtaatctggcctttgggtcagggctttatctaataatgttttggctttctcctgtgtcactgggtcttcaagacaaacggtggctaaaagggtaagggtctgtgcatttgctcccagagttttgtaaacgttgttagccattaccattgcttctcgaatactgttggaggctaagtaacattcgataagaccttcataccaatctaagcgacaaggtgcgagccgtatggcctcccgaaagtggattattgcttcttggactctgcccatgttcctaagtgctgctcccttaagtagcagagcttgaacactattactgttcagctgaatggccttggctcctaaatagagggcccgggagtagcgtttgctatagaagctgtgacagccagaaaccacccacggttctgcatgctgatcagagatattgaaaaggcggcatccaaggttctcaacatcctctagccgcccttctcgtgccagtaggtagccatatacatccattccttttatcagataaggatccaacatctgtgcctgttcaaacttgaggacagagtttttattgtctccagctctgaagtacagatctgccaagcttcccaataggtccacgttatctcgcaataaggattttttctctagtgaacagatggtactgattgctcttgagttgtcaccagtgtgcacaaaagcatacgctttgatccacacagagagccagtccaagttaggcacggtttggatcacattcattgtcatggatgccacctctgccccttttacagaaagggacaacaagcctagaatggcatcaagggctaatgggcactgcctcagcacctccttatagctggtgactgaagggcgctcctgaccagccttcttgtacaggtttgccagcatcatgtttattttgggagttctttgtcttgaagggatcccatcaagtatagcaatggcatctttatcttgttttagcattgtataacattcagccattttgtatttcacttcaatttcagatggaagacactgactttgtggagtagatgcagaatttccagttgaaggtctcacttttgaagttttacttagcgctttcttctgctgtaaagccatggtatacttactcacagcattccgatattccttatcatgaaagagagaatctgcatgatacaccaaaagctggtacttctgaggtggggagaataactcagggttgttattactcattgtaagtaacaagctgctgaggagccgcacgttggagtgcagccccgcggccgccatgtcccgcacgtggtctatcacattcatcctgctctgcaagccgcgggcagcggcggcagcactccgctctcgacgaattcgagctcggccgatttggcctgatnnnnnnnnnnnnnnnnnnnnnnnnnnnnnnnnnnnnncgccgcccccgtagagctccgttcccctatagtgatctacattcggggggctcggt

SEQ ID NO: 436469 - DNA, 1209 bp, Homo Sapiens
  misc_feature (1)..(1): n is a, c, g, or t
  misc_feature (26)..(26): n is a, c, g, or t
  misc_feature (457)..(457): n is a, c, g, or t
  misc_feature (706)..(706): n is a, c, g, or t
ngtgagccactgcgcccagccaatanctggccttttaagaagtttgctgactcctggtatggatgacagaaaatggaataacgttttgtttctccagtctaggaaaagcaagtcaggtagtggatagactgactggcgtccggggagcccagggtatgtgagggccacgtggatggaagcaaatgcctcctgcatagcccttggctctttgtcccacttgggaggagtccatggatgtaatatttacaaaacaattttttccttaccatttgcagaaagcattgcatatatttccttttagctcaggaaactggcatgccccaccctctgctactccatcagatgtaaatacaatgactataagccgtacaactcccctctcttagaaacctcagcaggaccacagagcaagggagtcaaagctttcttaattctctccagtaaaatgactcaactnaatttgatttttttaattaagtcaaaatatcaagagaaaaattgctactaaaacttacattttgatccacactgatgtgcaacacaaaatgaaagttttcacctccattccattttttaaaaattcacggtccacactgaaacttgctgggttttagcaggagacaaaggtgtcacccacggtgtcctcatcctgctctctctgtcccagtgacggtccagcatatgatcactgcagccggtccctggnccgtgccgattttgccacctcccagccacacacatttgcaggacccacaagaagaactgtagccttgataatttcagttcaggctgggaaaaatgccatgcaataatctggtttgctttcagtaagtaggcaacaagtgaaaactgtataattttcatcacctattctgctgttctatctaaaatgagtgtacctgtggtttgtgaactgggcccttgtttgtgccagatccttcaaagatgttccctgtcaggacacctgtggccctgcccctcctcagacacctttccactggcattcacgttccttatatgcagtgttagccatctttggcctacgtggactttttttgtaaattacaccatttccagacattaaactttttatattatgaaatttaccatgtaaaaagaacttcatatttttattgagattgctaaggcacttggccttcctcctttgtgattttcagtgtctattaaagcatgagttccctcagtttt

SEQ ID NO: 436470 - DNA, 461 bp, Homo Sapiens
  misc_feature (342)..(342): n is a, c, g, or t
  misc_feature (357)..(357): n is a, c, g, or t
  misc_feature (406)..(406): n is a, c, g, or t
  misc_feature (439)..(439): n is a, c, g, or t
aaaactgagggaactcatgctttaatagacactgaaaatcacaaaggaggaaggccaagtgccttagcaatctcaataaaaatatgaagttctttttacatggtaaatttcataatataaaaagtttaatgtctggaaatggtgtaatttacaaaaaaagtccacgtaggccaaagatggctaacactgcatataaggaacgtgaatgccagtgggaaggtgtctgaggaggggcagggccacaggtgtcctgacagggaacatctttgaaggatctggcacaaacaagggcccagttcacaaaccacaggtacactcattttaggataggaacaggcaganttgggtgatggaaantttttacagtttttcacttgttggcctactttacttgaaaggcaaaccnggttttttggctgggctttttcccggcccgaancggaatttttcagggtacagtt

SEQ ID NO: 436471 - DNA, 417 bp, Homo Sapiens
  misc_feature (329)..(329): n is a, c, g, or t
gacatcatcacattctctgtagacagcaggtgctcaatacaaatctcacaaaaacccaaatgaccttcctcacccaggtcacctccccccaatgggcccgctggggcctggcacacagtgggtgtccatcaacgcggttggttgaaggggagcgatgcttctggccagggctgggccatgctgtctgagggatctcagcgccaggtggggctggtacaggtgtccctagagagttgtccctcactgagctccagcccagagggagagagggcttctaggctaggattctaggctaggccggtgatgggaacaggtttttctgattccgnacattcatcttggtacccagggctggaggtctacctcctgggacatcaccagtgccttccagccatgcacacaggcagccactaggcg

SEQ ID NO: 436472 - DNA, 868 bp, Homo Sapiens
  misc_feature (403)..(421): n is a, c, g, or t
  misc_feature (849)..(849): n is a, c, g, or t
taaaaaatttttcaaaatattttgctaagttgggttaaaaacgcgtaaaccctttaagtattctaactttttcttgaagggggaaagaagtctttcgtcctgggaaaatacttattccctgcaaaaaaatgagccatccttttttagggagagaggaataaaagctttcaatttagtttaccatttagtgtcccaataaattgaatttcaaatataaatcaaaatcttgaaaatctttagcactaaagtcttggaatatatcaacaacttatttacatatgcagatgctatttaataccaagggctttttcaatgtcatgggggggaaaaacccaacttggtgaactcccagctaaacaaccaagacttcactgaagatttattccaattctagaattgttcnnnnnnnnnnnnnnnnnnncaactgactaacttcattaccttaaagcctagaacattattctgctttatttatatggctttctcacttttattttgtagcatgggttgcatcgacttttttactagagaattttactagatatttgtcattcaagttttcatctgctttataattgatacaccttgagggtcacttttctaatacttttactataatgtggtaccacctcagccctaataaataatatttttacctaatgtcaaatctttttccagctaactaaaaactgtgtacaaaaggattgcttgtaaatatgcatgtaaatagttctgttaataacccactgttttacatttggtacatctgtgtctgctaatacagttagctttctcacttttctgcttgtttgttcagtctgaattaaaattagactttgaaaataaagnttaaatagttgtttcctct

SEQ ID NO: 436473 - DNA, 1104 bp, Homo Sapiens
gtggctgtaacttgctttatgtgtccagcatctccgtgagcatctggtgtctcagctcaagtcaaccctggccagactccaataacagacacaagaactgagaaggtggccctggttaccaaaaaccagaggaccctcattaacatccccaaatttcaagccagactgaaatctgtcagaagaaatgacggtcccagcctacccccgacacgggtggaacagagtaggctgggcccagctagagcctcggcctgggctgctgcacctgcggggcccacagactgaggaggcggtcggcctccctccatcccgacagcagagccccgtgcgtcgtggagtaaaacgtgcgatgtgtggcttcccccgcaaacaggatctggagctgggcgccggcgccgtctgcagggaggggctgagccagcaggtccaggtcgcccccagtactgcccacggccacgtagctgtaggaccccctagtgtacggggcgctgtgccagcgagaccgcaggacgctcttgggcgcggggagccgtgggtttcctgtcactctccggagcacttgggtgagacacagaagtacttcttcatccgacagagtctccatgaactcagactcaagtccggcaatgaacccacagagaacgtggacagacgcaaaggcaggcaggaccacaaagccaatgagcttccggaaccaggcgtcctgtagctcaggggcagcatcctccaggggcgacgtgtcctcccacaccagctggatcagctggcagtctggctcccagaagggctcctcaaactccaggaagattttgttgttggtcccaaagcctatcttcctgattgcttctgccctctcagccggcaggggagggtcaaagaaggtgtccaaatgttccctaagaaaacctaagggcacggtgacgatgacatggtgcgccgggaaccggtctccatcctcacactctaccgacactggaaaggtctccccgggaaaggctgcctcctggaaggacccgttccagtggatggtcttcacaggcttctcaaaaactacagtgtcctccggcagggcggccatcatgcagttgtgatcccgggaattcc

SEQ ID NO: 436474 - DNA, 1138 bp, Homo Sapiens
  misc_feature (48)..(48): n is a, c, g, or t
  misc_feature (68)..(68): n is a, c, g, or t
  misc_feature (1089)..(1089): n is a, c, g, or t
  misc_feature (1097)..(1097): n is a, c, g, or t
tgggcaaatctggctcccaaaaagggctccctcaaaactcccaggaanatttttgttgttggtccccnaaaagcctatcttccctgattgcttctgccttctcagccggccaggggagggtcaaagaaggtgtcccaaatgttccctaagaaaacctaagggcacggtgacgatgacatggtgcgccgggaaccggtctccatcctcacactctaccgacactggaaaggtctccccgggaaaggctgcctcctggaaggacccgttccagtggatggtcttcacaggcttctcaaaaactacagtgtcctccggcagggcggccatcatgcagtttgtgagtccttgatagcccttagaaaaggtgcagtccagccccggcagcacggtatactccccaaagggtgccagggccaccaggtccatgctgtgggtgccgctcacacagcattccaggttgaagaaggagttcaggacggccagcttcagcttcctggtctcctcatcctctgtccagccggccacgtgctggccaatctccttcttgaggtactccccgacgctgggcaccggggtctctgcagcgtgcaggaactcccgggtctggtctatcaggccgtagaacagagtcgccatctccgccaccagctggaggctcacgctggccccggagctggcgtagctcacggagggcaggcccacgtgacccccggtctccaccagctggttctcctgggacagctccttctcccccagcagcccgtactcagcagccagctggaagacggggttaccccgggagggcccatggatccagtgcgcgcccacctccaccacgccaccgaagcagcgctccgagcggatgcggcccccggcgcgggccgtggcctccaggacccgcaggtgcgggaaggcggagtggccgcagagcctctgcgccgcgcccagccccgcgatgccgccgcccaccaccagcacccggggtccgcccggggcctccccgacgctgccggtcgactccatcgcgcggtccgggcagtccgagggcttctgagtagccgggcctcgtgccgaattcaccaaacaaanaaaggagnagaaaccatgtggggcgggcccccggcgggcggtgggggag

SEQ ID NO: 436475 - DNA, 1222 bp, Homo Sapiens
  misc_feature (1216)..(1216): n is a, c, g, or t
caaagatgtctcagtttattagttttctgtcaatcattaaaacaagaaagatgaaacatgcaattagatacaaggagacagaactcctaattctttcgtcctagctgaagcagaagagttttaattgcttggaaaaataagattttcgttttctctcaagagggaagaggaagcaaatataaattgccttagagtctatggctggaggtacaatgctccaaaccatgcaaatgagaggtggaaagacaagtccatcatctgtatgttttgtctttacaatggccaatatccagatatttagaaatgtgagataattggcagaatattccttttttcattagaatgtttagagtcacatagatttactgattctcttcttcttaatgagagtgacactgcactaaaatacttgaatatgttgtcagttattccagagccaattttccatttatgtgagttatcagtgccctttgtttctcttctaagtcctaccagctactctatcttaggagccttacactgtttataacatatttaccagagggaaagtaaggacaaggagaggagataaaatactaatcaatccatttagtaatgatgaacatctacaaaattgaagacgagaaaattaaaactcttggccatggagaggtatagacgttaactgcaggtgtctgcctgttccttgacctcaactcagaagtaaaattaagagttaagagtaattaattctaccatttaagccagaaattgaaatctctaatactatttcctaggataaaattgtgaaaccaaatagtgtgtatcagcaattctgaatttgaaattccatatattgatttttccataaaatattttctgcactcagagatatacatcaaatagatctgctaatgtaggaaaaaacaaagatacaaatttgcttatataggattcacaatagggtaagaattactagcagcatctttttgtttgattaggctttttcctttcctttttaaagaggtcaccagccatagggatgtatgaatcacagtatatgtgaaaacgtctatttgctgagaggtactctgtaagattggaaatagtccttcctaccagggagggatggcttacagagtataaagtagtcagtggccttcactgtctggaggtccttctacagatttatcctaagaaataaaagattgttttttccttatatctgaagatagantctttt

SEQ ID NO: 436476 - DNA, 380 bp, Homo Sapiens
ttttttttatgtcagatgttttatttatagataattaaaatttaggcatatacatgacacaaacattatatatagtacactttccatgatagaagttatgatgctgttcacagaaaggcctcaattcagatgacataatgcatatgctacaaggggacacctgggagaggggacaccaaatggccttctggtttttcattttggtttaaatatcctctggatgcattcaagtaatactaatcatttcatgttcaaaagtcttttaataaacaaattcagagtaaaattaattgaaatatttataatacgatttgttacacagttatttccaatatacaatcaagacgactcacgacacttggaaaggaaaggaggaaagg

SEQ ID NO: 436477 - DNA, 832 bp, Homo Sapiens
  misc_feature (824)..(824): n is a, c, g, or t
gaaagtggtttcttagaaaaagccttttttcgaggggcccgcagggcgcgcgcaaaccaaggtgatttatttggagtggggcgtgggcgcttcttttcccgagggtgtaaaagagggaggcagatagtgcggttacgggggttgtttctttggaaaagtgctttatttcagtaagatctaagtcagatgcattaaaacatatcaaaatgttacaaaaatgtatggctcccttgctgaggccctgtcagattatgttagatgagtaaacgcatcagtgtgtaagttcagaaccaaacgttgaatcaagtcatgtaccatcgctgaaaggcaagttataattaagaatacttcacaaggctaaaacaattgggaaaacccttcagaaacgctagcaattacacaccagaaacatcagcctggaaacaggtctgcgatctgcagggaagactccaaaggtaaactgagggtttcccaccacagcttgtgcatcttgtgctcagttaaatacagttaaaacacaaggggcgcttcaacaccccccttgtgatagggcagagctttctattacatctggaagaagggggcgccacattcattcttatttttacatctctaggaaatcatatctcatctcatctgagcgaagcaagactttgtgcaaaacgatttaagtggaaacgtgaaaatgtgtgctgctatatcagggacgcttatggtgatctcctgtctcctatctcattcttcacgtcatggtttggccgctgtaagacactgaaattgccttgttcatgtagaaatttctcttttggctgggcacagtgctncacgcctg

SEQ ID NO: 436478 - DNA, 667 bp, Homo Sapiens
ttttttttacgacaactgatgaaacagggcaagtatattttgaagtgctaaaataaaacatatttatacaagtacaaagcaaaacaatgctgataaaaatgttaaactttatgaaaaaaaatcatttgcagttcacatcaaaataatttaacattctctattattttaatagtacaagctgccacaacagagaaagaacagatacacgcacacaattttaaaaccaaatcagttataagtgcagaaaaaagtaagtacaagcacttttagcccacacaaatcttttaggattggcaccatctttctaaaacatctataatctatatagatttctaattacaacaccatcagcagctgccattgatttctagaaatacacacaatatacatagtatatttgttcacattgggaagatcagtgaaattcaaccaactattttatacatgcctcattcttcaatagacagtagaggactctcccgggcctcagaccctcttcaaagttgaattctgacttgtctttatgctttcactgatctgtattttttcacagtataaaattgtaaatggtaactatagagattctgacagcttgagggttattaataagctgttgctaaatgtgaactcacataatacctttgaagtctccaaaacatgtacattt

SEQ ID NO: 436479 - DNA, 461 bp, Homo Sapiens
taaagggacttattcatagttatccaaagctcctcctacaaagtagcagagttttctaataatcttgtggaagacattattcctagaatgctgggtaccaagaataatactttctattattttacttttacaagtacatgcccagcaaacatgcgcgcacacacacaaacacacaaacgcatacatttatttgggatctaaatctttttctcttttcacttaaataagtcaggctttttactttcagcatttattatgcatctagttcatgtttagtactgtgatagttttaaacacatttaaaaagacttgcaagtttatattaaatagtaatacatgtaaatattccggagactttggaaatattttctctgtacatgtgagaagaggtagaaatctatctattgtctcataaagcagtcattgtgtttgaatgagttcatccacatggcaagaattct

SEQ ID NO: 436480 - DNA, 427 bp, Homo Sapiens
  misc_feature (5)..(5): n is a, c, g, or t
  misc_feature (33)..(33): n is a, c, g, or t
  misc_feature (46)..(46): n is a, c, g, or t
ccccntggtgagttcttgatgagagttgcatcncaatggaattatncaataaagtcttagctgggaaggatttcttttgttttagaaaatatgcacatttttgattttcctttatgtatttacccatttggtttgacataatacaaaaatcttaaaacattactaatgatttaatatcttgaaagtacttttattaacaataggcagcctgcattaatgtgactttatgcagaccagcatttctttgggttcactatagattttattaaccatagaagactgactgaatctagattcattcaatcagttcggggaactgtgttatgaaattatattttgggcaaaaattacttcatataatggaaatttcaatattcagagatcagagttttagtctcataagacatttaatttaatctttatttaa

SEQ ID NO: 436481 - DNA, 1888 bp, Homo Sapiens
  misc_feature (34)..(34): n is a, c, g, or t
  misc_feature (122)..(122): n is a, c, g, or t
  misc_feature (1468)..(1505): n is a, c, g, or t
  misc_feature (1551)..(1621): n is a, c, g, or t
  misc_feature (1736)..(1736): n is a, c, g, or t
  misc_feature (1793)..(1793): n is a, c, g, or t
aacaaaagaaaaggggcattcatcgagagataanacttaaaatggaatgggataattgggaaggttggaaaaataaggttattccaataatattgtagtttggcattaaagaaagtatgttnttgtaccatcgattttaatggacctgtcactggaaaaaggaaagttcccatctttcaatgtctgtttacaaggttaagaaattgtactaatgtaatagcaaattcagtaatgtccaacagataactaaaattcaaattttatttttccatatttatcagacaatttttttctgacaagactttactgaaagatgaagtgcaaatgggaaccctgtaaaaatgtttataagagttgtacatgacatattttaagcgccgctaagtacacattgaatactttgtaagtatataggcatatcaacatgcaagtgtcatgtaccaaatattacaatatgcattttgttttttgaaaatgttaatgacaagagtagattcaataactgtgtttctctactttctgtgcttatatggttaatttgttggatcttctttatagcacagaatttattttttatgctgtcataaatatacccttccaaaagttatgaatttcatgtcatataaatagcacattttatttttgaagctacattactgggaacacctgcgtttctggataccgttttcagagataagtctttaaattatttttaacatggcagacttgttctaatgttggttatgttgaaatgtttatgataaaaatggagctttcttgagggaatattttttgtttgaatgaaaagctgaacaacaaattcacaaatattgatgtgaatgcaatatgaagaaaacaggtcagtaatctcaaattcataaatccttgggtgatgacttaactgcgtcattgaatctacaataagtacagtaggtacagttaaataaatttgtaaaaagattaaaattgtgtacatttataaggagaaagagtactagctttgaaaaatttctagattatttttctttctatttatgagatttattccctacattaaaaacacagagaaaagccaaaaaggatagagatataacaattcagtttacattccatagttttttaaacccaattggtgacccactgccttcaaacatcaatattttattgccgtatgattttcactatcagtaaatataaagagaaaagtgtctactagtatcatgtacacgaaaaagcatctgaagaaagaaagcatttgaggtttgacagtactgtttgtaagcgtaatgttgcatttcataccgcacttaaaagtccatgtagttactgctgctttgaccctggatgtgggaaaagtgcttaagtgctgagccctggtaggtttttgttttgcccctgcaatcttcaaatatcttttaacttttcttcttttgaaatatacagtatatttcgtaggggaaaatagtgnnnnnnnnnnnnnnnnnnnnnnnnnnnnnnnnnnnnnncacatttgggcccattctctccaaaataatcatacatttcttgacnnnnnnnnnnnnnnnnnnnnnnnnnnnnnnnnnnnnnnnnnnnnnnnnnnnnnnnnnnnnnnnnnnnnnnngtgaagatcaaccaaatattattcgataacataaccacataacatagaaacatcttactttaagcatattttagagattaaccattataatttgagatattcatgtttttattcntttcctacagaagaatctgtcatttccttttaggataattaaattacatcattgganaaattcttaatatgtctatgcagacaaaatggaagtggggcatttggtgggcaatactgtggcattaatatggggggattaattttattgaataa

SEQ ID NO: 436482 - DNA, 1521 bp, Homo Sapiens
  misc_feature (544)..(572): n is a, c, g, or t
  misc_feature (656)..(692): n is a, c, g, or t
ttattgtgtagtgtcatttgttattgttatgttacagatgaatgatacgtattatcttttaacttgagatccgctactgtgtcaatggggccttatatttaaggttattggcttaaggtatgttagttgtaaatttagtatgtgttatttaaaatttccaacttacccgggtgcaatgttggaatttaccctcggtaacatcaatagtgtttaccatggggccctgcctcaacatcaatttatgcgaatgatttttcactatcagtaatataaagagaaaagtgtctactagtatcatgaacaccgaaaagcatctgagaaagaagcatttgaggtttgacagtactgtttgtaagcgtaatgttgcatttcataccgcacttaaaagtccatgtagttactgctgctttgacctggatgtgggaaaagtgcttaagtgctgagcctggtaggtttttgttttgccctgcaatcttcaaaattatcctgtttaacttttcttctgtttgaaatatacagtatatttcgtaggggaaaatagtgnnnnnnnnnnnnnnnnnnnnnnnnnnnnnatatctttttcacatttgggcccattctctccaaaataatcatacatttcttgacatatatatataacttgagtttcttgagtnnnnnnnnnnnnnnnnnnnnnnnnnnnnnnnnnnnnnaaatatgtgaagatcaaccaaatattattgataacataaccacataacatagaaacatcttactttaagcatattttagagattaaccattataatttgagatattcatgtttttattttttcctacagaagaatctgtcatttcttttaggataattaaattacatcattgaaaaattcttaatatgtctatgcagacaaaatgaagtgggcatttgtggcaatactgtgcattatatgaggattatttattaataaggagtaatttttaaaatacttaaatttgtctcgtgcagataatactacttggtaaaataattcatatacatgatttttacgttaaaacacagcatgaatttataagaaattgttacattttaaaaattaaatatcagattggatcgcaaagtgttgccattttaattatttttaaaaaccaatacaattatattaacattgaaatattaaataggcaggagaaggactattcttataaagttataatattttgcctttaggaaaagctaatgatagaaaaggaaaaacaaatgcagattcatacaccatagaatacactgaagaacttggcttttgagatttcccagggggtggggagtgcactgttataatagttccataagaatgcttcctgggatatctggtaaataattatttcctctatttatattgaagtatcatagcccatgttaaaagtgagaggtagaaggattattgtaagtatgcatggcagagaacttaccagctatatccaataactattgcattcaatattaataatctcaatacataaaaatgctgatgattttag

SEQ ID NO: 436483 - DNA, 392 bp, Homo Sapiens
  misc_feature (125)..(125): n is a, c, g, or t
  misc_feature (130)..(130): n is a, c, g, or t
  misc_feature (144)..(144): n is a, c, g, or t
  misc_feature (270)..(270): n is a, c, g, or t
  misc_feature (287)..(287): n is a, c, g, or t
  misc_feature (378)..(378): n is a, c, g, or t
  misc_feature (391)..(391): n is a, c, g, or t
ttttattggtattataaacctgataattatttacatgtttattactgtaattttataaatttatgcaattggtggtgcttcctttcttcaaaatacagattttaaaaaatcatttctagattatntttcntcctccacagtccnttttttttcacctaacgcacctatatcttgaaactacattgttgttttagcttcgccagtgtcaccccttgcaaaactatgaattaagccccatgttttaggtgttactcatggatgaggaggctnttctttcctatgccctntatttctggataagtggattgtgcaccctttagttaaatttcacctcccgatttagcatagatcacaggaatcacatggcacacggttaancacggttggcttna

SEQ ID NO: 436484 - DNA, 350 bp, Homo Sapiens
  misc_feature (25)..(25): n is a, c, g, or t
  misc_feature (32)..(32): n is a, c, g, or t
  misc_feature (77)..(78): n is a, c, g, or t
  misc_feature (135)..(150): n is a, c, g, or t
  misc_feature (240)..(240): n is a, c, g, or t
  misc_feature (332)..(332): n is a, c, g, or t
atgtttattcttaaccaggattgtnaataacntaatttactgtcatagagttaaaagtttggaacagtagagagccnnatatatacttcatggtgttctttctactgtcagaaggccccagactggaatttttgnnnnnnnnnnnnnnnnacgtgtccgtgcatgttttaaagatataaaacaaggttatggctgattgtcgcttcatcagacagttttaaaattttgtttacttttgtnccttattatcaaagtaatatatgttcattggagaaagttcatcctcccctcccacattggagaggcaaccgctcttaacattttggaatatntcttttttccttttttct

SEQ ID NO: 436485 - DNA, 307 bp, Homo Sapiens
  misc_feature (285)..(285): n is a, c, g, or t
  misc_feature (306)..(306): n is a, c, g, or t
aagctttgcagtgctctctggtgaagcccctgccctggcaccgcctgccgtagcttccctctgggaagtgacttcctggtaaggtaaaaagtgtgtcaccagctgcttctgcaaaacagatgcactggcagcccaggggagtgcttgtgaggtgggaaatggcttctgactgcttaatttagcttcaaaagcacacatattttcatgattaccccccagtggtctatgcacacagacgccctcaggtgctctccaggtacagaccactggggagggtggtgtgcncacacgcatatgtgtgtgtgna

SEQ ID NO: 436486 - DNA, 917 bp, Homo Sapiens
  misc_feature (442)..(455): n is a, c, g, or t
caccaaaaaggtttaaaaaaatcacagactggatttattgtaaaggcttttttccagctctaagactttaaagaaaaatcaatgtcttagttccttatggagtctaacctggatgggtcattgacttcatttgttttgtcaaagccacagtcaagtgctccctttacaccaccccctcttcccaacaaaatatgcccaaattgtgccatttttcactttgtacaaacaagactatttccccccaaacagcaagatttaacttgttttaatgcagtctgctataaaaatgaagacttctgcatggtatatttggctttacaaacgttaatgcctagttaatgcttgtgttatatggtacacatcattacaatctgttggccagtaacagcttttgcaacatgggttaatactaaaattgtgaatcatggaacttttacttagnnnnnnnnnnnnnnatctacagcaaacttaaatactaatctataatacctaactgggttattggatccattgcaagattgtgcttatttatctcagaaggtaggcaactagcaaaaatacacatttctttcgcatatccccacccccatattacactgtaaaagaaatacattattcagtgcacttcctaagaaataaacttccttatagtatctctctctatatatatctatcccaaaacaaaggaagagcacaatgcaacttttaagattaccatttaaagcaaaagagacaataactctctggcactgtagcctcctctccagtttagaaagtttagctattttatcaacactattcgttttggctctgcataggaataaagttcaatgcatgattgccttggacagtttaagataccccctacatcattttgatagacaccttggcctcgtgccgaattcgccacccaggcc

SEQ ID NO: 436487 - DNA, 457 bp, Homo Sapiens
  misc_feature (46)..(46): n is a, c, g, or t
tccatgatctttgatccagcaggcttatctgggacagtaagatggncatgattgctactcaatgaagaagtatcatcactagataaagagtcaaaaatccactttctgatgtgacaaaactgtttcccagggccttgtggatgcctgcctctgagggtacaggtgaatgaacttgcacagcaaacgttattggttgtccctcatcttcagcagcagacaaactgttaactgtgtcaggcaaggattgtctctctttagataaggaggaaggaaaactgctgggtgtcttcactgtattttccagggaagagaaagaatacggcgttccactcaggctgggtgaggatgaagatgcctgctgtgcagtcaaagactgagtctgggaagcgtgaggagggggtggtgtctccgcagctatttctggatcttcctgttcactttcactgtaacattcttc

SEQ ID NO: 436488 - DNA, 1337 bp, Homo Sapiens
  misc_feature (39)..(39): n is a, c, g, or t
  misc_feature (134)..(167): n is a, c, g, or t
  misc_feature (518)..(567): n is a, c, g, or t
  misc_feature (664)..(672): n is a, c, g, or t
cagtagccaccttttgtttattgacctatgtaaaaatanataggtcttgaaaagtcagaccataagagaatatgcaagaaggttatttctgattctagaaggctatcagaatatgcaaaaaggaattaagttannnnnnnnnnnnnnnnnnnnnnnnnnnnnnnnnncccaaacttcatttctaattatacaaatgactaaggaccagtttaacaaatcgtttttatgtatatattacatgctttggaatatagatagaaaatgttccaaaaaagttgttcagaaacttttctattcacaatatgaacaagaaacttgtataaaagaagggggaaaggagcaccttttatgtaattttgaagcaaagatgacaaaaaagatcaatctggaatatggaaatcatttgctttaaaaaacaaacaaacaaaaccctacaataaaccatagctaattagttcttccaaggaaagtatgaggtagttttagcctcataattaaatccactgcagcttggagcnnnnnnnnnnnnnnnnnnnnnnnnnnnnnnnnnnnnnnnnnnnnnnnnnncacttggtgacttggaactacttgtggaatccagacttgtttaattttctaacgttcaccattttaaggcacgcaattcatctaaaatgacgtggcnnnnnnnnnctgttgttttggatactttctgtatcatcttaaaatgctttttcaaactcataattataaaaactttccatattaagtctgccacttcaaatgacagccgagttggagaattaccagcccagaacaatagctcatcacgcaattagtggagaaaaggaaaaaggagctccatgatattgtactttagaatgttctccaagcagactttgtcaattattcagtgggctgcttcattttccccaatctgctaccataagttatattacaggatgctaaggtaatcagtttttccagaacccattttatggtgcttatgaaaaacatcactctttatagtatcctaaaaaacatttacactcattcagaacttcatgaaaatccagcttcaagtaattttccaatactgtctaaattgtccatgtctgtgtagaaagagcatgttactctttgtcagctcacgaattcaaactctgaagtgagcaatgactccggagcttctggttccccttctctcatcctgctgaattgtgctctgagatttcccctgttcttattgccatgggacatcctgaatgccctttcatgtttttgacgtttgcctttaacaacttttactcccttaaaaagtgcttgctattgatgaaggcttcacactgagtcctccc

SEQ ID NO: 436489 - DNA, 663 bp, Homo Sapiens
  misc_feature (95)..(146): n is a, c, g, or t
  misc_feature (497)..(531): n is a, c, g, or t
gccacgtcattttagatgaattgcgtgccttaaaatggtgaacgttagaaaattaaacaagtctggattccacaagtagttccaagtcaccaagnnnnnnnnnnnnnnnnnnnnnnnnnnnnnnnnnnnnnnnnnnnnnnnnnnnngctccaagctgcagtggatttaattatgaggctaaaactacctcatactttccttggaagaactaattagctatggtttattgtagggttttgtttgtttgttttttaaagcaaatgatttccatattcctgattgatcttttttgtcatctttgcttcaaaattacataaaaggtgctcctttcccccttcttttatacaagtttcttgttcatattgtgaatagaaaagtttctgaacaacttttttggaacattttctatctatattccaaagcatgtaatatatacataaaaacgatttgttaaactggtccttagtcatttgtataattagaaatgaagtttgggnnnnnnnnnnnnnnnnnnnnnnnnnnnnnnnnnnntaacttattccttttttgcatatttgtatagccttctagaatcagaaataacctttttgcatattcttttattgttctgacttttcaagacctattatttttttacataggtcaataaacaaaaggtgtgct

SEQ ID NO: 436490 - DNA, 668 bp, Homo Sapiens
  misc_feature (41)..(41): n is a, c, g, or t
  misc_feature (61)..(61): n is a, c, g, or t
  misc_feature (64)..(64): n is a, c, g, or t
  misc_feature (71)..(71): n is a, c, g, or t
  misc_feature (76)..(76): n is a, c, g, or t
  misc_feature (203)..(203): n is a, c, g, or t
  misc_feature (462)..(474): n is a, c, g, or t
tgacggaaagtgtactttctgctttaaaagttcggaattcntcgagcacttgttggcctantgnaaaactnttacnctgtaagttttaaacgttacgtttctgtatgaatgtagtgtgggtttgagtagcattgtgtgtgagtggccccacaggtacattcaccctctagtgcagcccctcagtttaatgaaggaaaaaaaancaaacacaaagccttaagctctttgagtacttcctttaccaaatgagcatggttctaacacctggagctgggcctacattggaaacaagcccctcctgccctctgtccattcttagagcataccttcatccactccatgctcagcacgtctcatcccaagcgacaattagttggctagaaacacttttctgtaattttaaacttagactgttttgttacaaatttttgcaccattctgttaaagatgcagaattgggcnnnnnnnnnnnnnacagatgaaataagcccttacctttcctcttgtctctggggaatgtcagctgatggttcttatttaaggttttgcattttgttcactatccactactgttcgttagccagaaattctctagtgatctgaagcaatgtgactgaagaccagttttaagttatgtgttggcaagttgccttatatttaaaaggaaa

SEQ ID NO: 436491 - DNA, 758 bp, Homo Sapiens
cattttgaagattggaaaaaaacagtacatgaacagccatgtccaccagttagattctgaacattttgccacatacgcctcacatacattttgttaaaccatttgaaacattttaagacactctaacacttcattcctaaatgcttaagtatgcacaattaagacagtcttttataagactacaacacccttctcacagctcactaaaattacctaataattatccaatatcattcaaaatctaatccacattcaaattttctcaactgcctcaccaccgtgctggcctcccacccccaccccagtctatttacagatggtttttcaaaatagagtccagtaagaatatttcacattagcatttaggttcattacataacttttaatcaagaagagttacccattccacttccttttttctttcccaacacttgatattttgaagaaatgaggccagttatcttctataacgcttcacattccagatctgtctgatcgtttctttagtcggtgtcatttagttgctgctctatgccagcatttctccttaatttaaggaatgtgagcaccttccttctttttgattttgtctgaaacccatataatagccagtatgatacgccactcatgtaccatgaagttaacatacttcccaaagcagtcagcatcatcgagagaatctggacatatggggaggtggtgggggaattattggtcggtccagaaggaaattggaggcagccagcatgatagtaagt

SEQ ID NO: 436492 - DNA, 1304 bp, Homo Sapiens
  misc_feature (1108)..(1147): n is a, c, g, or t
aatttaaaaaattaaatatttttattatatacttttaaacatatagaagatagaaaaaaacagtacaatgaacagccatgtccaccagttagattctgtaacattttgccacatacgcctcacatacattttgttaaaccatttgaaacattttaagacactctaacacttcattcctaaatgcttaagtatgcaaattaagacagtcttttataaactacaacacccttctcacagctcataaaattaccaataattatccaatatcattcaaaatctaatccacattcaaattttctcaactgcctcaccaccgtgctggcctcccacccccaccccagtcttttacagatggtttttcaaaatagagtccagtaaaatatttcacattgcatttggttattacataacttttaatcaagaagagttacccattccacttccttttttctttcccaacacttgatattttgaagaaatgaggccagttatcttctataacgcttcacattccagatctgtctgatcgtttctttagtggtgtcatttagtgctgctctatgccagcatttcctgcaaatgagaaattagaaccagaggcttgacgaattccagttaaaccatgtcctctgtggacaccagttaaacttgactagagcacttcatatgtcagagtgtacagtgcagtatgcctaggttatcccatatcacaataaaaaaaagtctgctggtctgcctactagtgatataaaatggcatcatatcctaaagctctttattgtgaaagtatgttttttccacacaaccaaccagttaagtatgagaattctagtagggatgtagattaaccttttatctaatagttttggcatcaaaattctttaatattgattgttttacattaacctttcaacttttctaacatctgaactttttaaatgttcaaaaacatttgttttccacaaaccataaagttttacaaaagtaagattcactttcataatgctggcagacttactccttaatttaaggaatgtgagcaccttccttctttttgattttgtctaaaaccctgtaaggaaaataaaggaagttaaaaaaaatagcnnnnnnnnnnnnnnnnnnnnnnnnnnnnnnnnnnnnnnnngatgttaaaaagcattttgtttcacaagacattttacttattttattcaacaaaatatgatcagaaattaagttgatagtcttttaatgtactttaaaagttatcccaaagaaaacaattattaggctgcagttaaggttttcttgcagtggctcat

SEQ ID NO: 436493 - DNA, 1602 bp, Homo Sapiens
  misc_feature (537)..(622): n is a, c, g, or t
gtgtttgtaggctgtgtcgctattagttgctttgttggcgtggtgttgtgcttgtcgttgtatgttcttgtttgataaaaggtgaaaaggtgtgtagtaatatcgtgtaaacatttgagagtttgtgataacaggtccagttgacatgcaattcacaccatgtagaattctggtaacatttgggccatcatacgcgttcacagtcaagtgttgctaaacgccattttgaacaattttaagacattctacacgtcattcgtaaatggcttaagtatgcaattaagccagttcttgtataaactgccacaccctgttcacagcgtcataaaattacgcataattgatcccaatatcattcaatatctaatccacagttcaaattttctcaactgcctcaccaccgtgctggcctcccacccccaccccagtcttttacagatggtttttcaaaatagagtccagtaaaatatttcacattgcatttggttattacataacttttaatcaagaagagttacccattccacttcctttttnnnnnnnnnnnnnnnnnnnnnnnnnnnnnnnnnnnnnnnnnnnnnnnnnnnnnnnnnnnnnnnnnnnnnnnnnnnnnnnnnnnnnntagtggtgtcatttagtgctgctctatgccagcatttctccttaatttaaggaatgtgagcaccttccttctttttgattttgtctgaaacccatataatagccagtatgatagccactcatgtaccatgaaattaacatacttcccaaagcatcagcatcatcaagagaatctggacatatgggaggtggtgggggaattattggtggtccagaaggaaatggagtcagccagcatgatagtaagtggggtgttgttgctggcgttggcgttggtgggccaattgaattttagacctggctttcctggtcccagtcttggccctggcatggggggtggtggagggagaaaagagttccatggagcagatttgggcttgatgttatctgatttatttccaggagacctggagttctcactttcatctgttgaaacttggctttcattttcattctcttgagcattctgttctatattattagctacttcacagattggggaaagtagatcggacagattttgctcctctctatttccatatccagtgtaaaccacaacacaggtttctctcttaaaatcaattgaagcaatggtagctgggtaaatgcaaccgtcttctgaccaaatggcagaacatttgtccccaactttccactgttgtaaggaagctgcagtattcttcttttggcttttattcttcttagcaggttttcttttaggtgtggtttttggtttacccgaagtttcacaaatgtcaccattctttagagcatgcttaaatgaagccacagctttatcatatgcttttatcagtgctgtatcatcccaaatgtcagaatcatcgctctggcctgtgccgcgccggaacagcacggaatcctcctgctccgggacgccgccaccactgccgccgctgctcatcgccatagcaaacccgcgggtgcgcagcgtggggccccgtcccttcttaagagtccgct

SEQ ID NO: 436494 - DNA, 446 bp, Homo Sapiens
  misc_feature (314)..(314): n is a, c, g, or t
  misc_feature (410)..(410): n is a, c, g, or t
  misc_feature (433)..(433): n is a, c, g, or t
aattagcaaagtgtcaacgtttggcaggtccttcctctgatgatgagaatgaagaggaatcaaaaccagaaaaagaagatgaaccacaggaagatgctaaagaattgcaacaaggtaaaccatatcattggagagactggtcaatcattaggggaagggactgcttatatatttggagtgatgcagcagccttggaattatctaatggcagtaatggatggttcagatttatcttggatggaaaacttgccaccatgtattcaagtggtagtccggaaggtggatctgacagttcagaaagccgaagtgaattnttagagaagttacaaagagctcgaggccaagtaaagccatctacttcaagtcaacctatactgtcagcaccagggcccactaaacttactgtaggnaattggtcactgacatgtttganagaaggggaaatt

SEQ ID NO: 436495 - DNA, 413 bp, Homo Sapiens
  misc_feature (318)..(320): n is a, c, g, or t
  misc_feature (323)..(323): n is a, c, g, or t
  misc_feature (336)..(336): n is a, c, g, or t
  misc_feature (360)..(360): n is a, c, g, or t
  misc_feature (409)..(409): n is a, c, g, or t
ggccactgtgcctggcctaaattatcctttttaattatgtatcttaaattctttatagtcacaaattcatatctgaaaaagaaatttaaaatgaagtgaatgaagatgatagtcaaactaatgttttaaaaatctacatcattttctctgtatttacacggataaataagagacattaaattaattaaaaagtcaaacttcagttctttgttacttcttaatttattacttgatcaaatacttgatatctgcagataaaataatgggtatcgagacaggcaagaattttactaagctttaaggttaatttaataattnnnccncacaaataacatngcttaaactcaactctaggaactncttttattctctaaaaatgtatgggaacatatcattagagttatttganttaa

SEQ ID NO: 436496 - DNA, 527 bp, Homo Sapiens
  misc_feature (9)..(9): n is a, c, g, or t
  misc_feature (11)..(11): n is a, c, g, or t
  misc_feature (398)..(444): n is a, c, g, or t
tttttcccncntttattaaagctatcattccaggctttgatcaaagatccaagaatatttgttctaccaggctggaatgaatgtggtttggaagttcagagtacatttaaaagctgcaacaaaatataggtagccaacaatctcagaattttggatcagcccagatggagatagcaatttgaaatgtcttcgatcccttacttaaatgacgaaatgtctatcagcccagatagagcaatttgaaatgttttcgatcccttacttaaatgatgaaatgtatatcatactatctgtaaattggatattccattacagtgataacgtacagaattcccatgcgttattacactttcctgagagtaaagcaattagaataaccttaatcctagcaacaaagnnnnnnnnnnnnnnnnnnnnnnnnnnnnnnnnnnnnnnnnnnnnnnnggggtttaaaaacattgggggcatatcccgggatattggtggtatacccacaggggagatctcttcatagagtcagccggcgg

SEQ ID NO: 436497 - DNA, 498 bp, Homo Sapiens
  misc_feature (154)..(154): n is a, c, g, or t
ctctcccggcagcccgggctctggggcggaaggagaacagtgtcatctcttcctttgttgataaattgccaaagagtgggaacaggtggggtcaggggccagagtgcaggggagggggcaatggtggaggtggcggggggaacagagggaggtngggctgaggcctcggtggggccagtgcgacgctggcttaaggagctggaggggttcctaatacacatttaattcagtttctcttccctaagaggctgccggagttggggcctcctccagcagagaccctcggacccctgcagggcctggacttggggtgaacagggcttcagtcagcgcaagtattccatttgcatttggtaatttttcatgccacctatttatgaatatataaatctttataccaaatctattttttaaaacatggaaaagttgcctttatggaaacttggcagagccagagtgtacacattcctaaaccattaaacagatttctataacaaa

SEQ ID NO: 436498 - DNA, 771 bp, Homo Sapiens
  misc_feature (22)..(24): n is a, c, g, or t
  misc_feature (31)..(32): n is a, c, g, or t
  misc_feature (35)..(37): n is a, c, g, or t
  misc_feature (247)..(247): n is a, c, g, or t
  misc_feature (716)..(716): n is a, c, g, or t
aaaagtctgtgaatgctattcnnnttattanngcnnntccatacaaagcatacattgagctgtagtaaggctgaggaagagtacaactgaataatgatgttctttttcatcaagttcctaagagctgacttggagattttattcccagggcttccactgctaggattcttctcactagttctaacaaaatctgtgatgttaaatgactgatgctctcaattgtgatccagagttttaaataaatganatcaaggtggattttgggaatatatcctgaagttaacatcttgatgtccttcttgttgtaagatgatatttggcaatttaaaatctatgtgctacccacctgggcttgtctcaatccgtggactttttggtgtggcagtttcacctgaattccacacatcagatttgtttggaaatattgtactgtacagggactatgcattatgcagaaagatatagttttctttgaactgctgtaaccttaaattggaaactgattcttgtgagcctactttccttaatcccgccgcccccctcccccacttaatgtaaatgtcttgatgagagataatggatgagtattttgtatgatgaaatcaaacgatttaggaatttgtctccctccgttacacagttgatgcctgaaagaatgttgggggggaggactcaacaccctaattgtattttttaagtttcttttgtgaaagatnttttaatgcatttttactgtaaaaatacatggaaatgtatgcattccacaaccac

SEQ ID NO: 436499 - DNA, 355 bp, Homo Sapiens
  misc_feature (327)..(330): n is a, c, g, or t
  misc_feature (340)..(340): n is a, c, g, or t
  misc_feature (343)..(343): n is a, c, g, or t
gcctgtgtttatctatttcttggattatggaacagaacaaacatgaacacattaccttttgcctttcctcatttcccacactctttcctagaggtaatattaagcttccaattaattttagatggtagtttcaataattttttttcactgggtattacaagtcttcatttcaaccctctgagtttggtttacttgtccatttaatactaatttagtggatacgttttaggtgctgttatggcagacccaactcaagctggtgatttctatattacttggatcgtgctagttgctttgacaactacactcaacaacatataatatctnnnncagaacagangtntcattcatataa

SEQ ID NO: 436500 - DNA, 246 bp, Homo Sapiens
  misc_feature (38)..(38): n is a, c, g, or t
taactgagatttaatctaggtctatcttccatattatnttttaccctcctattttttacctttgaacacagaaggctgctacaaagttagtgtttcatattgacttgagtattttattcttgtaggtttcatcactggctgatggtctatttgttggagtaacagaaagcaacataatttatcttttagatgactgtcattcatatacttgaagatagttattacattccttcctcctgaatttcc

SEQ ID NO: 436501 - DNA, 847 bp, Homo Sapiens
tttttttgacactagaaaaccaactcatcattattttgacaactggtgagtaagaggaaagagtaaaacatgtattccacctttcctctatgaactgtgcctggggtcagcttccctctttgggagaatttcagctcccagacgaaaggaggaatggaatgagcatgccgctggccactggccgctggatccaggcatattctcaatgactgacagtagcatagagaggtggctggttgccagacatctcttgttgggaataaacagcacctcaagcctgcccacaggcggacctgccagaaccaaaatcagctgagcctgaatgtgatcacggctctcggtctcaccgctcaaccaacttaaacaagagacacaggagcttgctaaacgcctgcagcggatgcaatcagcaaaaccagacgatgagagactctatggcacaagtgaccgattccttcaaaaaaatattgtggaagaataaacgagagctaggtggagcagaagcccgtagattaaacagatttaagagacctatcaaccaagagtgacatgtgtgactttcgtctgcctcagttcaaataatcaaaccgtgaaaagtacacttgcacacggggaagtgtgaatacaatatttggtgatattaaggaattcttgttaagtttgctggtacaatagtgatactgcagttctaccgtcaagaacttcagcctgaacgcctggcagggaaggtcatgggaacaaagccgaagtgtacaggcctccacagtgtggctttgctctgagtgcagcagcaatgcagaaaggacagccagagaaggttcctcatgggcaatgggcccagcaggag

SEQ ID NO: 436502 - DNA, 445 bp, Homo Sapiens
gtttcagctagaaataagttattttattttaaaacacatacagattaataaatattactggaaaacttaatagcctttttatttacatgaggcaataacaacatgctatgactacatctataaagcaaaatataagcaggtcttggccactgacacatgtgtctatgtatgctaattggaagctccccaatacatgtctatgacaaaacttttacacaaccaatcaacatttgacattttttacatcttcttcctctcatgattatattccattttcaagaaaataatagttatcctttgaaaaggcaaaacgctcaagccactgaaaaacagtatctaaatttctgtaaagtgcaaaaatactaaggtggggggcaattattatattctgacgaataaatattctgaactgtttcaacatgaccctttggcactagtggtttgg

SEQ ID NO: 436503 - DNA, 864 bp, Homo Sapiens
  misc_feature (105)..(105): n is a, c, g, or t
  misc_feature (118)..(118): n is a, c, g, or t
cgtgttctgcactttttaatataaagagtgatgttgtatttcgtgttctgcgtgctggattggttgtctcctcccagccctgagcgaggggggcgggccctctancgggggcgcccanggagggcggaaggcggctctgcggcaggaagccccaccccggaagtcggctggccatggcggcgccttggaggcgatggcccacggggctgctagccgtgctgcggcccctgctcacctgccggcccctgcaaggcacgacgctgcaacgggatgtgctgctctttgagcatgatcggggccgcttcttcaccatcctcgggctgttctgcgcgggccagggcgtcttctgggcttccatggctgtggcagccgtgtcccggcccccggttccggtgcagcctctggatgcggaggtcccaaatcgtggccccttcgacctgcgctccgcgctctggcgctacggtctggccgtcggctgcggcgccatcggagccctcgtactcggtgctggtcttctcttctctctccggtctgtgcgctcagtggtgcttcgagctggagggcagcaggtgaccctcaccactcatgccccctttggcttgggggcccatttcacagttcctttgaagcaggtatcttgcatggcccaccggggtgaagtccctgccatgctacctctgaaagtcaaaggccgacgcttctatttcctcttggacaaaactggacacttccctaacacaaaactctttgacaatactgtgggtgcctaccggagcttgtgaagaaatgacctcaagtcactcacctctccaagaggaggataaaaactgaaccttggggagccaggtgtgttggttcacacct

SEQ ID NO: 436504 - DNA, 350 bp, Homo Sapiens
  misc_feature (1)..(2): n is a, c, g, or t
  misc_feature (5)..(5): n is a, c, g, or t
  misc_feature (45)..(45): n is a, c, g, or t
  misc_feature (47)..(50): n is a, c, g, or t
nnggntttttttacaattctccgcagattttattaattataactntnnnnttcagacgtcctgccatcttctcattcagacttttcttagcaaaggtagtccatggcaagtaatgaattcccagtaactaggtctgtaacagaagtaaattctgtttttatgtttataaactcaaaaagtaacatgaagtgcaaacacctttagttccttcccctcggtaaccttcttttgatgaaccagtgtgcagcaaaccaggatgagttggatttgggtgggatccacacagtcattttcaggcagatgagacttcctaagttctatgtatagattcatattgtcagttattttat

SEQ ID NO: 436505 - DNA, 662 bp, Homo Sapiens
  misc_feature (550)..(550): n is a, c, g, or t
  misc_feature (569)..(569): n is a, c, g, or t
  misc_feature (583)..(583): n is a, c, g, or t
  misc_feature (588)..(588): n is a, c, g, or t
aattagggtggagaaaatttcgcaagggccgtgtgaggtccgttggaacccagggggtttctcgcttagggaaaaacaaggttatggggccccatgtttcccctctaccccttacggggggccccggggcgcgcaaacggaaatggttctaggaaactttttcgaggggccgaggccgggccgacatgttttttgggcgtgctccgtcgtggcgccctatagaaagttgaagttttttattaggaaaaagacattagaataggaaattacgtagattacctcttttttgatgatcctctgcaataatagcatttaaaaatataactactttcctctgtataatatccgtacataattgctaactttcctgaatttccaaaacttttgtatttaatgactttcaaatacatgtccaaggaaatgtttcatttaccattgcaaacattgatttattaaataaagtagaagtccaggctttatgaaaagtcagcattacatgttctgcacagagaaatcaagaaaaaaaatttcctatcaatcacagatagtntatcagcagtctttgtganagtcttccaactanatatnttcattaaagaaatgaagtgggagctgcatttacagatgaggctcgtgctttagccattctccgaaccagtgct

SEQ ID NO: 436506 - DNA, 507 bp, Homo Sapiens
cggggatacatcatttcatttcccttacacaaaaaggaataaaataagtggcatacctgaatggtatacccttataccaatatgtgtatttcattaccaaggtgagatgaaacatttttatttaaaggtgggaaaaataaacacttaaaatataatgttttgctatatagtttctaacttcattccaacataaacaatttatcaatatatactgtattcaaaaaacaagaaatactactcccatgcaatatttattgttccaacatgaaacactaggtttatatttttaataaaactgcacatctgtttaatttggttaactgaaagaaaatgcacacttaaaaaagatgttatatccttctaataatgcaagtctatatcaaaggcacttcagcagagcactaactttaaccttttccaaatcattttgagtcatgctgcttttgatgtatctttctgtgtaagaccaataagaagccttctctaattgttatgagccttatcact

SEQ ID NO: 436507 - DNA, 2135 bp, Homo Sapiens
  misc_feature (28)..(28): n is a, c, g, or t
gttgaaaaatatagacatttattataanatcaattggtttgataagaaagcaattatttaaaaagtttaatacaaatacatgttaagtgtacaaattaggattcttttgggcaaacaagttgttatctaaagaagaagcaaaacctccttaacagttgtaataaaacctatgcctgaaaagttggtggctattacacggaaatatttatattgtgttcttctactcccaataactacttttaaagaatcaggataacttaaatagaatatcaaaatataaattataaataattataaaaatatatctgtacaagatttttattgaagacacatcagtgcataaatgcctaaatatgaggctataaatacagcaaaatattcaagaactatgttatctcaattttagaaaagggaacttttctgaagagaaatgtttgaagttaaggtactaagatttcactaatttcacacattggtattaccaacaaattgcgattaaacagaaatcactcttttagacaaaaatatttcccgataatatgaaaaaactggagtttccaaattacaaaaatgttgaaacagaaaggtcagaaaaaacaatgtgaaattaagaaagtatttttgagggtttctttttcacatagctatgcttagtctgggtaaatcctgcacaggcatgttttttgtggcgtccagttggtcatattcctgtatgagtgctgataaagatgacacagcttctgtgaaacagctttcttccatcccttcaacttgtagatagtgatgaaggtgagcctttttcttgtagagcctcatgaatctctctttcagttccatgaaggtgggcttcacacatgtgttatttgctaaagctaataacgaatgagaatggcccacaggaggtacggaacacaggctggtcttccagccttcttgattccaggagacaaattgtagagatggttttaatctttcaatatttctacgaagatctgaaatttgtacatttcctctaaccatgagtgcacaggcgaggtaaagactgtgtttggggtctgcccgaagcagctggtgatctttactaaaggcatctgaaaacatctgatccaatcttctaggaggaatgttaacatctgtcagtgtatacagaggtgttaggcttgacacgagataatgaagttgaggaaaaggaactaaattcatgctgatttcattaaggtccatattaagggacccttcaaatcttgcagagcctcgttaggttgaggagcaaatttgccacaatgttattcattgcatcaaagggcttcttatgctgcttttttaaagccccagaacttgaagtaaccagactctttggcttcacagttgtacccaactttccagaattcaccatgaggtcgattttgctaatgatgtcaaataaagattgattgtcaatgggcaatacacagtctgcatgctcattaagttccttcattgccaagatgctattataaggtgaggttatgacatcatcctcaccagaaggataaatggaagtcacaaatctgtatacttctgggaattcgtcttcaagcacctttaaaagaaatgtgccaagtccagatcctgttcctcctcccatggaatgtattataaagaaacactgcaagcaatcacagtgctctgccgactttctgaatttctctaaaatctggtcttggtaaagactgccgaaaactttgtgacccacggcccaattatttcctgagccagaaatatcagtgatgagctgtttcgtatcaaatacatctctcagtggtccctgcagaatttcattcactaccccttcttccatatcaatcaagactgctcgtgcttttaaagaacatatttttcccttggaaatacttccaccatcaccaaccactctggtgtccacatttctaaagaagctgcttattgcctcatcataaattcctttctggttgaccgcggcgtgctcccttagtgccaggtcccagaagcagcagccgatctggtttccgcactggccgacctgtacgaccaccgactgggtcatggtggtgcgccgccggctccgggagcttgctagcccgcggccgcttctgcattcccccagcaacggcccc

SEQ ID NO: 436508 - DNA, 987 bp, Homo Sapiens
  misc_feature (284)..(304): n is a, c, g, or t
caggtccgccgggacgacagaagcgttagagaggcacaagagaggggataaataccctggggacagcacaacatcgggccgcccgcaaagtgcgctcacctcagcgaatagcgcctgacagggcaatctcctagggggacacccaccagtgtccccaaagtgctcaaaacactcctgagaaggacttctgaaaggttcggtaaaaggaccttaaggggaccaagagaaaaaatttcgccaggataggtctggtgacttcttaagagggcttacattaagaactnnnnnnnnnnnnnnnnnnnnntagtgacataatgtccacaaattgtaagataaaaaggtgtatgtttatatactcaaactacacaccctccgaatagttctatctttatcaagcacaggtctaaaaacaagacttacgtttgcaaaatgaattcccacttatcctttaacactgttacaggcaaaatgagtgaaaaattttacctcctcccatggaatgtattataaagaaacactgcaagcaatcacagtgctctgccgactttctgaatttctctaaaatctggtcttggtaaagactgccgaaaactttgtgacccacggcccaattatttcctgagccagaaatatcagtgatgagctgtttcgtatcaaatacatctctcagtggtccctgcagaatttcattcactaccccttcttccatatcaatcaagactgctcgtgcttttaaagaacatatttttcccttggaaatacttccaccatcaccaaccactctggtgtccacatttctaaagaagctgcttattgcctcatcataaattcctttcttgttgaccgcggcgtgctcccttagtgccaggtcccagaagcagcagccgatctggtttccgcactggccgacctgtacgaccaccgactgggtcatggtggtgcgccgccggctccgggagcttgctagcccgcggccgctacaccgct

SEQ ID NO: 436509 - DNA, 625 bp, Homo Sapiens
  misc_feature (541)..(541): n is a, c, g, or t
ccgctctagaactagtggatccccctttggatccaattttcctgagatattgaaatagtgaaatcaccaaataaatgatatgaatcatttaactatacaaatgtatagttaatgctaacatgtatttattttcatatatgttgatcctgagtgaaatttaatttgcagaatgctttatgagttatgattactggcaaaaccttcagagcacttgtgacacatcattataatatccagtagctaacattagatctagcttattatttcagaaattaatttaggaaataattattaaaacatgttggctacagtagcactttactgaagtagtattttttggtatctctagcctagaatctcgtgtgttagttttaactgttttgaaaataataagtaacattaacaaaatgttgatatttggatcataaccgtaacatttgaatttatgcaaaaaaaagaccagaaatgtcatttcaaatgtaaattcctgaatgtaccattaaaattattttagttgctatcagtttgtttatatactatnttatatactattctaaaatattttactctgcctgatactgaaagacagcatatatttttttcaaaataaagttttaggaaattt

SEQ ID NO: 436510 - DNA, 604 bp, Homo Sapiens
  misc_feature (350)..(393): n is a, c, g, or t
  misc_feature (398)..(398): n is a, c, g, or t
  misc_feature (489)..(489): n is a, c, g, or t
  misc_feature (510)..(514): n is a, c, g, or t
  misc_feature (539)..(540): n is a, c, g, or t
  misc_feature (591)..(591): n is a, c, g, or t
ctctattctttctgcctcctagataagaactattagaattttccaaggatggaattgagttcacctaacagcatccaatacaaacacctcactttgttgaatggcaatgaaatcacctaaaagaaacacaaatcctataagaagtcctcttgagcaccctcttatggataaccctccgtcattgatgctttgtgttcatccttattacaactctttacatgccactctttgactataggtgtgattctagtggtctctggcaagatggcacagacaaaagcatgctttgttcctgtggtattctaaatgagaaattagattcatgagaaaaattgtgaccatgtaagaannnnnnnnnnnnnnnnnnnnnnnnnnnnnnnnnnnnnnnnnnnngaaanaaagtacttggacttatatgcaaatggtaatactgactcattatttagaatgtataatgaataacctgacaaaattacaaagttgacctgnaaatgcataattgcaatgggnnnnnttaatatatattctcaggtaatggnnaatattaatacaatagttgttagtatacaagttgttttaaaagagttaatnaaatatttctaag

SEQ ID NO: 436511 - DNA, 163 bp, Homo Sapiens
gaaaccagctcatgtttaattgtggcattttacaaattgtacaggtattttgacatctgccccccacatttagtctctcaaaatgacagtaaaacatccaatcgcaggtttaatacattgaccccttctgtcgtcttctcgcagccgtatagtagtagtaggc

SEQ ID NO: 436512 - DNA, 477 bp, Homo Sapiens
  misc_feature (426)..(426): n is a, c, g, or t
  misc_feature (429)..(429): n is a, c, g, or t
  misc_feature (434)..(434): n is a, c, g, or t
  misc_feature (441)..(443): n is a, c, g, or t
ggaaagcctgaagagatgagataggaggaaagacctcacagccagatctgctgggttttgaggagtgattttctttcttccccttgaaggggaaaaagctattttcattggtacatttaaagtcccccaactatggggaggtaccaattctggacaagtgccactacaacaacactaaacctgaacttttcaactccgttggtggtgggaggcagcgggcagaaatttactgttggccactgccaggtctatttcatatttcaaaggaatattgggtgctgcatataggaactgaaggggtcaatgtattaaacctgtgattggttgttttcctgtcattttgagagactaaatgtggggggcagatgtcaaaatacctgtacaattttaaaatgtcacaattaaacatgagctggtttcccaaanaanacaanaaggaannnctaagggaataaatgggatatataaaaaggaaga

SEQ ID NO: 436513 - DNA, 502 bp, Homo Sapiens
  misc_feature (151)..(217): n is a, c, g, or t
  misc_feature (443)..(443): n is a, c, g, or t
  misc_feature (447)..(447): n is a, c, g, or t
  misc_feature (478)..(478): n is a, c, g, or t
  misc_feature (498)..(498): n is a, c, g, or t
taaaaagaaaagaaacgaaaacaacctctatcttctggactgtaatagggtgtcacttcatctttggtataaaataggccatccataggctgaatttgatcacaactaggaaagactacagaaattgtcaacaatttctctatctattgcnnnnnnnnnnnnnnnnnnnnnnnnnnnnnnnnnnnnnnnnnnnnnnnnnnnnnnnnnnnnnnnnnnnaatgctcttaagctaggttttgcaatgtgacaagcaaggctgactaaaaactttgtaaagctcataaaaaagactgcagataaaaagcactaatgcttttgctagcgatcacgctttgtaaattaaaaaaatctgcattctgccccccaaacacgcattatttctaatgcagttgtttttaaaccaaccttaataactttactgtaaaatgttttagccttttagnatgnttcatgtcaacacttaagacaaagttcatgnaaagtcccagcattttccantttt

SEQ ID NO: 436514 - DNA, 787 bp, Homo Sapiens
  misc_feature (23)..(23): n is a, c, g, or t
aggggggaaaccaagttcctctntccagtccacatatgcataagggaaatctccaaaaacccaaaggcccatcaggtgaaagggtgatttctggtttttctgggtagaatacccggacatggtggtgggcctggctgaacctgaggcattagtattatctgcaaaggagcatcaggaaccacaacaaaaagcctcataagttgagcataatgaggtttcagccctctaccttgagaggatgacagaatatataagggcatgtcactatttagggcttttaaagctgattcctttggcccacttcccattactttcattactttgtcaggcccagagcacatgaatctccgacctcgagagtcttcatattcaaagcccacaaaagctcgagctatgtcatctcgccgtcttcctcttcccattacaaccgcacttctctttccaggaatagctttatttggagcaggccaagagtttgtgtctaagtctccttcatcttcagctctagtcctgatgacaatgtcccaaggcataagataatttgttcctggaataaagccctgttggtccaaacctgtatgaaagttataagacttagcagggcctagtttaaccaaagaccagctggagaatttgggtaggagacctttagggcaatttgaatgtagcatgcctgggagatactcaactgtggatgcctgtcgatcaacgaagtttggcctcttctcagttttcacttctacttgaccatgaacttctggattatctcctcctgcttgtggatcag

SEQ ID NO: 436515 - DNA, 439 bp, Homo Sapiens
atattcttttctagaacaaccaatctttattagaaagttgtagtcacgtttacaataaatatcaacaatataatgaaaaagtagaacaaattagtttccaaatactgaactcctgtaaccaaaacacattttggatttgggaaaacacagtaaacacataccaaaaacacagccacaaataccaaaaacaaaaaccagctcaagtataggattgaactggctggaaaacacttattgtgttactgccttaagaaccccacggagcaccttgtagctcattaactgcacattttccttaggggggaaacaaggtcctctctcagtcacatatgcataaggaaatctcaaaacccaaaggccatcaggtggaagggtgatttcttgtttttctgggtagaataccggacatggtggtgggcctggctgaacctgaggcacc

SEQ ID NO: 436516 - DNA, 421 bp, Homo Sapiens
gttctaccagtctaattttttatggtcctactttttcagactacttcttggctacttctgttcttcagaacagcaaccgcaaacacacactcaaagtctatggaccactctacataagcccaaattaaacacaatttccatgtagttgaatattacagaaagcaattcaaataaaatcgaaataaaatcagaggatctgtgttcaacagacaaaatccaaccaaacccatacaatagtaaagaggataataacaagtagtttcacagatagttaactatatctaagccaaatggtttttaggaaacctgtatgaaaccttttaactcagtgaactactttctagtatttgacaaaatcatttaaaacaataagctttgtctccatgattatacacaatcatggagacaaggtagagccgag

SEQ ID NO: 436517 - DNA, 1090 bp, Homo Sapiens
gaaccataaaaatgtaattttaatgatacagaaatagtatatgtacatttctttccacagcagcacttcattcatctctaaaaaatttaacaaaattaaggctaaatcagagcgagctgataggaaggggtattctatgtggtggtcttcttaaagaatgttctcataaatataggatgttctgcagacaagaaataaaaataaaacatgctgaacaagataccaaaaatgggaaatgcagtagaaaatgagcccctttctaccaatctactaagaatcccaactcccctgggaagtttcagatgggatgtgagttcttttaatgaatgtttatgatctgatgctaagactttctaaaattaaaattccacagtactaggccattttataaactaaaaccaagggcagttgagtctccaatataatccctctagaattttttaagttaaagtggacaatatttgaaagtactaattttatctgaagctgtggtgcttgaaaggacaatccctccatttgtggcccttctccctaacccatgttataaaaataaatgaagactttaaaacacagtgaaataaaaatgccatcactgccaaggcaaagggccaggaaatcaaatgtggttcttgagtaacctggctacagagactgctggatgctacaatcagggaggaggaggaccttcctttcccactttttcattatccttggccacacttgctggttaatgcattaccactgcatcctgactcaagagaaaaccttcagctgctccaggattcagaataagatgaacagtctttctcccctcctccgacctcttctccccagaaaggtctgaaggggaacggagaagggcaatgcgaacaccctgcaggaagcctcagtctaaaaccctagtctctgtcaagaggggcaatcccctgacacccgcagaatcctggtcttcataaggccccacacacatctgctttaaggggtttacattccttcttcctctgcctcctcttttgcagtgagttttcattttaacatcgctttctcctccccgactcctcacctgcttgggggagcgatctacagtgca

SEQ ID NO: 436518 - DNA, 894 bp, Homo Sapiens
  misc_feature (552)..(568): n is a, c, g, or t
  misc_feature (648)..(694): n is a, c, g, or t
agcggattacaggtgtgagccaccacgcctggcctcaagcctggtctgaatatctatatgcaaatatgggacactgacttcagagctattcatttagctccagtcatagcaattctgtagtttcctcacatttactgtgtctttgtccacaaatgaaatatgttgtaaggtcagtgttaatttcgtgagacgatatagatgaacacacttgctcattttttgaaataaatatgcagatttaaaatgagtggcacatatatataaataggttattgaatgggtattctcttttccctttaatttaaaaagtgatatttatttattaaaaggagcattggtagaattattggtttatagtatcttctttaataatccttacaattacatatactaataggatgttaaaattatcatcgtgtttcctatttgtgtttagattcttataaagcatgagatgagtaatcaagggaagggtcgcatctccatgtttgccccatgaatagaatccatttgacaagccatttcatttcctttctggagaaagggagttgnnnnnnnnnnnnnnnnnacagcaaaaatttaaggttttattgggggagggggtggtgctacttcctctgtaacatgtttttaaaactatgattatgnnnnnnnnnnnnnnnnnnnnnnnnnnnnnnnnnnnnnnnnnnnnnnnaatatccttccccttaactcttaaggaaagtcttctttcctacagggctgtgaattaaggaatgggtagcgtttacatttaagtacaccaatgtctgcccaatttcctaatgtatacatttgttttattttaaattattttttgttcttaaaaatactagaagatgaataacttcagtagcattactataatactgtatg

SEQ ID NO: 436519 - DNA, 431 bp, Homo Sapiens
  misc_feature (381)..(381): n is a, c, g, or t
  misc_feature (404)..(404): n is a, c, g, or t
  misc_feature (416)..(416): n is a, c, g, or t
taggtaaaagatttttattcttatttaaccatgctgcatgtatacatacaataccaatatatacaacttgaacaaatacaatttatacataaaatacaatgaaagcatggcttttgaaactgatgcaacaaactgtaatttgtaattttggccagcatacagtattatagtaatgctactgaagttattcattaaattagtcagactacagtataagttcaaaggcactagaaacatctatgttttcttctagtatttttaagaacaaaaaataatttaaaataaaacaaatgtatacattaggaaattgggcagacattgggtgtacttaaatggtaaacggcttaccccattccttaaatttcacagccctgttggggnaaggaaggactttcccttagggngtttaggggggnggggtttttaaaaac

SEQ ID NO: 436520 - DNA, 512 bp, Homo Sapiens
ccaggagcaggcagtgggcgcaagtgctttattcaaagcgaggggtggggggtgagacccgccagcaggggcctggggcaagaggcggggccaagctcacacagggagaggggcaagaatcaattctgttcttcagggtcacaggcagcaggcaagagagttggggggccgggtccagcgcccactgtgccctcagggagcctccccagggcagcattgcatagtgaccagccgactggccttagcctgacctgcgctgagtgggggaggccctgcctccctgccgggcacctttggggaaggggtgcgtgaaggcattggcaggccctgcaatatgagccgaaagacccctggacccaagggggaggctggtcaggggcagggctggggctcaggcgtcctcaagagtccacagagaaaagacgcaagacaaagtcagacgaggcctatagcaaacccactcggtccgctacaaagaacatgagatgagggctgcaaagtggcaaagtggc

SEQ ID NO: 436521 - DNA, 931 bp, Homo Sapiens
atgaagagacctgtttattactgataacacttcatttggctaaaaccacaagaaatccacacacaaatacataaagtgcaaattctcacaggcagtacttataatacaccctggtgtttttgtagggaaaaatgagaagatgttgacagaaactgttaaaacaagggcacaattttgaactactgctacacactttagtcagaaaaataattcattcttgactgcatatattttacctggcatattcaatgaggcatacaaagagtttattctagcctagaacaacaaggcctcaccatacatagaagcagagtcttgcttgagtggctcttgtaagatacatgatgaatcataacagtggacaaaaacataccaaataggatcaaatttgttgtgactcacttggaaggtagtgctactaggctcaaaatgacacttagactagtgatattaagtctacatagaccccatttctttacctttctggccaacaccttgctttgagtgtaaaataccaggcattatatataatttccacagagagatatgctttgctctctccaaagaaactgagtatttaaggggatgtctgcttaataaacattacattataaagttcagtgatgggacttcattgaaaaaactgaattagaaaattcattttttgattgttccttaaactatttgctacttttaaaaaatcccttaattcctagtatcagcaattaaacactctataacaggtactgaactaggtggtatggatatgaaaaataataaaccacgattcctactctcgggactgagcatcaggtggtcctttttagtcaaggaatgccaatagtaacaaaactgtttcaggtcagtttagtttggcgttaatccttctgaaggtcagattccaagggcaggaaatagtctgaatatgttc

SEQ ID NO: 436522 - DNA, 293 bp, Homo Sapiens
gtttattttcattctttccaatgtccacattctagtaaatttgaatattttaatccaagtttatatactatttaatatgcttgtatagtttagtattttttagactcaaaaaggtttacagaaagaagaaaaagatcaacatgttattagtcatttaaagatcattttgaaatctttgacctttatattttaatgaataaaatattagtagttattagtataaaataatttatgtcttttggacttagcatccagtatttcttttttaataaagaaaataattattctcttgc

SEQ ID NO: 436523 - DNA, 1089 bp, Homo Sapiens
  misc_feature (1057)..(1057): n is a, c, g, or t
gggagactcacgccgattctctctcagcgtagggctgtgagggcgcagtccaccgccaggagccttccggtttctgcgcggtgcgcgacctcgtcccgaagcctggggatacaccctctcgagagcccgctgtcgccctccgttaaggtcgaacccctcacagttgctgtgggcaactccagcccaacattccctcgctctggttctcgccccattgggaaactcggccccacgcttcccacttttctggatgaggtgtcccctttctccccactaaaatgtcaaataacctacggagggtcttcctgaaacccgcagaggaaaattcaggcaacgcctcgcgttgatccataatgagatggcatcaacatcagataaaggtgcccaaggaagaaatgacaagaaagattctcaaggaagaagtaataaggcattacatctgaagagtgatgctgaatttaaaaagatatttggccttactaaggatttgagagtgtgccttactcgaattcctgaccatttgacctctggagaaggtttcgattcctttagcagtttggtaaagagtggtacttacaaagagacagagtttatggtgaaggaaggagagagaaaacagcagaattttgataagaaaagaaaagcaaaaactaataagaagatggatcacataaagaagagaaaaacagagaatgcttataacgcaatcataaatggggaagctaatgtcaccggttcccaactcctaagcagtattttaccaacttcagatgtgtcacaacataacattctcacgagtcacagcaaaaccagacaagaaaagagaactgagatggaatactatacccatgagaagcaagagaaaggcactttgaattcaaatgcagcttatgaacaaagtcatttcttcaataaaaattataccgaagatattttcccagtgacaccaccggagttagaagaaccattcgagatgaaaaataagaagacttaagcaggtgctgagagagaaagagcagctcttgaagaaatgcgtagaagatgcaccaaaaataantctcctgtaagacttcagtgaatagctgtttt

SEQ ID NO: 436524 - DNA, 1002 bp, Homo Sapiens
  misc_feature (689)..(689): n is a, c, g, or t
gtttgaaaagtttcttgggtaacttccatttttttccctgtttttcccggggggttccttaaataccggttgggcatttgggagggcctccaaccattctagagtactgggtggtggcagttgcaagtatcttttgctgcactaaaggaggcaatgatgacgctggtacagatttcacttcagcatgggctggaatctgtaaatgatgcccagaaggcaaaactggagacttcacagtcactggaagactctgggtattaactacaataaaagatgagtctttttgtgttgagggaggaacagcaaatgtttgcatggtgagtccatcaattttcacaccatgactctgaactttagaaactgatgaagaaaaatttccagttcccacagaagtaactctacctttttctgatgtatctactgttcttgtaagaaaatagtttgaagaactggctggctgaaaaatgggcaattgaactgatgcacttgtggaagagctggaaatctgagtctgaaaagtaacttgaactggttttcctgtattccctttcaaagcatcagacatgactgaagattgaactagtggtataagatttccagaagacttaggaattggaagtaattgcagaagattttttccatccgagccaatcgtctgaactacttggtacatgcagcctgaaacgcanacgcgaggcgttgcctgaattttcctctgcgggtttcaggaagaccctccgtaggttatttgacattttagtggggagaaaggggacacctcatccagaaaagtgggaagcgtggggccgagtttcccaatggggcgagaaccagagcgagggaatgttgggctggagttgcccacagcaactgtgaggggttcgaccttaacggagggcgacagcgggctctcgagagggtgtatccccaggcttcgggacgaggtcgcgcaccgcgcagaaaccggaaggctcctggcggtggactgatcccgggaattcc

SEQ ID NO: 436525 - DNA, 471 bp, Homo Sapiens
aggggtaaatattcattttaattttttttggacaaataatttcaaatataattttaaaagaccaaatcagcattacagattccaatttaaattaagcttaataaacacaataaagcctttgaatagttttattttaaaatgatatgacacacttgctattaacatataaggcatcaagtgccctaagacagagctcataaccttaataattgcccttgaaaatatcaaaaagcacataatcaatgtcaaattatttttgtttggcaagaaaagtaaaattaacagcacgatgagaaccacagggtacaaactctcaatacacaatatgtaataattaatctttctttcttatatgacatttgtttggagcctggctaggaagcctgaagatggcagtgaaaaaatagggagagctgttcctgaaacacaggagagttacccaaatttgaaacaaaggaatatactctccat

SEQ ID NO: 436526 - DNA, 387 bp, Homo Sapiens
attctcacctctgatttattttttacttcatataagatacagtgtaattcatttttactctctctagaggtttctcccatctaaacagtacaaatcttttatggacagagtactttaaaaatcaaagtgtcagagtctatgatttgtagtttcatgtgaaaatactaagtattctggattccccaaggttaaattatattcagtataatttttggtaaaatatattttgtattttaagtttttggaaactgtttattcatatatggtgtacatacataataactaaaagcaggaatgttttatttcattaagatgtatagatctttttacctatcattttggttaacaaatttactttaggttactagaactggactcgttttagaa

SEQ ID NO: 436527 - DNA, 649 bp, Homo Sapiens
  misc_feature (82)..(83): n is a, c, g, or t
  misc_feature (145)..(145): n is a, c, g, or t
aatggatatgttctgatggtttaattcttgagccagggccagcaggcattaaaattttcggccaattgccttgagagaaaanncttaggaaaggctgacagggaacgggtgagagaagacaccgggattctatcgggccacactnaacaaatattaaaggtcaaagcaatatctgtgcacggctttccttttgctcctccagacaagtgaggctgttggtatagtcctcttcaccctctgcatgtagcttcaccctagatcagacttttgtctcttgggtcccagatggcacaggagcactgcatgcttgttttctagagcccagccagtcatgggtgctagcctagtctccacacaccagcaagtagaacccaagtgtattgtataaatatttcctgagtaccagtaagagaatgcattcttttctcatctaggccaggaatgttgaaaatgctcagccttacatagaaactcctagattttcactaacgcatttcacaaaagtaaataagtatttcatataattcagaggatgtttaaattgtcagcattttaataaatacttgcattataattttgtctcttttttaaagaaagtcatacttgaatataatttattaaacgttcaatggagtatatagtctatttg

SEQ ID NO: 436528 - DNA, 489 bp, Homo Sapiens
  misc_feature (2)..(2): n is a, c, g, or t
  misc_feature (6)..(7): n is a, c, g, or t
  misc_feature (12)..(12): n is a, c, g, or t
cnactnncccgnccctcttgttctttcttatctctctattggcttttaaatgctcctctttgtattaaaatttttgtggttgctcaagagattacaatatgcatttttattctacttaatattgagtcacttaatgtaaaatataagaaatttggctttgtgcaatttcaaattctttttcatttttgccgttgttttcaaatacttcgcacccatgtacttacaaaccccacaatataatgttttagttttttgctttaattagttagttgtactcagtctaacattgggtgtccacgtttcctctgcctattatggtcaattccgggtggcagccacgcatcttaaactttaattctcaatggagtccctaaacccgagattagcaaacttttgctgtgaggggatgtatggtaaatattttaggctttgagatggtttctattcacctctgccattgtggtgtacaagcagctatagcacctaaat

SEQ ID NO: 436529 - DNA, 2531 bp, Homo Sapiens
  misc_feature (49)..(49): n is a, c, g, or t
aggggaagggtgaatactagggcggacggcgagcgtgtgcaactttgtncccacaatagagccggttcgtcgggtgaaggtgtaaatatccgtctaagacgcgtgcagccaattaggtgggggtggactgtcttaagcctctttttgacgccgcttaaaaaacagttgttatgttttgtccctggtggcgggtttaaaatagtttaggtgagggatagttgtttccacagttgtggccgccccccccgggaagggtaaggttccctttccaaagaaggttcccaaagggtcgcagatttttttccaagttccggagcttttataaaaacggccggccccggcccctaggttttttaatccggctccccctatttggggcccctttttttcaaaaaaacacggggtacgggttaaactttgggccccccggggggaattctttaggagcgggcccccccttatggttgagttttgttcagcaaccagagcttggtggggatgtttggatggggtttgttgtttggttacataaactactttatttaaataaaaccaggaaagaccctttcccccttacacaccagcacatgcacacacgcacacccacaccctccctccctttcggctgtctgcccatggccacctcaaaccccgaggttctcattgtgaccaacctccctcaacctgtagacccccgtgcagagtccagttgcccacgcatcccggttgctggcagaacatgggcctagaaaagagcactccatcttcctggggtgggtcaaaaggaaggactggttctcccaaggcacccagatctggtgtggcttccctacaaactgggagcactgccaggcagctggagctgctccctgcggagggcagaacttttcaccccaagccaacccctccctgtaacaaaggaagtaagagggttggcagccaagcttcagtgtgccccgagggatcctgcagtaggtattttcagtttggggaagagcaagggagagcaattgagcaccaaattccctaaccccgtcctgcaggagggtgctgagtcagttcagcatcctctacccagaaaaagtaaacacaactgtgcagcaagagtgagggtgggaatgacaggggcctaagccttcaggacctcatgacttcacccccaacatgggccctcttagggacccactagcaccttggcaatgttgaggacccagcccagcggaaacaccatacccacaggagccagtctggagttggtgatgctccctatgttgacagtggggttgggtttctctccctgacaccagcttcctgcaggccctgtaagttctgctttggggcacacatcgcagagtgcctcaggtcatgaaagggaatgctgaagggaaaggtggtgtcttccggaggcacacagtacatcttacaggttacacacgggcaggctggagcaggacggggggcagggctcagcagcatacctagggtaccctccagagttgccttgggaaggggggcggggctggaaaccaacgggaggggtgactgtccatcccctccgacgggagtactcaggcccagcacccattttctctgatgagcttcccagtgccttctagaccaagttccctgagggaaaaagccaaacagatggaaagagagggagcagaaagggaaagcaaagggtcaatgccctgcagatcgtgatgagctggcaggcagaggcagacagagcgccgagggcgagccttctgaatgggtaaggcaaagagagccgcctgctgaggggaagggggaggctgtgagaacgccagggcaggcacagaggactcgaacacagctggcctctcccagggaagcactggagaaggggaccttcgggaagacgaggccccagaggagagggcgtgagaagactgtgggccccaaccggcccgtggtggcagattcaagccaggaaccctggcccctcggctacaggctgacgctgcgctggtgccgaccccccacgggctccgccgtcgctgccccggcgccctccactccgcgttcccagctcttggccgtccagactgacgtggtccgagaggcctcgcaagtgctccacggagtcgcacttctgcaggtctgaagccaccgtgcgcaggctcagcagactcagggtatcggtgtcgggggcggggccgggccccaggctgctgccctcctccagccccgcaccctcggccccctcaatcccgctgtctccgtcctccatgtcctcgggtcctgcctcggcccccacgggggaggagcgccgagggcccagggggtggggaggcagacccccgcggcgccgtgcgtgaatctgctcgctgatctgctccaggttacgaagggccacggagtagcgcgtcttggcctgagctacctgctgctccagttctgtcaccttggccttgtgctcctccaggatctggctgaactgggccttgagctcaaagtagggccggctcttgccgatggccctccggagggtcttctgcagggcttgg

SEQ ID NO: 436530 - DNA, 2785 bp, Homo Sapiens
  misc_feature (2376)..(2377): n is a, c, g, or t
  misc_feature (2381)..(2381): n is a, c, g, or t
acttcacttgtttctttttatttggtgttggatccaggacaagggcagtggggaatcgaagcaggggcttccctagcttcatatcccccaggcccctgcgcctctggaatgtaccaacaaggggcaggggtttcagggggctcagcctcttcatggggcaggcctcagccctgggtttgtcacagtctggccttgaatttgcctttggccttgaccttccgacaggtgctaggaattgttccgacttcaaagggcagaggcaacaaggcacttccagctgggggcctcggaggcacaggagagcaggagcctcggtgtgaaaggaggggagaagagggagatgatcagaagtctgtggaggaaggggcttctgagggagaccagctcttcccttggggtgccagccagcctgggagctgccctctgcctgtgccctccagccctgaccccgtgctcagcactgtccactgggtgtgagtcacaggtcgaggcccacctttcttggcttcaggatgctgggtgccaccctgaaatcaaggttcggtgggagggaaatgaagaccttagccgtggggtagagtcctcaagggccttgcctgtggtcgacaggggctttagtgcccaccagcttgctgtgctgtcgtctgaggacctggccctggtgtcggagtacatggggagaaggcaggctgggccttggtgtggaggctggggaagtggtgacgggctgcttatagatgagctcaaaggctcctgtgtcacagttgcggtccagcctccggtcaatgaccacgcgcagggtgtcagcttgcacgccagcacagagccgggcagtgactgctgtggagggtgccatcgtggggctggcgttgatctcaatcagccagggctggaagtcctccccgaacacgaagtcagcgccatagagctcaaagctggccttccgacactgcacggtgtcctgggaggtctgaagtgcgtggatcacagcatccttcatgccaggcacgatgatggtggaccaagcatttggggcacccatctcctgcaggtgggcctggaacctctggctagaccacatgttgtctggcggaagcagtggatgccgatggcatgagttctccaggtgcttctggatggagttgttgcacaggtgcactgagttgtccaggttcttcagggagaagggctgcgtggaaaagcggatatagctgtcgcggtagaaccacacggtaagtgggttccagtcagttaccaggaaccactgtctgaggtcaaacttggtgccaaagatgaggaggggccgctcaatatacttctgcaccacccacttgccgtccttcatcaccacggggttgccgttcaccagcttcagcatctcctccaggtggtccatgcacatgatgcctcgtccgcgggacttggctcctggcttcacgatccagatgttgcgatccccttccatgtctatctggggtaccacggcctgcagctgctgcaggatgtcctcacagcgctggacctgagtgtcgaggtgcctgagttctgccccttcgtggaccacttggtagtagcgctggaggaagagggaccagccctcgggggtgaggtacagcggggcctccaggtccttgtcgatgtccatgtgggccaagttgctaaggtactcctcgcacgcacacagagcttcatccacaaactctggggacaccaacactgggtttttctcctgtttcttgggctgcttgtctcctgaggcctcttcctctactgcctgaatagggtatgacttccactcagacttcaccaccagcttgagaacgttgcgggcagcagtcagccagaagtcctctatgaaggcttttttgtcatcctcagcccccaggcagtagcagcgtgggaagaaggagttggcatcaacctcatcaaaccacggcaaattccggagattgagacatagacccaccatcagagcatgtgttccatctaggtcatcaaatttcagtaaatcatcgaagtcgaacagctgtgatggctggaactcctcgtcctcatcttcatcctcatcctcagtggtgtcactgtcaccccatcgctgagctatccagatccttctggggtggcagcagggtggggcctgagcgatggaccatctttttctccacccagcccctccggcgcaagagacaccggatcaccgggtagcagccttggattgtaaagatcttcttctgcttgacagctctctccacgtagattttggcgtttctgagccggttcatgtgagacgccttggaggatcctcgccagaggaccgggaaaccatcttgcggagaggggttattgaggaccggggtgtgtgggggtttgtgggtnnaatnatccgaggcgccctgggcgtgggtgcctgggaccagcgtcttgaaggcgccgctgaggcggcgcgcaggggcggggctgcccgcctggcatctgccgcctgcgtgaccctcctcggactgggcggaggcagggccggcccatggcagcctcctgggtggacggaactcggagcggcgcgccgaggggaaactggtgcgtggctcgagcggctgcggcttccgcagccagttgcacaccgcgccgccctcctggcggtaccaggaggccgagccccggcgcccgggccccagctccctcgcgctcaggagcagtggcgcgtcggggccctgcatgcgcccctcgccgcgctcgccctcccagggccctgatcccgcgcccgccctcccagggccctgatcccgcg

SEQ ID NO: 436531 - DNA, 683 bp, Homo Sapiens
  misc_feature (466)..(622): n is a, c, g, or t
tttactcgtgggtggattagatggatgatggctggtggatggatggacagatgggtagatgtgaatcatacacagatgtgtggataaccagtaggtgcgtggataatagataggtagaagggcagataggtggaagggcggatgggtggaggattaatgggtgggagagtggaggtaaccacagtacttacctgaggcctcttcctctactgcctgaatagggtatgacttccactcagacttcaccagccagcttgagaacgttgcgggcagcagtcagccagaagtcctctgctcccaggccaggggataccctgctcagcccctaggcttgaggcctgttctggttccagaacctgatcaggacttgccccattttggatccagaacctgactctacacttttctgactctagagcctgagtttagaacttgctcctgtttcaggctggtcacggtggctgannnnnnnnnnnnnnnnnnnnnnnnnnnnnnnnnnnnnnnnnnnnnnnnnnnnnnnnnnnnnnnnnnnnnnnnnnnnnnnnnnnnnnnnnnnnnnnnnnnnnnnnnnnnnnnnnnnnnnnnnnnnnnnnnnnnnnnnnnnnnnnnnnnnnnnnnnnnngccgacgcgtgcgcgagcgcgcggtcgacgatatccaatacgccggccgtaccagcatgga

SEQ ID NO: 436532 - DNA, 634 bp, Homo Sapiens
attccgacgtctgcgtctgtagttttattccgtatctggctgggggagggtggtctccgaggtggatggagtgagggtggaggggacagagatggtccctgctcccacctccccgagcccacctgggaagctgcgtggccgggctgctggagacatcccgagccctgggggagacagaggtgtgggtgtttgggcttcatcttccaggtacaaggagatacatttcatcaagcagttcctgatttcatggagttctttgagggctcggctgggaggtccctctccggggggctccaagtgccggacctggtggtttctggaaggatcaaggacaagtcctgggagtttcaggcttcggcagtaacagtgtgttaattgcacttgttcgattttctggcagaagccaggagagacggggacagcgtgcttctcttcggtgaccatcccaggcgcccagaggtgaccagacttctgtgtggtctgggacagtgcagggctcaggcaggaaggaccactgtggtgaaaggccactgacaattctggtgaggagtagggtggcaggggttcagccagggagaggaggtggctgccttttctcaggccctgctctcaccctctgccgaattcgcacgag

SEQ ID NO: 436533 - DNA, 466 bp, Homo Sapiens
  misc_feature (12)..(12): n is a, c, g, or t
  misc_feature (338)..(338): n is a, c, g, or t
  misc_feature (341)..(341): n is a, c, g, or t
aaaatccctggnaattttcaggcttcggcaattaacattgtgttaaattgcaacttgttcgaattttctgccaaaacccaggaaaagacggggaacagcgtgcttctcttcggtgaccatccccaggcgcccagaggtgaccagacttctgtgtggtctgggacagtgcagggctcaggccaggaaggaccactgtggtgaaaggccactgacaattctggtgaggagtagggtggcaggggttcagccagggagaggaggtggctgccttttctcagggccctgctctcaccttccaaaggtctagggtacacagaactcatggattttggtctcgncancccaggggccacacagaaaaaggggttcaactggaagtttgcagcatctgggaaaggccaattctggcagaactggaagattccagaccaggggagaggcgtccagggagagaagagtcctgctc

SEQ ID NO: 436534 - DNA, 1097 bp, Homo Sapiens
  misc_feature (1040)..(1040): n is a, c, g, or t
  misc_feature (1075)..(1075): n is a, c, g, or t
  misc_feature (1093)..(1093): n is a, c, g, or t
catttacagctgaaccacgtcttcaagaaagaagccaaaaatatttccgtgaggtttttaactacctctgaatctgtcctactctaaatactaccggagtctctttgtaggttggccagtatatgtttttagtgaaatattatttcacaaagaactatatcacgtacctttcctctgactgtttcctggcatatatgcatgaatatggccattattgaactatcacttcagtaaagaagttaaacagtacttttctgaggtttttcagctacctctgggtcattctgtaatgtaaatgttgttaataagaatggtttttacataaattatgcaaaggttaacaagcagtaacactgcactcctcaaaaagtggcggtatgtaatgaaaggcccttttgatatccttgatttttcattgtgtatctgtttgggcacggtctatgtaacactagttctgcgtattagtattttagagtatctctgcctcccttgtcctgttgtttcttttgcccccttggaacacattggtcagcagttctaagagacactgcccacatgatggccattccctacttcatccttgctgagctaaattttatatttttgtgcatccttctcccagatgacttaggtggtaagtccagattagtcaaagctaatcatggaagttccattttaatgattctgttggggtgaacttgggagcaatgagatgtttgggaagtattgtgtagtacttctgggaaagatctccttgatacaacattgtcatgacatgagaagagactctgctgggctttttcatgtctgtaacatggtattggcttatcgtttttatctctgaagggcagtagcctgaagataacagtgcacaaggtgggaaaagccagctcagaggtgacgttgccgagctactctgctctctatacctgttctctactgggactttttataaccctcaataactgttttttatttggcttagggctgtctgatacttagagctgaaggcattccagctgacacagaggaatattttnctaagtgttatgttctatatggtaattagggggangattatttcttttcacangtta

SEQ ID NO: 436535 - DNA, 599 bp, Homo Sapiens
ataaggatgaaaacacagattacactttattttaaaactgaaatgaattttaatacagaaaatgaagacagcattttgcaaatttatcactcaaaggggtatctctatttgaggaaatcagcgtgttacactttgaaagatgaaatgttacagcttgtacaccaaaatgaagaagtgaaattgaattaaaagatgaaatggttaccaaggtaatgcaggtcaggggatcaaaggtgaagggtcacacattattaaaaagaaatccaaaaggacggctgcatcatgatctctcattagtgttccagcggtgcctctcttttggtaaacttgaacatttcggcagacattcaagcagctttttcggtaaaaagatttttacatgactactattgctgttcccatgatcatcttctataggtggcacggtgttgagaacacagtaggtgctagttccgcagaatacactttgggaaacgctcttccggcttgttttcggcagccatttcccctccgcgcgccacatcctcctcctcctcgcgaccgggaccccgagcgcgcgcctcgtaccgacgccgccgcccggataacacgttcgcgag

SEQ ID NO: 436536 - DNA, 254 bp, Homo Sapiens
ttttttttatttagtttggctacatttttattcgagcatggtcattttcaaaagaaattacaaattgaaaattcaataatacttttacaaagacaattcaggaaagatttttgtcatggtatcatacattgtatttaacagtccctctttttagctaaaaaacaagatgaagaaagtggaattttcagtcgaaaatacagtgttttcacaagatcgtatcaaaagttcccaaatttggaatttccagtaattgg

SEQ ID NO: 436537 - DNA, 837 bp, Homo Sapiens
ttgtaaatgacattacatcttttgtattatccaatacacagtagatactcagaatttactccaatgaatgcatgttaaaaggatttgtacagacacaacactcttactttcaaagagcagaggaacattttatatagtgaacacatacacactgtggcaatgtaaaactacttaaggaaggaaaaatatccccctccccagccaggtactgagacctggggctaaaattttttgtcagtcagcccccatccccatcccttatcttcgagtgaccttaccaggaaacctggctttggtggaaaggagagctgtggggcttggggagcctgatgccttttcttttgggaggaaaggccacctgcacaatccacaggacaggagtggccagcagctatcctgagctgaggctccagaagagttcagatccaagagagcaagggatgaatggaaggaaagtcccacccaccttcatgtgtaaagtgattggcatttactcaaatctaaatctactcctctcctccctgcaatataccattgagcatgtgccagagtaatggttctgaacaaaagccaacacagatgtcagcctgggggcactctcagcctaaggaagcccctacagccgagccctcagccctaatgacttaggcagtaggttaggcaggagatgtagagttggtctggctcactgatttcactgtggaaatcttctactagaatttgcaaagactagatattggggaaaggttcattgatcttaagatcccaagacacacagcctagtacctaagaattttagtatatgtgggagacagaagtggagaaagctaaagaatt

SEQ ID NO: 436538 - DNA, 448 bp, Homo Sapiens
  misc_feature (358)..(358): n is a, c, g, or t
  misc_feature (376)..(376): n is a, c, g, or t
  misc_feature (421)..(421): n is a, c, g, or t
tattaataaaatttctaatttagttgtagctagattcttaaagtactcagcaattatggtggctattttgaaactgtgcattgtttatcaagcttgtttttcatgtaaaaggatctgggcattgatatattttcattatatttgtagttaatagtaaaaatgtttaaatgtcctttcattatagactcagattccctactaatttgatttagagataatcattcatggctatacatttaatttaatactaagcctgacaataaactgcctagtttttaaaacctgcttagagataccatacctactttattttaaatgcaaaataaaaaagtccttctccattcctttaatttttggnagagaatcaagtggaagnaggcatatagctaacagttctatacttctctttaagggcacaggnctaaaacatgatagcagcatttctcac

SEQ ID NO: 436539 - DNA, 493 bp, Homo Sapiens
  misc_feature (285)..(285): n is a, c, g, or t
tattaataaaatttctaatttagttgtagctagattcttaaagtactcagcaattatggtggctattttgaaactgtgcattgtttatcaagcttgtttttcatgtaaaaggatctgggcattgatatattttcattatatttgtagttaatagtaaaaatgtttaaatatataagtagctggtgaaatttgtatttggcatgccccaaagccccttttccttcaaaagctttaatcctgacagcatctcttgaaatataaaacaaatttgacgttccctaaganaaatacatgtttttctttgaggatactactgttgctttgctgccctctacagtcatctaaaatagtcactctagatttttctccattcagatacttagaatactttttccctgacctgtgtatgagctttatatttcaggaatgggttaagtaatatttactgttacggaagtaaagtttagtcacagttaatctatatatgtcatgc

SEQ ID NO: 436540 - DNA, 1080 bp, Homo Sapiens
ttttttttacagataaacagtatatttattaaatgagttaagacaaataaactttacaaatagacaaataataaaaggctcagtggctaaaatagatggtaagcatcattgaaagaaatcaacaccatcacggtatctcagttggcttacacgtgtaaaaagaaattttcaaagagcaatttcacagaaatgaagccagtttttttcttataaacaaatcaccaattcttggttcaaaactgacatctgttatgaaaattaccatatcacatatttgtaagatgacaaggagtaactcatcttcaaagtgcaagtaagtctatttacaaccacaaaaaaggcaatgatgaggagaaaaggatttttaaaaaatatacaaagattaaaaacatttgggatgcaaaattaaacaattttttggttagaggataaaagagaaaaagtgattgaattacagatttcagctatacatactatataatgggatccaagatctttaacagcttgcttgcatttttttctacctacataatgctctggaaatttctggtagaaattacagtgtctcaaagagagaaatacacactaagcatgtcttgctactacttcatagatgtcataagacccgtttatggattagagttggtgtagaaagccattgccttgagttgaaaaatgaatactgtaaaagctcaatacaaatcctccaaagcacatgcacttctaaatcttttggtaattacattcatatttaagcataaccaaaataaaaaagaaaactgaaaacatttcccttttctctattccctatgccttgtgggctctccagttgatagggtcaatttttagagttgaaagggttcttcaagatagtccaccacccttatttagggtaaatgattttcccaagatcatgcagcacattaatggcaaaaccaagactagaaaccaggtcttgactcctagtctaatatgctttccagcatatcatgctacctcttttttacagtatgattcactataaatacctgatgaataaatgtacaattacaaatgctgacagagccaatgaacagtact

SEQ ID NO: 436541 - DNA, 707 bp, Homo Sapiens
atatgaaatttaaatctcaatgcacataaagttttattagaacatatccatgatcatttgttcacgtacagtattgtctatagctgctcttacaataccacagcagaggtgactaactacaacagacactgtgaacaccacgtaaggctgtctagcctttaccaaaaaagtttgccaatccctcaatagttcatcctttccccccatgatctgcagtactgtctctgttgtaaattagagtttcatttatttgtgggtctgttttggaaatttggctcaatccattggccaatttaactatctctacaccaaaaatacactatcttgatcacaataataatttataataagccttaataataacacaagtctccctgcctgatgttccttctttgttaatgaaatagctaaccctgcctctttacttttccaaatacatttcagaatctggcttccaattccaggaaagaccttgttgggatttggtttggaatcacattgaatccataggtgagttttgaaagaaactgacatacttatgccattgaggcttcctatccattaatgatatatctctctccatttatgaggtcttctttaatgtccttcaatattttctccatagaggtctcactcatttgttaccataatccttggtaaaactcacctacacgaccatccaggcacaccatttctttgtagaaaaa

SEQ ID NO: 436542 - DNA, 1476 bp, Homo Sapiens
  misc_feature (60)..(60): n is a, c, g, or t
  misc_feature (1399)..(1435): n is a, c, g, or t
atgtaggtattgggtttttttgggagggggaggtagagtgaagggggtggggtgatgggngtgtgtgtttttaacatccaattcagttgtttaagctttatttttaaatgcatgcatgtttcaaggaaacaaaaatttcaagatacagaatacaacatatcagattaaataattcagaattattttaatgtatacacaaataacaatataaagcacatacataagatacattatataatttgaggtttcaaaaagcagtaatttggttttaaaattctgacaccaatatctaatgtaacattcaagtaaaacatatttcaaaagttaagactcctgagactaacacataactctatgacagcctgcctttaccacgatcttcaaaatagtgctgttcaattctcctacagaaagcaaggaggttgctatagtttttcaccttctcagaaagttcatcatttgtcaattgtgtggtaagaatggtgtatagatggccaaataccagtgcgtcaagttcagtaggctgcttattgaagaaatacggttgtgttcccagtctttgagagagagcttgacagcactggtctacatcctctaagacctggtccagagtcttctttccccatccaatagctttcatcttacgtttgacttcccactgtttttgataggccaaaatatgattcagaggccaagggtaaggagatccatacctagcatgagtgatctcccctactgtagcttcatcacaccactgaagatacagctctgcagtcaacagcatattgttgactaattccatgtaagctttcatttctgctttttggacttcctccagcccatcactaagagaatggcccttggctttaacaaattggactattggaccaagttctgatactacttgatttcccacatgaataaaaggtactttaccagatggagacatatattctgcatttgccctacaaactactttgataggcaagttacacatttgcaaaaaggcctgcactgcaagagaagctgcattgtcagaaagtaaaatttgctcccctttcaattgctgatataatgtagcattttcaggccaaggttctgcagctgcaatctgggagacgaaggcttccgccactagagacatgtcggctgggaggcccggcgcccgggtgcctgccccccacgggcctcagcgtcctccaccgcaaacccggaggctctcggcagttaacgagcctagccccgccaacgttcagactcgcaaagcccactccaacagcagcggcggctgcagtgaggcccccaaggttaccgccaggcctggctagggacttccggcgcagccgacaacggcacccccgctctcgacgaattcgagctcggccgatttggcctgatnnnnnnnnnnnnnnnnnnnnnnnnnnnnnnnnnnnnncgccgccaccgcgatgactcgcagttccctatatgattacc

SEQ ID NO: 436543 - DNA, 600 bp, Homo Sapiens
  misc_feature (61)..(61): n is a, c, g, or t
gggtaatttgcgggcccctcagccaatgggagggcgtcgccccggccagctcccttttctnggagctccagccgcctcccggggactgcagttgccacctcgagccctgctgtgcgtctcgggccagcaattccgcctgcgcgcgggacccattcctcctccagccgccgcggcccacggcccacggagcgggtgaatcccggcgccgcgccccggacccgcagctccctgcactcctccctcccagccgctttaacacccacaccccacagtctctcccacgcccgcgccttggcggccccactgaatccctacgcggggcccagcggtaccgggagaccgggctagcctatgggagcgcccagataacgcgggttgggggcgcccgcgcccccatccccgccagcatgactcgatcgccgcccctcagagagctgcccccgagttacacacccccagctcgaaccgcagcaccccaggtgagtagagggggagctggaagaaggaagagagcggagccaggtctgtcactcgggcctctgcaaggtttgtgatgtcttgaagtgccgagtgtcattagatgtctgaaggcaagttaga

SEQ ID NO: 436544 - DNA, 541 bp, Homo Sapiens
gtggttgtttttgttttccctttatttatccaaacatttacaaactccctatgatgcatcagacactgctaagtactgttaggagacagtgacaaattggatacagtttttggcttcaaaagacttacaattaaaggaaggataaaacctgtaactaccaatgctcatatagggaagaatgagtgagtcctggggccaagatccaagaatatctgaatgaaatctgcatcattccatggcactacatctaccattacatatcacaaaacaaaagctgttcttcctttcctcagaaacacggctgcatcaggtctacccaggtagaccacagaatgatgaaccaaaacagcccttccacggttgatatacaaagacaactcccaacccctggtggatagaaaggactgcatattttgaaaactttacaataagccaagtgttccatgcctcatatacctgctgtcattgttttctacccactgatcagtgttaccactgtgtggtttctacccactgattggtgtttccacccagtagtcag

SEQ ID NO: 436545 - DNA, 1055 bp, Homo Sapiens
  misc_feature (493)..(493): n is a, c, g, or t
  misc_feature (525)..(526): n is a, c, g, or t
  misc_feature (605)..(606): n is a, c, g, or t
gaaagatttgaattttttttattatcccagcaaacattacactagagaaaatgattgggaaaatacaaataagttcattaaaaacacaggctgattattcatatctattacattcagaattatgcgaaacaattagttatattgcaaagctgtaattctttttctaacaaagcatgattttataaaactttaatgttgccactgattcaattttaatacaaaatacttatatacacaatacaatataaaagtaaactgtgtagtgccttccacaaagggatatattaaggcgctttacaaatataccaatattttgacccaaattactttttgctttagattaaaatgaacaggctaaatgttccactttaaataccaaagggatgtttattaaaaattttttatctaaaataccttgggtaacagcagcagcaatgtctaaaaatcctcccactgtattctctaatttctaacacattaagtcagaataaanacaattccactcacagttttgcacttttgcanncagcagaaggttataactttttaaaaaagtcaatcttaaagtgactttttagtcatacattctatagtttctatacaanntagaagggtagaaaagatacagcagtaggggcctgccttatgatgtcactggacaatgcataacagtatctacaattacataattatagaacacatcttataaatactattgatatgcataaaaagggtaagtataataaagacagcaagtttttaataaggaaattattttaaaagaaaacatatagaaccaatgttttcactccatttcaatggaaagcatctatatttttaacattgtttttctcatctttttggtcaggaagcaccagattctatactggaagaagtagatgtagttttggaatcagatagctgataagtatatcccaactgttaaaattgctgataccaaaggcatgtatactgcttcagataaatgcaaagagcttatagtatcagaggaaattttaaaacgcatacatatttgcgccaggcgcggtgggaca

SEQ ID NO: 436546 - DNA, 333 bp, Homo Sapiens
aaattaaattcgaatctagtttatttgcagaattttacttaaccagttgtcatttcttcctgtttctcaccattatataaaaacttaccctttgtacaagtatgaaaaatgtggaacaatgaataagtagtgaatattgcacatttaatgtccaaaataaagttgtggtttttaaaggtcacactagatatgtgggaagaaaacgagttgaacacacttaagtatgtgtctccacataagtgattttaaactattgaaagaaaaataaattctatcagtgctcaatgagagacagtacatctgtacattaaaaaataaaagttataatcaacc

SEQ ID NO: 436547 - DNA, 714 bp, Homo Sapiens
cacctgcagcttccactctttatttccaaagaatcagtgtcacacatgcagatcacaaagcgggtctccctgtgctgcttccttctgtgttttctagtctctcccccaggggctgcccagggccctcaggaactgagtgtgggcaagacactgctgggccagagggcacgacgcccacgtgggcccgtattgcccaggccatttggcagtgcagagcccccccagcctccagcaggagccccctggcatgagctctcccctcaggggtcctgagcaacgtccctgccagggctggtgggtggcagcgggggggcagacacctcgctgaggtcctgcagcagagcttgcagccgctgcaggctggggtgcacgttttcctccagccactcctccacggcatccgggtagaaagccagctgcacatctgagaccagagggccttttacaactaggggctcaccctctgctctctagttgagggacatgtcagcaacagcagcagttctcagggaacccatggctgcacggcctataagagcccagggcctcacctgagcgctgcgggctggatgtgctgaaccatgaccgggtggatgagcttccgctggcggtggtaggggctgaaccagccagtgacatacctggggcaaatccacataggggtgtgccgcgggctaccaaggcagccgtggggcggctttgcagtaatacatc

SEQ ID NO: 436548 - DNA, 320 bp, Homo Sapiens
  misc_feature (157)..(174): n is a, c, g, or t
gtgatttccttgcaattaaaggcagccagtggtaagacgagaccaaggacctttcggaggtcccttgcacccctgagagtcagtgactctctgttttcaccttggactgccgtgatgtctgactcatactgtagtcttcttcctaaaatcctcttcnnnnnnnnnnnnnnnnnnggcagtgtgttgaattctcctctagtttcattcagtgagtgctatttcttgcttcattataaaaggtggtgtgtcacaggtcctgtgtgatcacacaggctaagtgtaaggtttgagaatgatctcttggcccctttttctcagtt

SEQ ID NO: 436549 - DNA, 392 bp, Homo Sapiens
  misc_feature (173)..(215): n is a, c, g, or t
  misc_feature (370)..(370): n is a, c, g, or t
  misc_feature (385)..(386): n is a, c, g, or t
gaagactgagactcagaaaagtcaagtaacttatagagcataggaacataagtcatagagcagataaatggagccagagcccaaatttctgtactcaaagcttgtatacctcattcttagttataccaaatatattttgtaatcgtagttattattctttgtttctctgaaannnnnnnnnnnnnnnnnnnnnnnnnnnnnnnnnnnnnnnnnnnctgattgttgaaacagttgggatattattcataacagaaagaactaaggtttcattgagatggtctttggattagtttgttgaccttgatattggtgacttgggaatgggtgataccttagctgagcaggtgatttatcagcaatctgataaganaatctctgctttaanngctttc

SEQ ID NO: 436550 - DNA, 1785 bp, Homo Sapiens
  misc_feature (1385)..(1397): n is a, c, g, or t
tttttctgtgaataaaacttttaataatgtacagcagaaattggacaggctcattcttatattaaaacaaaagatttcctatattacaatttatttacatttgcatactgaagaggtaaagtgtctaagtggctattttacagtcctttctaataaaatgtacaaaaacaaacagaagtaccgagaatgccgttcgggggcctttatggcgacgtaagaacgggcttggacttggtctgtgaatccagaatccagaggtgcaggtagcactatggatcagggttagcctcggggggccaaaaacacggcttcagtttctccccaactctcacttagtgttaagagtggcagaggtgggtgtgggagcttcccaaagacctgctccatcttccccagaggtggaagagttggactgtgtgtggggtaagggcagaagggccaactggggagtgggctagtggcttgggagtggacgtgtgttggcagatcccagaggctacttgtgactctgggaagaggagtctaagttccatcattacctataaaccgccaaggttctgctgcagggcggataggtgggaggtcagcaggggtaaagacggtccccccaatgacacaatggtatttaaacgaaattagtggccagtaaattggcccaaaggttaggggaagatctcctttaatgcaaggaaagaagcaataatcagtcaaataaatagaagggccaggagcactggggagcctgagggcagggacagggctctccctcctccacaagctttggcagagaactgctgggttggaggcagagatgctctaaggctacatacacaatacacctcccctggggacaggaagggggctcagaatgaatgcagtgatttgaggtctcacctggggttctaaaccccaggtctcatcacccgcccctggtctctttgtggagggggttgtgggggttcctctttcttcagtgatcttatataagaacaataattctaggctcaaaagggtcgtagaaccaattatgaaaccttctggtctcaaaacaggcatctacttacttgaatcagctctttttacagtgctccaggagtaggacccaagcatgtcttgtccacagatgtattcccagcacctggcacccagcaggcacttcacccacatttgttgaataaatgcctggagagggtacaaccagctggacagtgcaagaaagggccctagagccaaaaccactcaaggaattgggggtggggaccaaatacgatgagagactgagcctcagggccaagaggaactctcactgctgagtgggaacaggctcaggtgcaaggaccaaacatttcccgtgtgattgagctatgtgcgttcaattggataannnnnnnnnnnnnagggatttctttaaaaacaaatagattgagaggtaatcacagagatggttttccttttacaaaaacttaatatttaacaacattaaaaaaagttaaaatccaaaccctcccaataaaattaaaaaaagaaatcaaaccactccagttaaaagttatggcttcaaagttattatatacctaagatatgctgaccaaatcaccacccacagccgtgcttctaggcttcgttaaatactatactcaggttaaataacatgttcggctcaggctgttcccttcagtagggctcctgaagtggatgcaaacctctcaccttccctccaccctgatcagacagtccagtaaaagaagacccatgcagatgcctccctcccaccccagactccct

SEQ ID NO: 436551 - DNA, 417 bp, Homo Sapiens
ttttttctgtgaataaaacttttaataatgtacagcagaaattggacaggctcattcttatattaaaacaaaagatttcctatattacaatttatttacatttgcatactgaagaggtaaagtgtctaagtggctattttacagtcctttctaataaaatgtacaaaaacaaacagaagtaccgaggaatgccgttcgggggcctttatggcgacgtaaggaacgggcttggacttggtctgtgaatccagaatccagaggtgcaggtagcactatgggatcagggttagcctcggggggccaaaaacacggcttcagtttctccccaactctcacttaggtgttaaggagtgggcagagggtggggtgtggggagcttccccaaaggacctgctcccatcttccccagagggtggg

SEQ ID NO: 436552 - DNA, 595 bp, Homo Sapiens
  misc_feature (392)..(535): n is a, c, g, or t
tgaagcattacatccaagtgaaacttcttgagatggttacataatgtctaaatctgctggtgtagaagttaataaagtgtagaactgaataactattaaatattagatcaagtttctcatgtttatcttaacgtataacgatttatcttaaagcactgattttcacaaaataacatcagtgtgaaattggaaaagaagccaaatattttatttcatgtatctgggaaatgaggtgctttagtcaactgaatctgcccaaaactaaaaagcattaattaaaaagtacttaactcagaattataaaaataggagacatcaataaaatacattctacacagaatacgccaaccatacactactctttttttgataataaaaaatgtatttactgnnnnnnnnnnnnnnnnnnnnnnnnnnnnnnnnnnnnnnnnnnnnnnnnnnnnnnnnnnnnnnnnnnnnnnnnnnnnnnnnnnnnnnnnnnnnnnnnnnnnnnnnnnnnnnnnnnnnnnnnnnnnnnnnnnnnnnnnnnnnnnnncccgcctttgggtccggttcctccaagatgggcaggaataatgtttgcctcggaggggag

SEQ ID NO: 436553 - DNA, 472 bp, Homo Sapiens
  misc_feature (321)..(338): n is a, c, g, or t
  misc_feature (437)..(437): n is a, c, g, or t
actatcttcaaatttgttttatttcttgttcataattaacagtgcaaagcaatacagcctttaccacttatgcagagcataacgaatcaaatttcaaagcataataggtatgttactacctttttacaaaaccatgaaaagcaaaggatttatgcctacactaggtgaagaagccacactgttatatgttatgctaggatgtgtatgccaggaatcaagtgtgctacaaggccaagagcaaagacctgcaattactccaaatgatagccaagtccttcttacggcatctttatgcatttacctaaattatgccgaagctcnnnnnnnnnnnnnnnnnncacgtgtgcatatatgtttaagattcaaaaagaatttggtgccagttggcatcatttgctagagatcatttttgttcctcaccatttaatattaaaaantagctaaaacattgggattttcatctttccctgtt

SEQ ID NO: 436554 - DNA, 1013 bp, Homo Sapiens
tgtgatgcttagaacacttgtgggactttgttatgaggaatccatagagacccagtttctcgtaggagtgtgtgggagcttctttctggcaaatcctttgggaaagttttagggatttacagctcctgggccccacatatcaggacccagcagttcctcaactggtcgaaattgaaagttgacccgtaagaattccgatgttagctttcaacccgcttggtgctctgaattaagataaaaggggtttttaaaaattatctttctgacaaatctgcgggatcattgtgacccaatgacaaaccggctgcctgcaaaaattcaaccatctgtttattcagatcaagactattggagaaggtacgaggggcattggtcaacaaatcgacaaaggcatttacgggtcaatccaactgagtagaggaactttatattattctctaagtttaggttgttattggaccgaaaaaaggattcaggagaacgttccaaaatatgttacaatttcaaggtctgatgtcacaatctttctccacagatcccaccgttttgaaagattctcgggagtacgtgttattgctcgtggatatcttgatatgatgctagcgatcacttctttgctagctcctttggaaagaaggaacatcttcaggtcctgctcattggtaatcatcctatgaaaaactccaggctgtcgtttccttgccatgtcaatatctactcccatagtaagtaagtttttcagtaggtcctcatttttcaaaggctcactgtctgtattatgacacttcacaccaaaaagcctaaatgaaactgatttgaagatgttttctgctgaaaatcgagtcatccaacatccttgaaccaagagagaagttatttctcatatgccaagaggtttcctggtgccataatggttaggtagttcaaaccttttgaaatgcttgtttgtcctaaggaaaggctctgcatccctccagaaaggctggagaacagctatctcctgaactgcaccc

SEQ ID NO: 436555 - DNA, 773 bp, Homo Sapiens
tttttttagtttgtttaaagactttatttgaaaccaatgtcacagcgcgttagtcataaagatcatcagaatcatcggtgttgtggtttctggggcgtaaagcagcctcaatttctgagttactgtcatcagactcatcccagagggcattagattttaaattgatcacgggtttctttttgttttcatgccgttgacaaaggacttccttcactagatgaaaaactagcttccgaagcaattttgttagctgtctttgtctcgaatgcaccgctgccaatattcaaacctgacaagtgtgacacagaagcatctgtcttttgaaacctgttttcagtttgatttgtattatcctgaagggtggccttcttcagcaactgataggcttctgtttctgtgattgggatatctgcagccacattttgctttcttgctcttgtctccacagccacttgaaacttcttgttcccttgtaggaacactgttgagccatacagcaggtttggcttcctttattccactattgtcattcagaatagatggcaagctgcaagatgattcactactgtgaatagctgacctacggccacactcttctgtacagggcttttgtcaataatgctgttgcctcttcttctgacagaattcatcatgttctttcaaggtggcaacatgctgacccacctgtgccctcggtacgtctgagtctggtgtttgtccaaggtactctatgttggtgcgttagtggaggattccttcctcgaatcaggaga

SEQ ID NO: 436556 - DNA, 721 bp, Homo Sapiens
  misc_feature (349)..(349): n is a, c, g, or t
catctgtcttttgaaacctgttttcagtttgatttgtattatcctgaagggtggccttcttcagcaactgatagggcttctgtttctgtgattgggatatctgcagccacattttctttcttgctcttgtctccacagccacttgaaacttcttgttcccttgtaggaacactgttgagccatacagcaggtttggcttcctttattccactattgtcattcagaatagatggcaagctgcaagatgattctactgtgaatagctgacctacggccacactcttctgtaagggcttttctcaataatgctgttgcctgtgccctcggtacgtctgagtctggtgtttgntccaggttctcttgttggtgcgttagtggaaggattccttttctgaatcaaggagagcttagggtttgcaaaaatacaatttttttcaagtggatagggcaactctttcttgctcagcatggattaattttaaggcctctattccatcttctccctccatcttgccacctggatttggctgtggttctgggctctctaaaatcagatcatcttcacttattgaaatggtaaggtcactgctggtgctccaactttcctcctcctcttcctgcatttttctgaagggcttttgtgactttggttccctgtgagcaagatgatctgaaacaccttcccaaggagaatgcttctcttgagaccacttattttcag

SEQ ID NO: 436557 - DNA, 477 bp, Homo Sapiens
  misc_feature (398)..(398): n is a, c, g, or t
  misc_feature (415)..(415): n is a, c, g, or t
  misc_feature (427)..(427): n is a, c, g, or t
  misc_feature (434)..(434): n is a, c, g, or t
  misc_feature (454)..(454): n is a, c, g, or t
ttttttttagtttgtttaaagactttatttgaaaccaatgtcacagcacgttagtcataaaaatcatcagaatcatcggtgttatggtttctggggcgtaaagcagcctcaatttctgagttactgtcatcagactcatcccagagggctggaaaataaaaccagacagttatttaacatttttgcattctggttaagagcttacaaaacagcacagcacggaaggactggttaagcagagtgtcagtctgcaaaatgcataacagggacaccacatgatgtacctgaccagacacacccaaatgcatgtcatactgcacaaattacacattgcaaagtgtgtcctctgcactggttatgggaaaaccattttgcagaatacttcccttttcccttcngggtggtggcccactcntttattataggntaggggnttaaaggtcaaggggtacanggaagcaggggttccccgggggg

SEQ ID NO: 436558 - DNA, 653 bp, Homo Sapiens
  misc_feature (164)..(172): n is a, c, g, or t
  misc_feature (480)..(480): n is a, c, g, or t
taggaggtgggaaaagcttcacaaggttgttctcatgaatcagaaagttgaaaagacctgccatgggtcctccctgggtggaggtcagactagaggacattggcagtagtccccttcttaagctgttttgatgacacaaagaaaaggctgagattctgaactannnnnnnnnaacataaatgccacttaactagggaccagctctgtgcctgtgccaaaccaattggtgtgagcttgaggaggagtgaaggatggggacagagcatacacattgatgacaaagaggaatcagacattcgaaacaaacatgttctcagagcttcgtggaaattctgtcaaggccctaattcttgcctgctattctcttgccacaaaagatcacagaccagttactatagaaacaattctcttcacaggttgtgcatgttaggatggagatggaaaagatttccttatcaaaaaaagaaagaaattaggttntcagatatatttgccctctatctaaagtgttcctccttttatgagcagaagaaagaagaagctgcaatgattgcaaatatgcttctaattccttgcagttaaatttcaaactttcattgtagacttggtggagctcgtgcgtttctaatacatgcagaaagcgtgtattttct

SEQ ID NO: 436559 - DNA, 522 bp, Homo Sapiens
  misc_feature (135)..(140): n is a, c, g, or t
  misc_feature (142)..(241): n is a, c, g, or t
ggggggatcccaacccttttcctgccccgggttttcttgggaacaagtttggccaaggtccctttccctttggggccgcgcgcccaaagaaaggttttgaaaaatttttggggggcggggcgggccgcccagggnnnnnntnnnnnnnnnnnnnnnnnnnnnnnnnnnnnnnnnnnnnnnnnnnnnnnnnnnnnnnnnnnnnnnnnnnnnnnnnnnnnnnnnnnnnnnnnnnnnnnnnnnnatattataaatatttattcaggtatggtcaaaatttatccatattaatgataattatttaaatgctctttagctgttcatcaccatattaatactaggaataatgacggctaattttaattgagtacttcctaactgtggcccagttacagtaaaataaacactattagatacactccatcgattattacagcaagtctatgaaacatactgtattacacagccagtattagaaatgaaaaactcatgggaaggatatgtataaaacttgctcaaagttac

SEQ ID NO: 436560 - DNA, 408 bp, Homo Sapiens
  misc_feature (117)..(117): n is a, c, g, or t
  misc_feature (297)..(297): n is a, c, g, or t
  misc_feature (302)..(302): n is a, c, g, or t
  misc_feature (321)..(321): n is a, c, g, or t
agaaatactgttttattattaaccgtgacaatccctccccatctttgtttgttcctcccttcatctctcccctctcaccacaggccctttaatcacaaacgatggaacatatttgantaatttgctgttaataaactgacaagcaagttatcttggctatagtttgagctgagtaatgtgtaacagttaaaatatgttaaagcttccaaataaagctctaaccagaaatgttgtcagccaaaaataggaataggtgactagagacgacagtgagtacttgttcatttcccatatttnaagantcataaactaagaactttnttttaaatttagaataccagacacaagaccttttgacattttatgcttagtttataaacagacaattttacagaaagcatcaccttt

SEQ ID NO: 436561 - DNA, 379 bp, Homo Sapiens
  misc_feature (3)..(3): n is a, c, g, or t
  misc_feature (22)..(22): n is a, c, g, or t
  misc_feature (45)..(45): n is a, c, g, or t
agncatatagctgagagggatntaaaaatgacaccaacaaaattncataaaggaaatggttcttacatcattataaccaagtgtttgttactgactgccttctctcttctttttcccacccccacatctccctgtacatctttccatttcgggggaaactgtgaacatttttatgatttttttctctaattaagctccattctctgttaagtggacaatgacatgataacttagttggactaatgtagtgttacatggtggagattctttatcatgcctattgaggttctgcttttttaaaatctcttttagctgggaaagaattaattcataatttaccataatgttcaaaggtagggtagaagtttcctggcacgag

SEQ ID NO: 436562 - DNA, 949 bp, Homo Sapiens
  misc_feature (217)..(218): n is a, c, g, or t
  misc_feature (226)..(226): n is a, c, g, or t
  misc_feature (228)..(229): n is a, c, g, or t
  misc_feature (354)..(354): n is a, c, g, or t
aaatgcaaattttttgatcatttattaattgtaattaaaatttacatgggcctatttattaaggacattgtgtaatgtttccactttgttttaaacaattacaaacatgtggcttaaaataatgtacagatcaatgtaacaagtttgaaaaatgggcgatgagaatatgaagtctgccttctttctagcaataatcataaacactccacttaatggnncatatgtntnncttttgaaattctaagtttgtttaagaacaaaattctaaaggggttcaacatgcaatggatatatatatcattcagaatcactagcttccaatgcttacacttaacttcacattaggcaaaagcnccattaattacactgcatctttggctcagtgtgttaaaaaagcaaagcaaaatggtaagcctagtgaaaacaatcctttgtgtttgccagtttcagattgccaatatggttgcaataaaattcaaccattatctctgatgagatatgcagctttgattagtaggacagtttgttttctgaatgcaagatacaagcatgaatctgttcctctaattgttctcatagcttaggaaaatgaggcagaagcaggtttgtttgaataaagcataattctgcttcccgttatgaccacatatgattagaaaaacagtaaaccaatcagatactgtcagatgaaatattctgtcttctactcttggcaatctcttggatattgccatagactataaaatgattgaatgagttgtggtcatgaaactatccatgtcacaaatattggtctctcctttcaactgctcaagaaaaaacaagcctttggtaactctagttattgtatgctataatacaaaacaaattaccaataaccattcccgaactaactaacatatggccagacatttttcctgtataagattaatgttttcatgattcctac

SEQ ID NO: 436563 - DNA, 700 bp, Homo Sapiens
agaacaataacattctttttaattatgaatctgcatattagagcattgggggacagctagtctctgctctacttggcttcagctgaggtggcttggaggttgggagtcggaatcatctgaaggcttgctcgttttcacgcgtggtggttgatgttggctgttggctggagcttcagctgactacagctggaatatctagttgtggcctttctatgtagctgcttggattcctcacagcatgatggctggattccatggggggcatctcttgaaggggttagtggcaaagtttggaagagcatgcaggaccagaaatggtgttattgggtctcactggaatttatggtctctgatcattcctgatgccattcatgcagttctggtgtggatggtgtcatccctttgcaaccctccccgatttttggaagctgagaggcacatctcatctcatgggcagttttccttcccccagctcttgcctctgtggtctcagtgcttctattctacttcgatagaaagtagggccgggcacggtggttcacacctgtaatcccagcactttgtgatgcaattctgatgtcaactccctgatgttacctcaaatgccacaggttaaggccaccagtccccactaggctgccctcgctttagacacacctgcaggcttgggtgtcctcagaccacatgtacttctcatcaa

SEQ ID NO: 436564 - DNA, 358 bp, Homo Sapiens
tataagaatatgacataaatttttattatagaaataatgtcattataattttagtgctagtacttgtgggttttctgtatttgtatcaccttgaaatttgttccatgaatagaaaatacttctttattcatgttttcaatcacttagaattattttaaatttattttgggtttgtgagagataataagattaagaacttcatcatttcagtgactttcctccaactctctgaatctgctacctcttattatatgtcccttagcagtacttttccagttaggttcgttaccctgctcattagctaaacctctttatcttgtgcctcaaaagagcttttacttttgttagcaacatttat

SEQ ID NO: 436565 - DNA, 2108 bp, Homo Sapiens
  misc_feature (5)..(6): n is a, c, g, or t
  misc_feature (8)..(8): n is a, c, g, or t
  misc_feature (16)..(16): n is a, c, g, or t
  misc_feature (42)..(43): n is a, c, g, or t
  misc_feature (46)..(46): n is a, c, g, or t
  misc_feature (61)..(61): n is a, c, g, or t
  misc_feature (73)..(73): n is a, c, g, or t
  misc_feature (93)..(93): n is a, c, g, or t
  misc_feature (101)..(101): n is a, c, g, or t
  misc_feature (114)..(114): n is a, c, g, or t
  misc_feature (123)..(123): n is a, c, g, or t
  misc_feature (138)..(138): n is a, c, g, or t
  misc_feature (230)..(230): n is a, c, g, or t
  misc_feature (308)..(308): n is a, c, g, or t
  misc_feature (321)..(321): n is a, c, g, or t
  misc_feature (325)..(325): n is a, c, g, or t
  misc_feature (330)..(331): n is a, c, g, or t
  misc_feature (346)..(346): n is a, c, g, or t
  misc_feature (350)..(350): n is a, c, g, or t
  misc_feature (353)..(353): n is a, c, g, or t
  misc_feature (366)..(366): n is a, c, g, or t
  misc_feature (375)..(375): n is a, c, g, or t
  misc_feature (385)..(386): n is a, c, g, or t
  misc_feature (389)..(389): n is a, c, g, or t
  misc_feature (391)..(392): n is a, c, g, or t
  misc_feature (401)..(404): n is a, c, g, or t
  misc_feature (415)..(415): n is a, c, g, or t
  misc_feature (426)..(426): n is a, c, g, or t
  misc_feature (431)..(431): n is a, c, g, or t
  misc_feature (435)..(435): n is a, c, g, or t
  misc_feature (439)..(439): n is a, c, g, or t
  misc_feature (441)..(441): n is a, c, g, or t
  misc_feature (454)..(454): n is a, c, g, or t
  misc_feature (456)..(456): n is a, c, g, or t
  misc_feature (461)..(461): n is a, c, g, or t
  misc_feature (475)..(475): n is a, c, g, or t
  misc_feature (526)..(526): n is a, c, g, or t
  misc_feature (572)..(572): n is a, c, g, or t
  misc_feature (581)..(581): n is a, c, g, or t
  misc_feature (1819)..(2001): n is a, c, g, or t
  misc_feature (2054)..(2054): n is a, c, g, or t
ttttnncncgaacatnttatagggtaacaatttaacacatgnnagnaagaaaacgtcttanattcggcggaancacaactgggcgtaattaancaattcantacgttaagggcnatcataagnattctatttataaanactttaccattttttatgctgaaacagcagcatgtcctttaaattattcattctaacatgtagtttgtgttttaattgtcttaatgcaaggnaagtaaaacagtttgaaatatgatagaaagtataaacacatttcaatcagtagtttatattaagaagatttctaaganggtgctaaatttnaagnaattnnccgtcaaattatggnaacngtncagattatttganttgtttttnaataggtggnnggncnnttttttttnnnngggcaattttnccaagacatgntgganagtnagcngncaaatatcatatngngttcngggtactgtggggnatccaaatccccctcccttggcaatgtactggggccatttgggggaaaaanaaagtgggattaagtgttaatattgactaggggtaagtcctttacntcatttttnctaggaacattaatagttgcctttgttatgataatggcacatctcattttaaaaatgaaatgctaaatatgttagaaacagatcacaacattttaatgactgggataagcaaaatgagtccaacctttattctgataatagccagtaaatttgcaaagagaggagacaaactgtaattgtatacataaaaacacctagtcccactttaaaattttaatatctatatatagtactgtatttaatttttaaagatgaagacagcaaaaatattcacattaaaatatcttacagaaatcattattcttctattcaagaaaaccaattatactaagttaacagggaaaatttaacagaggaaattctccttgggacacttattgaactgaggatttcacttcatagtttaaaaaagtaaacaggtctcaggtgtctttttcatgggtaggtcaccttatcaatctgaattacagttcatgggtaaagctaactttttttgtgtgaaataagttaataatgccaattcagtttcttgtaaacaaatgtctgtatcaaaccactataattactgtgtaacaccttgtagtatcagtgaagtggctgagaattaaatgatcacttatgcccttatctttagatacagtaccttcaaaagaaggcctaatgtggacaagctaacatgggtgtgctaaacctacgcacaggagactccatctgcgtatgtcttgtattactctttccatcccaaataaccttcatcagctgttttaccactgaaatgaaaagtagtcaaaggaaataattatgtttaatcattattggttgtgctataaaataatgtgaatcacagtgggagtgttttgtgagtaaacttcatattactattcccaacacacacccacaggtacacgcaacatttttagtatgcaaaatggaagtattattaatagtggttcaccattcttttacttttctagttatttctcaaggtatggttcacagacccagggagacctttacacatgcttaagattgggtaccattgctttaaacaaacacagcctctggctcctcatagcaaacaataaacttattccaccaggggggaaaaacagaaagaagattcaactacttttggcaaatatatggcaaccttgtcccccatactggattactccctcccatactatacattcactggccacttgtatcgattaatgttttcaaagacagagaactannnnnnnnnnnnnnnnnnnnnnnnnnnnnnnnnnnnnnnnnnnnnnnnnnnnnnnnnnnnnnnnnnnnnnnnnnnnnnnnnnnnnnnnnnnnnnnnnnnnnnnnnnnnnnnnnnnnnnnnnnnnnnnnnnnnnnnnnnnnnnnnnnnnnnnnnnnnnnnnnnnnnnnnnnnnnnnnnnnnnnncattgttacaatgtattatttgtaattattgttgtattattggtttttattgntataaaaattttttccaatattttttatcaggagttgcctgcgtgccaagcttg

SEQ ID NO: 436566 - DNA, 316 bp, Homo Sapiens
  misc_feature (32)..(32): n is a, c, g, or t
  misc_feature (95)..(95): n is a, c, g, or t
  misc_feature (104)..(104): n is a, c, g, or t
  misc_feature (304)..(304): n is a, c, g, or t
taaattattcattctaacatgtagtttgtgtnttaattgtcttaatgcaaggaaagtaaaacagtttgaaatatgatagaaagtataaacacatncaatcagtnagtttatattaagaagatttctaagatggtgctaaatttaaagtaatttgttgtcaaattatggtaactgtacagattatttgaattgttttttaataagtagatggccaattatatttaactgagcaattttaccaagacatgatggaaagttagctgacaaatatcatattgtgttctgagtactgtgaggaatccanatttccctgcag

SEQ ID NO: 436567 - DNA, 451 bp, Homo Sapiens
  misc_feature (8)..(8): n is a, c, g, or t
  misc_feature (26)..(27): n is a, c, g, or t
gggccacntgtgccagctgcctgcannggcccgaccttggtgtgatttccaaaaacagtttggtaaccgttgaagagtgtggctgtggctttgtccctctgcacaattggccatttgaagcaaaatgaagtaattggtcagactccagaggggagaaccctgcctggagatcctcgcagtctcagagagttagagaattggcaggaggtatgtaacggcctggaaggccccacacctctgtccaaatcaggaacctgcaacgctttaaggtcccaggtcccacggggagcaggagcaaaggacaaagccatccccacctgcagctcccgggccacctgggaggcggtgaggggagggggtggtggtcacagaatgaccaggtgaaaaatgacagccgtgtggcaaccgtgccccacagtgacctcagcagggctcctcacacctgcctagt

SEQ ID NO: 436568 - DNA, 510 bp, Homo Sapiens
  misc_feature (160)..(173): n is a, c, g, or t
  misc_feature (347)..(347): n is a, c, g, or t
  misc_feature (428)..(428): n is a, c, g, or t
  misc_feature (441)..(441): n is a, c, g, or t
  misc_feature (453)..(453): n is a, c, g, or t
tttacaacatgatgccatttatttacatgattctgaaagaatatgagtccccaggatcaaatatatacatttttaatatttgaaatatttacataatggaaccacatcagggttcgagggtaagaacagtgttttcaaatgtcctctccaggtgtgtttnnnnnnnnnnnnnntccagtaatccaaagctcacattatgctttttctaacaggccaatctttacctttcttttaaataagtactcagacatgggaacagttgcatctaatttgtgtgaaaagctgtttaaaacttcttacgttttcaggtaattttactccctggtgaaattctgatctacaacganagaaagccccaggaatttctctaagcacatcatcagtacatttttaaacactaatgagccaaggtaaaacaagatataaanccttctacaagancaaaaaatgaanaacaaaatagttagtgggttgggtaacctgcccttgaaatgatttacccttatcctt

SEQ ID NO: 436569 - DNA, 1669 bp, Homo Sapiens
  misc_feature (25)..(25): n is a, c, g, or t
  misc_feature (88)..(88): n is a, c, g, or t
  misc_feature (1586)..(1622): n is a, c, g, or t
cttaacagtgtaagagactcagaanccactccctaaatgggtaaatatagattgcaataataaaaataactagccaaagttaagattnaaaaaattttccagctgaaacattacagtttttcagtacatcagagggacaaataaccttttatttaaaggtattatatttagagacttgtatatttcaattttgtgtaggagaaaggaaagccattcttctagaaggcactaactggtttaaatgtgtgagtgaattcctaaagaaaacatgtgcaaagtatagtcaagaaggctgcctggttgtgtgttgtattcactactcttcatcacagactatgaattattgctgaacaactatatcagtcaccaggttttcccatcagagcttcagtgtgttcagtccacagtgtcgcagatctcctttactttctggttgaattcttctggttgatctgcatatacataatgtcctgcccccaagaatagctattgtcttcacatatgaatgtggtcgtaaggactggatgctggtgccagaattgccatctatgcaggatcgggcgccaaagatcactgaaactggaatgtcagggtgcattttaccaattcgctggagcattggcctttttgcccatccataaggaatagtcatattcttgaaagctgtctcaccacttggagtctgcacattacagtggtagatgtattctgtcacagtatcgtcttcgaacattgaagaatactttcgtttgaaatcaggccttaaacgctgcactagacttaaaccaaagggtcctgcaatccttaggccagctaaagggttaaagggagtcaatgctgctcccaaggctctgatccaaaactggaattggtctgtcttgatcagcaaggtctggtcgttcagggaaaccccaaggctccactaaaatgagatgattaacccttgatgggtacttcagcgagtaagcagcagccaagaatccacctaggttgtgcccaagcaagatcattttgtccaatcctagggcacatctccactcttcaatggattccacaaactgattctccacttcttctgcatcactgtcaaacctgggtctactacttcgtccaaaacccaataggtcaaaagcatagacaggtctgttggtgcaaagatctccaaaattcagtgcccagagcccaagacctcctccaaaaccatggagaaggacaagtggagtcttatttgaaatattatgagagaacttcagtgtccatattttatttccattagatatacgaacaggttcttttttgtatgtgcaaggcacacattttaacatcttctcttcagcttctttaaggtgtgatatagacgtagggcaccatgtggggagccaaccagttagccatcctgacctctctccggtgtcggcagagtccacctcctcctcttccgccgccatagccgccgccgcgcaagcaccgggacttatctcgaagccggctgacaggccgactgggccgccccgggctggcgcggcacttaaggcggcgcacgccccgctctcgacgaattcgagctcggccgatttggcctgatnnnnnnnnnnnnnnnnnnnnnnnnnnnnnnnnnnnnncgccgccaccgcgtgagctccaggtcgccctataggatcgtatcatt

SEQ ID NO: 436570 - DNA, 426 bp, Homo Sapiens
  misc_feature (13)..(13): n is a, c, g, or t
  misc_feature (34)..(34): n is a, c, g, or t
  misc_feature (106)..(108): n is a, c, g, or t
  misc_feature (117)..(117): n is a, c, g, or t
ggtcagtttgtgnaaattcatcaagccattcatntctaatacatgcgcttttctctatgcgtgttatccccacagataagctggtaaatgtttaacttgcaaaaannnaaatttgtnttaattaaaaagcccttaattgtagcatttgtcaattcctgtggtgtaaatatttctaccatggttgattacatgctacgaatgtggtgtcaattctgagttgggcaaagagacatatgattggttcttgcaagctcagttgagccagctccaggagaccattggttatacttcaacaaagagatcttttgaaaagtaaagtcttctaaaatgagaggtgaaactgaatgctggacggggtaagttccttcttgcttggtatcctgctagcacacccatcacctacttccccacctctctttactcttc

SEQ ID NO: 436571 - DNA, 333 bp, Homo Sapiens
  misc_feature (5)..(5): n is a, c, g, or t
  misc_feature (9)..(9): n is a, c, g, or t
  misc_feature (12)..(12): n is a, c, g, or t
  misc_feature (20)..(20): n is a, c, g, or t
  misc_feature (33)..(33): n is a, c, g, or t
  misc_feature (58)..(58): n is a, c, g, or t
  misc_feature (176)..(176): n is a, c, g, or t
ctggncccntcnttagcacncaagaaaactgcnccacaaggattgttttagtggggtnttaattttttaaaatgttcttgtttatttaaattgcttgaacaagggtttagctgtatgggaagagttcctgcctttagctatacatgtttccacccacttagacatgctgctcaccncacagactcatacagcctccacagacacaaagcttctgtgtatcctacatgtacctgcaccccaattctgtcaacctccccacagctcttgactggctgtttatctattccattccactaccttcccaccccagccctcaaagtcccaaacagattg

SEQ ID NO: 436572 - DNA, 785 bp, Homo Sapiens
  misc_feature (20)..(20): n is a, c, g, or t
  misc_feature (91)..(91): n is a, c, g, or t
  misc_feature (94)..(94): n is a, c, g, or t
  misc_feature (97)..(97): n is a, c, g, or t
gtgttattcttttttattgngaaaatggatttctttttccaatgtttcaaatatacaagcagaattgtttgtttgccaataaatataatanatngangcagaagttcaaaaattaacagccacaatagtttatttacaattgaactctttataagatatttacaagacaaccaattttacacatcagaaatggtatcaaaagttatgaattacaacacagacaacaatatgaaatgggcataaaacaaagctgaagtagacagacaagcaattttttttaatttattaacactagcttaaactttgttaaagaaaaacaaacaactatgttttaggagaactgcagggccttcagttgaagattgaattcacagtgttgtatcccatgtagggaaaaataagactaattttccccccacactctaacacactgtaattttgcacttggaactttgctaatctactgtccaacctccttctcaacaaagtcaaatcaaaggagaattaacctagaagaggggacaataaaataagaggtcctcagggagagggagaaccaaggaaatagaatctacttaaatctggccagatagcacctcgtggattcttctcagtctacttcaagtcagaaactggggagtcccctgggtagggcacaaacacaatggttaaatttgctaactcatacccaaaattaggaacccgacacatgctgaaatcaagaagaaactgagggatcaaagaacaaagtcaagagacactgattggggtccttttccttttgg

SEQ ID NO: 436573 - DNA, 788 bp, Homo Sapiens
tgactgtccttaaaaacatttatttttttcagggtgcaggggtcgtgacatcatgacatctacaaaaacggtagaaaaacccaggtttggtgcggggagtgggggcattgtaattacgtctccaaatgctaacagctgtggcagcgcatgctctcttagcctctgaagaggtctctgggcgctcacacttgaaaaaccatgaggttggaacaatcatgttaatgcgcctttttggttttggtgaaaatttcagacagtgtgacattaattatttatttgtctttgcacagaatgatgatgctaaagccagccccatacagtcctgatgctcagtacttccagcatgggctctgtccaccctgctctctgggtctacatccagcccttcagttttcactaggcaaatctgaggtgagtcaactgagtttgcaaaatgtgcttattagcaggtgtgggatgttctactaccttcttcagagccacagcattcctgttccttcccacatcatttcactaagggtctgaccaactcatctcccaaccattcaagacacaggagaattaactgcaggccttcacacatggaagtcagtcacagtgcgtggagaagggaggggcgggaggggctgagtgaggagtggatgtgagcaggtcccctggcagctccaaaccccagtagacaagaacagcttccagtgccatccatttcaattctcatcttttgttttcaaagagagcttccagtgttttaaagtttgaaaaccacgttctagatcgcgagctagaac

SEQ ID NO: 436574 - DNA, 1226 bp, Homo Sapiens
  misc_feature (168)..(182): n is a, c, g, or t
  misc_feature (762)..(762): n is a, c, g, or t
ctagctagcattctctaaacaggtggttagaagcggtggataccaggcttctgacgatcaaattgtaaaaaaaggggtcaggtgttatctccagactgtggaattagattgtagtagaatatattttacctacaaacattttgacctcacccaagagtaaggctctcnnnnnnnnnnnnnnnaatgaaaaaagaaaggagaatatttgctatcttatcttaaaaaaatagatccttaggtgattacaattttaaaataagaattgagatcccttactatgcacagtcctttaagttcataaagcttgatcccaactctgggagatggggcaggacaggtgttaatgtccctgcctttagcagatgaagaaaccaggctctgagaggagaagctacttgcccaaggcctgaaggcttctgaaagaggagcagagctcagggcacctggccctccttggtcccctctctactccacggtgctgctactcagggtcatctcaaaactatgtaaaggcagatgttgccaatccacaggcttcagggactcttatcaagactcatcccaacttttaaggcacactttcacaccgctcacattgtgcattacattttggagtccttgttggaagtgaactttccgcctgtaagcctgccattccatgtctaaaatattgggatggcatcaccttctgtactatgcagcagaaggagactggcctgggattctggaaacatgagatccatttgcatattaatccccggnctcgctgtgtgaccctgagcatgtctccttcactttctgtgcctcagtgtccttatttgagtaaaaagggaataaaactagatgagtggttttcaaactttaaaacactggaagctctctttgaaaacataagatgagaattgaaatggatggcactggaagctgttcttgtctactggggtttggagctgccaggggacctgctcacatccactcctcactcagcccctcccgcccctcccttctccacgcactgtgactgacttccatgtgtgagagcctgcagttaattctcctgtgtcttgaatggttgggagatgagttggtcagacccttagtgaaatgatgtgggaaggaacaggaatgctgtggctctgaagaaggtagtagaacatcccacacctgcttagtagtcaggtgtgcctcgtgccgagtcgacacccagcctcgctgcctagccttag

SEQ ID NO: 436575 - DNA, 315 bp, Homo Sapiens
  misc_feature (270)..(270): n is a, c, g, or t
  misc_feature (278)..(278): n is a, c, g, or t
ctaacttttatctttattcggtggaattttccagcatgagctttttgactaccctacaggttcgattttgttgctttagagattggcagcatatcaatttgtcctgagaactgataataaagggaagtgaaatcaagcacttaccctgcctttcttgtacagtgatgaggttattaagagttaaaaacaggcacatatacaaatatttcatgctcaaactgtctcatttttacatggcctgtagaaatcccttcaggttggcttgtatanccctttgncagatcccaggtctttaagagcctccttgaatcctgg

SEQ ID NO: 436576 - DNA, 148 bp, Homo Sapiens
  misc_feature (41)..(41): n is a, c, g, or t
  misc_feature (91)..(91): n is a, c, g, or t
gtttttaatcttcatattattaagatgcataataatatttnacagatgaagaattgagattcagagtggataagtgctttattagtaaatnacaaaggaaagatccaattctaggatctgaattctgaaccattatcttatactgagc

SEQ ID NO: 436577 - DNA, 536 bp, Homo Sapiens
  misc_feature (440)..(486): n is a, c, g, or t
ggctatctttggagaaccgattgctaaatccttcttaggaccttaaggtagcctcctctccaggcttgttctccctcttggaatatggggaggactggaggacctctaaggtcccttggttctccccagtccttagattaaaaggcccaggccccaggctggccccctgcctgctgtcccactccttcattccatttcttggaatgtggccatgcctccagtgcctccattcaaccccctctaactgattccttccatcctctgcgaccagagacgccgcccgcctcctgcccaccacctccagaagctcctggctggggtggactgccgtctcctcccactccccacattgccatgcctgggcgacgcccaccccacccactcacccacccccagtgtccgttgtgtgacctagtgcaccatgtattagcttccatggnnnnnnnnnnnnnnnnnnnnnnnnnnnnnnnnnnnnnnnnnnnnnnntcggcgacttcacctttttttgccgcgataaacgccatctcagcatctgt

SEQ ID NO: 436578 - DNA, 1329 bp, Homo Sapiens
acgggtatctggctccaaatggattcccagaccttgtagcattacttttaagaatgtaaaccactatggtaatgtctttttcagttattgaataggtgagaagtgctgtttggaaacgtgggaaaaatgtataggcaaaaaatatagacaaacatatagacaagcaacccagaaacactggcctggtgattcttatatgcagggacacatagcactttccatcccgaagctccagccggacagacgaggctgaaacactctccatattctaacaatgagaatcaatatcgcgtatcagcaagagttttcgcactgtgtgcttttatgtggtatgcatggaatataagcggaacaaaggatccgtgaggtttcatttaataaggactagatggtggataaaaattggtttcagtagcacaccatggctcaggattatagtaattgatagggcatgcaatgtctaagacatggcacaggagccttcagctagtttaagctaaggttaagctaacggtgtatgccaccggctccctcgggattcacgcatcatcaaggttaacgcacatgtacacacttaaacatgaaggctcatgggaatgtacagtctagtcattaggttgacctatttggctgcttccgactctgattttttgtaaccttgtttaagtgggccaggacagctactaatggtcacaacgacctctttctctaatccttactttatacatcaaccttcaggtggctccccaaaatgttataccaaatctgtaaaatgcaaataaaacaaaagacaaatctccatcacgtacaacatgaactgaacagccatttaaaaattcaatgggtgagaacttcttggacctcattggctagattcctttcttaaaatccatacaccgaatttaacaggaaggttcccattccttgaagagcaaacttcagatgtacaagccttgagtgaaatatattttggtggctgagtaaccatcttactgaataagagacacgatttttgtaaactacacgagagtgacagatgcacaaacgttttggcccgtgtgcctttaaatagatgtctcttctggtggagggatgtctagagggaggaaggtatgcattctataggactgcagccttcaaagctgctcagtcatgtttttgccagtgggtcaaacacctgcagtgctgtcctcttttcttggtcactgattgtcacccagtgacctaaggttttgtgttcatgatctggtggcagctctgccttggcagctgaagcgccagctgacactgggtctatgggatctcttttggggctcctggttcctgacc

SEQ ID NO: 436579 - DNA, 381 bp, Homo Sapiens
gtagaaaagaacgttaattgtttaaattatagtttaaattttcttttgaaaatgaaccctaggtagataaaggaatctccttggcttctaactgcttttggtggtggagacaccacctgatgtcacccacggacacgttttcatccacctgtgaccagggagcttcagggagtgccatccgtttccatgggagagccccgccaaagtcacttagtggtataaacaacgtgcttctatgtaaaccccggtaacaaaaaaatagttttctatcaaatacagtatcaaattgtcatttcatgtaaacacagtgattcctggtgaagaattgaggccaaagtaccacaaaaaatggccacgggattgatccctgcttgaaaaaat

SEQ ID NO: 436580 - DNA, 489 bp, Homo Sapiens
  misc_feature (435)..(435): n is a, c, g, or t
  misc_feature (448)..(448): n is a, c, g, or t
  misc_feature (453)..(453): n is a, c, g, or t
tgtgtgagtttctttataaagaaactgaagcagacttttattctttattgcaagcagattcaggtctcctgcttagataatctagagaaaagtccaatataatattatccagtcagtttatctacagaaataaaagttaaaaacagaagcatacaaaataaactttactgaaatgttagattggtttaattaacaatttaatttttcaaagctgattaatgaattatcagttaaatgttactgtgtggagactgatttatgttaatgcacctactatgtttaataatttaacaataaactccagtatttatgatgatgccaactatggataccattcatgttaaatacatttttggaagaccttcttttattacattacctaatggaccagacattttaaatgggtgacgccgacattataattttaaagtcagnccccatttatgcntattnaaaatccggaatccttggataaggtaaaaaataagc

SEQ ID NO: 436581 - DNA, 853 bp, Homo Sapiens
  misc_feature (57)..(68): n is a, c, g, or t
ctgcttatagacacacatcagaaagattttcattccagttcacccacctttagcttnnnnnnnnnnnngattgcatttgccaactgatatttttcctgtttttaaagttacaaatgggtaacttcctaaagaaatgtaggatgcaaggacctgcatatcaagctgttagacactgagttgtcaaataaataatactaacattaaataagagtggttgtattattcagtactagtcagtgcaaaacacatgagctgagtggtttgaagaacaaggctggaggtttcccgcgacagcaccggacccctggccaaggctcaactcaggggagtccccacagcctgtctaaacatttgtttaaacgctcagcaagccgagcggatggtcaccctgttggagacgctggccgcatctggcctcctccctcgagacggtgtggcctgcttgttcgccctgtctgctcagacacaggctgggttgactggggctttaggcggccgcggcccttcccagctggctcgtggcggaaggctggccgtgctccgacgcgtgcacggatgaggtgcggcgtgggtgtggccagtcctgctgtggccgcctggtatagggctgagccgaggggaggtttcagcttgcgaggctggacctccttaaaggggaagggccttgtccagggcaccaagccttgctcacagagcagctggtgtaagtgaagctgcgacttcacccccggggcctgctctgcaaagcccagacattctgccaggagggggactcttcatcccagggaggcatgggctgggggccagggagcccatcttcccatgaccatccagaggcctctcacagatcgca

SEQ ID NO: 436582 - DNA, 579 bp, Homo Sapiens
  misc_feature (138)..(149): n is a, c, g, or t
agctatataaattgatctttagatttttctgcaaaagtagaatcacactttcatgacacttctaacatatcccatcaaggctgcttatagacacaacatcagaaagattttcattccagttcacccacctttagcttnnnnnnnnnnnngattgcatttgccaactgatatttttcctgtttttaaagttacaaatgggtaacttcctaaagaaatgtaggatgcaaggacctgcatatcaagctgttagacactgagttgtcaaataaataatactaacattaaataagagtggttgtattattcagtactagtcagtgcaaaacacatgagctgagtggtttgaagaacaaggctggaggtttcccgcgacagcaccggacccctggccaaggctcaactcgggagtccccacagcctgtctaaacatttgtttaaacgctcagcaagccgagcggatggtcaccctgttggagacgctggccgcatctggcctcctccctcgagacggtgtggcctgcttgttcgccctgtctgctcagacacaggctgggttgactggggctttaggcgtgtcgc

SEQ ID NO: 436583 - DNA, 1604 bp, Homo Sapiens
tttttttaccaacgggagatgcagtttatttacaccagcagccatgggggcagagggaatacacagcgtttacaaagttagctacctgtacagaatggattacatatgcaaaaataaaaatctcaagaccacaggacagcgtgagccccacccccctcccccaatgaccccagcatgcggtaatgccaggcgggtggcccctgggcatgcgggggggagtgatgcatggaaggaaaagccaccggccatggaaattagtacagaacccccccacacacactcagacacaggatacagggtggacgacacctagccggggtgggaaggatgggaattgaaacccacacagcctgctgttagagggaggggagtggggagctcctagcccctgttcaactacatggtaggggggggcactctctccccagaaggaaaagggtttgttccctcagggtccctgctggaccaagcccatctcttacccagcctgggcagggggctctgccctgagggcgggccaaggaacaatggggaagtttatgtggacaaaccagttcccaagctacttcccacttctccctcctccaaccagaaggggggaaaagggagaggccacagggcaaagagtgtattagggcctgagctgcagctgcctctcagaagggagagtggcccacagccttcctcccttcaccttcagcccactccccagactgcatctggaagcggctagaggcctgctgagatcctcctctccctctggcctcctctcggagggagactacggagggccaagaatagagaagcccaggccccgggatttattctaactcctgccaaaatctgtttggctttttaaaaaataatcacaatttgtgggttaaaaaccaatttgcaaccaggcatgagccacaatcagaaccaccccagcgggagagcggagttccagacagggcattgcagccccatctctgttgttcccttaaccctctagggtccctaacccgatcagtccaaccagtcctgggtactaactacccaaatgtgggatggctcctcttgggaagagggtaggggacatgtccagcaagtgccagagaacttggctcagggtcacctccacccgtgtcagtcagctctgctcccagcccaggtcgcggtcctccagcttggctcctgggagtggtggtgcccgcatggaggggggacggtacatctctttaggatgtagaccaggcaggtgggcacactggcatgacagtcccacagaggggcagtgacaccccttcccctccactgacaacctggggcacagaggccaccctctcttcccacccaactcctagcaaagggggagaggcacaagattaggattttcctcagagccccaaaccacaagtacagaataaataacttaaaagcgctaaggaagggaaacagggcacgctttggaggcaggagcgctgagaggaactgaagccagtcaaggtgaagggggtggaagcagcagttgggaacctgggctgccccggtagggcagtggggcagggtgggcaggaggaacacggggccaccccaggagggtgaggctgggtcccttcctg

SEQ ID NO: 436584 - DNA, 475 bp, Homo Sapiens
  misc_feature (61)..(61): n is a, c, g, or t
  misc_feature (81)..(82): n is a, c, g, or t
  misc_feature (91)..(91): n is a, c, g, or t
  misc_feature (172)..(193): n is a, c, g, or t
cttattcaatgaaaccctccaataatataattgatgactaatttcctagacctgagaaatnttttatcaagacactggcgnnctgcttttncctttagaattaaaattcaggatatcaatatttatacatttctaatttcaacacaaagggtatttgtttaaaatattaaannnnnnnnnnnnnnnnnnnnnncattttacaactttgctgccactcatgaaccacaagctgtactgacttcatgattgtaagagcattcgttagtttatattttcccttagggacaattcttgcatggatattttcacaaagttcataatttctataaaaaaacgcatgtgaaatagcttcaccttataatagaaaatttaccaaaatattatttcctgtggtgataaatatagggatatatattaatagcaaaggtaacaatctgtcttgaagctatctgaactttcactctacagtaatgac

SEQ ID NO: 436585 - DNA, 370 bp, Homo Sapiens
  misc_feature (14)..(14): n is a, c, g, or t
  misc_feature (36)..(36): n is a, c, g, or t
  misc_feature (104)..(178): n is a, c, g, or t
  misc_feature (201)..(201): n is a, c, g, or t
gcgggtggaagttntgttccatcccagagggagaancttgagctataagtgcttaaaatttagtttggtaagacccctggtgcattgatatgtcaaagccttcnnnnnnnnnnnnnnnnnnnnnnnnnnnnnnnnnnnnnnnnnnnnnnnnnnnnnnnnnnnnnnnnnnnnnnnnnnngcccagtccaagtctgaaaagtncagaaatacaattcctgggttaaagcaagcaaagctgcttttctaataactcccattttctatgcataccctgggtccagcattccatcttccaggtatggttagaaaagagatcagaccttagtgactgctggtgaagtgaattgcatgctgcagcccctcatcaggc

SEQ ID NO: 436586 - DNA, 556 bp, Homo Sapiens
  misc_feature (467)..(467): n is a, c, g, or t
  misc_feature (484)..(484): n is a, c, g, or t
ctctggggttcatgtttcttcttatcgaggtctcaggccttccagtccaatatattttgctccaaattttacttcaaggagagatcaagtatcaaatacctcatcaaattggagactttagggagtaaggcttaggaaaaatcaagagaatcaagggacccaattttcagtgggttttataatcataaagccacatgagtagttgactatcttcctgaataaattgttccatgttatcattaaatgtctcagcctggccagctctcgcattggtaaagcattggtggggatggaatatccctgagagatccatattcagagctctttcacaagtccagaaatgttcagtgtgcttttctgcttgtccaacactttcttgagcaattgatatcttctgaagctgacacatgacagggtggaagtatgtttcatctcagagggagaatcttgagctataagtgcttaanatttagtttggtaaganccctggtgcattgatatgtcaaagccttctaattatggagactggcaagtcccataatctgttgtctgaagc

SEQ ID NO: 436587 - DNA, 508 bp, Homo Sapiens
aaaaagaaaaggtttgtctttagttctctgcctctgcaagtctttgtgatcacatttgttaaattgaatctgagattcaaatatttcatttaatattttctgggttttgataatgggatattctgtaagataaagcaagtaatcctagagtgatttactttatgtttagccatccaccattttcctatttctctactcctcccattctccatttttaaaaggaaattaacaaatgtcttcctttatccctgcctcagataatttttccctgaactcatcttgtcagcagaaacatttaatgtgaaataattctgtatttctgagacaagatcaacacagtagttctttacattgagctgaggtgaatgtatacttaaaaatactctattttctttttatatgaacttaaaatttttaaaatcatatatgggactccccaatgtgaaaatattagtctggacattctcttgccatcaggtgctatttctaccttagctgtgagttagac

SEQ ID NO: 436588 - DNA, 1029 bp, Homo Sapiens
  misc_feature (38)..(38): n is a, c, g, or t
  misc_feature (145)..(170): n is a, c, g, or t
  misc_feature (1006)..(1006): n is a, c, g, or t
agaaaatggttcttttctaagcaatactatttttttcncgagggatgtttccctctttctttgtttttatattcctgtgggaatcagagctttgcatcaagaaaagtcacctaagcttttttgacagaggactggtgtaacttannnnnnnnnnnnnnnnnnnnnnnnnntgactgaatctatttttatggaaagatcagttaacgccatcaagacaccctaatgattggaggcaaaatttttccataatagtagtaccctctggtgggtgcacccaagaccgtgcaggaggagtttggtagcaatggagagtcctattaagccagcgtcattctttcaggtggagtcagagactctcgggtgcagctgctttggaaggagaccagccgcccccagccgacaggatcaaatgataatggtgatgacggtcccactaggaacttcacggctcactgccctgctctaggatgaagtgtcattatggccacagccctgctgtcaccccttcatcttggatgttgtgggtcctgcaactccttttgctttataaagtggtttcgtactccaaccgctcctgaataagggcatcatctttgtactgcagccttggaggagatggggaacattcaaaagctaaaatagcctttcggaggcttcggtccaaaacatgtctctcccatgctgggtacctattcctgaacaagtcaattttaatgactgattcttcaatccgtggtgggcgagatgatggggtggatggggcagtgggcctcacttgaaagacaggtacacacccatcccgctctgcgaatttctgatcgcggtcgctgacaacactgcggttgttggagatggaccgtagggtgcttgtggccacgtctgggggcaaagtgaaggcagcggctgggtcctcacaagcacaacttggtgactgcccgaatctgggtccattgggatgaaagaaggcataatacatcagcataaaaacaacgcccagttaaaaagntgctgaaccagtaggccaacgtg

SEQ ID NO: 436589 - DNA, 459 bp, Homo Sapiens
  misc_feature (13)..(15): n is a, c, g, or t
  misc_feature (59)..(59): n is a, c, g, or t
  misc_feature (65)..(68): n is a, c, g, or t
  misc_feature (72)..(72): n is a, c, g, or t
  misc_feature (75)..(75): n is a, c, g, or t
atttttaattttnnntcactttttttccaacatataaaaaggtagcggagttgtctgtnggtttnnnntttnttnttaaatggttaaatctttggtttgtttctttttttggttttcggttcaaaactttgttggcctccacaatagcaggagggcagggtggctcccagtggtgtctctcctctgtccgtcgtcagtggagacgtgtccggggctggtcaaacacagggtccagccaagagttgtggaggtcttgtgggagtggtggccaccaccgcgccctctcagatggggaccacaggctgtggcactgtccccaccacatggaccctgatggggatgccatctcgaggaaccccaccactggggtgtgtgcgtgcgtgcatgtggggggagggagaggcattcgccagtaccagaggggcacagggtgggaaaagcgaggtgagttctcttttt

SEQ ID NO: 436590 - DNA, 447 bp, Homo Sapiens
  misc_feature (144)..(144): n is a, c, g, or t
  misc_feature (289)..(289): n is a, c, g, or t
  misc_feature (427)..(427): n is a, c, g, or t
  misc_feature (429)..(429): n is a, c, g, or t
ctttctttttgaaagaaaatgtatgacctaaaaaatctcagaataccttgtgcttctttgtgaaatgaaaataaagagcagcaccatcaccacagtggctgtaggaggagagtcaatggactattaaatgggaaatcatctgtnttcagattttactttgccaccattacttccctccagtgagctgttatctggcagagggggccttaatcgcctcctatgctggcagaaaaccttcatgcatttagcacagctattcatataatgtgcaatcacctccacacaaaanttccaaataaaatatatgtcttcccagcacagacagtgccattagtgcatctaactgcccactgaactccaaagtcctaatgttattatattccagcttgttgagggctcattattttatctgagcctatttgatggntnacagatacttagttaatt

SEQ ID NO: 436591 - DNA, 875 bp, Homo Sapiens
  misc_feature (19)..(19): n is a, c, g, or t
  misc_feature (27)..(27): n is a, c, g, or t
tccaagtccaaaggaaaangggaaacntccaaaacagtggtgaacagggttttccccaacaagtatttttggaggcccatactttcggggaaaacaagatttaatgtgtgtgtggactttacagtatctacgttcctaactgaaaatttaacaaagcagtcagatggaattacatgtagtattacaaatgtgttcattcaacactaatgagcaccccactccttgcatagcactgggctaccattttacaagttgagtttaacgtctttatcaagcatgaccttagtgtgaggtaaaatacattaaattagcgtcaacgcgttagtctgcttgcggccatgtacggaatcctgggccagctggcttccctgtgccacgtcaccggtttctcaggtctcctcattcactcagacaaatacgtgcacactgactgtgtgtcagacagtgtgccggtcactcggacaccacaatctggtataggttcaaagaatgtaaatttatcattttaacctatgcagaacaattagaaaggcagattatttttccaaaatgaggtccaaagcaaactataaggtgtttctattggtcataccacaccagagaccggtaagtgcctttatagactgagaactaacgtggaagtttcatgctgtcgtctaaatagcctaggtcatttttggtctcataggtctattttgtggagcacctgaccccatataaatcattccatacttaaatgggtttgtaaactaaacctgaacataaacaaagagccaaaaatgaaggcagtttacaatgtaatgttcttcaacagcattactctccccatgagaaatgaataatacataagtaattcacaattggttcaacatttt

SEQ ID NO: 436592 - DNA, 1021 bp, Homo Sapiens
  misc_feature (509)..(524): n is a, c, g, or t
  misc_feature (980)..(980): n is a, c, g, or t
  misc_feature (1019)..(1019): n is a, c, g, or t
ccccctttggtttttttggttaaggaaaatttgtttttccgttttggcccccaaggggccaaaagtttccaaaaaaatttttttggttcctaaaaggaaaatacggttatttttttaaggccttttccagccataaaaatgttttttaaaaggcgtggtaaaaagatatttctatataagtaatatccccctctaaaaaaaattggagcgcttgtggagaccattttaaaaaacaaaacacagtcaacaagtataatactttccccctcattgtcattattgataacgatttattagtttcattttgcaagttttactaagggtgctattaccacgtaattatgacagttcacactgatagccattttctctaaaagatgttacaatgacccctatgatacttctataatttcatatttgatagccaagtgaaccaaaaaaagtttacaagtatgatcctgttaatctgattcttacgtctttaaaaaaaatagtctgtgctatgtacnnnnnnnnnnnnnnnngagaattctaaatcaatacaatgtttgatgttaatactgtcattctggagatcggctaaaatgaaagcatagttattatttagctttggtatattctgcgacagatttaaacaagtaagacatatatcaaccctcatattttccaaccatgaagttacaatagtggagtcacttatgagagaggaaatattgcagacacagaatcaaagtttgagacccagtttatctttaatcctctgggataagctatgaaacaagcagtctgaagagtgaatactcagtgtcatgagcgatgtgcataagtttacaataatatgggcacaaaagagattgtcgcctttagtacattagggtcattagaatttcttatatccatgcaccattatatctacttgcatgaatttaccacaggttcatagcggactttgccatttaatgcttacagagctaaagttncaaaatgctatctggctgtacatgtttcattaaaataanct

SEQ ID NO: 436593 - DNA, 499 bp, Homo Sapiens
  misc_feature (360)..(452): n is a, c, g, or t
tgctttttaagttttatttgcaatacttatatgatagatgttttttaattcctggaaaaataaatacacattattaataatagttatctggtagatggataacggtacatttctatgtaacattttcattttttgtaatcagaatgtattacctttacagataggcaaacacaaagatttgggaaaatgcatgtaaaatctaagaaaaaaggtaaattgtagatataatacattcacaaaaagaatataactgtgttgagctatatttacagatataaaaagatgaacaaattacattaggttttttaaaaaaagacaacctaacagtatgtatcgatgatagcacgtttgttctttaannnnnnnnnnnnnnnnnnnnnnnnnnnnnnnnnnnnnnnnnnnnnnnnnnnnnnnnnnnnnnnnnnnnnnnnnnnnnnnnnnnnnnnnnnnnngagctgggcaatatagtgagaccctatctatattaaaagaaaaaatt

SEQ ID NO: 436594 - DNA, 925 bp, Homo Sapiens
  misc_feature (314)..(314): n is a, c, g, or t
gatgtgagcaggtgtgtggaagatgggggggatggtgtggtgtgggaagtggcgaagcatgttattagcacaaaactgtgttcctgttatcaaatgaaatgcgcttcctatgttacactcagtagttgttcaaaccagtttctcttgacttcagtagccaaattgcagcatgctgtgtaggtacacagtgcacttgagaaatgtctgcacatcccaaccctgcactatatcacaagcagtagtgaaaggtgtagcaaataagaagattccatgaacttctcagctacctgagacttctgctgcaccctgaaaanaaaaatcaggctagaaaccacataaaacaactaaaccaaactgaatgcaggggctgctatgaggaagaatgaactttgcagcctgttccaaatgctaaggtgaaggaggtccttcctggctctgctcactaggtgtgcaagtcaggagatattcatttcgtgatcatcctgttcctatcacctgtggtgaaatttctactgctttcaagtcttccagcccctatttgaatgccaaaattcttaagttccttcaagtaaaagagatcttcattttaaaaataaaagtcaatggctctggtctcctgtagccttttcagcccctgtaacagtgctttctcacttagattttcactgtcacttcaataaaggggtgagaagagagaactggcctgcgatcaatgaaaactattcagtaaaaactcttcatgccagacatggccccagaaacaggaggaaagtttaccagacagcaggagtgggtggtggctgggtccagtggaatgggtaaaccggctagccgcggccagcagagccttcgagcggctctgtcaggctgcctggagcgtaaggaagaagaaggcgcgaaggaagaagacttcctcatattcttg

SEQ ID NO: 436595 - DNA, 2440 bp, Homo Sapiens
  misc_feature (22)..(23): n is a, c, g, or t
  misc_feature (25)..(25): n is a, c, g, or t
  misc_feature (33)..(33): n is a, c, g, or t
  misc_feature (38)..(38): n is a, c, g, or t
  misc_feature (42)..(42): n is a, c, g, or t
  misc_feature (74)..(74): n is a, c, g, or t
  misc_feature (260)..(260): n is a, c, g, or t
  misc_feature (268)..(268): n is a, c, g, or t
  misc_feature (272)..(272): n is a, c, g, or t
  misc_feature (276)..(276): n is a, c, g, or t
  misc_feature (509)..(583): n is a, c, g, or t
  misc_feature (590)..(665): n is a, c, g, or t
  misc_feature (849)..(849): n is a, c, g, or t
tttattgtctccattcctaggnngnggtatcanagagnagtnggaatggtacaggtatttctttgttccccagntatgtatctgtatctgtatctatatatatagataaagatatatgtttgtaaacaaagccaggcatacaaacaggttaatttccgcaaagtacatttgaatagtcttaatctttaaaatgtttaactaaaagatggtataaactactaagcgttttattacgcttattagctccgtcagccaaatgngcccttgnatgnctgngaactaaaatattattccaagaataagtccaattacaagtatttcaaaaccaaaatacagcaaatgcccaaagttagcgagccttctgagctaaaatgctgttggtaaaagcacagaaatgttggtatgtgaagaagcccagcactgggggcagggaaaatagaggcatatgcttcatttagggtagggttataaccaaagttatcttcaggtgcgtcataaaagctggcctnnnnnnnnnnnnnnnnnnnnnnnnnnnnnnnnnnnnnnnnnnnnnnnnnnnnnnnnnnnnnnnnnnnnnnnnnnnatcaatnnnnnnnnnnnnnnnnnnnnnnnnnnnnnnnnnnnnnnnnnnnnnnnnnnnnnnnnnnnnnnnnnnnnnnnnnnnntaaaaaaacaacaaacctgccccacatgctagggcaagcccacctgccagcactgtcatgaaggtttagccttgttgctagggatgctctaataagcaggaagatgtctgacagtcactgacaggaaaattaattacaggctcctcgactcctcaacttttctaatataacttggacaagacanatcaaccagaatacaaataaaaagtcacatgcttggttcctttaagcttatttaatatttgaaatcttattttctattttcccagaccccagaaaacagaaagtttttagatgaccaatattttgttccagaaacatacagccttatcagctaattcataaaagagctattttacaaaggtacatctggataattagaacaataaagtcttttaggcatttcaaaatgtgatcagtaaaaatacatgattattaataaagtttttttaaagatagttccagatattttttaaaagcaatttctgttaaagagtacatgattgtatggtgaacaaggaaaataaaatgttctagtaggaagaggcttattaaaaataaccaacagtgtgcacatgacagttaccatttttggaatatatctgcttagcagttggcacctggaaatggtggggaaggcttccttctaggaggtacttttttttcctaccaatttattatcaaaaccctcaataccagtggggaaggcataaggaataaggcaaaaggaactcttttcttgaggaaagaaaaattttgtagatgactctgaaaagtggtggaaatatcaggaaaaaaatgacttataaaacaaaaattgtaatataagggggaaaaactagccatgaggaagctgactgtgaggccctgctaattttgtattttgaggtcctatgcacgcagttctcagtggtgccctctgtgacatatagggaaggaaatactgaccaaagctctagtaattcaaaaccatatatcgacttcagagaagaaagcttccactttgaaatatggaagccccacgtattacaccaaatttactaacatcaaagaggaaaacaaagatgccagtaaaagacaattcacaggaagcataattactttctttagcttctaaaaataatttttaaatggacttctctattatccctcctaactcaaaatcaaataaacaacaacaacaacaactttttaaaaaggggattcatccttcattggcagttgctgtgggaaaaaagaaagccaaaaagctcataaaatatacctcccatgaaatacaatacatagttacaatttcggttctaaaagccaatgtaattcaagcagtccaagttaggtgattttaaagtatgcaaaatatatagcttcgaaggtggtaatcatgatgttaaattacagcactttgggggcttgctgatttgccttgattaactgttctctgaaaaggaaggagacactctacatgtaatttgccacttcatagcaaaggaaccattaagcccacagaagagagcacagtgtcacagcaggtcacttccatagctaaaatgcagcctgcttgctctgggaaggtagctttctttgtacaccacccctgtgccctttagcagggaagtagatttcaacttctagtcacgtcacttagaaaaaactcctctgatggtgaccagtctcactcaaagacagactgcatctaattccatcatcctgaaaggaagatgtcacaaccaaagtcaaacggatgtgactcccgcgtacctcggccgcgaccacgc

SEQ ID NO: 436596 - DNA, 356 bp, Homo Sapiens
  misc_feature (332)..(332): n is a, c, g, or t
tgagactatgtctgccttgcttccatttgtaactaaaatctagcagaatgcctaggctaacaaaaaatttttggttaagtgaaaaaagataataaattaattccctcatctgttaatctattggcatgtcacagaattatcatctggtaccagtgaaagaattacttaaagtttgtatgacaactgttatttcaatttatacagatgattcaggattgagtaaaggttgaattaagacatttggtcaggtgtaatgctcaataaattgagcattcgctgagattagtaaatgctgttatttcagtggattgcaattatttaaagtctggtgnatgtaatctttattgtagtccact

SEQ ID NO: 436597 - DNA, 536 bp, Homo Sapiens
tttttggtacagaaactaccacagcaagaagcggtaatgtaaaaggatatacaaatcaatcaatcattgattggccaatgatatgcaaagtagcaaaaacaatgcctctatttatcctcgccattaatctattcaaacatataaagattttactggtaaaattatacaactgtgttagacgtaatgcagtaggtaccttatacaaatcattgaaaacttacatttaaaaggagtccctcattgggtccacaaaactaatctctttttacctcctgcccagtcagcacttgctactgcacagggataagaatcccacccagctatccggataagggagatgtccctctcaaattaagtatgcaaaagcctaaaaatatttcattaagaggtactgaaaaaagcttaacttctaaaattgagacccaattcttcttttattgtgcatagaaaggtgaaccaatgtattatcttgtaagtaaagctaataaaggcagtcttgaacactcaatcgttgttccttgcagttacagccctct

SEQ ID NO: 436598 - DNA, 383 bp, Homo Sapiens
  misc_feature (144)..(206): n is a, c, g, or t
cccgcctaatctctgaacctctcctttagctgatacagggaaggaggaggcagagagatggcaagaggggagttttgagggtttgggtgttaggtacactaatggtgctttctagcataccaaggaaaccattcaaggcagaannnnnnnnnnnnnnnnnnnnnnnnnnnnnnnnnnnnnnnnnnnnnnnnnnnnnnnnnnnnnnnggacatcaagtgcagaacaatctttttctaactctagtgtcattacacaggtacattaccaggcttctaggtcattatcttctatgtgtgcttttacacaattacctgagagctttttaaaactatacattccagctggacgcatctgttatcccagctacaggaggactgcttgag

SEQ ID NO: 436599 - DNA, 841 bp, Homo Sapiens
aatgaaagaaagttgataatttaggaaaaccaatggtatgacatgttttactagaattacaattcaccaaatcttattgaggggtggggtaagaagaaaacctgaaggcaggcaatgcattaaaagcatcaatagagatttctggtgctaataaagttcactgacaataagaactttactttcttccacctaaagaagtttccttaagtactaacttttaaaagtccattctgtcatgatatgagcctgttcactgaaccgtgaggaacaaggatgaaaaataagaatagaaagagtatggttcagcctgagtctaagtggtctggtgttttatgatgactctaccaaatgtttaatttaaagtcttaatttcttatttttaattataatgttgccaactgtctgactgaccttgaaggatcagggatttttccacgactctaactgaacacaagatccttctcagacggggagaatgaagtgacaacagtgtgtcgatctgcgcaagttgtgcagctactgaaggagaagcaggaacacaacagggaatgcagacgcctaccaggaaatcgatgtgaactgctctcaattatgcagcaaatactaagaagaaaggacaatgctgaattcaaattcagttaaaggcagtcctcaggctctttcaagctagccctagatggcaagtgtgtcctgagacaggtttctctaactgggtttcagcagcggggctttaccatcccttcagatcttttcctaaagacaaaaatgacaaagtctatagatggaagagggggtaatgaagcaggtaggggaaaaagatgctgagctcattggttaagtg

SEQ ID NO: 436600 - DNA, 499 bp, Homo Sapiens
  misc_feature (379)..(394): n is a, c, g, or t
  misc_feature (439)..(447): n is a, c, g, or t
tggaggtataatggcacagcagttttaatacaaccaccaatcttcacaaaataattttaatactttgtgcctgggctagcagcatcttgcactgtgacattcctatacagacataagcattttatccaagtacaaatgttaaaagcagagtaacttaagcaattgtgtatacaaaggtatacagacactgtaggttatttttcttcttgaatcatttttgctgcatagtaaattgcaattacatgtcagtataatgttactgatctatagaatacactttgaactgtgaggtatggcagctccctatgagagagagctaacatgtaaacctgaatattttgagtgatttttgttttagctgccacagatgggaaagacnnnnnnnnnnnnnnnnttccagcattcaaagaccctagagacttacttttctaatcaattnnnnnnnnnggtctttcagtacttctcatctattttctagcattcccttatcggagcaccc

SEQ ID NO: 436601 - DNA, 1155 bp, Homo Sapiens
  misc_feature (480)..(480): n is a, c, g, or t
  misc_feature (587)..(623): n is a, c, g, or t
ggtgggttccttggggaaatttcgtgaaggactcttgagaagtgtcgcatgcgcaaaatttgggggacgactgcggacatgggagcttgacctctgaggcaaagtgcgaaacttgcgagagatagagcatcgagcagcgagagccccacgtgtatcagcagaggaaatagacagatttggcacagcgaacgacataagatgcagaagattaaagatgcgataaaaataagacatttgaatcacatgatgtaaactcatgaagaagttcatgatgcaagtgcagaatgcgtagaatttcaacattatttttcattatatgagatgatctgcccccagtaacgatatctcatacgaatgcctcaacttcatgctccctaatttttctcttatggctctcatctcctccattaatgatttccatatcatctccatctccagcccagcctcagcatttaaactcctaatttttgaattgcccantctaaaataagtttcagatttcctcaattccctgtccccttctatttgtccctcattcttgcttcccatcactcttgctggcctatatgatataaaaaacgcttacnnnnnnnnnnnnnnnnnnnnnnnnnnnnnnnnnnnnnagagcttgctaaatatgatgtactactgcatgtattgcaatactcaggcctcggaaagcttcctttctccccacattggaaggtttttatggttttgtcatttagtatggagcaaaacggttgtatccccctcggtatatactagcctgcaatgaagaaagaacgagacccacatcatcagcatggctcctagtcttggcatcagtcaaaggtgcaaaagcattcatggcaccaacgccgtaggtgggggctggagcaagtgcgtggtggtaggggtcggcagcataaactcgtccgtaactgtcactgtaggcagcggcagtggcaggggtaggctgggcgtagcggtatgcagcataaccaccataaatgtctgcaccataaaatccatcctggtaaacaacaccgccgtaggccgggatcgggggcgggggcgccgcggccctgaaggtgttgtacacggtgcgaccgcggcctcgcaggtgcgcccctcggtaggcggccgcgacggtggctgctggatacgggaagc

SEQ ID NO: 436602 - DNA, 422 bp, Homo Sapiens
  misc_feature (39)..(39): n is a, c, g, or t
  misc_feature (93)..(93): n is a, c, g, or t
  misc_feature (130)..(130): n is a, c, g, or t
  misc_feature (139)..(139): n is a, c, g, or t
  misc_feature (398)..(398): n is a, c, g, or t
  misc_feature (414)..(414): n is a, c, g, or t
aaattattggtgattatgtggcaggatgttttggatgtntcttctccaggactgatccaaagaataaactttaaaagataaactcgttttctntgaattgctgtgcaaatgatagcatatttactctganagttaactngtgcaggaaagaggcagaaagaaattgagacccgtgtacctacatcttgaaagaggctttttgtagcttccctgcttcatctatgtcttatcgtatttagtttcatgaagccaaatgccatgaacctacctttccctctcatgattctgctgttgtataccttctcacacactactttgtactgagttgccctttatggcgatggtgaggcacttacctcagaggattatgggctgtgtgtctaatagacctgaatggncctgtgtatcagcggnactggacc

SEQ ID NO: 436603 - DNA, 663 bp, Homo Sapiens
  misc_feature (229)..(266): n is a, c, g, or t
  misc_feature (592)..(592): n is a, c, g, or t
  misc_feature (616)..(616): n is a, c, g, or t
  misc_feature (621)..(621): n is a, c, g, or t
gtcttccaagaggtgaagttcttgtttattgttgcagcaactcttatacagacattagcgttcagttaaataaaggaagatagatagcacagtaaatacatcacaaccccaaactggatgactgtggccacgggacggaggagggagggagggagggaccagtgaccagactgtcaaggaagtacattcagtgggtgtgcggtgtccacattccaggctcacgtgtagnnnnnnnnnnnnnnnnnnnnnnnnnnnnnnnnnnnnnngatcattgagttttgtgtatacaaagaacgatattgttacaaatacaatactatacttctcccgacactttacaataagctctatttcaccctctttacagaacaatagtacaagttcatactctaggtgctgtgctaattatgtacaagaaatgtcattcccacacagtcctcacacactgccttgatggaggggaagaaagatcgagttgtgtgctcaagtcaacctaggccagggaaggagacacatgaaactcaaaccaacaggtggcctgtgaatgcgagtaaacacatctaaggcgtgggggcgggcccctggtttggtnaaacatttgggtaacgggttacancactngggtccgaggggacccaggaaggggctctgtagatgggtttc

SEQ ID NO: 436604 - DNA, 213 bp, Homo Sapiens
  misc_feature (117)..(117): n is a, c, g, or t
  misc_feature (122)..(122): n is a, c, g, or t
  misc_feature (145)..(145): n is a, c, g, or t
  misc_feature (150)..(150): n is a, c, g, or t
  misc_feature (156)..(156): n is a, c, g, or t
gaatgtttaaatgtttattttcatgttaaaaacgatgtgttaccctgtggttagaatatacttttatgctgaaaaatgaagtcactttatttccgaaatatttccagaaaaaaaganaaganaaaaatccaaaagtcaagaagantaagntgaaantgttctggcagattccatcatcaatcccaacataagccacagcctttctaggccaga

SEQ ID NO: 436605 - DNA, 1104 bp, Homo Sapiens
ttttataaagggacactgcagtatttagtacaagttcggatgcacttttttgaacatctgatgtcttacaaaagtaacatcttgctaaactattatacatccaaataactacaatatctgaagaagcaaggctgctttttcagccacaaaatacgacaaaagcaaggattttctatgtacagtacagacagggtatagttcaatcctctgctactgaggtagttaaccaacccttttaaaaaggttctgaaaagaaccactatctggaatgcctgactaaccagctctgatgattacacctgaaactgcatatctgaacacaattcaaaagtgatcactataaaaaagatatagacaatcatgattaaccttggtgagcagaaataaaatttaaggataccatcagtggcattcatctataccactgcaataaaatttaaatgcacaaattcaagagaatatttcaaaataccactgttgggatccttaatttaaaaaaggggaaaaatctacttagagcagatttttaaaagaactttattctttattaagataccatgctaggagttatgaaggatttctgttggaacacattttgaaaatagagtagctttagtttaataacttgcactgcagagaaaattgttaaagaaattcatatcaaagtccaagtattagttcaatgtcccgtatttgattccatgatcttcataggaaggtcttctgcaatagaatatgctcctatacagccgacatatttaaggttgcttgatttccttaccattactccactgcaagcttctggtgtaatcccacatagcaagtcagtcttcattgtaacaggtcaggaccggcctcgaccccttttccctgcccgcggcctctttgttgttgggcacctcctctcgcacctcgaacgcctcttgctgatccaggacctcctctctgtgaataaccggctctaccgcggggaggagcagccccacgacctctggatggagcagcaccccttgctcctctaccaccccttcctctagctccaacttgaaaatcttcataaccatagtatggatcttcatatccaccacgatagttatggtaatc

SEQ ID NO: 436606 - DNA, 1140 bp, Homo Sapiens
  misc_feature (141)..(141): n is a, c, g, or t
  misc_feature (180)..(181): n is a, c, g, or t
ggggaaatcctgcccgaaggccccaaattataggggccccccgtcaggatttagggtgagtttctggatcaacctttccagttttccatttttacagaggccctactgtttctacttccacttgtgggccaaaagtatccntgataaaactcctggttttcagatttgtaaccatagtannccagaatgatcaccaccttgggagccggtgctgagcaatgggttgggagccccagttctgattattggtctggcgccgcttggaatctggctggttgtacccatcagctttgcgctttcctcctacatttccaccgcggccacccctcgcaccacgtaccccgcggcctctttgttgttgggcacctcctctcgcacctcgaacgcctcttgctgatccaggacctcctctctgtgaataaccggctctaccgcggggaggagcagccccacgacctctggatggagcagcaccccttgctcctctaccaccccttcctctagctccaacttgaaaatcttcataaccatagtatggatcttcatatcctccgcgatagttatggtaatcatatccataataatcataataatcttcatatccataataatctgtaggatatccataaccacctctgcctgcacgccctcgacctcttgttggagggggcatatgaggtgggccataatagtagtaatcgtcatacatttgattttttgctgcttgcctctgagcttttctttctttccttttctgatctggtggcttggcaaaaacaatttcaatattttctccctccaagtctttgccattcatttcttccatagccttgacagcaccatctcgctcatcaaaatgaatgaacgcataatcttttaacttcttcactcgttccagtttcccaaactgactaaatgccttttctaaaatctcttctgttacagtattggcaaggttgcgtacaaacagcacttttacctttgccataacctcaggatcaggatcttctataggatcagcccattcgacagttccaacattcccccagaccttgactttaccactcattaacctacgccttgcctgggcagctgttttgtgatcttcatattcaagaaagcaaaagcctctgttttttt

SEQ ID NO: 436607 - DNA, 445 bp, Homo Sapiens
  misc_feature (55)..(91): n is a, c, g, or t
  misc_feature (426)..(426): n is a, c, g, or t
aaggagatgatgatagaccactatgggcgaactggagctcaccgcggtggggcgnnnnnnnnnnnnnnnnnnnnnnnnnnnnnnnnnnnnnatcaggccaaatcggccgagctcgaattcgtcgagagcggaattattgcttatgtcatttcttaagcagttatgctcttaatgcttaaaagaaggctagcattgtttgcacaaaaagttggtgattcccaccccaaatagtaataaaattacttctgttgagtaaactttttatgtcatcgtaaaagctgaaaaaatccctttgtttctatttataaaaaaagtgcttttctatatgtacccttgataacagattttgaagaaatcctgtaagatgataaagcatttgaatggtacagtagatgtaaaaaaaattcagtttaaaagaacatttgnttttacattaaatgtttat

SEQ ID NO: 436608 - DNA, 413 bp, Homo Sapiens
  misc_feature (28)..(28): n is a, c, g, or t
  misc_feature (74)..(74): n is a, c, g, or t
  misc_feature (81)..(81): n is a, c, g, or t
  misc_feature (125)..(125): n is a, c, g, or t
  misc_feature (178)..(178): n is a, c, g, or t
  misc_feature (186)..(186): n is a, c, g, or t
  misc_feature (192)..(192): n is a, c, g, or t
  misc_feature (208)..(209): n is a, c, g, or t
  misc_feature (214)..(214): n is a, c, g, or t
  misc_feature (217)..(217): n is a, c, g, or t
  misc_feature (226)..(226): n is a, c, g, or t
  misc_feature (233)..(233): n is a, c, g, or t
  misc_feature (237)..(237): n is a, c, g, or t
  misc_feature (255)..(255): n is a, c, g, or t
  misc_feature (266)..(266): n is a, c, g, or t
  misc_feature (289)..(290): n is a, c, g, or t
  misc_feature (311)..(311): n is a, c, g, or t
  misc_feature (321)..(321): n is a, c, g, or t
  misc_feature (340)..(340): n is a, c, g, or t
  misc_feature (350)..(350): n is a, c, g, or t
  misc_feature (358)..(358): n is a, c, g, or t
  misc_feature (401)..(401): n is a, c, g, or t
  misc_feature (404)..(404): n is a, c, g, or t
gttttttgtcatattgcctctagatttncttctgtgcttctctctatctgctctggaatggatgagtgaatgtnttctgcnggtgttttagggaacatattgatagacatgaccaccttgcagancaaaatctctctctctctttttgctttttatagaaaagcaagtgcatagttanttaattgncattcnatttttccagatattnncactnccntataatggnttgttcnttgnatacctgtaaaattgtgncaatttccaantattaattgtaggtcatatctgnngcaaatcattcttggtctgtnctttctaggntattccatagaatcaacanattttaaggnctgaaagnatactgtcgaaatcacccagtcccaaccccccaatttaaaatngantctagtaaa

SEQ ID NO: 436609 - DNA, 343 bp, Homo Sapiens
ttggcatttattgagagttttatttgaatgcttattaaaagtatatgatttataatatttagaaaatagaagaaaaaagaaaactgtagatgttttatcttgttttaatactgtatgtttagtacgtatacatttatgttctagtgtatcaaaatttttcattttcattaaagtgaatcccattttccatattctaggtccattttaaaccatgaaaactttaatcacatattttgtaaagggctgaaagtatgatttaaactacagattgatatattttaattctaaatgaaaggtaatgtaaataagcatggatctgattgaataaagattttaaaatagt

SEQ ID NO: 436610 - DNA, 651 bp, Homo Sapiens
  misc_feature (81)..(298): n is a, c, g, or t
tcggtcaacccccagttttgatttacagggggagttacagttccaattaggttttttgggggaaagaggaccgaccatttnnnnnnnnnnnnnnnnnnnnnnnnnnnnnnnnnnnnnnnnnnnnnnnnnnnnnnnnnnnnnnnnnnnnnnnnnnnnnnnnnnnnnnnnnnnnnnnnnnnnnnnnnnnnnnnnnnnnnnnnnnnnnnnnnnnnnnnnnnnnnnnnnnnnnnnnnnnnnnnnnnnnnnnnnnnnnnnnnnnnnnnnnnnnnnnnnnnnnnnnnnnnnnnnnnnnnnnnnnatattttctaattctatacatttcttattgcttatctgtcctgtcattctgcccttgaatgttacacacacacaaaaatcaagctgaccaaaaagctattagactactttttactactaaaatgaagaaaattaattttatgaatctggctcacactgaaagaatatttattaacactaccaatcagagatccaatgacagaaacactgtctggaatacaaaaagaacaaaaaatgaggtcatttgaattgccctgaaaaactccaaattcttcaagatggtgtacttgtatctatattctgaagtactagtgttttaattttaactaaaaattaaataagagtttgtttttt

SEQ ID NO: 436611 - DNA, 685 bp, Homo Sapiens
  misc_feature (74)..(74): n is a, c, g, or t
  misc_feature (406)..(420): n is a, c, g, or t
gggctgcatgcaattgaacccaaaccaaaggcctgcagcgggagtctacgcatggggctgaacaagtccaggtnaaaatctgcagggctggagagattaatacttggcttgttgtagaaagtgtcctcaggtagagacaaagcatgcagaaacttactcattcttcaccccaaatctgaccccaaccggtagtcacaacaggcatggacagcctggcaacagctactcaattgcacgtgagtgaaacacacagctgggtccaaccacggcttttccttcaaatcaacatcaatgctcagcaataccgcaacgaacagcgtgaggaaagattctcatgccacggtgcgcgaaagggagtcgggacaggcaaggcagagagactcaaaattcatcgacaggacgtgcnnnnnnnnnnnnnnnacacaagaaagtgctgcttacattgttgttttgtgttatttagtgatttgttcagcgctcatctcttccaccagactgcgcttcctgaggacaggttttttaaagcacctcacatagggtgcgcgtctggtacactgtcgccgagtaccagacaaccagtgtctcacacgggggaagacgatgaagacagcaatggcatccttgggaagatgggcaggagaccccatgacacctggcacctgggcctaagctgggaggccagcgg

SEQ ID NO: 436612 - DNA, 1582 bp, Homo Sapiens
  misc_feature (1126)..(1126): n is a, c, g, or t
tttgtcgctttctcttatattgtggatattttatccctgtctttcacagcagcaattttaataaacagatgcctgcagcatttcaccactacacaagagctactcgcgctcgggcaggcgcacacctgcctgtgtacacaggtcctcgcacagcacggcaaacgcagccaggcctttgggacacaggcctctgaagtgtaagttagcagccctcaccccgacaagcttctaaagaccaaaaatacctctatcctccactacataaagcttgtgagtagcaaaacttgtaaaaatgaagtgtacaaaaggaaacatccgtataatacatttgcaccctgtatacaatgggtccctttgaaactggccaacagtcagcgatggcagattttcaatcatagaaaaagaagccagtggctgtcatgcgcactcaggtcaatggtttgtgtgggttctccagagagagagattttcctttacagttacagtacttgctggcgatcttgctgattaaaaggccagttgaatttcctggcatttaggcaagtaacatttgattgtcacaacgtacaattctgagacaataaatacaagtagatcagatgcatttcttcattgtatcaagtaactccagtttaatgtaatacaatttagtgcatttcagtatctcattcacagttcgacttctgtccaaatacttgtgcaacaaaaagttaagaaatggagacgaactccaggtgacattgtcattacacagcttcaaattctaagacaactcaatgatctttgaaaagcgtacgctgctgttgcctgggccggcgacaccaatgtccctggtaacttcctgggctccctaaaagtgttcccgtcattctatttcccgagcagtttgtaagaatgccaccattatccctgaattaacaagcagccagtggcgagtgttcatgataaaactgaattcatgtgtccaccccactccagcagatcagtgtgacatcttttacgcaaaaattgtttttgcatcctggccccgataggcaggaatacggagccggatgtctgcatcccccaggtcggccccacggcaggggtatggggcagagacacagggcggagtcaggggtgtgcncggccccatcccccgaggcccgagggggcttgcctttggtttggggactagctcagtagagaaaggggcaggcacacggccggggacgtgctgtttccagaaagaaggcaggcaggcttttcgggctggccgtttgaaccctgagcctaggtgcagtgcaagggctagaagcacatcgcgccgtggagcactagtattgcacgccaggggctgcatgcagtgagccatcaggccagaggcctgcagcgggagtctacgcatggggctgaacaagtcaggtgtaaatctgcagggctggagagattatacttggcttgttgtagaagtgtctcaggtagagacgaagcatgcagaaacttactcattcttcaccccagatctgaccccaaccggtagtcacaccaggcatgcgacgcgtgggtcgacgatatcccgatacccggggtaccgcctgct

SEQ ID NO: 436613 - DNA, 1162 bp, Homo Sapiens
  misc_feature (1077)..(1090): n is a, c, g, or t
tcttttgaatatttctttaatattacatttaaatattctctttaaatacagcattatcacaatgtaaagaacctaaaggggaaaaaattattttcagagaaccagacaagctttggattcacattgaaaatactacctgtgtacagtatgtgagaaaggaaattggaaaataataagggttgtggtaataagagtcatttatctaggcctagactgggactgaagctatctgcttctatgatcagaggcctagctttcctagcaaccatgagctagaattctgtccaactcaggtagcaccagaagtgagatggactaggttgtagagaaggcctttcgcttgacaagacagttaatgctaaatgttaatatttagcacttaaaagtttgggatcagtgtgagtcacaactgtagcgttaatgaaggggatggacttaaattaagaaactacaggttttcagaaacatatcttgtgggttggcaatgagcttaataattacagattcatattcctggtttgatcccaaaagctaatgtgttcctcatcgtgcagctggaatctacttcctagattaagccggagccttcctgcagagacagtgggcaaacctcaccctccccttccgacacaaactttgaaaaagattcttttctccataaagccaaattcccaattaagcttcagtcctgtgtttgagggtaccagtctaaggtaggggagtctagttcagttctgggtagcttcgagagctcaggtacttaaaagactctcaactgtgttttgtgaggctaggggatggggagagataaggatctgtgtacttaagttcccctccaaactaaaaccaagcaaaaactggaacaaataggaaaggcagaatgaactaaaaaatgttatgtgtattaaatacaaatcttttcaggctcagagtttagagacttcaggggtgaaatgctgctgcgacatacgtgatggtttctgtaagacaccagggccttaatatcccaccagaaaaggctttatgagcaagataagtaggagtagtgtctcccccccaacacagtttttcactttnnnnnnnnnnnnnngttaataaaccataccagaagtaaagtatggtgtaaaggatgcttgagaagaatagttttgctccctactgc

SEQ ID NO: 436614 - DNA, 316 bp, Homo Sapiens
  misc_feature (23)..(23): n is a, c, g, or t
tttaggaccaatacaaaatgacnaaatgtaatggaatcagactgaattaagtaaggctgtatattgaaagtcatattataaaaggtttgctttctttaagtgtatttatcttaaattataatcgttaaatgtttggaagataatttttgaatcataacgtcagcataacttcatttgacttctcaataatcttgatactagaagcaataaaagaaccattattaaatatattgtaatgttaaagatgtgaaggttcttccaaaaatttgtaaggctttcctaattaacagtaaactcttatagctgatattattac

SEQ ID NO: 436615 - DNA, 677 bp, Homo Sapiens
  misc_feature (2)..(2): n is a, c, g, or t
  misc_feature (11)..(11): n is a, c, g, or t
  misc_feature (30)..(30): n is a, c, g, or t
  misc_feature (36)..(36): n is a, c, g, or t
  misc_feature (554)..(554): n is a, c, g, or t
tnccatctaanaattcagtgtgtgaaattnctttanttttagaaagtatgttctatagtaaaataatgtttccacattatattatgttatatttcacttaaaatactattcatactatacattctaagactggtgcttctgcttttgaaggggaaaatgccaatttttactgtaataagtaatgtatcataattaaaaattatttatttggacttcttctcctgacaattgtggcttaattcatgacttgtttttgaatgcaggcagtatttagggtagtttaaatgagtaaattcagcactggtaccttattattgagtaatttcccatgggtagcagtgtctcaagagtggtcaaaagctccactcttaggcttttttactactaaagattccacataatttaaatgggaaagaactataccctgacacataatttaaattatataaatgctagaaatatggttaatgtattttactttgcatttgtgtagtactttatagtttacaaagcatatttacaccaattattttatgtaatcctcataataaccntggtataaacctggaagggtatggctttatttttatagataagaaaaatgaagccaagacagggtaaataacatgccaaatcacaaactagtaagagacatagttgaagcttaaattcaagtt

SEQ ID NO: 436616 - DNA, 1313 bp, Homo Sapiens
ttttttcttctgtagaaaacatttaataatagggaggtgacagggaaaacaaagcaagggcagtgttggggcatcagaccagggcagggctggaactagggagaagcaaccagttaagaggcaggctactacaggtagcaaatggagagccctctcacccagccaactccaagagttcctcttgtcccttgtgctctaccccaaactttagccccagcacctgttcctcatctccagcaaagaacagcagggcaggacctgaactggtctcttttcaggggctgtcttgaagatggctgttttagcagacatgaggctgcccaaaggtttctacaagccacctgcgtggactttgggggttgttgaacacatgccctgataaccatgaattggagacctggatctaaacatgggctagctacccatcctggcatctttggctaatacccttagcttggtgcccctatctgagaatgatactttgggctgttcaagatcctgtctgaggagcctcacatgggtttcctagttaagttgtaaagtcactctgccagagaaggttatcaccgcaaaaggcaggacctggtgggctgggctctccatacacttccagctctgactgcctggtataaatgttcctcttgagatggatgtgtgttgaggtggatagtgagagcactgggcggtggctagggatagggcaggcaggatttgctcttggtcacactggagggatgcccagaccacacccgggcactagagcagttctgggatacagtgtctgaatcctcagtggtcactgctctcttggccctgactgtgcaagggaatcacgaacacagagacgtcatcgtaggacacctgcccttcctctgtgagactgtcttcctttccctgtgtgctgtgtatcagcatctgggccagctttgagaacctgtgtgggtcctcttggttcccagggaggaagctccgcaccagccatgccacctgctcgttggacagtacatcccagagtccatcagttgccatgacaaccacatcatcctcctgtagctccagctggtccacatccagcacagtcacctgtggcacagagagcaagaagggcttgagctggatgtttgtgtccaggactctgagctgatggtctcccaggccccgggagacagccagtgttcctagtaaccgagcctgcctaccctgtccatggatcagtgggtacttgagatccgatttctccacacgtttgtagctccagccactcatgtggtgatccctgaacaaaaccctcgtgccgaattcgccacccaggc

SEQ ID NO: 436617 - DNA, 1275 bp, Homo Sapiens
  misc_feature (333)..(370): n is a, c, g, or t
accatcgggtaatttaatattgtgttaccagtgtgattacgagttgaggtagtataatgtgtgtggggaggcgcggctggataatatagtaacatgtgggctgtagtagatgatataattgtgtagatagttttccttagcagcttaagaggcacagtggcttgtgttgtggttcactggttggcgggtgatagcgtttactcttactcctaagtcgggtgggggttaaattggggcgctcgaagggtgtgttgccggcggtggcctttcccaatgttccaggatttgcagggccggagccggcgccgcctaggccgtaaatcagattttttnnnnnnnnnnnnnnnnnnnnnnnnnnnnnnnnnnnnnnctttcaacactagactgccgccctgttaagaatgtctaatatgcaatcaaagtattggaaagcaggcatttttaccaaagagcaatgtcactataacttatgaacagaaagttgtgaaatataagggtactcatggaaaccagtgaagagaggaaacaccggcaattgttcaacacggaacagtgagcaggtactttgggagtaaggctctgagagatggaagacgctggtctcagatctgaggtgatgtctggccaatcgtcttggctccaagggggaagaatgcaactggcaggattcgaggagagggcacttctgcagcccccaagcaagtctctagttttcgccccaaagtggatgcactttctaacttcagcaaggcctcctcaggaggatttgctttccgatgtgtagtagcggtacaggaaacctaagagaacagcgcctatgatgggtaaaatccaatatgcccagcaacttttgcatgtatcattttttgaagggtccttgctaccactttcaggtttaaggtcactcggatggatatcaccaatgtagtactgctttagcatttctctggcatcagaagagtgtcctacatcttcaaagctttcacttgcatctacaccagcttgttccagcagaacctcttctcctccagggtgctcgttgaggaagcgggtgacatcgtagactcgcccatggatcacaagccacagttccttcaaggagttgcgctttgccacctcctccaaccggtaataggtgactgaggtctcgacttcctgccctttcccatcgctgccgctagcttccgcagtcgccattgaaccggacatactgcctctccaccgctaactgagattccgcgactactttccttgagagcccgcgctcagcctccc

SEQ ID NO: 436618 - DNA, 853 bp, Homo Sapiens
  misc_feature (48)..(56): n is a, c, g, or t
gggggaaaatatttaaaggggtactctcctggggaaaaccaggggaannnnnnnnnaaaacccccggccatttgtttcaacacgggaaacagtggagcagggttctttggggagttaagggttctggagagaatggaagaccgctggttctcagatctggaggtgatgtctgggccaatcgtcttggcctccaaagggggaaagaatgcaactggcaggattcgaggagagggcacttctgcagcccccaagcaagtctctagttttcgccccaaagtggatgcactttctaacttcagcaaggcctcctcaggaggatttgctttccgatgtgtagtagcggtacaggaaacctaagagaacagcgcctatgatgggtaaaatccaatatgcccagcaacttttgcatgtatcattttttgaagggtccttgctaccactttcaggtttaaggtcactcggatggatatcaccaatgtagtactgctttagcatttctctggcatcagaagagtgtcctacatcttcaaagctttcacttgcatctacaccagcttgttccagcagaacctcttctcctccagggtgctcgttgaggaagcgggtgacatcgtagactcgcccatggatcacaagccacagttccttcaaggagttgcgctttgccacctcctccaaccggtaataggtgactgaggtctcgacttcctgccctttcccatcgctgccgctagcttccgcagtcgccattgaaccggacatactgcctctccaccgctaactgagattccgcgactactttccttgagagcccgcgctcagccttcctcggcttccgtaaccagggcccata

SEQ ID NO: 436619 - DNA, 2363 bp, Homo Sapiens
  misc_feature (411)..(411): n is a, c, g, or t
  misc_feature (415)..(415): n is a, c, g, or t
  misc_feature (949)..(959): n is a, c, g, or t
  misc_feature (1068)..(1282): n is a, c, g, or t
  misc_feature (1992)..(1992): n is a, c, g, or t
tagagtgtcactgatgctttatttacatgcgtcaccatctcttttacaaactagattacggttttaagtggaatacacaaggcaatatctacaaacaccaaggaaagttaagtactgcatctctatttcatttggaaaggggaagattcccaaatcaaactggttttgatccttaagaaaggcggcagagttaattcatggcaacatatggttagacaaaatcctcagtaagaatgccatatgatagtgttcgcattgaaagaaggatgaggtgcttcaaatcaaagtctcaactgcttgactctcaggtgtttaaatatggccacacaccatatttagttctagattatatgggatatgagcaaggaattgaaacagataagatagtttttacagatactgtatacagantttnttttccattcatgcaacttttttcttaaaaaaagttaaacatgtgaagccaaaatgcacaatacatttttttaaatattaactaatttttctggtcctccttcacatttgtttacatttcccatgtacataatgtgctaggacaagtatacaagagaagactgattgccaggcaatgagataattttagagaaataagtgaccagacacatagttcttaaaagcagccgcacacgtatttctggagtgtggcaagaggcctcatgaccaatcattcatcaaagaaaaatacaaacagatacaactaaacaagaggaaaatattccattcatttaaactgcataaaatgttacccacttaagatttagataaaatatactcttttatttgggcatccgcttcaagacctcatttgacaggcatgattccatcagaacttcacttcctctagtagtactctgcctccccggtctctgagagaggctagctttttcgtacctctttactggtgattgcatttctaccaaaaaaaaannnnnnnnnnnaacattatgcctaatcatacaatgttcacccaaatacagcaagaaaaataaaaccagagttcagagctgttagggtttcctttttgctttcagagaggatgagtaacannnnnnnnnnnnnnnnnnnnnnnnnnnnnnnnnnnnnnnnnnnnnnnnnnnnnnnnnnnnnnnnnnnnnnnnnnnnnnnnnnnnnnnnnnnnnnnnnnnnnnnnnnnnnnnnnnnnnnnnnnnnnnnnnnnnnnnnnnnnnnnnnnnnnnnnnnnnnnnnnnnnnnnnnnnnnnnnnnnnnnnnnnnnnnnnnnnnnnnnnnnnnnnnnnnnnnnataacatttttatttcccctcgcaagtccttggcaccaacatggaggacttctttttgactgctttattcttcatggccttttccaagagattcaaatgctccttattctttaagtggggttcactaggtagaggcaaagtctgtccccaccatctttaaactgcgtacaagtttggaagccacctgaaatcacaccctgagcggggcatacttgtcctgagtagtaagccatggtgtcctctcctcagggtggggaagcaacacacacaatgctaaaaattaacaccaaaaacaaacacaaagtccgccttgtactacacatgtgtgactgatcctcccattaacaggagtgacaagcttctgaatttttaaaatgtgtttcagcaatcatattgcagaggaagcaataaaggaaaccaagctcagattcattcacagttaatggggtacactgagcctggcagccagttctcatgccaggacagtgaaggcttgtgataaagctctttcctagctttggtaacaggtatcaggttctggagccctggagagaacagcagatcccaagagcgcatgtcatgttttcaacattaggtactcttctaatttctcatcaaaaagtaggcggctccctagagcagcttatttagaggccaagggtggcctcggatagttctcatcataaatcaaacattacagcttccaggcnccttgaggctaagcattctgctgatatgctccagatcagaaaattattgttagggacctgtgacactcactcagaatgtgacatggtggccaacggctggcctgtcctgaaagcagggtctcaacataaggggcagagggctctggcagcacccctgcccacttcagaaccaggctagtctctggggccctggcctctctgcaggtggctgagggtgagggtgccgggaccctagacaggcttcactaccagattctcggctgaccctctccaggggctggtgggtctcgcagtactgatgctgcacttgactttaccctggtctcagctctccacaacactctacatgtagatgctgttttagttacttg

SEQ ID NO: 436620 - DNA, 463 bp, Homo Sapiens
ttcacatgtttaacttttttaagaaaagagttgcatgaatggaaaacaaattctgtatacagtatctgtaaacactgtcttatctgtttcaattccttgctcatatcccatataatctagaactaaatatggtgtgtggccatatttaaacacgtgagagtcaagcagttgagactttgatttgaagcacctcatccttctttcaatgcgaacactatcatatggcattcttactgaggattttgtctaaccatatgttgccatgaattaactctgccgcctttcttaaggatcaaaaccagtttgatttgggaatcttcccctttccaaatgaaatagagatgcagtacttaactttccttggtgtttgtagatattgccttgtgtattccacttaaaaccgtaatctagtttgtaaaagagatggtgacgcatgtaaataaagcatcagtgacactaaaaa

SEQ ID NO: 436621 - DNA, 831 bp, Homo Sapiens
  misc_feature (730)..(730): n is a, c, g, or t
  misc_feature (743)..(743): n is a, c, g, or t
  misc_feature (749)..(749): n is a, c, g, or t
gttggttagaaatatttattatcccctccccccacatacagattacttctcagaaacatgaagatattatccatgtcctcatcaattacagtttgtagaaaataaacttaactcatatcccatcaacaatgtatttctatcatttttttaaacaatagccatttcatttttccatgttagttccagaatagcttcaagttttatcttttggatcgaatccagtcaatctttgtttataggtaacagtttcctaacagatcccctcccccaacccctaaaaaaattctatatcctaagtgataaactcttcttgtacattcagcaaactttatattggaaaagaaaaagaataattgagataggtatttactttcgtgcacagtaataaatctagctgagctgctacaccttgctttgcaaagatgtttacataaaataaatcatctcttatcaagttacaatggtaatttcttgaaatgtagatatgaaagctatacacttaatccactgaaatttccttctaattttttaatctgtaattaaaccatcaccataaggacaagcttcatcccaagatgttcccccttttcccctcagctatttctatcaacttgaatcctctctcagatcatgtaaagagatacattaaaagcccaggaaaaaaaatgttttagcttgctgacataatgcccttaagtttgctgacataatgcccacattttaactttanaatgtacaatcanagttanagcatcacttaattcatacagtacattattaatcaacagtgtcccaccaactcagaagtttcataagttgctcgtaccgaat

SEQ ID NO: 436622 - DNA, 1068 bp, Homo Sapiens
  misc_feature (117)..(118): n is a, c, g, or t
  misc_feature (983)..(983): n is a, c, g, or t
aaaagccagttacttttattataatgaatgagaaatactatgactggagaagaggtttcacgtgactagattattcttggttcacacactatggtatcaaaattaattatggaaaannaaacccacattggattacacacatttttattgagttttgtctgatgatagggaaacatttacaaaggagtaaatgttacgtaacttctcacggtatgtaagttagaagctgggcagcaaacatggttaccaagagtcgtctagttcttcatgagaaaagcctgttaaactttcgactttgtcactagattgcagcgtgtccactagggagccttcttggaccatcttttttgagctcttatctgccgactcctggtcttgctcctgctggatgattttcatgtatttctctaaaggattttcactgtgagcagatttgtcttttatttcttgattactcatttctaattcattttccatttctaattccttttttattttaatcttcagtgattcttcaatcatcttcctttcctgatacagtttttctagttctcttcgttccctttctaaaacttcttgtaggttactctgccttctttcttctctctgccttcgttctttcacttgctgttcccgtattttttcttcttccttttgttcttcaatttgtttctgatctacacttggttgctgatatgagaggggcacagcagctgcagcagcgtccacatgagacatatccccggcaggagaaagcccgcccatttccaactgccttggcatgttccctgcagattcaaaagatgattcaaactcctcattatccttaaaagctagcttgtccacatctgaaaattcacttttgtcttgaagttcagtttgtcttcgataaagacccactttctgctccggagggctggagacaggagggatggagaggctgtgcctagactcagtgggtgatggtaggggcattctgtcangacaaggactgggggaagcaatgtgtgatctgcccagaccttccagatacatttcactttcgaggcttctttttgcttttggaag

SEQ ID NO: 436623 - DNA, 1177 bp, Homo Sapiens
  misc_feature (489)..(515): n is a, c, g, or t
  misc_feature (986)..(997): n is a, c, g, or t
acatttcggaaaatatactttattcaataatataaacaatgtagatatatttgattatttaataatcattttaagtttattgcacagatgcacatgtcaataattagtgtttttcagatgggatgatatacattctgcttttatttttatctctttggtaacaattattgacagaccaatgaaccaaagataaattgttttacagttgtaatacccttgtatggtaattctcagcctcttttatcttatattctactagcacttacatctaataggtctcaataaagtagaaatgtaaaagtatgtattttcagaaaaggtcatatttcataaagattctgttactatgttagtcatttatcataagtgttaagtctaagaaaagttgtaatagaaattgctaagactttaaaataaaaactactcctttagtagttaaaaaatgttattatatggttgagtataaattttattgccctagtgacagtnnnnnnnnnnnnnnnnnnnnnnnnnnntattgccattaatagctttatctaaaaattctacaacagacaaagcagaataaacgttttggcatccagaggtcaggtgatacagaaatgaagttcagcaggtgcaaaagatatatcaagggcatggtagttaaaagaaatgaaaagagacagatgtcaaatgaatattccacagtaagcagtgttatcaggaagctggaatacaaaaagacttgtgcacatgggaaataaggattagaagcaactttgcccaatgtgacagtgagtattaaaagacataggtccctggaagccagggtcagaagggatggtaggccatggacatgagggacagtcagttactgaaattttaatgttaattcggtgtctcatctaggctctggtaggttagaagatttctggccttaccatgatagttggattatatggtacttggatgctctaaaacatgttgtgactcagtactctttnnnnnnnnnnnngttttagcatgttacatattcctaataagtgaaattttatgtctgaactaaaatttacttcacttcctcgtgtaagaatgccttgcttaaactcaatatataaaaatcagaattttaaaaattaaacaattagaaatgaagttattcactttacaaatcccgagaattccggaccggtcc

SEQ ID NO: 436624 - DNA, 593 bp, Homo Sapiens
aaagcttttaaaactaattttattcctaaagttaaaatcagctagcgggtagcactgaaaatacaccttcactatacaaaacaatgtaaactgattacacattaataaggaatttagcacacacacttctaataaaagaagctagatgcagcccttgctataaaaagctatacctgaacaaaaatggacatgtggagtctaaggccctggcagtcgactagagaatgtcagttgttcccaattatgtttaaatgcagaaacagcaacaatgtggaaacttacattcatcaaatgttagcatttaaaatatacatgactaataaagtgaacattcagaggagccactgctcagcatgttccatgtcggccacttgtggacactgatctcatccaaagaggacagaagtttcaaacatctgagcagtttaagttaaaaataggatgaaggggaaataagagaacaggataagtgtcctcccaagacagcagtggctgatgcccacatggcgcaaacaggctgacttcaatgagtgttcacgggatgtgtgataaagcccagctgagcccgggaagctcacgtgtccacaggcaga

SEQ ID NO: 436625 - DNA, 505 bp, Homo Sapiens
  misc_feature (400)..(400): n is a, c, g, or t
  misc_feature (419)..(419): n is a, c, g, or t
  misc_feature (472)..(472): n is a, c, g, or t
  misc_feature (484)..(484): n is a, c, g, or t
aaagcttttaaaactaattttattcctaaagttaaaatcagctagcgggtagcactgaaaatacaccttcactatacaaaacaatgtaaactgattacacattaataaggaatttagcacacacacttctaataaaagaagctagatgcagcccttgctataaaaagctatacctgaacaaaaatggacatgtggagtctaaggccctggcagttcgactagagaatgtcagttgttcccaattatgtttaaatgcaggaaacagcaacaatgtgggaaacttacattcatcaaatgttaggcatttaaaatatacatgactaataaagtgaacattcagagggaggccactgctcagcatgttccatgttcgggccacttgtgggacactggttctgcntcccaaagggggaccggangttttcaaacttctggggccgttttaaggttgaaaattgggttggaggggggntttagggggacngggttaaggtttcccccctgt

SEQ ID NO: 436626 - DNA, 907 bp, Homo Sapiens
  misc_feature (121)..(121): n is a, c, g, or t
ctaaaacatcaggatgaaattcttttctatgcctactagctgactggccttcctttttcggtgttgagttgtgtactctggagtcaccagcctctggtagattatcaagcatctcttctcnatcagccttttgtttctgtcttgcatgcttctctgtccactgtctggcattcttgaggaaggctggcttattatatttaaattctgaggactgagatgaaatcaaagaaaagagttaatggagaaaaacatgatttgcagtggtttagagctgctgcagctatcctcacacagggagagttagcggtatagacaaggtaggatatgtgttgcagaggaaaatggggatatttactatgtcagccatgagcgggtcatcagggttgggttctgacatgagcagctgaatagaggtcaacacagttgcgatgttgagggatggtctccaagcaccttttggtggcaatttgagaacatccagacaaatccttccagcagaatcaatgtttggatgataaattggagtgagaaatcggatctgaggaggttcaaatgggtacctctcaggaatgataacttctagcttaaaaacacctttctcataaggtgtgttggctccacctaatatttgagctcgcaggtcatccatttggtctttatcttgccaacatgtgatgcctgggggtggctctgtggctaacatgtgcagctctctcttcagacgcgaagctctctgcatgatccccaagtagaaggaaccacacacagttcactgctccacactaagagctgcctgggatgcactgagctgacacccctcacaacgcagcaacgcgcggaccaacggggtaccagcgcctgcgcgacctctgactgttggcgtggcatcccgaggaattccggaccg

SEQ ID NO: 436627 - DNA, 795 bp, Homo Sapiens; identical to SEQ ID NO: 135310

SEQ ID NO: 436628 - DNA, 1526 bp, Homo Sapiens
  misc_feature (147)..(155): n is a, c, g, or t
  misc_feature (341)..(366): n is a, c, g, or t
  misc_feature (510)..(614): n is a, c, g, or t
  misc_feature (715)..(723): n is a, c, g, or t
ctctaccaagcgcgccccaaggggtgtgtgtaattatccgccccgtgcgggagttccgagggtttttcccacacacccgccgttttgggagaaggggtttccccacaattttcggccacaaaaagtggctttaatggagaaattgtnnnnnnnnngctttctttccccaaatataagcgcccccggggcgcggggggggttttaattttgttaaattatagagactccgcctttgggaactccccctgttggaaaagaatcccccagagaaagggccctcccaggaaccgcaccccctgtggggttttgttctcaaaaacacccctgggttttcccccccnnnnnnnnnnnnnnnnnnnnnnnnnnaatcccaacccccttgtttcttggccccgggttttccctagggaaccacttatggcccccggtttccctttcccttctggggccgcggcggccccaaccaaaagttttgaaaatttctcggggggcggagggggcccccccaannnnnnnnnnnnnnnnnnnnnnnnnnnnnnnnnnnnnnnnnnnnnnnnnnnnnnnnnnnnnnnnnnnnnnnnnnnnnnnnnnnnnnnnnnnnnnnnnnnnnnnnncaacattaaatgactatttatttttcaggtttaaaagatttcaaaatacatatgtacaagataaataaactacacaaaaattatgtcatcaaatatatttnnnnnnnnnttcaaggtaggcaacttagatcaccttggcaaagaacacattaactaagatgaaccaggacaagtcccctaaacatcaggatgaaatttcttttctatgcctactagctgactggccttccttttctgtgttgagttgtgtactctggagtcaccagcctctggtagattatcaagcatctcttcctcatcagccttttgtttctgtcttgcatgcttctctgtccactgtctggcattcttgaggaaggctggcttattatatttaaattctgaggatatgtcagccatgagcgggtcatcagggttgggttctgacatgagcagctgaatagaggtcaacacagttgcgatgttgagggatggtctccaagcaccttttggtggcaatttgagaacatccagacaaatccttccagcagaatcaatgtttggatgataaattggagtgagaaatcggatctgaggaggttcaaatgggtacctctcaggaatgataacttctagcttaaaaacacctttctcataaggtgtgttggctccacctaatatttgagctcgcaggtcatccatttggtctttatcttgccaacatgtgatgcctgggggtggctctgtggctaacatgtgcagctctctcttcagacgtgaagctctctgcatgatccccaagtagaaggaaccacacacagttcactgctccacactaagagctgcctgggatgcactgagctgacacccctcacaacgcagcaacgcgcggaccaacggggtaccagcgcctgcgcgacctctgactccgct

SEQ ID NO: 436629 - DNA, 1102 bp, Homo Sapiens
gggctgatcaagttttaataacggggttaacaagaaatgtacaccatttagcaagcacacaaagactatgggtaggaactactgatccctggagtgtctggctcccaagcccattttctgcctacctttggcatagcttcatagttactacattcagagaatccaagaggactgcatggacagatgaacctttatttaaaaaaatagcacttcaaataaattaaaagggacaaccgtcaagtgttcaaattgtgaagaaatagttgaaaacctagagagactccaagctgcagtcttctaacctcattctttgtccaatggcaaaaacccacacatctcagtactcccactcaattttttccctactgagatgagggaagcaattgcaaacaggagaccagacggaggagaaagctgcatctgattggaatgaacattgccacgtacttgctaatacgggtttcactttatgaccaaatgtattctttcaaaaataaaaaaggggagagggaagctgcatgtttttaaacattgaaattatttagggataaaacactaactctagtgcctttaacgggcaatagcaacttttttcctccgtaagtcatagacaccatccccatgctgagcctttgtgctacaagcttttcaggagatgttacctaaactttattaaaagaaagagaacaacgtttaatatatagacactggactagcccagtctgtgattttcaagtccacattcttcatctgaagcactgcatcagggacccccctgagtctgcaagttttcaagttcacacgtacatggaaccagtttttcttgtttaattttgtcctcactcagagcagccacacacagtggccgttgacagctggaaccatcgggcggggccttttcctacaaggcctggccggagctgcccaaggtttctcctcaatgagaatcgatgctgtcatgctctatggatgggaacaagagctcgaaatagctgcacctggtacaggtttcatccggatccattcggattcgctatgttccatgcgcgctgctgaacgccatttgtccactttgtgtgtgttgaacaggtttgtggccttg

SEQ ID NO: 436630 - DNA, 959 bp, Homo Sapiens
  misc_feature (275)..(356): n is a, c, g, or t
  misc_feature (520)..(538): n is a, c, g, or t
gtcacacctcggccggtggaagagtaaggttttccgcgcccgcaagggtttactacaagatttgatactattgttttcttgtgagtaagacgaatgttcttttgtaaatgtgaaggggggagtggggtgaataatattatgaatcaggatctctactgggtggagcgtaattatttgtttgcggaactccgtggtgtggggggatgtggtataatagagggggctcgtgtgtggggaaaatagaagaagatggcggcccgcggaagagggtgggnnnnnnnnnnnnnnnnnnnnnnnnnnnnnnnnnnnnnnnnnnnnnnnnnnnnnnnnnnnnnnnnnnnnnnnnnnnnnnnnnncaggagatgttacctaaactttattaaaagaaaagaacaagtttaaatatagacactggactagcccagtctgtattttcaagtccacattcttcatctgaagcactgcatcagggacccccctgagtctgcaagttttcaagttcacagtacatggaaccagnnnnnnnnnnnnnnnnnnncctcactcagagcagccacacacagtggccgttgacgctgggaacctcgggcggggccttttcctacaaggcctggccggagctgcccaaggtttctcctcaatgagaatcgatgctgtcatgctctatggatgggaaaaaagcaagaaaataaaagcacctggtacaggtttcatcagatccattcggattcgctatgttccaaacccgctgctgaacgccatttgtccactttgtgtgtgttgaacagtttgtggccttggagtcagtctcaattagaagaactgttattggacgccccagaggttgatgcaatagcagctccagcagggctacttgtagagactgactttcggatgtgaggcaacaagtagggatcacaggccagctgctggacatcaatgcggatcccgggaattcc

SEQ ID NO: 436631 - DNA, 719 bp, Homo Sapiens
acaacactataaggagttgtttaattcaccaagtcagcccgttcacacccttagttaaggtggccattaaggggccagggggtggcaatcagtaagctgcctcctgcctaactctctttctccaaccattctctataggctccagcgtagttgcgagccctgtggagacaaagaagcgtgagagactgacaggaatgacaggcagtccccatcacctcccagctagcagccacacctccccgtacccagtgtatccaagactccgggccagctgcgtggcctgtaggccccgcttgcccatctgacagaagaaaacgagatgctcatcttccagctttggcttctcagcagaatataaagcctggaaggcagctggctccatctgcagagcactctccaactcggacactggaggagtggagagggtagaagggaaagccagcaatttggcactcaggttcggaagctgggcctggaagggctgggtcctggggcccccaaacaacatatgataaccatcccctacccccaccccaatttcaaggaacagaaaccgacaacttttgaatgcaagccactccctaagctgtgaggaggcggggcgggatgccccctcaggcgtccagatttggggaggtcaagagaagctggtctgcccctctcctctccgcctgctgtcttctcaaactggatgggccagttccgatgccaagatccgc

SEQ ID NO: 436632 - DNA, 1159 bp, Homo Sapiens
  misc_feature (80)..(88): n is a, c, g, or t
  misc_feature (267)..(348): n is a, c, g, or t
  misc_feature (386)..(402): n is a, c, g, or t
  misc_feature (410)..(579): n is a, c, g, or t
atattattttttgccccccgcgcacccgggggtgtttgttccccgcgggggtgaaaaattatttacaccaccactgtgtnnnnnnnnntgcccctcggcgggagaggggtttttttaatattcccccccactctctcctaatatctcaccgcggggggggcataaataaaaaaaaggatccggggggaccctcttttgtgaaaacacaaaaaagcaccggacgcacccctttgttgttttatacacccccctttttcacccgggggnnnnnnnnnnnnnnnnnnnnnnnnnnnnnnnnnnnnnnnnnnnnnnnnnnnnnnnnnnnnnnnnnnnnnnnnnnnnnnnnnnggggccccgccccccaaaaaagttttaaaaaatttttnnnnnnnnnnnnnnnnncgccaggnnnnnnnnnnnnnnnnnnnnnnnnnnnnnnnnnnnnnnnnnnnnnnnnnnnnnnnnnnnnnnnnnnnnnnnnnnnnnnnnnnnnnnnnnnnnnnnnnnnnnnnnnnnnnnnnnnnnnnnnnnnnnnnnnnnnnnnnnnnnnnnnnnnnnnnnnnnnnnnnnnnnnnnnnngattaaatgttctttatttgatgcttttgtgtgcacaacactataaggagttgcccaattcaccaagtcagcccgttcacacccttagttaaggtggccattaaggggccagggggtggcaatcagtaagctgcctcctgcctaactctctttctccaaccattctctataggctccagcgtagttgcgagccccagtgtatccaagactccgggccagctgcgtggcctggaggccccgcttgcccatctgacagaagaaaacgagatgctcatcttccagctttggcttctcagcagaatataaagcctggaaggcagctggctccatctgcagagcactctccaactcggacaccgggatgttgagcgcccctgggatggtcccagctgccgcctcctcgcgagagcgcacgtcgaagagccgggcccgtccggaggctaggagtgaacggagttcaggaagcgagaccgtgggcgctccagccatggtgcgcgtagcaaccgcgagtctccggagtgcggccctggccggccctctcggcgcctgcaaccctcgtgcggaattcgccacccaggcc

SEQ ID NO: 436633 - DNA, 380 bp, Homo Sapiens
  misc_feature (132)..(132): n is a, c, g, or t
  misc_feature (214)..(214): n is a, c, g, or t
  misc_feature (293)..(293): n is a, c, g, or t
  misc_feature (368)..(368): n is a, c, g, or t
cagttaagctatttttttaataaattgaaaagatgttctgtacaacataatagagtcataggaaatcaaaagcatatcagtaacaacttttagaaaaagaaatgaatgataaagaaaaacagatatgacctnctcaatatcttggggaagtaagttaggatgatgtttcattcacgtcttaatgatataaataaaggataactctgtgtaagangtattgtttgtatctggtggtaaatttagttaaaaacataatcacaagttacaaaaactgtaattacaaattacaaagnaaaaacaggcagacaatcttgtattgacatcctcttgcatcttgttacctaccaatgttctgttccattataaanttcaatactaaa

SEQ ID NO: 436634 - DNA, 865 bp, Homo Sapiens
cctttttttgccaagaccactttatgaaatattagtccataagcccagtgatataattttaatgaaaaatatcctgtatcactcaagacttaaaagaacaaaaataccccttagaaacactgctttgaaaaataatcacattaactttacacacaacagagtcctttcttaagctttatttaagaaatcgagtactatatagttcaatatatataagacacatccagtattgtgttcctgatagcaagtgcatagattttgttaagatatcattttcactcaatagaaacgtttcatggtcacatgaagataatattcccagtgatttgcccaagcatgagaggagaaaacagaacacagcaaaaatagtgaactacaacagagatgaaaaacaacaacagcaaattagcagaacagtcgattcctgataagtgaataagctgattgtttggtcacaatgttttattcacttatcaggaacgattcacagtacattaatgttcactgtgtgtcctagcctgccagctaagagtccgagcccatcggctgcgtgcgactgctgtgggctgggcagcgtgtgtggcttccatcagcaaggcggatgttgatggtgctgcggtatcccaaggtggtccatgcatggcacacggattcaccttgctcacactgcagtggtgtcataccgactcaaaactatgggtatgaatttaagcagggaccaactttacagtcagtaagtgcttaaaggaactagcattttcatccccttctttggagaattatttgttgctttagaaaagcaacaaaaactggctttgtctttctcttcctttgcttagcatgagtatttttgggcgtacgggga

SEQ ID NO: 436635 - DNA, 424 bp, Homo Sapiens
  misc_feature (424)..(424): n is a, c, g, or t
aggattccatatttcatttccattttattacatgttcacattatttcctgaaatcatcttagaaccttttgtttttgcaaaattttagaggtccaggccctgtgatagctatgtgatgttttttccagcacataaagcaaattcatgatgtgaaagaggcaaatgacaatagttaaagtatgtcttattttgtaataggatttttttaataaaaaattattgtggaacaaggtacattaaatttggcttgcgattaggaaatatgggagccggacttgaagagcgtgtgattgagtccccacatctaactgatgaggaaacaggctcagatgggtctattgatgggtccacttgctagaagcaaaactggaactagaaaccacgccctggcttctaggcagcaagcaatagttttctcgtgccn

SEQ ID NO: 436636 - DNA, 1177 bp, Homo Sapiens
  misc_feature (673)..(673): n is a, c, g, or t
  misc_feature (678)..(678): n is a, c, g, or t
ttatttgtccataatattttaatacttttccactttaaatactggttttaattctgtgattgtaacatggaagatccaactttattgtgtttaaaaaacatcatcaggatcataaagctattatagaagttactctacacactcccaaggtactttaaaatgattatgttttgagtctgtagatgaaccatgacaaaatccaaatacatcgtctgtacaactcggactaaatactggtgaaaagtgtttaattggacaaataactgataagcttaaagataaccagcacaatttcacaagagaaccagctcagcccaactaaaaatttcttaatagcaattggacactgaagttgtattaagtgtataaattagttgatgaaactgaacaaatagaaaacccattcctccttttccttattttgccttcttacacctcccttgcagatataaccctcctttggtttagctacccctgtggcaattccaaaccaagtactgcagtgatcatcctctacctcaaaaccaggagtcctgaattccaagtgaaacgctgtactctcttgtcctgtacagtgggcagtcagggacaaaatccccacatcaccaatatatttcaagtttctaacatagcacaaaagagtaactgagtagaaaagagagtgaagggtagncttcnttcttttagtttgggggaagacaaatatctgtagatgagaaaacatgaatattcaggatgtaggaatcagcttaatgaaaataattgtagagggtctaaatgttgtccagaaggccagtacctctccaaattctgacctcttttggactctttccacattccccaatttatttcctcaatctgattggggtgggattaactctagtgaggtacaagtgcagttatctaaaggtaaaatgttatcttttcttcttttaatacaaatattttagtgtaatccttttatttacagaatcaattgcaaaagtatatcatcacatttagtccaaatgcaactaatgataattagatttagatattgctttgtaaacttgccatacttctgtaaaataaagctatccaattcagttatgaaagagttaactgtctgtgttcatgatagttaccagaaatggcaaacagagaaacatttatagtgcgcatatagaatttttttgaa

SEQ ID NO: 436637 - DNA, 656 bp, Homo Sapiens
ttgctggagctcggtacaggtccacccagctgaagtgggttctttttcccactaccactggggcaagggagtgagcctaggtatggtcacctcagcagccacagtcttaaaagcaagtcgctagattttttgaaagtcccaagagaagtggtggtcttcccttctgtcatcccagtatatatagttatacatgtaaatatctaaataccccatgtaatgctggtggctcatgtttggggttggcttcccaaacgctgtgaggtccccgtgctggtcgtggctgctgcaccagaacccatcctgccttttctccagtgtgagcatttcagggagccaccatcagccttgggttcatgagaggaagaaacccccaaagaccaatgcctggagcccacttctccagcgacaccttccctcgccagagcaggctcctaggagtgcatggcaggggtgccgggtccctgtgcacgggtttgctttctgaacattgcccatcaacaccgccttcagggagtcccagagtaacctactacctcccccatcgctcctctgcccccctcaccctgtgggcaccaacacctcccgcacacagatgaaaccatctacagagcccttcccgggtccctcgaccaagtggtgtagccgttaccaatgtt

SEQ ID NO: 436638 - DNA, 428 bp, Homo Sapiens
  misc_feature (136)..(136): n is a, c, g, or t
  misc_feature (418)..(418): n is a, c, g, or t
gctcaccagcttgggctttactttagttcagtactgtttttatcagacccgtaactgctggctctacttagagtgacagttttgctgaagattcttacccccacctctcctgacatcctctaagctcttgcctggngccaagaggcctggtggtgaagtaaggatagggtgtggatcaggagattctcaactccttggcttctaggcactgtccagctgggaggcagaggggaacttgtactctgaagcctgtgactcctcttaagcctcacatctcttcaccactactctggtgccctggttatctgtcccacagcgagaggtattttatgtccataaagtgcccgtggtaagtgctcagatttcatctcttggctgtggcgggtgctgtcatttctcattccattgaggggaaganctgaggcaca

SEQ ID NO: 436639 - DNA, 118 bp, Homo Sapiens
ctgactcacattacattaaggtacataatgacaataagaaatacagtgagcataaacaagcctgggaatgaacctaatagactcttagtaaacatagcactcaaagatgggagagcag

SEQ ID NO: 436640 - DNA, 382 bp, Homo Sapiens
  misc_feature (377)..(377): n is a, c, g, or t
aaaaagtgctatgaaaataaaagggtatcatgtattaagattttaattgagaacactgggaaacctttaacttatattactaaaagttcttagtcctaagttcaacttttttgcactgacattttcatattattttacacattatgggaaattcaccaccattcacttagatctgtgatgtgctggcactagctagtactacctcctaagacccaggtgtacatatctccttccaattatgaggatttggtaacttgaaattacccatggtacaagtatgtacaccatggaaactggaaaatggtatatataatataggttattagcctaagtagatatgggcacattgtcatctattttgcagagagatagatatntaatt

SEQ ID NO: 436641 - DNA, 476 bp, Homo Sapiens
  misc_feature (455)..(455): n is a, c, g, or t
  misc_feature (468)..(468): n is a, c, g, or t
  misc_feature (474)..(474): n is a, c, g, or t
cacacccagccagttttcctattttctgaattcagaattgacttctctgggaaaactggagatgagaatctgcccagtgctctgctgtccagtcaccgccttttgaattttagttttggcaccaggagtaccgttagctttccccttcttctggcccatttgactcatcagcacaatagggtcaccaccttaacttttaatttctaatctgctttactgtctttagggtgtgtatgaaataaacattgacaggctttctggagccctcaaggtgcctactttgctggttcccttttccagcagctcccccacctcccttagccccccctcctctggcagcctctcctgcctctgctgagctcccctccacgtgttccacccccttaccctgctgttgtttacatccaacctgcctgagaatttcctctggggggggatctattcctgtcatggtntagtgcctggggngggagnaa

SEQ ID NO: 436642 - DNA, 375 bp, Homo Sapiens
  misc_feature (2)..(2): n is a, c, g, or t
  misc_feature (345)..(345): n is a, c, g, or t
  misc_feature (364)..(364): n is a, c, g, or t
tnaagctctgagtccagggccctcacccaggacatcttggtgcttgggccaagatctgaaccaggtctgcccaagaacacagcctgagttcttgaccaatatcgcctccctccttgcaaaaggtgttctttccagccacctcctccctcaagcatggcagtcctgaagtgcccatactcaagttggctttgattttggggatattcgccagtgctccagactgcagagttgtcactacccaggggggaccagcctgatgcctcctgacgtccaggaggtggcaccgtctctgaccttatgctcaggaagttctcctaacccgctctgggtacctccagagctgtntcaaaccactcgggatcanggagaatgtgg

SEQ ID NO: 436643 - DNA, 639 bp, Homo Sapiens
gtgttatttttaaatccatttattccgaaataaaaagcaaaataaacaggagtcgcatcaccagggcgccacgaccccatccccgcctccttcctctgtcctatgctatcaataaataagtttcccagccccaaataattattagaacctcctccccatgtgccagctccaacctctgctaggtatgatacagggggcggccctacccctggaatatacaaaatgttacacagatacaatatgtacactggggaagcagggccaccccagcagcccgtgccctcgcctggtctacagttagccccactgtcctgcctcagctgcctctctgtgtaagaagatgggagcccccctgagggaaaaattgctttggtgagagtaaggaggccatgaggcctcttccaaagaggccaattatatgagcctctggctattaaataacaatcatcatcatccagaaatttaaggagtcagccctggccaaggtggctaagggtctacacatttgtctccccccattagacaggggtcttatgtgctactgtaagagtaaagggatgactgggaaggggtggcaggcacatgatgggggcggagcctccggccccacttctccaggctttgctgacagtggcctgc

SEQ ID NO: 436644 - DNA, 408 bp, Homo Sapiens
  misc_feature (11)..(11): n is a, c, g, or t
  misc_feature (34)..(34): n is a, c, g, or t
  misc_feature (39)..(39): n is a, c, g, or t
  misc_feature (310)..(310): n is a, c, g, or t
ccccaagtcanccctttaccattagggtagcaanacaancccctgtctaatggagggagacaaacagaccctttaccaccttgaccaaggctgagtccttacatttctggatgatgatgtttgttatttaagagccagaggttggtggagttggtttgtttggaggaggtctgacggccttcttactctcaccaaagcaacttttccctcaggggggctcccatcttcttactcagagaggcagctgaggcgggacagtggagttaactgtagaccaggccagggcacaggctgctggggtggccccccntcccccgtgtacatactgtagctgtgtaacattctgtatcgtacctagcggaggttgcagctggcatatgaggaagaggttcttataattattcgcgg

SEQ ID NO: 436645 - DNA, 288 bp, Homo Sapiens
  misc_feature (6)..(6): n is a, c, g, or t
  misc_feature (18)..(18): n is a, c, g, or t
  misc_feature (213)..(213): n is a, c, g, or t
  misc_feature (221)..(221): n is a, c, g, or t
ccagtnaagcatactganaaacgtatacagaagagtgcatgttgggattttggagacttaattggatataagatatgttatttctactaattttccactattttgactttaatcccatgccctaatataaagtatataagaatgagaaacatagtttatgtatctatcaaaatagaacataaatgtttgtgaacatttgaatctgtcagcttntcttgctnacgtgcctgtagtgcctgtactcaggatgctgaggcaggagaatcgcttgaacccaggaggtgattc

SEQ ID NO: 436646 - DNA, 293 bp, Homo Sapiens
  misc_feature (5)..(5): n is a, c, g, or t
  misc_feature (29)..(29): n is a, c, g, or t
  misc_feature (292)..(292): n is a, c, g, or t
ttaantggtcatgtttttcaacatgaccnagttcaacaaattacatttgttcgtaagtgagactggtctatagctatctttgatgaacaattttctggaataaggattatgctagcctcagagaccaaattgagatgtttcaacattttgtataatctagaactgcttaaataaaataaagattctctttcataagtttttatttccttttaaatgcaagcattacaaggacagtgttttcttttgtctgatttttaaaaattgatttattgctatccacttgctaattttnt

SEQ ID NO: 436647 - DNA, 386 bp, Homo Sapiens
  misc_feature (343)..(343): n is a, c, g, or t
aaaggtataattatttcttttattattttggatcagttacaacatgataaaatgatatatacttaatatttgtcacatcatgtttattaaaccaatcaggcagtatgaaaagaaatagcctagtatttaaaaactatatatcaggataaaatcgtatttctttgtcactagaaaaatatgttttaaatagattatgtctacttggaaaataattataaaaggcagccacagaaatatattttgtcatgtacagtagatatttaaataaatataaaaataaaattttaatggattagaatagcttctacacactaatgaggtgttgttattttacttaagaagnaaaatggaaatagatattttggtttaggatattttaaagttac

SEQ ID NO: 436648 - DNA, 1043 bp, Homo Sapiens
  misc_feature (283)..(292): n is a, c, g, or t
gtagtaaacgacataaacaactgaaaaatatttctatgggaatacatcactgggacttttacttctggaaagctacttgcaaaaggcattagagtcaggccaagacaactaattggtctgcaatttccttgtgtatacacatgggggagtggggctagtcctttaaagtgatggcaagacataaaaaaagaagtgaccttggagaaattacttttctgaattgcgtttctccaccttggtgagctacagagttctttattttcacaaactaactcaactgtgnnnnnnnnnntctccttagtcaaaattgtaaagggatcttcctacaagtggccaagaaagagcctggtgtcctttttgctgatttgccacctctctgcagttccttaggcagggtgggcgggacctgactttggaagccaaaggaaaagatgtggagcccatggagggcggttcactgttaccccttccaagagcttggaaattatttcccaaatttcaacttatatttaagctgaatttactacaagtcagaaacttttagttagacatatgcccaactacgggacgtgtccaacttggaaggtaacttcattttgggggatatgtcacgttgcagaatgactagacttataaacaggacttgaaatggaaaattatgatatacctaactctctggaaaaatatctttttttcttggtaggtaaaatctggcctttctggatgcaagaccatttagcttacaagatggttttagggcatcaagaatccctcaaccactttctaggcatacagcaagaaaagagaacgagtgcctcctttgtcattctttggggcccaaagaattacaggctgaaaagacatactctatcagtgaaagctaatcatcagagactctggctaaatcaaaaggcattcaatatattattctaggcaagtccatttttttctttcattttctgtctgcaggtagagtaagctatacagaatacagcaagctatctgtaagaggactgttgtcatcgattttcacaccatttaaa

SEQ ID NO: 436649 - DNA, 405 bp, Homo Sapiens
  misc_feature (235)..(235): n is a, c, g, or t
  misc_feature (240)..(240): n is a, c, g, or t
  misc_feature (376)..(376): n is a, c, g, or t
atggttatatgctttttatttgtgacatttgaaatacccaagctcacatataactgatttcctaaatatcatttaattttatgttgcttttctaattgatttaattgttagttttccttatagtcaaatgcttaatacaatcataaatgggaccaaaaatatagtaaacatttctttttctgatgtatgtaaaaaagaatacagggaaaattctgaaatcaggatcactataagnctagntaaaacaggtgaattatttgattaggaaatgggactcttccttcataaggttacacaaatccttatgtaggtcactggaaaattcttactcaggaattaatacctgttccggggggaaacggcctgttattaaagnctttctgttaatatatttccaaagggcgg

SEQ ID NO: 436650 - DNA, 453 bp, Homo Sapiens
  misc_feature (93)..(93): n is a, c, g, or t
  misc_feature (244)..(258): n is a, c, g, or t
acagtatacacaattttaataacaaaacttgcctgtacactgctctttatgttaccctcccccctcccaaaacaccctgcataatagtatttncttcccaccctcaacccatctgcccacctcccacccaaaaagaaaaatggctcttgaaggtgattgaacacaatgtatttggactgtactttgagtttccagtctcagtgttgataggaaggttcaccaaacattccatatatcagacttnnnnnnnnnnnnnnnaaaaccgctaaggacaaatatgttagttgaaagagttgcagaggtttccaaatgtttgcaatagcagaatgaaagcttaaacagtaattttctatttgtttttggccttattcaagtactatgagtttgccccaggttagatagagaaatatttaattatctatagatggccttactgtctctctctcttttttt

SEQ ID NO: 436651 - DNA, 565 bp, Homo Sapiens
gttaagagttaatatttgaaaacttttattttctcaaatgagcaccaacacagattggaaatatgacagaaacaatgcacttttctctaatactgaatcactatgtacaaatacaggaaaaggtgaagacaaattatttgaaaacaattacctttgttatagaagcaaagtgacctgaaaaatgccaccaaagaaaacaaaaacccaaacccaacaaatacagtttgtaaacacaagcataaatagacagattctgtattggaagatagtctctgcaggttgggaaagggaaccgactcccactgtcaccgaaatgttatacaaaaacatatgcgcagatagaatttggtaacatgagaatagctttcatagtttcttctaggctttaccttttctgccagatttcataactattttaatttttaaaaaagtaaatatctctttcctctatctagataactagcatattttctcatttgaggcagattcctttaaaatatgtaagttgattgtgttcaagatttgatttctcagcctctttctaaacctgaggcaatctgacctt

SEQ ID NO: 436652 - DNA, 622 bp, Homo Sapiens
taagattagtactttatagtatcctaccagtgttgtttttctggtttggataattatggttatataggatatttttactagaaattggttgaaggatactagcaaagcctctagactgcttttgcaatttcgagttcaaatttatttaagttgagggtggttttataaactgatcatctctataatcttagttaagcaagtccaaatatgttgttaatatatttaacatattcagtttcttttctacttaggtttgcttaatgtacaattaagctcagagccaaagaaaggaaaagagctaatcataatatggggtggttgttctggagtattttctgacacaaataaattctctaattctcccacaccaattgggtgttctacaattcaattctgaacaactgggtgttctataattcaattctgacactaacttctccaagttagtgcagactccacaagttagtgcagtccaagttagtgcagtgcaagttagttagtgcagtctaaattagtgcagactccacaagttaaggggctcagtccaagacttcccccacatcagatgccactcacaaggacaacctgcagttctgaatggtgataaattccgagttccccc

SEQ ID NO: 436653 - DNA, 1060 bp, Homo Sapiens
ctttgttagaaaattaatttttaattgtgccgctttcaaactatactgaattttacatttctaaagatgtaaaaactcaactaatagaaaatatacatgaccattctgtctacatagataacagaatctatgaatcttgaaactaagtacatcaatttcaaaaagtattggtcatttaaacagaatcaacaattcggattgacaagaactgttcaaattaatttgacctgtagattctgagccatgtttttattaaagtcagatctattcctaaatacaaaatattttgaagatttattaaaactgaatattacaatgcaaggtaaattaagactaaaggcacataaactttggtcccaccttggttgtcagttttagaaaactgccacaaaattaatcttcctgcatattttcgcagtacactttctttatctttgaaaaatacatgcaccagttcctgaactagctagaccagtctgcacatgctcagaaatccacaaccatattccaaatcttaattacaaactaaggatggcaatatatatttaaatgcacgtaagtcatgtcaacttcaaaaacatctacgaaaaatattcagccacaaacaagacattacttagtgctgacatttatatgatacgtcccacaagagtgtgtacgaaaaggttaagattccacaatgctttccacatagggctcaaacttacagaaatcactttgttgtcttaagaaattaatactctgcatcttgttaattttaactaatgcctacattcataactgaatctagaccagaattgtgagatacaaaaggccaatgttgttttcaaagcaataaagcctaaggtagtaaaaactaaaaatgctgctttattctttcaatatcatgtatcttatttgattaaatagaaaaaaaggtgacaagccagtaattcaaaataagttccaagcaggagaaacaaaaacttaacctttttacacacccctgcctaaacatattttaattcccatataacagtgtgccctaaacaaccaattccttttttctagtaaatgcaca

SEQ ID NO: 436654 - DNA, 1092 bp, Homo Sapiens
  misc_feature (16)..(16): n is a, c, g, or t
  misc_feature (18)..(20): n is a, c, g, or t
  misc_feature (25)..(25): n is a, c, g, or t
  misc_feature (29)..(29): n is a, c, g, or t
  misc_feature (37)..(37): n is a, c, g, or t
  misc_feature (47)..(48): n is a, c, g, or t
  misc_feature (50)..(50): n is a, c, g, or t
  misc_feature (66)..(66): n is a, c, g, or t
  misc_feature (89)..(89): n is a, c, g, or t
  misc_feature (99)..(99): n is a, c, g, or t
  misc_feature (113)..(113): n is a, c, g, or t
  misc_feature (123)..(123): n is a, c, g, or t
aaaaaaaagggggggnannnaaaancttncaaaaacnccctgggggnncngctgtatgttgcatgnggtagctccagagaaatctccanttttaatctncaggttcatattgncccagtcttnccctcagatctttgatttggtcattcttcttggtaagaatctctttcatgtttcgataagctgctgtttgctgaaatttcttttctaattccttttcagccatgtgcagctgctcctgaaccctgagtagattgtgctttgttgtcgccagattctcctccagtgacttctggttttctgtcttgtcattaagtgtcttctgaaactcactctttaaggcagcgacagtgttttctaagttacttaagtcttgggcctttataaaatccttttgatttccttgatcaagctgtaaatcttgcagtgctttttctagttttgacttttcatccagtgcatttgtagcctgtatttcaatggtcttcaaccttgacttcaatttctcattctcttcttgaagtcttaaaatttccttgtttaggagttctgctgttccaccttcattaagtggagcaagttttggctttgtgacatctaagatgggctttttgtttgaagatgtaatctctgctttttcaaattctgcaacttgttctaataattctcggttttcaagttcagagatgtctgtctgtagcttaagataccacttctcagcttgtgcaaacagctgtcgcagaagtaacacattggtataggcagtgttgatgagctcagattccacctcactatgaaccacagcttgtaatccattgaggacttcagagacttcatctatggtgaaggtgtcctccaccagcctgctctccttgaggtcttggaagcaggaatctacagttttgagtctcaagcctctctttgaacgagcaaaacgcatataattaataacttcattttgatggtgctcatttaggcccaactctgccatggcggcaggcagcggcggcagcctaaaggaacgggagaggccaggcggtgccccgccaagcctgggatcgccgagggtagttggaccacagaaaatccgct

SEQ ID NO: 436655 - DNA, 302 bp, Homo Sapiens
  misc_feature (1)..(1): n is a, c, g, or t
  misc_feature (52)..(52): n is a, c, g, or t
  misc_feature (263)..(263): n is a, c, g, or t
  misc_feature (295)..(295): n is a, c, g, or t
nttattcatttattttggaatgcctgcatccctattataaaaacatgtaatnttaagcactttccaacatattaacagccccaaattttacttatgctatcatataaagaaaaataggttgtaattttatcttttagagcattagggtcctaaaagaacatcccattctgtgttaattcctggttaatccttccaaggtaattcctgaacatcatccattcttttttatgaaggtgatagtaaccagaagttgactgatggtnccttacctgcatcagtaatagctgattcaagngcacgag

SEQ ID NO: 436656 - DNA, 406 bp, Homo Sapiens
tgctataaacattttatttattttttaagaaagtagcttcagaaaaagaggaaaatatctagatcatttatttatacatatatatattttttaataaaaacctttacattatcttcatgcataaagacccaggtgtggccatattgcctgagatagccctaacaccagctatctcatgccattacctggggctccctatagctgtcagcagtgtagcaaaggccctctgcctgcccctaacgcccaactccatgcctgcctcagtcatggtttgtttttgcttctggaaggggtagatggagggtgggaaatgctttggagctaacatgggatgaacagggagggttacccaacctgccattttttatccaaactctgcaggcaaatccagacagagtctcagccc

SEQ ID NO: 436657 - DNA, 468 bp, Homo Sapiens
  misc_feature (3)..(3): n is a, c, g, or t
  misc_feature (92)..(92): n is a, c, g, or t
  misc_feature (235)..(235): n is a, c, g, or t
  misc_feature (270)..(270): n is a, c, g, or t
  misc_feature (327)..(327): n is a, c, g, or t
tgnctctcttgcttttaaagtacaggaaatgagctactttatttctaaggttctttaattctatgatttataatctacaactctactacccncctcactctgcttgtgtttctaaatatcgattggaactgggctgaaaaatcacacttaatcaataggtgccacctaaaccgggatttgataattctagaaatttcttaggcttgaggcttatatcagacaaatcatttcctcnacttctgtaagtgtgagattctgggctcagagctnacagttagttcccaataaatatttgttgaatgaacaaattaatgaaaatcttttaangcaaacatgcaatgccaatatgacttttcctttctgtgaagaaaacatttcttctacttaaatctaaataaagcactttgctcttggaataagcgaacaaacattcctgacttcagagccccggtgtgtgatttgtccttc

SEQ ID NO: 436658 - DNA, 301 bp, Homo Sapiens
tgcctgattgctcagtgatcaatcattttgacctcctgattaagtgaaatttgcatcggatctatcccacttcctactgtagagtataattaatcttgaagactgtgagccagagggcctggaggctcctctgtctattatctgagtgtccttgggcagttatttaatacatttctgctcccccagttttcactctgtacagtggagataaggttgttgtgtgaggactaatgagtcctaaaatattgccttacgattaaaattactttcacagactatttgcagcattaaatataatagg

SEQ ID NO: 436659 - DNA, 431 bp, Homo Sapiens
ctcaacaccaagctcctgcaggaggctcctggctgattttcccatcttcttttccatactacagctagagctatctcagtttcatcaaaatgtcaagttatgacttacctgcttaaaatctccactggttccttcttgcctaaaggcagagtggaagcttagtcctgcaataaagaaccttcccaaattccccagatttgtgaagtaagtttcctactttacaggcttcacctctggcaagttgtgctgctcaacatcctttaaacctggtgttcttgtgcttgtgcccaaacccgtgctgtctcctctgactggagtcataataatagcagtaatagtagatactcatggaccactttccctgtgcctcacagtgtttcttgtgcaatctgcatggcttagttcactgaatcctcctgccaactgtgtga

SEQ ID NO: 436660 - DNA, 1846 bp, Homo Sapiens
ttcgattgcacccacaagtaaaaaggctttattcattttggggatgctgcaatttggtatttatataaacatttacacactttagtaaacacagtcctacatgtaatgcagcattacgggtgagaagacccttggaagtcgagcgtccacagtgttccacgcgcacaggcggaccttctcactgtcattcccatcacggccagtcagtctctccactccctcctcccgcctggctcgaggacggacgcttctcatcagacacaccaggcagcctacagtctacacagcagcgagtgctctgctgcctggctcaggctctcatctcacgaggacgtttccccatcttagtgtcctgttaaataatcttgtgtagagtccgaagcaaaggagtcgacatcctcgttatctgaatcgtcgctgctgtcgtcggcggctggctctcctgtaagtgcgatgcgagcgtagtcatctgtgtctatggacttgcagaagtggatggcgtacttgagcttctcctccagcacctgcttgcaggaatacctgggcagcttcagcaagaagaaacaggtgtaggactcagggaggaagtggtctggagggttgtatttatccaacacctggatgacgaagtctcggccccggaagtcggcgatggtcctgggcagcctcgtccggccccagacgaagcgaaggaaaagagagcgctctgtgttggagaaggactccatcacctcccagaaccactggatcagcgatgcggaaggctcgatgcctttataggtggccaccgacttgagaaggtgcagcgggatgtcagggctgccacacaccatcgtctccagttcgtagccggtgaacagagagaggaggggaacaggcacaacgcgggccattccttcccgaacagcagccacctgctcatcaaattcatggagtctatagtttatcgccagccgcacgtactccgcgcggttgttccagggtgatgtgtgtgtgcttggagcctcaactgaatgtcctggccactggcacttggcactgtgaagggcaggctcatggcttcaaactcctctgaggtggcttcattgtctcggatgtacatgagtccaggaataaaatccttatcaacctcactgaggtccgcgatggtgaggctcatcccagccagctgcttccagacaggctcggcaaggttgaggctcaggggactcccggttcggatggcaatgcccagcaacacacccaggaagcggaacatgctgctgtgcacgggtgctctggcggccgggctgagcaggtagcagtctcggttggccccagactcatccctcccgttgggtgtcacgatcagcaggggcgtgagtccgttctgcagctcctcacagatctcagctatggactcgctgtagccgcccccacagtcatccacagattcacccacaaacttgactttccagacacggtgaggaaggaggaggctgtcgggaccaaacgagctcatcttagcacacatctgcccaaagacagacttggtgccgtcggggccggccagcccgcctttgctccttgatcgtttgacctggatgcggttcagctccacgacggggccatgctgacgatcgcgtaccatagttgcttgtactactttccggaaagccgcctcctttccctgggatatcagaattcctcggagagtgtcgaacccaacagaaggcccgagtccagtttcgtcgagcgagccttccaggtcgaacatggggatgcaggggcagaagagctcggagaggtgggaagcagagagcagacggttcctcagcgcaatgatggatcccgggaattccggacc

SEQ ID NO: 436661 - DNA, 260 bp, Homo Sapiens
  misc_feature (6)..(7): n is a, c, g, or t
aaaaannttatatcttatttaaatctttattaaaagaaaaaagatttaaaacaagtaacaacaaatttcattaaatattaaacattttaattatcaaagatatttagacaatacgtttctaacatttctgcacagcagaagcacactgattatagagctcagactgtcatgtgctcatgtgagtttatttttggcataaaagtatctaaagtcacatttaaacaaatgtgataatattttataaactgatagtaacttac

SEQ ID NO: 436662 - DNA, 317 bp, Homo Sapiens
  misc_feature (10)..(10): n is a, c, g, or t
  misc_feature (14)..(14): n is a, c, g, or t
  misc_feature (18)..(18): n is a, c, g, or t
  misc_feature (38)..(38): n is a, c, g, or t
  misc_feature (77)..(83): n is a, c, g, or t
  misc_feature (98)..(98): n is a, c, g, or t
  misc_feature (100)..(100): n is a, c, g, or t
tgtccttatncttngggncgggtggtgaaatatttagnggtaaagtgtcaagatgtttggtcttttaaatggttcannnnnnntatataatatgtatnanttatatatataattagaagagggaataaagcaaatgttgcaaatgtagaacaaatggtgaatttaggcagaggacataaagtgtttgttttacaattctcccaaccagcaagtttgaaatttgttttataattctcccaaccagcaagtttgaaattttccaaaataaaaagttgggaaagaaactgggagagaaagagagggagggagggaaagag

SEQ ID NO: 436663 - DNA, 522 bp, Homo Sapiens
  misc_feature (474)..(474): n is a, c, g, or t
  misc_feature (478)..(478): n is a, c, g, or t
aagaatttgacatgtattttcaaatgcagtgagttaggcagaatgcaaagcagagtaacaagattttacctactgcttactttttcattttacatgtgtatttaatatgttcaatgcagcaagaattgctgatattattactgtgagatgatgtgtaaaaataacactaggaacaggtagtatacatcaagaccaacacgaatgcattgataaagatgggaaacacaagagaaaaacattaaatagtcttattacaaggaaaaaggataagggttaaatgattcaaaatctaaacaaaaattaatatacagatatactgtcttccattcagtgcatgaaagaattatctggatataaaaatcaagtatccttacattctgggtttcttggatacaattttctcctcaaaaataatttttcaactatttcaggaaatttttaaatctaaaataactctttttaatctgggctccnagangaaaaagaaataaatacttataatcaattgactgctctgccttg

SEQ ID NO: 436664 - DNA, 148 bp, Homo Sapiens
aaagtctacaggtaagcagacatttctatacatgtcctggtcactctttctaaagtatttatgattaggttattgaccatgtcttggatattgttggcagtttaaataataccctcatccgtaggtatacacagaaagactgttttct

SEQ ID NO: 436665 - DNA, 296 bp, Homo Sapiens
cagttcgttaaatctttattgatgcgtggacactccttcccctccagccccgccccccagccccagaaatactagagaagctgcaccataaaacgagggcacgagattgttgtcccattcacgacggagctgagggggaggtgtgcaggttccagcctagatgttcaggattgagatgtgggtcgtgaaaggaaagtgggttttccgggatgtgggggcttttctcagcactgggtccactgacgctgctgctcccaaggggatgctaggactccgctcaggcaggggtgggctcg

SEQ ID NO: 436666 - DNA, 415 bp, Homo Sapiens
  misc_feature (363)..(363): n is a, c, g, or t
  misc_feature (381)..(381): n is a, c, g, or t
tttatattgctgaacaccaatatgtcactttattatttggattttttttcccatttgtcacatacctgtcaatgtttacacaatgagggaaatcaaccagcattggaagcaactgaccaaatcagttgataattctgtaccctcttaacacacatcaattttcacttggtagggattatctttaattcggtctcacagctattcttaaaattggtgtcaagattgtcacatctttaaatacagatagaattgccagaagtacataattatatatatatacacacatacagaaaaatacaagactgtttttccacaatatttaatttatacactactgtaactatatgcaacttttgaagggcngggttaagggggtacagntaactgttttaggggccaggttaggtaggtttgg

SEQ ID NO: 436667 - DNA, 1349 bp, Homo Sapiens
  misc_feature (206)..(221): n is a, c, g, or t
  misc_feature (841)..(899): n is a, c, g, or t
ttttatcacagcggaatttattgttttaagaaagactacaaaaaggtagaaaacagctcggcacactagactaccacacgtgtggacactttcaccaccgggagagggagccccgtgggcacggggactgggcagggccgccccaaaagctatagcacgcggagcacacaaaatagtgatttttatacaataggtcagatttccannnnnnnnnnnnnnnncttgccataaacatctatctcacaggctgaaaacactgagaaaactggaacagataaggccatgatggttggaaaaaaacccaacaagttaccaactccgctcgggcggcgctcacgaatcgcacaatagtcatggggtgggggtcgcacggcacggaggagaagcgtggtctccgggaagataggggcacagaaaaggttccattacaaaccagcggcggagggcgggggcgcgggggctggggtctgtgggcactccccggctccgcggctcgctgctctttggaagctggaggccgtgccccctgccgccctcctcacagccgggccgggcagtgcccccttcttgagcttgggggcaagggagggcccagcgctggagaagatgcgacacccacggctttaattgcacttaataccaagaaggggaagcagtggggttgctgggggtagggtgtcccggggctgctgctgacagtggggagtccccaggtgacgcccacctgcgccggcccggggctcagggctgggcccaggacaggctgtgcaaagccagcgagctgaataagttaacagtttcgcacgggagggggcctgcctgcctgccccctggggtggtnnnnnnnnnnnnnnnnnnnnnnnnnnnnnnnnnnnnnnnnnnnnnnnnnnnnnnnnnnnagctggatgccccgcggggcacctgggcacgcggcgggttccttaaggcacgtcttttgtgtcagagtttgcagctgcggctccgcccagcccactgattgtgccggccccataagggaggagggccccggtcttccctgtctcggagtccccctccctgccctggctgaggctggagcagtgaccacgaagccacagaagctttgagggaccctggcgtggaggggtggcgggggcgggtggggcggggaggccaagggcttagctggagggcagcgcctgcacgaagaggccgcgcgcgtcagtccgcgccagcttggccggcggctccagggtctccgggcccagcgcgggtgactcgccgccagccgccagtgagatgtcctgcggcagctcgtcctcgctctcctcctcctcttcttccctcgtgccgaattcgccacccaggcc

SEQ ID NO: 436668 - DNA, 389 bp, Homo Sapiens
ttttttttaagcagtctggattcgtgtttattgaagccagtaattagagacatctttttttcccaggactagaaagcaaggttccacatgactgcatactgcacccggacagagccacacccctggactaaggctggtgggggataatctgcagtcttacttttaagttagaaacaccaataaatttagtatacagacgacagtgaactttcacttacagcattaacattgttaaggtcatgatgtacagagcagtcactttcaactttgttaaattaataaaacatgacaatgtcttcagtttaaataccgattttaaaatgccaatcaaaaaaaagtgcaaacaaaataacaatctagcagcattatctgttgcatttttaggaaag

SEQ ID NO: 436669 - DNA, 832 bp, Homo Sapiens
acaagttacatttttgatttaatgaaaggttttaggtaacactgttagaaacaatttaaacctttacaaaaaataactcaaattgattcaaagatgcagaattcatcagattatcttatagagaccagtgtgacttaattctccctagattttatgaacaacttttattaacagaaatcaaacttattgtccaaagtgacaatatatcaaagaaatacataccaaaacctgctgccattatagttgttaacatttttattgcatatttacaatgtgtggaacattataaggatttacagtagaagccaaatttcccagcccttaaaattttaataggaaaaatcgaataaaccatacatatttttgaaaatgagcattagaaacacacagatgattataattctatagactaatacaggtgaatgctgtatgtaatagaacagctgggagaggtaaaagagtggataagagagtcatcagagtgtgaaaaaactacagctgggtggtattgaataaagagacaatattgaaaatatttttaaacgctaaaatgtcccgtaaaagcatagctatcccctatggcaaaactgtgagggtagaatttttccccaccccgttttctgctcttctggccaccatttgggggacttccctgtccaggtgactctctctcacatagctgtacctggggcttactagcaatacatgctttccactaccccctcaacctcatcacagaaataaccttttctgttcaatgatcagtcttactttacctactgaaaacgggtggtgaaagttagtaacataaacaaaccagtgctgtttcttc

SEQ ID NO: 436670 - DNA, 421 bp, Homo Sapiens
  misc_feature (25)..(25): n is a, c, g, or t
  misc_feature (332)..(332): n is a, c, g, or t
  misc_feature (358)..(358): n is a, c, g, or t
  misc_feature (417)..(417): n is a, c, g, or t
attgcttacatatgatgtacctganattatttgtccataaactttactaagtaccaactatgtccaagacattgcactaagtgctaggcaaatcattggacaaaacttctgtcctcaagaagctcatgatctatttgtaaaggagataaatatagtagcagataactattaagtaatgcaatatctaagttgatttatgagtttaaaatctgacatagtgaaattaaaaaaatcagtatttggagaaattaatgatgtccattgataaaaatattgaagctatcttattcttattcatctttcacatatcctttacttactaaaagtgactncctcccacaagttaccagtatatgtnacacagaaatccagtgttctttttcttaaaacaccagtatgttagataataattcttgnataa

SEQ ID NO: 436671 - DNA, 303 bp, Homo Sapiens
gcaggagcgtgctcagccctcacaaggcagcccaaagtaccagggagttgatgccctgggttgagagcaaccctcaaccaacagaggcaagttggtggatcagtaaccccactcccttgctcttcactgggacaatctggggagagttctgcagtctctcagggggccccagcaggctgagccttgcctgtccactcactgccaggcacccactcgtcatcatacccttcattggcttcctgtcttccttgtgtcactgtccccatggttcctgggatcacctctcaagtaaatgatgtggcc

SEQ ID NO: 436672 - DNA, 301 bp, Homo Sapiens
  misc_feature (209)..(209): n is a, c, g, or t
  misc_feature (275)..(275): n is a, c, g, or t
  misc_feature (282)..(283): n is a, c, g, or t
  misc_feature (288)..(288): n is a, c, g, or t
  misc_feature (292)..(292): n is a, c, g, or t
aacgctttttaaattttaatagaaacagacctgtttgctctgttaaaaaacaaaacaagcaggaaaacgtgttaatagcatgcttggccaaacagacttcctctgcagtctcatcagaaggagtgggaggccctcggaagtgcagagctgtgtttctgccgctgtgtttctactcttctctagaaaagtcatctcttgtagcaggtgtngtcatccagagctgggcgtcacactggtggccaccagccacgtgtggctgttttacatgtaaactnattaggnntgtanactnatctgggac

SEQ ID NO: 436673 - DNA, 352 bp, Homo Sapiens
  misc_feature (279)..(279): n is a, c, g, or t
  misc_feature (281)..(285): n is a, c, g, or t
  misc_feature (324)..(324): n is a, c, g, or t
  misc_feature (327)..(327): n is a, c, g, or t
ttcacagtggaaataaatattagctttattaacactcaaagtgccattcatttatattcattccatagtccagaaggttacttattagagtaagcctttgcaccacaatctttcaaaaaaatgaacatgtaagaaaaagcagttttcattgtgctaattattgcaggccttcatgcacgtaaacctcaacaaaatgtgtgccaacaatatacaaatttccatataaacaaagtcattgatcactaacaaaatataaacatggtttcttttatattagantnnnnntaaaaaaagctatttaccagcaagaaaaaacaagtaccnagnaattataaaactcagaaattgtata

SEQ ID NO: 436674 - DNA, 466 bp, Homo Sapiens
  misc_feature (428)..(428): n is a, c, g, or t
  misc_feature (433)..(433): n is a, c, g, or t
  misc_feature (440)..(440): n is a, c, g, or t
cttttctttctgtatttcccaaattacagggagctatgcccttggtattgcacacagtacactgcaaaagattcacaaggttagttgaaagtcatttttgccctggtgattcaaagctcaaagaattttctagcataaagtcttattaaaaattttaatcaaaatattatttgagtttaagtttaataaaacaataccactatatatactctcaacaacttcattatataatcagtcctatgaggttgtacttgcttttcatatcacactgattaaggacaaaaataattttgatgtacatgtaccatacactgatatggcaatctacacactggatggcatttacatacatacaactattaaatacccacaattacaacaatgggcgggtgacagccttttctttggtggctgacatactgcccgtnggttngtctccnaaggcccgcattactacggtacacat

SEQ ID NO: 436675 - DNA, 1237 bp, Homo Sapiens
atttgagtttaagtttaataaaacaataccactatatagactctcaacaacttcattatataatcagtcctatgaggttgtacttgcttttcatatcacactgattaaggacaaaaataattttgatgtacatgtaccatacactgatatgcaatctacacactgatgcatttacatacatacaactataaatacccacaaatacaacaatggcaggtgacagcattttctttgatgactgacatactgcctgtaagaatagtctccaaaagcctgcaatactacagatacacacacaaattacaaaggatgaaccgaagagacttaagaaaacctactgtatatacaattatgtaacttgcaaaattttcctgctgttgcattcaagtcaaactgtcatgcagattcaagtatttaatgacattctctctatgaagacattctctctgcatgcaatgggccaattattgtcataagcagaaggctgcccacgtgggttctggatactgtaggtaccaaaggagaatgcctttggatttcagtccttcctttatggatgagagatggaaaaggaatctgagagaaaaatcagtgacaaagccgcccctctctattgctatcaataatctatcacggggttattctgtgatgatttgatcatgtaagatgctataagactggtggaaagaaatttgcctgacatgtggcagaagcagtggcatggccctgggagacaagatggccagaaagctgtggagcaaggtaggaggcccagaggcgcatctgcctgcaaagctgacttaccattttctgtcagaataacttagatgctttgagacaaaagcgagatacctatttaaactcccaacttggacaatccctcataaactagacttccaggtttaacaactccttaggatgcccactttggttctttgttttacagtgctaattttacaattggaaaaaattctgtcatttgaaaagtcaagggatgactcactgctgaaatgaagagaggtggctcccaacctgctgaaaactcgaccaagtccacgggagttaaattacagagattcaaacctgcaaagctaaacttctgtgaattcaggatgcaacatgcttaactgatgactgcaaggaaaaatgccaaaggaactcaatttcaaggacaattaatgaaacccaaaaggttttgttagtaagacaatggagaaacttctttaacgtcaatttt

SEQ ID NO: 436676 - DNA, 248 bp, Homo Sapiens
  misc_feature (22)..(24): n is a, c, g, or t
  misc_feature (144)..(144): n is a, c, g, or t
  misc_feature (177)..(177): n is a, c, g, or t
  misc_feature (186)..(188): n is a, c, g, or t
  misc_feature (198)..(199): n is a, c, g, or t
  misc_feature (207)..(207): n is a, c, g, or t
  misc_feature (232)..(232): n is a, c, g, or t
atttaaatgtttttattaaaannnattaaagaccttcatggcacaacttcttcccagcacagttatggtttagtcataccaattacaatacaattacaaccaataaagcaaggtggggagggccttctggcttcaaacttaaanaaaagcagaggaagaggggagggaccacttcanacaaagttnnnaaatactttnnaaaatctntcagagtaattgccaacataacctntcatgttggccattcc

SEQ ID NO: 436677 - DNA, 1212 bp, Homo Sapiens
  misc_feature (153)..(156): n is a, c, g, or t
  misc_feature (159)..(159): n is a, c, g, or t
  misc_feature (161)..(171): n is a, c, g, or t
  misc_feature (173)..(174): n is a, c, g, or t
  misc_feature (177)..(178): n is a, c, g, or t
  misc_feature (1135)..(1171): n is a, c, g, or t
atttgggggggaattccaaggccctaagtccaggcccagggttttccttaggaaaaccggtattggaccatgttcccctttcctattgggcccgccggcgcacaacgaatgtttttgaaaactttttggggggccggggccgccgaccaaggnnnnttntnnnnnnnnnnngnnggnnggggttaaaaatccttttaataaagtatatcagtgacaacttcctgtttaaatatattgttaaaaaatcatgcaagagcattttgttatcattatgaggaaagatttgagactactgttccttctgcagaaacgctatgcacagatgcaaaatgatcaaaggctgatacaataatgaatctcaagtaagtagcggagccatcatgtgccacaatttcttcattttgaagctgcccctctgtgtgtaccaaatctttttcaatccattgctcaaaatcaactggctctttagacgtgcttttttcaatcttcaaggtctgtacaaagtaactttggattacaagcctttcaatccttacatgtttgtggaaacaaataatgaattcctggggaaacattcctgtggtggtccaaaacgtttctggattcccatcaatgatattttcaggtgggtgtttttcatcacttgatgtagctaaaatcacttcggacccttcagagctcagacagagatcaatttttctcatcttaaagtgtttaacctgggactcccgttagctctgggcgccggaccttccgggctcgaaacctcccttgcgccccgccccacgcagagcgtcccgacccgcagctccgcctgctcgccgcggcctccgtggagtccggggtcgcgcgcgctccaactctgaaatcttcgcgccacgcctcccacaaggccccgtcccacccctcagccccgccccttcgccgcggccaccgctgagtttccgggcgcgcgctcctaccccgagctctttgcgccacgactcccacaggccccgccctgccctcagccccgccccaccccgccaccgcggcctccaccgagttcccgggcgcgctcgctccaccgagttcccgggcgcgctcgctcccacccgctctcgacgaattcgagctcggccgatttggcctgatnnnnnnnnnnnnnnnnnnnnnnnnnnnnnnnnnnnnncggccgccaccgcggtggagctccagttcgcccatagatca

SEQ ID NO: 436678 - DNA, 594 bp, Homo Sapiens
aataaagtatatcagtgacaacttcctgtttaaatatattgttaaaaaatcatgcaagagcattttgttatcattatgaggaaagatttgagactactgttccttctgcagaaacgctatgcacagatgcaaaatgatcaaaggctgatacaataatgaatctcaagtaagtagcggagccatcatgtgccacaatttcttcattttgaagctgcccctctgtgtgtaccaaatctttttcaatccattgctcaaaatcaactgggctcttatagacgtgctttttttcaatcttccaaggtctgtacaaagtaactttggattacaagcctttcaatccttacatgtttgtggaaacaaataatgaattcctggggaaacattcctgtggtggtccaaaacgtttctggattcccatcaatgatattttcaggtgggtgtttttcatcacttgatgtagctaaaatcacttcggacccttcagagctcagacagagatcaatttttctcatcttaaagtgtttaacctctgcgagttccaaaccctcggccctcgggtcgcctgccctgggcctggccccgcctccaggtccc

SEQ ID NO: 436679 - DNA, 1657 bp, Homo Sapiens
cacatgtctctccccggagttctccactcagccctttttcccgcgtagagaccttgtgtacctgtggtgcctgtcttagtgtttatatttcgggttccctttttgggggccccttgtgtgcaccagaactgggtgatcccctaatctttggggcccccctcgggggaatactttttgagccccgcccccccttgtttttagtcgttgtgtgctgttttttgaagtaaatcatcttttattttcatcttacatttggttatcatgagacatgcaaactcctccaattttaatgagaacagtgtttttgtgtctttttatcacatatccgcttaatattaggtgtaatattgctaagtcggattcgcatatgaggtgcagcatcaagtcttttcctatattttgtttttgttgcagcgtaatatgaaaaccccgtttcacacaggtgcattgtagcaaaaggaagaagtacacgcactgcacgccttgcaatgcttgggtattcctgaattaggctactccaaaaatcatttagtgaaagttcactaaaattttgcttcacttgagaatcagatgttaaatcaatcaggctctcatagtcccgtgctactaatgaagctggtttaacagtaactgtaaatggatttctaacccaagcattattgtcatttgttacaggaaagtattttaacagagtagcgcgcaaaccccttaggtgctgcacaatggcactgcaaatatctttatcaactgtagaattaatttcagtcaaaaaatcactgagtgtaggaaaacaatcaaagttttcttcttctacagatgaggcccaaaattccaattttcttaacaatgacgacattttatcaaatactgtaaaaacggtcacattttttccttgcattgacaaattaacttcatttaatttagtaaaaatatctgcaagatatgcaagtcttagcagccaagatgaatttgttaaacaatcagatagtcgaaaagcagaatccatgaaaaccaaaagttcacgacgaagttcaaaaagtcttacaagaactttacctcgagaaagccacctcacctctgtatttagaagaagtgctgtgtgctgagcacccatttcctcacataaaatttttaatagtctggattgatgtggtcgagctttaatataattgatgatttgtactgcctggtctagcacattttttagagatgtaggcattattttaactgccagtgcatgtctgtataataggcagtgactactggtgctttcgggagccacatattttattaaggtgacagcttcggcaattttcccatccactgccctagaagcatcactacaaacatcaacacatttttcccattcaatttcatgtttctgcataaaactgttgatacagttgaatatttcttcaccggtagcattactttgcaaagattcacacaggagtaggtcttcctcaatagacttattaaacctataacgaacaaacacaagcagcacagcaagtcctgaaacatcagctgattcatctagttgcagtgaaaacccatcgcaaattttcagtctacaaacaagctcttcttcaatgtcagcagctagatccttaattcgacgtgcaacagtactgtttgatagctgtactgcatctat

SEQ ID NO: 436680 - DNA, 1026 bp, Homo Sapiens
  misc_feature (456)..(456): n is a, c, g, or t
ttttggagttgcattgggatttttcccaggaaaaaatatggcttttagtaatgctttgcaattggctacgcagatataaattaagatatgtttattctgagttcttattggaataagtttcaaaatcaacgggcttaagaatgaaaacaaaacttttgagggtctcacaaagtagctttctggtcaatacaccttactttatttttaagctcgcagaataaagtatagaaacaaatggggctgaagttccatttgctaattcagagacttttgtgcttccgcaaattggagggcagcaagccatcctattctcatagtaatcgttttggctttgaaatttacatacaatttaatagcacatttttagccattatggattggcgcaataaagagatatcaatgtaatgcaatgtgatgctttatgggcctcattctaattcagaaagcttgtttaanagaactaagactcttctgtttaataaaatagcaacaatctaatatctagattggtagtcctgcggtgccactagtgggagatgagagtattatgacgacgaggaaccgccgaggatcctctacaatagtccagctggcgtcctgccttcttgctgctggccgtcgtacaacgtcgtcatgactgggggtctttttaataatagcaattctgactggtataagatgatatctcattgtggttttgacttgcatttctctcatggttagtgatgttgagcattttttcatgtgcctgttggccatttgtatgtcttcttttgaaaaatgtctcatgtcttttgctcactttttaatgggattatttgtggggttatttggtttgatttccttgtcaattctggatgttcgttccttgtcaggtgaatagtttgcaaatattttcttccattctgcaggttgtctcttcactctgtaattacttttgctgtacagaagctttttagtttaattaagtcccatttctctatatttgtcactgtgctattgaggtctttgtcataaatgctttgc

SEQ ID NO: 436681 - DNA, 1142 bp, Homo Sapiens
  misc_feature (1049)..(1049): n is a, c, g, or t
  misc_feature (1053)..(1053): n is a, c, g, or t
  misc_feature (1056)..(1056): n is a, c, g, or t
  misc_feature (1063)..(1063): n is a, c, g, or t
  misc_feature (1067)..(1067): n is a, c, g, or t
  misc_feature (1069)..(1069): n is a, c, g, or t
  misc_feature (1071)..(1071): n is a, c, g, or t
  misc_feature (1075)..(1075): n is a, c, g, or t
  misc_feature (1077)..(1077): n is a, c, g, or t
  misc_feature (1081)..(1081): n is a, c, g, or t
  misc_feature (1084)..(1084): n is a, c, g, or t
  misc_feature (1104)..(1104): n is a, c, g, or t
  misc_feature (1106)..(1106): n is a, c, g, or t
  misc_feature (1130)..(1130): n is a, c, g, or t
agtgtaacaccccttttattaaaaacataaatccaaatgtaaaaaagtgaatgaaagaatccagcagatatttattaagcaagatgaaagtgaaattacaaacacaggtcaacttttaaactcagcactctgttggagtggaggtgcacggtccttcatcataggcagcctatgcgagatgcatcttaggaagggagctttcgctgctcagaaatcaaagctccatcggaggtgtcctactggaggcatcagacaacaagctaaatgacgttagggctacacaacacaaaggggaaagttgacaacaattcaggggctttgagtagtcaagacaattagcttagtacttcaggtcaataaatgctacaatttatgggcaattagctgtaaaatggcctacagctgaaacactattcttgtcttatttcacgatttcatggagattaaagataatctaaacagattaaggccttaatctttaatccaggtgagtaattttgtttgtagtaaaaagcataagaaataattctcagcatattatgtaaaagaaaaagcagtgaaaaccttgtttggtcttccagtggcaaggatagttgaacaacttcaagaagctgagagaagtttgttcccaatttacaagtattttgacatatagataaacaaaagcaaaaccagttaaaccttaaaagatcatctgaataagatcctgacaattataattttacatccatgtgaatttcaagcaattgttaatggggaccagcagggctgcattaagaaaaccacttttcactgatctctcccccacatatttttaatttgtcttgctttgtttattttggttatgcaagtcctttctcttcatgaaacaagtgtaaggctctaaggctaaaataatagttatttttgtgggccccaaatagctacttttgaatttctttctttagtatatctcaaatctggggaacatggaacttgaagactcctaaccatgaagcatttggaaaaatacatatcattcacttttcacagaaccattttcttaaaanaagnggnatatccngatncncngcangntccnaanaagccttgttttacacaaancnccccgcatattttcggctatattntggcccacccca

SEQ ID NO: 436682 - DNA, 456 bp, Homo Sapiens
  misc_feature (186)..(186): n is a, c, g, or t
  misc_feature (389)..(389): n is a, c, g, or t
  misc_feature (396)..(396): n is a, c, g, or t
  misc_feature (426)..(426): n is a, c, g, or t
gaatgaaagaatccagtcagatatttattaagcaagatgaaagtgaaattacaaacacaggtcaacttttaaactcagcactctgttggagtggaggtgcacggtccttcatcataggcagcctatgcgagatgcatcttaggaagggagctttcgctgctcagaaatcaaagctccatcggaggntgtcctactggagggcatcagacaacaagctaaatgacgttagggctacacaacacaaagggggaaagttgacaacaattcaggggctttgagtagttcaaggacaattaggcttaggtactttcagggtcaattaaatgtcttacaatttatgggggcaattaggctggttaaaatgggccctacagcttgaaacactattncttgtcnttattttcccggttttcctgggggggtttnaaggttattcttaaaccgttttagggccct

SEQ ID NO: 436683 - DNA, 662 bp, Homo Sapiens
cgagaagtcctggatcttttgtggttacaccagcatcatgtggcaagcagaggcgacttccggaagagacaggcaggcaccgtgaggaaggtggctgtgctctcccaggtgtctcagagacagatgccttatttaaaatcagcacgacatgtgtgagatcttctgtttcctaccccaaatcctgaaaccctgcagacactgggctgactgggagaggtggggtgtgtaagttgtcccctagtttgctaagaaaatctaaaataatatttattatatgagttaggagagagagaatgggtccgcgtggcctcctctgcagatgtactggtctgaaatgaggttctgagtcactggccaggccagatgtgctcatgtcggtgtctggtgtctgttttgtggagaaaacagtatggtgtgttttaagctatttgtgttctgttgtaatatacttttagaaggttaattggtaaggttaaggtagcattaaccacaaagatgtttggtatttaaaaaatattctctagcaaatattggaatttccaaaatatatcatttgtacagggttaattttgaaataatacttgaaaatttcattataaatatatcctactttttatcttaagttgaagaagttatttactaaattgttcttgtacccttag

SEQ ID NO: 436684 - DNA, 945 bp, Homo Sapiens
gagaatggtgaaatttctttgaattgtgacttagtacaaattttaagaggtcagtaaatcctgatgctatgagctaaatctcacgggtaaataacatcaattacattccttagacactatcaatctttcatcttggtcaaccagagaaaacacagctttgccaaatagatctttccatctaacatcttaaaggtcaattatttaaatattcaccacaaacaaggatatcatttggtttcaacattagacaattaactgaagataaacatgcacgtccatagtttaaaaaggggaaaaaatacaaattcaactggcctagtcttttatctgagtttattaataccatttaaaatattacaaataaatcaattacatttcatgcatttaaaatgcaaatctaaaatgctccagagaaaggcttttcatttcaatgtgaaatatccaaattatttcaacattacaatgagcaattagtttgcagaatctgcaaacatttaaatgtagtgtcagaagtatttattaacagttaacaatattaccttcaggaaatacacaaaggccaaagttagtcgagtttcacttggacaatttatttaatacatgggttttggcagacccacttattatgaaatataggagaactctcactttaactatgcctgaactgccagcaaatgcaaataagtacatgctccattaaattaaatgtcatccaacatttatcaaatattgtcttagttacagcttgatacctatctaaattcatattcgagcaaaactaggccccgaaagtgcgtttagtggctctgcacctccagaagtgagttcaaaaaacctgcagctcatcagaactgcaacaataactcttaatattttcttgtgacgaaaaatacattcaggtttactttcaatatattttcaaatatttactggaaggtaattgtc

SEQ ID NO: 436685 - DNA, 914 bp, Homo Sapiens
  misc_feature (442)..(504): n is a, c, g, or t
ggctgtcgcgacaacctagtcaattcaatataatagctctatgtggttgttggacgcctcttttgtatcctctctgagtgacattgttgtatattattgagtccctgatagagagctgttttatatatgtcgtggtctgatgtttaatgtagtttgggttccacaaagtattggtggtcagccattagtaaatctgcgatttgttgtgtgctcgctatgataaaatagttttgtatagttgtgttgcagagtgtttttataggatggttatagttgttgtagtttatgcattgttttgtgaatatgtttgtgttgtatattgatttgagatatattctaatattatgtggtgatttcgtattgttttagaagaaatagtttgggtggggtgtggtggtttggtggcctttgtgtgggagtgtggtatgaggagggccgcgcnnnnnnnnnnnnnnnnnnnnnnnnnnnnnnnnnnnnnnnnnnnnnnnnnnnnnnnnnnnnnnncaaaatttcaaatatattttattcaaaattctccatttaggagaaaagatatataacaatgtttacacatgctttaataacttatttcactgtacaacttacattctgtataacagtacaataaaccagccaaagaaaataaccagttagcacttaaataagaatctaccatgtaaaaaacacagtatgggacactacaaggtagtatttatatattttttaaatgactgagctacagtacaacagtcatctagttcagtggttgtctaaaacatcaagctgtccacatctttctgattcatgatgggaaagctattatgacctttcacattcgaacatgtcattttattgtgtaaatttggtggatggggggcagaaggctctattacctttatccctttcttataaat

SEQ ID NO: 436686 - DNA, 894 bp, Homo Sapiens
  misc_feature (641)..(641): n is a, c, g, or t
ctataaaaatataactctttattaaataacatgcacaaatatcaactagtcattaaacagatatttagaacaaattgtaaagaaatacaaatccttaggtacaatttagtatcttgttcatgatatttgaagagtttaaaaagaatcactgattaaactaaccatcctttttctttctgaatccaaaaccttttcaggcatatactccattccaaatttttttctagcatttcagagcttcagaatatctttaataccaaaagcccttaactacttatttgattatacatttccaatgagaaggcattaacttttcttttaagctatcattagctttgagtctctttataaaagaaatttgtagaagcataatcatggcagagaggctccagctttttgaggtaccatttaagagagtgagaactgtggttaagactaaaaagctgggatgactaaaattcaccagattccttcttgtcgcttttatcttctaaaagcctgttctgtttgggccaacagtgctatttcccagacctctggttgaaccatcagaacaaaatgccctataaacttacccctctctgattttctataacttcaaagttcaattatactggttttttatgattttccacagtatncccatccaatttcctttttaggcaaaagtataaacaaactttgcagtaagttttcatattaaaaagtattgcttttataaattagcttttaatgttcccaggcttaataaacttaacttcaacagaaccagtgcttcgaaatctaccctgcctttctggcccaatttatccaataaaaaaggccaaaatctctcacctaaatttctaaggaaaactacatccaacctttataataaagtccttgcactgtgta

SEQ ID NO: 436687 - DNA, 357 bp, Homo Sapiens
  misc_feature (319)..(319): n is a, c, g, or t
  misc_feature (326)..(327): n is a, c, g, or t
acattactcgatttttatgcttactttcttttacatttcaaccatataattaatttttccatgagacagggtaggacacataatcttcttggatacattactgtttattgtttcaagtggatggaatatataaatcccactgagtagtttagtgtggccttgtatcttttataaacaggttaaatggagactttacactgtaatctgtgtatttatctgtctaccataaattgtcttagtgacaaatgcagaatttcttttatttcttggctcaaattaactgttgatccttttcactgataatatacaagggtaaaanagcaggnngcctttaaaattgaaaaaagaaataagata

SEQ ID NO: 436688 - DNA, 896 bp, Homo Sapiens
  misc_feature (58)..(119): n is a, c, g, or t
  misc_feature (194)..(273): n is a, c, g, or t
  misc_feature (383)..(383): n is a, c, g, or t
ctctttctctctttaattttggtttctctcaagcttccaaatggtgctcagtgctccnnnnnnnnnnnnnnnnnnnnnnnnnnnnnnnnnnnnnnnnnnnnnnnnnnnnnnnnnnnnnncatctggaaaaaaagcagcctgacagtccagctgtttgcaaactcatagcacatcctccagttacatggcagaannnnnnnnnnnnnnnnnnnnnnnnnnnnnnnnnnnnnnnnnnnnnnnnnnnnnnnnnnnnnnnnnnnnnnnnnnnnnnnngaaggcaacatgacgtgagctggtgatccatgaaggcagggagggaggggaaccgttttacctgtgctgaaccaagggaagaatgcggagagggagggagggaaaggggnaacaaaaatcagaagaaacactgggggcagagggaggaggggacacggagacaactttatacaacttgagacgaggcggcccggccggcgtgtcctcagtgcggtgtgtcggcggaggatctggtgctggtggtgctggcacttcagggtggggggccgaggacgggcacagtctctaagcagctcccccaccccaaacacggaggccccaaggggctgggaacaagagtctgtggcgaagcaggtgaggcagcgggcggtgggcgggcttgctgggtgcccccgccgcaggccgggcacgggctggtacggcctgtcttctttccactggccccccggcatgggatgggccagggcgccgggtcgggtaccggagtgcaagctcgaaagagagagagagaaaacactgagacagcattagtggagtgaaaggcggacacagatgagcctgcagaccatgcccccaaccctccgctgcccatcccctcctccccaatcccatccctctgaggc

SEQ ID NO: 436689 - DNA, 905 bp, Homo Sapiens
  misc_feature (832)..(832): n is a, c, g, or t
atgcaaaattcaaactgtatataattcacatttatgcttctaaacaaatagaagctcacatctgtactacttttacaatttacaaagtgcttttatatacattttctcatttgctattcatgacagacacgtgagacaaatattcttattttacagatggaaatagacccagacattattcagtactttaaccactaatagtggaaccctgagactttagatctgcaaaggggtttaataatgcaaatatcacatatatttccatttttaacaccatatttaagttttccattttcttaatagaaaatgataaaaaatgttttccccaatataataatacaaatggaaaatattatagacagtcatatactaacccaatgaccaagattcaccagaagcaaaacctatttggaggggtcctatattgttacatatatacagggcaccagcaccagaaccacatttagactaatactttttatttctaattaaaagaaaacaatgcagggcactcctgcagcctacaagtctaactgtacatacgtatgtgtcagactatgcaggtggccaagaagaatgcaaagagatattttatccaaatttggagtttagggcctgattgtcctagcttaagcccataggaacctgacaactcgttcatacctctcatctttagtcatagtttctccttctccatccccttttctccgtaactaccctgtgccatttagactggaaattctaacaggtagctttttctttctgaattatctttactactgtataatttttattttcagaatatgccttatttctacatctcgaagacatntctttatagtagatgggggagctagagcttacattcactgccagaaaagggtcagttccagtgttaatttcca

SEQ ID NO: 436690 - DNA, 744 bp, Homo Sapiens
  misc_feature (680)..(680): n is a, c, g, or t
  misc_feature (688)..(688): n is a, c, g, or t
  misc_feature (716)..(716): n is a, c, g, or t
ggagtgcttatataagcgataataattggaccagtgtcccttgatgtaaggtgtctagaaagaactcttctgctcttgaaatatagagatttcacatctctacacaatacaggtttataaagtttgctattatatgatcaagtgagtgaaccaattaatcattagaaacaaatgtcattgaatacagaatagttgagttacagttaagaagggagccataacctcagctgccctataaaatctataataaggtggttttcatatatatattttttccccatgtgaattctttggtgttttttccccctctttttttagtgctatgattgatgaacatgcaatgtgagattcaaataattgcattgagcatgtttatttgaataattgccccattgcacaataaataaatccgctgagtgtgtttgtttgaatgtttttacatgtacatgggatcacatagtcaaataaatgcagctgtgtttattacaatgtgtggggctccagatatacacacacttgtttgtgtgtatatccagggccctacagcccctgaatggcctcacacatcttggagcaaaagcatggttaacaatttttcagttcaaatacatgtaaacttattattgggcagtctcctcaaatttgtgactaagatttgcttttattaaggcttacattantagaaagntaaaaaatgacctttttaaaagttatcngattgtgaaaagtatctaatacatttat

SEQ ID NO: 436691 - DNA, 547 bp, Homo Sapiens
  misc_feature (3)..(3): n is a, c, g, or t
  misc_feature (5)..(5): n is a, c, g, or t
  misc_feature (12)..(12): n is a, c, g, or t
  misc_feature (18)..(19): n is a, c, g, or t
  misc_feature (219)..(232): n is a, c, g, or t
ttnantatcttngtgtcnnttgtttttttattgaatgcgtttattttaacaaccaaaaaattctaacagcctaacaatgcacataagttaaaaattaattatcacttagtgataacaaagatagttgatttacatggaaaaaagaacatttacaatatgttaatccttattcacattgttgataccgcaataaaacacaatttgttttttcatttcacnnnnnnnnnnnnnnggcgggaaattgtgctttgtcaagaggcactacaagagaaagtttcttcttccaaatagatattatatgacagatattgaataaatagacatatatgcattgtaattcgcaaagatctggcaagaccacaggctaaaatgcccacagattcacttagaaccactgcaaacttggcagtgaaattaaaaaataaaaggcaagacttagcattgaaaaatacctaataaatttttggttgaagtgtaaaaagataccaaatgcggatgccatcgatagatgaaccaccttgtaagagcttggcaaaatcagtttcca

SEQ ID NO: 436692 - DNA, 382 bp, Homo Sapiens
  misc_feature (202)..(202): n is a, c, g, or t
  misc_feature (205)..(205): n is a, c, g, or t
  misc_feature (305)..(305): n is a, c, g, or t
  misc_feature (344)..(344): n is a, c, g, or t
cttttactgggaaggggatcatccctcaacaactggatttgttgtggtggtggtggtagtggtttgcatctcgggaaaattttgcacccagaatgctacagctgtagggatatttacagagcatctaattcaattccttagtttcatccattaggaaacaagccctgaaggggaactcgactggctcattgcttcataagtnagnttttagagttctaacaggaatccctgccaacttacctcaactgtcattctttagactaataccatacttgggaggaagatccaaaagtgtctagaatttncacttttggtattgatatgttagatatgttatgaatgtntcgaggcttgctgacataataatggctttatgggcttt

SEQ ID NO: 436693 - DNA, 1849 bp, Homo Sapiens; identical to SEQ ID NO: 178219
  misc_feature (76)..(76): n is a, c, g, or t
  misc_feature (238)..(238): n is a, c, g, or t
  misc_feature (248)..(248): n is a, c, g, or t
  misc_feature (512)..(512): n is a, c, g, or t
  misc_feature (535)..(535): n is a, c, g, or t
  misc_feature (594)..(594): n is a, c, g, or t
  misc_feature (670)..(670): n is a, c, g, or t
  misc_feature (767)..(767): n is a, c, g, or t
  misc_feature (919)..(919): n is a, c, g, or t
  misc_feature (926)..(926): n is a, c, g, or t
  misc_feature (1113)..(1130): n is a, c, g, or t
  misc_feature (1359)..(1374): n is a, c, g, or t

SEQ ID NO: 436694 - DNA, 475 bp, Homo Sapiens
  misc_feature (2)..(3): n is a, c, g, or t
  misc_feature (5)..(5): n is a, c, g, or t
  misc_feature (28)..(28): n is a, c, g, or t
  misc_feature (37)..(37): n is a, c, g, or t
  misc_feature (64)..(65): n is a, c, g, or t
  misc_feature (199)..(199): n is a, c, g, or t
  misc_feature (251)..(251): n is a, c, g, or t
  misc_feature (257)..(257): n is a, c, g, or t
annanacaagccgtggaatatgaatttnctttcaaanaataaggtcatagatgcacatgggacnntttatacaggagagcagatcatgagtgagcccaggcttggattctgtccctgcaatcttggcagccatgcagacctctttgaatctcaggtttcccacctctaaatgaacttgttctgagttcataggtccctnaaaatctaaaccattacctactttctagatttctccatagcttcatataaangagatntttttcctaagaatttgttaatttaacctattggattaatacgatcattgaaatgtgtatcagattttaagtatcatgattttattcccaataaaacaaaaaattattttctatgatgaatatgcatacattaaaaatgacgagaaatcatttttggtacttgtctgaagaactcatccccaatttttgccttttttgctttgcaaagcacattttct

SEQ ID NO: 436695 - DNA, 762 bp, Homo Sapiens
  misc_feature (170)..(179): n is a, c, g, or t
  misc_feature (190)..(217): n is a, c, g, or t
  misc_feature (226)..(226): n is a, c, g, or t
  misc_feature (228)..(228): n is a, c, g, or t
  misc_feature (233)..(234): n is a, c, g, or t
  misc_feature (236)..(239): n is a, c, g, or t
  misc_feature (243)..(243): n is a, c, g, or t
  misc_feature (246)..(268): n is a, c, g, or t
attggggggggagaccccaaccccctttgggtttgggcccgcggattcctcttggggagaaccccgtgggagccccctttttcccctttccattgcggggcccccgcgccccaaaccaaaggtttttagaaaattttcttaggggcccggagggggccccccaaattttnnnnnnnnnnccaaaaaaaannnnnnnnnnnnnnnnnnnnnnnnnnnnatttcgttntnaaaanntnnnntttnttnnnnnnnnnnnnnnnnnnnnnnncccgttttaaagtttcctttatttctttagatctttatgaaacattccatcgtttgcagatcatagtgctttattaacaaattcatgtgttcttttcccatccctttaatacaaaaaaattattcatcagttattttcatctgacatttcactaagtacagaatgcataatgtcaacattattagatcagccattcaagtgggtcacataagtttatcctcattgtgccaaatacccactcaaaggataagctgaataacagatgcctccaggtgtatacaacaaccttagtttcttgacttgaactagtcctgtttaacaggtcaaactgctagtctttctaagtaaactaaaaaagactcaagtacacagctgtacatacatatcatcagatggtaagttcatttcaacaagaacctctataactaactgtacatttgtacagttttctgctatcattgcaaaagcccctctgaacaaacttatagtttaga

SEQ ID NO: 436696 - DNA, 918 bp, Homo Sapiens
tttttttatcattctctgaagagcatattttattaatcttcaagttcctcagcatattaataataaaaacttgatatatattatcaacaagtctgactgttatgcccaaagaaaatccagattattttaaggtgagtttgcttctttttcatctgattcatcatccataacctgttctacgccttctacctccggaatataaaactgcagcatgttctgaattccatttttcagagtaatgattgaactagggcagctggtacaagaaccctggagtttcagctgtacaatgccatcttcaaagcctttgtagattacatcccctccatcttcctgcacagttggccgtattctagtatctaacaattccttaatcattgccacaacttcatcatcttcttcagatcctgcttctcctgaaggtgtttcctcagtaaccaggggtaagccagatgcaaagaagtccatgattgttgcataaatatctggtttcagtaaattccagtctaattcttcattttcctttgtgacagtgatgaaatctggtccaaagaagacactttttactccttcaatcctaaataactgcctagccagaggggagcgaaatgctgcagctggggtgggaaaatccatggtccttgtctcaagaactggttttcctggtataaactttaagctgtttggatttggggtatcttgtgtttgaataaacatgtatctcactgggtgataaaaggctgcaggtagtgggaaaagtggtctttgtacaaactgatgcagaggctgtttcttaatggtgtatggattcttcaacatatgacagaaccgcctgcgcagcccggcggcaacagccgcagctccccagccccgcctggccgtcgccgccatcttagtccggagtgcctaagggtctcc

SEQ ID NO: 436697 - DNA, 1057 bp, Homo Sapiens
ggtacttcagaacaaatgtttattactgcttaatggggccaaaggggcaacacaaagcattgaaaacatcactggctcacaaaaacagtcaccttgttaccttctcagttgcatttgtttatttcacaaggcttcattcacacataaaaacaagatactaatccaattcaagttcataacgattataaaagtaaacatttgttgggacaatgtacaataaattgcactttttagacaagcattacatttacatttatagagtgtactatacataatacatggaattacggaaacgtctaattggtcattgtttatagaggaagaggctgatcactaacgtttattttgtagttaattagtactgttcagactaatcaactcctttattctagaacctgttttcattagagatgccatggacaaaataatggaattcataaaaatagacaattccagaatctctactacctcctctgcaagggaaaggtaggagttagaaagaaaggaagtggggctgactgagaaactttgtccctcatttgaactaaggatccatgcattatgcaaaataccaaaaatagagaaactgatacaaaaggcttttgggacatcttggatctgggaccatctccagccttattcttgtgctttcatgacaccagagtctttcgatgcatttatattctcacaattcagtccatatattttatcccatatataatatatagttattaaaagttatacagtttaatggaaaagattttacatgttaactaattgccaatgaaaaaggaaaataacttaaaatgttcactttctactcaatgattcttttttcttaagcttttcagaataccactaatgacaaaccagagatggaggtaggaagaatgggatatattaatgaaatgtttttatagcaggcagcaaattcaggtggagataagcttgacatatgtagtcttttagatgcaaactgagaaaggaatgccagacagctgactgcagtcactaaaatctcctatatgcccaatcccgggaattccggaccggtacc

SEQ ID NO: 436698 - DNA, 550 bp, Homo Sapiens
  misc_feature (5)..(5): n is a, c, g, or t
  misc_feature (31)..(31): n is a, c, g, or t
  misc_feature (39)..(40): n is a, c, g, or t
  misc_feature (57)..(57): n is a, c, g, or t
  misc_feature (77)..(77): n is a, c, g, or t
  misc_feature (81)..(81): n is a, c, g, or t
  misc_feature (93)..(93): n is a, c, g, or t
  misc_feature (96)..(96): n is a, c, g, or t
ccganatctttctttttataaaacacggggngggggcanncgaaggcagctcgggcncggcggacggcgcggctcanacgnaagatctggatnggncgcggatgggctggcggcaaatggggcaggcgctgagcgcggacccgcagggggcgcatgccccgtggccgcactggaacacgaggcggatgtggctgtcgatgcaaatggggcaggtgatgcgttcctccatctgccggtagcggctctgcagctcctccaccacctggcccggcgggccgggggcgggggcggcgctcgccacctcaaaaccgtctgggcgcaattttttgctgacgaccacctggcacctgatgcactttttcatcctgcgcgcgcactcctcacacacggtgcggtgctggcacggatagaacagaaccatcagcgccatcttggagcacaccaagcactcaacggccttgggcctcagggcggctcccacgtgcaagttttttactgtgttggggtccccaacagtagctaggggcccggtgctacaccctgccacctg

SEQ ID NO: 436699 - DNA, 551 bp, Homo Sapiens
  misc_feature (33)..(33): n is a, c, g, or t
  misc_feature (423)..(423): n is a, c, g, or t
aacctccagtaacttaccaggagagaggttaantatgtaatctgtcttagatgtttctaatatttaaaagcatatctaaacccttggcaaaaacaaacacaatcaattcagtgtaacagactgagctttaaactgtactttaattttcaataactgtaacctactggttaattgaaccaaacgtagagtatttaaatgactcactatgaagtgtgtcaaatcaatgatagaatgcatagaaaagtggagataagtttgggggaaggtgcaaggtgggttaatgtgaaaaacggtaaatgccagttttaataacaaaaatggtactaaacgcagatgaacattaaattaatacagtataaaagagaacagcttaaataaactggtattcacatattacaatagcaaagttatgacagaatgaantgaagacacgaacagttttgaaaattctcttttcagcctacttccaaatagaaatagtcaggcttttttcctgtacactagtttgatgctttgtctataccatatatagtagccaaatacattcttta

SEQ ID NO: 436700 - DNA, 1712 bp, Homo Sapiens
  misc_feature (1002)..(1002): n is a, c, g, or t
  misc_feature (1254)..(1316): n is a, c, g, or t
gggctggtaccggtccggaattcccgggatcggcgactgctcgggcccggccgccacctgcacggcgggggagccgctcgccgcgggagcgtcaggagggcacgcgtctgcggctgaaccgcggaagggccggtgaggaaccgggcctcgggagatggccctgagggcccccgcactgctgccgctgctgctgctactactgccgctccgcgccgccggctgcccagcagcctgccgctgctacagcgccacggtggagtgtggcgccctgcggttgcgcgtcgtcccgctgggaatcccgccagggacgcagacactgttcctgcaggacaacaacatcgcccgcctagagccgggagccctggcgccactcgccgctctgcgccggctctacctgcacaacaacagcctgcgcgccctggaggccggcgccttccgcgcgcagccgcgcctgctggagctggcgctcactagcaaccggctgcgcggcttgcgcagcggcgccttcgtaggcctggcccagctgcgcgtgctctacctggcgggcaaccagctggcgcggctgctggatttcaccttcttgcacctgccgcgactgcaggagcttcacctgcaagaaaacagcattgagctgctggaggaccaggctctagcggggctgtcctccctagcactgctggacctcagcaggaaccagctgggcaccatcagccgagaggccctgcagcccctggccagtctgcaagtcctgcgcctcacagagaacccatggcgctgtgactgcgccctgcactggctgggtgcctggatcaaggagggcggccagcggctgctcacctccagggacaggaagatcatgtgtgcagagcccccgcgcctggcgctccagagtctcctggacgtatcccacagcagcctcatctgcattccgccctctgtccacgtgcagccgctggagctcacagccaacctgggtgaggacctgcgggttgcctgcccaantccggctacccgcagccattggtgacctggagaaaggtgccccagcctcgcgagggccggccgcgagcccaggcccagctagaaggcgggttgctgggcctgggcggacactcggcatccgacacgggcagcggcatgctcttcctcagcaacatcacgctggcgcacgccggtaagtacgagtgcgaggcctccaacgccggcggcgctgcccgcgtgcccttccggctcctggtcaacgcgtcccggcannnnnnnnnnnnnnnnnnnnnnnnnnnnnnnnnnnnnnnnnnnnnnnnnnnnnnnnnnnnnnncccgaggcgggcagcatggccttccgcgccctgggcgtggccacacagacggccattgcggcggccatcgcgctgctggcgctcacggcgctgctcctggtcgccatgatctgtcgccggcgccgcaggcgaaaaaaggcgcgggggcctccgggggagggagcgctgttcgtcaacgactacttggacggcccctgtacgttcgcacagctagaggagctccgcgacgagcgcggccacgagatgttcgtcatcaaccgctccaagccgctcttcgccgagggtccggcggaggcgcccgctgactgcggcccggcacagggggcggggccgggactccgcgtgcccccgccggtcgcctacgagatccactactagggccgcgggcgcgcggat

SEQ ID NO: 436701 - DNA, 1364 bp, Homo Sapiens
  misc_feature (31)..(31): n is a, c, g, or t
  misc_feature (40)..(40): n is a, c, g, or t
  misc_feature (92)..(100): n is a, c, g, or t
cctcttttacccctcacccttaaaatatctntacccgccnaaaggagagagcctgggtggcgaattcggcacgaggttgaatttgtggctgnnnnnnnnnctgtccacgttggtcacccttatccttatctctgctgtcacccccaacatggccaccgggcaacaactgccatccagcctgtcgccccgcccttcgcggggcagccccgtcggcactgccggccagtccttgctcttcccacctttcggaggcccaagatcctactgtgaccggccagggccagcgagggaccccccccacgcagagctggaggttggggtgatgtcttttcggaagagcttcaagggaggtgttggggcctccccggccaccttccattgctaccccaggattcccgagtgcaacgttcccggctcgcgccccacacacggctcagcgcacactgcgcggcttccacctttactgacggagcatgcgcgaggccgcaccggccaatctccggcgcccacgtcatccgcgcgcccgcggccctagcagtggatctcgtaggcgaccggcgggggcacgcggagtcccggccccgccccctgtgccgggccgcagtcagcgggcgcctccgccggaccctcggcgaagagcggcttggagcggttgatgacgaacatctcgtggccgcgctcgtcgcggagctcctctagctgtgcgaacgtacaggggccgtccaagtagtcgttgacgaacagcgctccctcccccggaggcccccgcgccttttttcgcctgcggcgccggcgacagatcatggcgaccaggagcagcgccgtgagcgccagcagcgcgatggccgccgcaatggccgtctgtgtggccacgcccagggcgcggaaggccatgctgcccgcctcgggccggggctcgctgccggcggggcgggcggccggaggcggcggttgcgcgggctgctgcggctgctgccgggacgcgttgaccaggagccggaagggcacgcgggcagcgccgccggcgttggaggcctcgcactcgtacttaccggcgtgcgccagcgtgatgttgctgaggaagagcatgccgctgcccgtgtcggatgccgagtgtccccccaggcccagtaacccggcttataagctgggcctgggcttcgcggtccggcccctcgcgaggcctggggcaccttttttcagggtcaccaatggttgtgggtagcccgtaggctttgcaggcaacccgccagttcttaacccaggttggctgtgaacttcaagtggttgcaccgggcccagagggctggaatgcaaaatgaggctgtgtgggggatcacgcccacggagccctcggtagcgcc

SEQ ID NO: 436702 - DNA, 1961 bp, Homo Sapiens
tttttaagtaagcacagcaataaagttttaatggaatagctttggcccaggcagaggcagttcccagatgtctcaggacgcgtgtgaaccccaagaagttgggggcgttatctgggcccttgggatccattcccctgggtataaagtgttggtacgtggctccaggcctggcccactcagcctcccccaggaaggcttctcaagtggagaaggttcttggcctcagaactcacggcgctgctgctcacgctgaccccccactagatgcagatcggtgtagaaaggcctgccagggcagggatgagggccccaagctggaagcagcccagaaatccttttaccagaggacaactccctaatccgctgggcaggggcggggtgtcacacgcaggattccgcgacgactgtcactgcctcctgggcgcccctctgtgcgggagcggggagggaagaggatgggacgccctgtgtctgcctcgggcgcagtgcgaggcccaagctggtttttgggcggcccttgcgcacctctgcagcgctgcgacctggtgcctgtatcccccacggcctcctctgcttcccacgagagccggttgtttttcggccgggctcagggagggcgtgggctcgcgcgttccccatccccctccaggacccacgcccttctcggagcgcaccagggtcagagccgggatggtccccgatcccccagcgcccccacgcctggtgaccttgggtcgggcgtcccctcacctgaagctccgcgcggcgagcggctcccccgccgtgcagttggcgtccgggcccgagcagtcgccgggctgggagggggcgggggacgctcgcgcacgcgcaccagagccccgcgcccgccgcctgtgcctgacgtctcgagcgcaggccaatccggagggcgccggagtcgggtgcgcggggggcgcgcgccgtggggagcggggtgtccgggagggccgggccgcggcagcaccaaggacagcgccgggtgggggcggggccgagcgcgcaggcgcactaggctgccgcgagcgcgggtggcgcgggctttccggggcgtggagtcccgggggagcggggcgagaggcgcccgcggcctcccgcctttcccttggccccgctcagggcgaccgagccgcgagcagcagcggggccaggtccatggtgagggcgaggcggcggccctgccagcgcacgtgcgagggcagcgcaggcgcgccgggcccgtactcgaagcaggcgctgagctcgaaggccagggcggagcgcaccaggcccacgccgcccgcacgctctggcgccgggtggtacaggcgcccgttggcggccaggggcagcaggcgcgccggctcgaagggcacggccagggcctcgccaccgccgcagtaggagaggcgcggaggcccgtggtccgcggtcagcaggtgcgtgaagaccaccggccggtcctcgcagcgcaggaagttgcgctctctgccgcagggcgagaggaaggggaaagcggcctcgtagcgcccgctgcggttgggtctcaggcgggagaagaaggtgaccaggaactgcgggtctttgaagcaggtgatgaaattcttcattttggaatcatccaggaaaagctggccctggtggtccacgtagtagaaatactcgcgggtccgcggctccggactctggccctgcgtgtaggaaacgcccccatccccgctgcaggcccgggctccccgcgaccgcgccaaggccagggtccggagcgtcccgcaaggcggccacattctcctcccgcgccggaagcgaccagcaggtcacgccgggggcggtgctgcgcgaactcgcgcctgcccgcagtagccccgcgcttcgcgttccggcggcgcccgcctccgcgacccgggcccggcgctcttccctctccctcgggcctcgggggctcgcccgccctggccttccga

SEQ ID NO: 436703 - DNA, 1632 bp, Homo Sapiens
caaaggagaaaaccagaacgttttattagtttcttgaacctatttatagtgtcaaaagttagacgcaggtgcaggcctccattccatctattggctggctctcgactgccgagactggcctgccaacctgtgtttcaggagggcacgcgtctgcggctgaaccgcggaagggccggtgaggaaccgggcctcgggagatggccctgagggcccccgcactgctgccgctgctgctgctactactgccgctccgcgccgccggctgcccagcagcctgccgctgctacagcgccacggtggagtgtggcgccctgcggttgcgcgtcgtcccgctgggaatcccgccagggacgcaggtgggcaccgtgtggagctgcgggaggacggggtgcccccagggagaggaagacccccgcagcggggtaagcgcctcctctttccccggcctgcagacactgttcctgcaggacaacaacatcgcccgcctagagccgggagccctggcgccactcgccgctctgcgccggctctacctgcacaacaacagcctgcgcgccctggaggccggcgccttccgcgcgcagccgcgcctgctggagctggcgctcactagcaaccggctgcgcggcttgcgcagcggcgccttcgtaggcctggcccagctgcgcgtgctctacctggcgggcaaccagctggcgcggctgctggatttcaccttcttgcacctgccggtgagcgcctggggtctaaagggccgggatactccattatggcccctcgccctgtagggctggaatagttagaaaaggcaacccagtctagcttggtaagaagagagacatgcccccaacctcgggcgccctttttcctcacgatctgctgtccttacttcagcgactgcaggagcttcacctgcaagaaaacagcattgagctgctggaggaccaggctctagcggggctgtcctccctagcactgctggacctcagccaggaaccagctgggccaccatcagccgaagaggccctgacaggccctggccagtctgcaagtcctgcgcctcacaggtacctcttcctcggaaagcgtctctgtctgggccacggtgttggcagtagggagcaggctcatgtgtggaggggctctgacatcaggcaactgggcagcagtctggaaggctgcaccaccgcctgcagccacactggagggctgcgggagtgggtgtgctggggaatacagctcaggcaccctgcctggggaaaacagaagacaggaactccacagggtgacttaacagaattgagggttctgcacacttttaggctgaggggaggcagacaaaattgcaaaggagagagacagctgaccaggactggggacattcccaagagagggcatccaaaggcaaggctgagaggacttgtgaggtttcagtgctggtgagatgtctatgtggacgcccaggttcctaaaaacagtggcacttgttgcaggaagacttaaggagcaggtgctttctcagagaccgacggagaagtgatctgtaacaggcaggcatcacagagctaaaggggaggggggcgagggtgaagggcctgccgccccaaggagcttgggggtcaaggaaggggt

SEQ ID NO: 436704 - DNA, 353 bp, Homo Sapiens
  misc_feature (225)..(288): n is a, c, g, or t
ttgtcaaaggagaaaaccagaacgttttattagtttcttgaacctatttatagtgtcaaaagttagacgcaggtgcaggcctccattccatctattggctggctctcgactgccgagactggcctgccaacctgtgtttcaggagggcacgcgtctgcggctgaaccgcggaagggccggtgaggaaccgggcctcgggagatggccctgagggcccccgcactnnnnnnnnnnnnnnnnnnnnnnnnnnnnnnnnnnnnnnnnnnnnnnnnnnnnnnnnnnnnnnnntacagcgccacggtggagtgtggcgccctgcggttgcgcgtcgtcccgctgggaatcccgccagg

SEQ ID NO: 436705 - DNA, 951 bp, Homo Sapiens
  misc_feature (327)..(390): n is a, c, g, or t
  misc_feature (473)..(567): n is a, c, g, or t
  misc_feature (792)..(855): n is a, c, g, or t
  misc_feature (936)..(936): n is a, c, g, or t
gcccccccgtgtttttcccccagtggggggaaaaattttattttcccaaagggggcgaccaaagggggttggaataagcccccgtggggggggttttaagggttttcttcccatcccccttttgggaaaaggggttctcccaagtgcgggcgagaaatatcttttaagtgaagttcccacccggttttttccaataaaaaggcccaggggcgggggcttaaatttttatttggggcttcgctttggacccccccttggatagatcccgtaaagcccctccaaacttcctttgggttttgttcaaaaccgttgggtttcccccggggnnnnnnnnnnnnnnnnnnnnnnnnnnnnnnnnnnnnnnnnnnnnnnnnnnnnnnnnnnnnnnnncccagtttcctttccttttggggccccgggcccaaaaaaatgttttaaaaactttttggggggcggagggggcggacaagggnnnnnnnnnnnnnnnnnnnnnnnnnnnnnnnnnnnnnnnnnnnnnnnnnnnnnnnnnnnnnnnnnnnnnnnnnnnnnnnnnnnnnnnnnnnnnnnttgtcaaagaagaaaaccagaacgttttattagtttcttgaacctatttatagcgtcaaaagttagacgcaggtgcaggcctccattccatctattggctggctctcgactgccgagactggcctgccaacctgtgtttcaggagggcacgcgtctgcggctgaaccgcggaagggccggtgaggaaccgggcctcgggagatggccctgagggcccccgcactnnnnnnnnnnnnnnnnnnnnnnnnnnnnnnnnnnnnnnnnnnnnnnnnnnnnnnnnnnnnnnnntacagcgccacggtggagtgtggcgccctgcggttgcgcgtcgtcccgctgggaatcccgccagggacgcaggtgggcacncgtgtggagctgcgg

SEQ ID NO: 436706 - DNA, 807 bp, Homo Sapiens
cggggagttgggtcggtccgggccgaggctcctacatgggccgcgtccctgctgcgttgtgcagcttcggactctgtcctacaagtccccagccccggcgctgacttctcgccgctgccagggagacacccgggccgccctgcctttttttggaagccctgtcaaaaggcagcgtgcatgtccgggaggcagcaggccaggtagtctccgcggaggaggtggtacaactgattacaaacttgaaaagagggaaaaggtgcggaaagaattggctgaccagggagcagagcttttccgtggatgattccaaaatgaagaatttcatcacctgcttcaaagacccgcagttcctggtcaccttcttctcccgcctgagacccaaccgcagcgggcgctacgaggccgctttccccttcctctcgccctgcggcagagagcgcaacttcctgcgctgcgaggaccggccggtggtcttcacgcacctgctgaccgcggaccacgggcctccgcgcctctcctactgcggcggtggcgaggccctggccgtgcccttcgagccggcgcgcctgctgcccctggccgccaacgggcgcctgtaccacccggcgccagagcgtgcgggcggctgttgttcttttgcgctccggcctggtcttcgaggctcagcgcctgcttcgagtacgggccccggcgcgctgcgctgccctcgcacgtgcgctggcagggccggctgctcgccctcaccatggaccttggccccgctgctgctcgcggctcgggtcgccctgagcgtggccatgggaaatg

SEQ ID NO: 436707 - DNA, 1606 bp, Homo Sapiens
  misc_feature (116)..(116): n is a, c, g, or t
  misc_feature (379)..(379): n is a, c, g, or t
  misc_feature (977)..(986): n is a, c, g, or t
caccaattatcacatcggcgtgattttgctgcctcccgaatccggcggcgccgccggtggccgcccttattgcttttataatagtggaaaaaatgggccatagggtaaggggcgcncggggccgtcgccgatatggcgggggcaagggggggcgcagaaacacgggcgcggaacaacgtccggctcccaacatgccgcggtaataaacataagggggcaatcattttagtgcgcgcaagagcggctctggttcacataagaggtgataagacgagcagggcacggcgaaaaagcgtgacgcacgggtggagtacgtagggcgacgcggggcgaggtacaaggtgtgcggagtgaaagtcgcgcgggggagagtaggggngagactctatagacgcggacggtgtacaagcacgcataaacaacggtaagaggagcgacgcgaagcggataccgggcgcgcgcgggacataggcggctataaggcgcgcagcgggtgcgggacgtcatcgtcttgcgaacgaggcattttagcgctcggccggcggcacggcacgacaggggcgcgcacataccggacacgcgtagtagcgtgcgtaggcaagcgttcaagtgcggtagaatcgtgctccagttggtatgcgcgcggaaagggggcgggggcggaacgggagcgaggaaagggaagcgggggcgagtgagtgtaaggggcatggacggcgtcaaagtacgggagggctaaggctgcgggtacgtgcgtccacgctggcgggcggggagacccgtggtggcatgcacgtcgcgcgtccacggggcgaggaggcccagcaggcatcccttcgaagactagccgcgtttcgggggggaggagggggagaggagacgaccttcaagccatgggggtcgtgtgaaccgggggggtgcctaagcgtaagcgtgacatggcccattgcgcggaagcaggtggagaggaacaaaannnnnnnnnnaaaagtggcgagagggtgaagggtcccccatcgaggttcctcggcggcggcagggagagagggcggttttgggccggccgggccggaggatgaagggggggaaggggcgtcggtgagccgcgcaatgcgagttaggttctcaagcggggagaaggaaggcggaccagcagcgtgcgggtgtttgaagcaagtgaggaagttcttcagtggggggtcatccgggagaaaggcgccctgggggtccacgtagtagaaatacgcggagagccacggctccggactgtggccctacgtgtaggaaacgcccccatcgccgctgcaggcccgggctccccgcaaccgcgccaaggccagggtccggagcgtcccgcaaggcggccacgttctcctcccgcgccaggaagcgaccaagcaggtcgcgccgggggcggtgctgcgcgaactcgcgcctgcccgcagtagccccgccgcttcgcgttccggcggcgcccgcctccgcgagccgggcccggcgctcttccctctgcctcggtcctcgggggctcgcccatctggaaaattccgaaccggtgccggcctagaaagcggggcggagcggggaaagggcaaggagagcgcag

SEQ ID NO: 436708 - DNA, 598 bp, Homo Sapiens
  misc_feature (597)..(597): n is a, c, g, or t
tgtctgtgcaaatgctttaattggtggattcttagatacagtggttaatccattgcccacaattctttactaattccgaggcacctcatgccgggaacacactttcccttccactaaacaaaggtgaccgcgtttcagagctctcctcttacaaggttcacgtccttcgttaggccgaggaccgtggtactacaaaagaacatttcgttagctgaagtcactacgattggcgagaaacatccgttacttcagaatacgttaactacaaaatatattgaatttccatatgtattaaccatatacatgtgtaactattactaaatgtagttcagtcattacaaaataagacattctgggagcgggctacaaatattcaaaccagctgaattccccaggtaaggccccgtgttataaacaaaccacaaacatcagacgtcagaccgagagctcagtgactgcagggtgcgtagccggaaaagccaacaaggcactggcaccgcagagtcgctggaggggtggtggggggcactgccggctcggggggcctttggaagtcacctctaacttcgattcccagccaacagcggctggagtccna

SEQ ID NO: 436709 - DNA, 434 bp, Homo Sapiens
  misc_feature (173)..(173): n is a, c, g, or t
  misc_feature (235)..(235): n is a, c, g, or t
  misc_feature (340)..(340): n is a, c, g, or t
  misc_feature (370)..(370): n is a, c, g, or t
gtctgtgcaaatgctttaatggtggattcttagatacagtggttaatccattgcccacaattctttactaattccgaggcacctcatgccgtgaacacactttcccttccactaaacaaaggtgaccgcgtttcagagctctcctcttacaaggttcacgtccttcgttaggnccgaggaccgtggtactacaaaagaacatttcgttagctgaagtcactacgattgggcgagnaaacatccgttacttcaggaatacgttaactacaaaatatattggaatttccatatgtattaaccatattacatgtgtaactattacttaaatgtagtttcagtncatttacaaaattaggacattctggggggncggggctacaattatttcaaaccagctggattaccccggggtaagggcccctgtttttaaaaca

SEQ ID NO: 436710 - DNA, 473 bp, Homo Sapiens
  misc_feature (448)..(448): n is a, c, g, or t
attttagactgtatgttgtgctgttttgagtacactttatttcggaaagtgatatttagtattttctatacactctgaaatcatgagcatttcactttttctaagtcaattatttcataaggattttattaatagatattggtaaatagaactttggaaatcttaattcagaattcttactatacctgagtcttttgtaagctatagttttatgtacaaccttgtacagtttttttgacatacaattcagaactttgtttattctcttggactttgttctggccaatacattttttttaaatctttaagaagaactgtgatttgttttagtgggtatttttctaattaaatgaaaacttgtataatggtattttagagaatgccagtaagtgcatgtttcaagttaatgtttttctcatcacttgtatgtttctaacacagcatgggnctttaataaaaccatccggggactt

SEQ ID NO: 436711 - DNA, 473 bp, Homo Sapiens
  misc_feature (45)..(64): n is a, c, g, or t
ctagtggatcccccgggctgcaggaattggcacgagctagtctcnnnnnnnnnnnnnnnnnnnnatgaatgctcttttgttaaataattatgacacaaatgacagccaaaatatttattattggttaatataccacttaaaatctctgacctaaaacaaatttttgagccactggaaaagtgaactttctcacagaaatatttaatgttgtcaaaagaatactctgttttaacaataactccattaatttattactttaaaagatgcacagtgctgcttttacacattttcaaatgtagactgaccacatgtttgatttaaagcttaaagaatcaatgttcccttttgtgaagatggcttttgttgtcattagattctactgattttttaggaatagagctgctccacactgaatccactggtcttggttcaatttccagtgtctctttgtataaacgtttgagatttagagg

SEQ ID NO: 436712 - DNA, 991 bp, Homo Sapiens
  misc_feature (710)..(710): n is a, c, g, or t
aaggtggggattattgtagttggcgcatgggttaagtattttccaggggggaaccttttttaccattgtcgtgatagcctgtataataccatttttccaggtaggaaaaaaggaggccggggaagggctgcaaaaaatgtaggaaggctcttttattaaattattatggcacaaatgccaggcaaaatatttattattggttaatattccagcttaaaatctctgacctaaaacaaatttttgagccactggaaaagtgaactttctcacagaaatatttaatgttgtcaaaagaatactctgttttaacaataactccattaatttattactttaaaagatgcacagtgctgcttttacacattaaaatttcagtgacatcaacaacataactatatgttaatattttgaactaacatttcaaatgtagactgaccacatgtttgatttaaagcttaaagaatcaatgttcccttttgtgaagatggcttttgttgtcattagattctactgattttttaggaatagagctgctccacactgaatccactggtcttggttgcccccacatggaacatcaatattggtaaccacacgatccctttcagcacttgtgtaaacaggcaaagagatgcactcatccggagaatatggaccacatgcatcctgtggaatgcagcccataaagcaagggagcagggagggcacgntggtagaatcaaggggattttcagaaagttgatttccatcaaaggtgcatccttgtagtagcaagccagggatctgccagggaaacaaatatgtcatgaaaatatgcattaaagtcgcaaatgtcagaggttactctattctaccttaagagctatgctttccattgtgttcaccgattccaaatatagaaaacaaagattatggtactttgagaataaagtcagtaaggcctggactagtgttcactgtcaacttctttgagacggatatcccgggaagt

SEQ ID NO: 436713 - DNA, 457 bp, Homo Sapiens
aaaatgtatatattacttatatattaacattaagcattaatactgttcaataatagaatatgaagaaaaatacatatagtggtatttgggattataatcttacacagaatagtgacaagagacatatgaaagggcaagtgtatcaaagctagatgacaataagactgcaaataagatgaatttattcaacactatgtacaaagtttaaggccgtggtctaatccatgcatcataattggatgagtgatatccatcgatcattagcccgatactgaacattactccaaaataattagtaggaacaaagatgtctgatgttaataaaacaagactctttttctccataagtataattcacatggctatagatttttaagttttacttttccaaaacagaaagccttgaagagactccaaacccctattttaaaacaagaaaactgatgatgatgatgat

SEQ ID NO: 436714 - DNA, 1156 bp, Homo Sapiens
  misc_feature (1006)..(1006): n is a, c, g, or t
  misc_feature (1013)..(1013): n is a, c, g, or t
  misc_feature (1026)..(1026): n is a, c, g, or t
  misc_feature (1032)..(1032): n is a, c, g, or t
  misc_feature (1038)..(1038): n is a, c, g, or t
  misc_feature (1043)..(1043): n is a, c, g, or t
  misc_feature (1045)..(1045): n is a, c, g, or t
  misc_feature (1054)..(1054): n is a, c, g, or t
  misc_feature (1062)..(1062): n is a, c, g, or t
  misc_feature (1064)..(1064): n is a, c, g, or t
  misc_feature (1075)..(1075): n is a, c, g, or t
  misc_feature (1078)..(1079): n is a, c, g, or t
  misc_feature (1087)..(1087): n is a, c, g, or t
  misc_feature (1100)..(1100): n is a, c, g, or t
  misc_feature (1102)..(1102): n is a, c, g, or t
  misc_feature (1104)..(1104): n is a, c, g, or t
  misc_feature (1108)..(1108): n is a, c, g, or t
  misc_feature (1112)..(1112): n is a, c, g, or t
  misc_feature (1117)..(1117): n is a, c, g, or t
  misc_feature (1119)..(1119): n is a, c, g, or t
  misc_feature (1127)..(1127): n is a, c, g, or t
  misc_feature (1130)..(1130): n is a, c, g, or t
  misc_feature (1132)..(1132): n is a, c, g, or t
  misc_feature (1137)..(1137): n is a, c, g, or t
  misc_feature (1140)..(1140): n is a, c, g, or t
  misc_feature (1142)..(1142): n is a, c, g, or t
  misc_feature (1151)..(1151): n is a, c, g, or t
ttttttgccagtcactgaacatttatttggagtccctggagccctgctgtagccaggagcccaggttgtggcatgggggacagaggaggtgggacctggcagacccacagctcccaagctggggtcccggaggcagagtgacaatgcatggctgtgtgggagccaggcaggcggtgacgtggcagagctgccagcaggggcccaagagactgcagcaggttggtgctcacagtggatctgagggatgggcgtgcgtggcagggccttggccatggcccctgaccaacccctgtgcaccaaacaccacactgagctcagaatccgggcagagagggaaccactggtacagtgaggccaaggcacacgcagccgggcctgcagactcgagcccagcagggaccattaggtctcgggaggaggcagctgagggcgacaggatctgcacagagcagtgaggggcagaggacgcagggaccagatgggtctcccaggccaggtgagcccagaacggcccttcccagcccctctagagggtaggttgggggcagtagctcaccaggcccaggagcagcccatcctggaggcaaagcctatcccaaaacctggccctgcctcttcctgaggtgaccttgagtccgtaaaactgacgcccctggggtgacgcttgagagccggaagctgttccaggaggagggaggggcctcggtttctcccggggcatgtgggcaggaaggccctcgggatcccgcatcagtcccacggccgcggtgcggtcgtcacctgtgatcacggctgcctggcgcccctgccggccccacctcagcccttcctcgcaggcctggccggggcaacccagtgggcctgatgctgcctggcacctcgaggccccagagccagttagcagacgctcgctcgcccatctccctagagtcccgctgtgcagctgacaccccctgccccagccccacggttctcagctgtccggttccagcgtccactccgacangcactgnaggcaggggcccngctgtncctcantctangnggggttggnttgggggngnagagggcggcnggnncaggaagnattgggaggggtngntngctngggncctancntcgggcanggncnagggntgncntaagctctnacacg

SEQ ID NO: 436715 - DNA, 497 bp, Homo Sapiens
ctatgggtttgttatattttattttccaagtaatactgattaaaaatatttacacacctacttttaagtccacagtttagcactcttatttgtatggctttaaaagttatagcacaagatctttacattaagaattgggggaaaagattccattcaaaacaaagcctgataattatatacatgtctttctctgtactttattttaaatacattaatttttaaatgctgctcatctttttctcatctggtggtaaaatactagtgcaacttttcatcaaaataaagtttaccacagatgtaaataaattttcccaattgaaaatgggcccttcagtggcctttaaataaaatttctcaacctaacttaagtgaaaaagaactggtggttgtcattataagcagaaatataaagtattatagcatcatctacattgctccttacaacacaaactttgaaagaaccagagatgctttatagaagttcagttggttttgag

SEQ ID NO: 436716 - DNA, 299 bp, Homo Sapiens
aattcggcacgagctaagatgtaatatgtggtcctgaacatggtttggtctgtgtctctaacaagaatccagatcatgacctggaccttctgggcatgagtctagagctgtgttgtccagtaaggtagtcacttgccatacagtcatttatacttcattttaatgcaatgaaaacttcagttttcaatagccacatttcaattggtccatagtcacatatgattagtggctcaggtagagatttccatcatcaccggaagttctgcggactgtgctggatccctgggaccagtatttgt

SEQ ID NO: 436717 - DNA, 730 bp, Homo Sapiens
  misc_feature (311)..(311): n is a, c, g, or t
  misc_feature (313)..(313): n is a, c, g, or t
tttttaaagtaaaagtatctttactattaatatacaaatggtgaagtgtgacaagtttgatatactgtaagccatactttcaatgtctctcataaatacaaaacttcaacatttgcagtataatttttacagtttagacatatatatacagcatttcattgggacataccatattgaaacaataagaaaacgttgtggtagctaacttaagaatatagaatttgaatggaatatataaattaaagaaaataaaagatagtatgtttcagtacatactgagcacagcatacagttcacataccaaaaaagcntntttttaaaaaaaacctttatttctaacttcacatatttctaacagggtttagaggcaaatgctaaaccatgaatatttctttaagagttggaacaagtaggtttgttcttaatagtatcatttcttttatagtatgcatgttgttctctaaaaaaactatttgcaaaattaaatcatagattctatctctgttaactttctcctctgtgttacactgttttctccttcgcatcagtgtaatcggccataatttttatctaagcaacgttcctagtccctggtctagcacttctcaaagtcaggtccttcttagctattccaaatataccaactcagtttgcctttctagatactcatttctttgtttctctactctcctaagtcgggttgtgatttgaaattctacaacagtgatgg

SEQ ID NO: 436718 - DNA, 1277 bp, Homo Sapiens
  misc_feature (3)..(3): n is a, c, g, or t
aanaatattattattattttaaattttatttctttttaaaatgtgagttccaataaaatttaaaaattagattccaacctgtagattaaaatgaattaaaaaatacaaaatcatatacaacgctctcttcacagggatgttacatgccatgagaacaggtttctctgtcatgtgatatgaaacagggaagcagatgcctttaagtcaggatggggacaggcccttgggcctttcaagattattacagacaactccaagtagctagaggcctggccttaccccccctgggtaaggaggagcttgagtcacaccatagatccagactatctggctgacccgaggagaaggtctctgggacagtctcctctctttccctgactctcttaggcctgaggagaaaggctggggtctggagatgctggtcttgctggggtcaggcccaaagctgatctcacccatttgattcctatgggccggtactttgcaaagctgttacatctgttctccttaggaaggaaaatccccctgctatcagtggctggaatgggtagaggacctctaccacagcaaggatatccagggactatccatgtggccatagggaagcaagtgctgttttgtccctttctagctttgtggcagccagtcccaactcctgtgtgcctcggttggcctttgggttggactcaacagcatgcaccacagaagatatccactggagagactgagggactgggacccaagtctggcttaggcagggctggccatggaatgttgaagctggcctgccaggaattttgaaggctgggtcctggaaccatataatgcctaatttcagaaacgaggagttttctaggaaaggggcagataagtaaaggacaaaccctgcagcccccttggcatgcctgcctgtgcgctcagaggctccggtgtggaatcccatcagttagtctggcgtgtttcttcagctctgcgggtgggtcccaactggcccactctactactgcccctctctggattcccaagcttggcaagcagcgggggccgcacagccagtagtgatgtgggagaatacaggatggaaaagcagacttccacgtattttcacttaactgcaattgaggaggaattctgatacagatggtgatatataagacaaagttcaccgggcccagaatggggcccaccccctctgggcacagaacaaagctgaggaatttgatatggaagctctgagcctcgcttagtcagtgcctcgctgggaacctggatgagtc

SEQ ID NO: 436719 - DNA, 618 bp, Homo Sapiens
  misc_feature (306)..(333): n is a, c, g, or t
  misc_feature (424)..(460): n is a, c, g, or t
  misc_feature (572)..(572): n is a, c, g, or t
  misc_feature (582)..(582): n is a, c, g, or t
  misc_feature (602)..(602): n is a, c, g, or t
cacacaatagatgtcagctttattgcgcggatggctcaatggatttcaactctgaatggcctcactgtgctcccacatcacacacttagggtgggtgctgaagttgccacttaaagctccccagcagctgtgagacccttagggcagacccctgtcagatcagctgtaagatgtaccataggtttttcttgactactgagaacaaatttagcatcaacttggggagacgcccaagggactcactggcccaggacagtcctctgtgcctccctccccaagaaccactcagtctagtcacctaagacnnnnnnnnnnnnnnnnnnnnnnnnnnnnaatagttattgagtgttctacagcttacagtaaataccatagttacaaattcttggcttcaatctttcagagtgatcactgtctgatcttnnnnnnnnnnnnnnnnnnnnnnnnnnnnnnnnnnnnnaagacaaaaccagatttacacttcatacacacagggcaaggccatggggctttccaatctttacactccggactgtgttttgaaaacacctataaattctttgatcaaactncttggaaganactgggtcaaaggtttattnttattattattattat

SEQ ID NO: 436720 - DNA, 1221 bp, Homo Sapiens
  misc_feature (506)..(506): n is a, c, g, or t
  misc_feature (1020)..(1020): n is a, c, g, or t
  misc_feature (1186)..(1186): n is a, c, g, or t
ttctttcttacctggcaatgaccctaaaatgtatatcctctttcctgaatatttagcagagacacacacacctgtccagagcgtttttggtatgcaaagtactttgacattggttgccaaagtcctccattttatagatgaaaaaactaaggctcaggaggcttgagacttgctaaaaggtcacacagcttggaagtgattcttcaaatcctctgctctttctgctgccacctgctgggtctcttggcaagcatggagggaggggctaactgtactttatagagctgggaagcccagtctctgagctgagcagatttgtatgaactgctttgggccaggacctgtaatgagccctggggagggacccagaggcacatctaactggcagcacaaggaggatgagaattttgcaactaaaggcctcacttgggacaaaacactttggggtcacaatgcccaggaccgaagacatgtttcaaggacagcacgaggcatcttttctattngggagacccatgttccttggtaagcctgcacacctggtttcctaatccctgagagcctgcccactgtccagatccagtgagttggtacaaaacgtacagactgaagtccctgggcttgcttttcccatgggtgaggaccagaaccagactctgagcatccttacccctggccacccgaattgttccaagtttgaggtaccccgttcccagagatctgggggtccttctttggagggcttgctttgttctgatggccttcagaaaggaatcacatgaagtataaaaggacaggccccttggtcaccaagttttggctcctcatacagataggactcatccaggttcccagcgaggcactgactaagcgaggctcagagcttccatatcaaattcctcagctttgttctgtgcccagagggggtgggccccattctgggccttgtgaactttgtcttatatatcaccatctgtatcagaattcctcctcaattgcagttaagtgaaaatacgtggnaagtctgcttttccatcctgtattctcccacatcacttacttggctgtgcggcccccgttggctttgccaagcttggggaattccagagaagggggcagttagtattagtggggccagttggggaccccacccgcagaagttgaaggaaacaaggccagattaaantgatgggggattccacaaccggaggcttttgaggg

SEQ ID NO: 436721 - DNA, 426 bp, Homo Sapiens
ttaaatttaatttctttttaaaatgtgagttccaataaaatttaaaaattagattccaacctgtagattaaaatgaattaaaaaatacaaaatcatatacaacgctctcttcacagggatgttacatgccatgagaacaggtttctctgtcatgtgatatgaaacagggaagcagatgcctttaagtcaggatggggacaggcccttggcttttacaaggattattacagacaactccaagtaggctagaaggcctgggcctttaccccccctggggtaagggagggagcttgagttcacaccataggatccagactatctgggctgacccgagggaggaagggtctctgggggacagttctcctcttcttttcccctggacttttcttaggggcctttagggaggaaaggtttgggggtctgggg

SEQ ID NO: 436722 - DNA, 403 bp, Homo Sapiens
  misc_feature (388)..(388): n is a, c, g, or t
  misc_feature (400)..(400): n is a, c, g, or t
gtccagcctgcagatttgtttttttgaattgaaggatagttaacaaagaaaatgcacagatcttaatgttccttctataggcatgttttttaaattatttatttccttaacatttaaacattgagagatctcacataaaaacccagacttctggttccttttgagaagccagaaattggccacacagaccctcattcttgcattcttgcaagacagccgtgagctggaggcacacttcagccaaactgctggttggcactccacatgttccccacagccacagtccctagccaggcccctttcctctttgcctgccaggtccctggaatccattcctctctgtctcagctgagacaatacttcctcaggtaagccttctggccctttncagtctagatgnggt

SEQ ID NO: 436723 - DNA, 2353 bp, Homo Sapiens
  misc_feature (44)..(44): n is a, c, g, or t
  misc_feature (139)..(139): n is a, c, g, or t
  misc_feature (326)..(326): n is a, c, g, or t
  misc_feature (375)..(375): n is a, c, g, or t
  misc_feature (378)..(378): n is a, c, g, or t
  misc_feature (2190)..(2200): n is a, c, g, or t
aagagaatctccaagaagaagactcatgtgaagaaatgcacccncaatgcagtgttcaatgagctgcttgtctttgatattccttgtgagggccttgaagatataagtgttgaatttttggttttggattctgaaaggnggtcccgaaatgaggtaatcgggcagttagtcttgcgtgcagcagcagaaggaactggtggagagcactggaaagagatctgtgactaccccaggagacaaattgccaagtggcacgtgctctgtgatggttagcatcctagccgtgagttggaacttaaaggtttttactaggcaaggagaaattntctttctttctatattggattgcaagcttgggaaatcaagctacctttntgntcgtcgtgctgctgctagaaatggattgaattagtagaccagaaagtaacttcaaatgtgtattatgataatttccctatttattagaagagttggataaactttcataagatattcaatatctccttcagattaccagtgatataactaggaatagtcagacattttatgaatactgtgccagaatcccaaattataaatgtgacaatctcattggaacatgtcacaaaaagttaatgtgattaagatttaaaaacgaaaagtatgccttgccttgtgaaaatttatccatttatcttcaggttggggaaatcaatttttctttaaatccaaagatactaaaaaaatgtcctccagtttgtatttattaattctgtcatgtgcaaatggttgtcctgcatataacagtatctggtcatttcagtttggtttgtaattatttgatgcaattttatcataagagtaactcagattcatttcaaaaggacagtgaacaagctgagaaattattttatcaaagggctgagttgagaacactgtggctgaaatataatttttctcccccctaaggttacatgtgagtcaaaattttgtaaaatataacctcacataagaaccatggccttggattattcactgcctgtcacaagcctcagtgtggcctgagaaatccctatgtacctttgtgaaattgttgaattagttagtgaataaagaaataaacttcaactagaaatccagttagaagtgcaattttcttataggaaataggtatagtgtgcaagtgtacttttaaggccatcgtttgtacccagagtcggcatggccacctaagtcttcatttaatttattgtcccccagaaaagattaagatgctacttgaaaagactgtgaagattttttacattgccagataaaaagtgttacttaaccaacaaacaaatgtaagactacaaaatcgttcaagagcaattctaatataatttacatatgttcacgcaaaatatgcttaggctgtcaaattagcacaacaaagaatgtgtttcactatcttttctaggctaatttgtcttgagctgttgtctatagagcagtttacagacttgtgtcttgtatcattttccagtgccagggttctgaaattcattcagaacctgttagattaaagctgcaccctgtgattatttgaaaagaattagcttgagagtaatgtcactatatttgagttcttagagaagtatgagtggaacttgagtacagttgaattattaaatatgcaagttagaaattaagtctactgaaaaatttacattttgagtcaggttttgtgtcagtactttagcagtttttgagaatgtgtttgatatcacagtgtttgtaaattctatgaaaaatgcattttccaaacaacttatacatgctttttatgactatgcctaatgtaaagaaaatgtattacattctgtatgtacaaagattaaaaatcaacctcttttttgtgctttaaaatgactttgggattaaaaaagcatatttcccaatcattgtcttcattccactacaaagtcacctcacagcatcttgctccactcggcatctctgtgaaagcaacatgaaatgaactgtagtaggtgtgtagtttggggaagtcaaatggccattttatgtatgtgcatttggtatcatgggccgtggaacagaatatatgttggacctctgaaaagttgtaaggggccaattctaagtattcttcacggcagccagaagttaatggtggtagcagctgaggtatggttgttggacgaggccgannnnnnnnnnnaacatggaacaatgaaaccaacaacaaacattctcttaaaacttcaccatggatccttcgtaacttagtttttagctttctcaacatttaaacgtgtttctgagtgtgacacgtcgagtaaaactatttgcaactggttttcagaaacgagac

SEQ ID NO: 436724 - DNA, 742 bp, Homo Sapiens
  misc_feature (526)..(537): n is a, c, g, or t
tttttttgggcaaaagcagcaatttattcatgtcttacaaacatggtcttacaaacatcatacagagctggcacaaaagaacagacactgtctcacacaccatgcttccttccaaaacacttctattgagttacaacatcagaacaaatcaattactgagttacacagttcttcaaacatgtatacctccccatttgggtggtgagattggctaatcagacaaacaattaatttacatgtttaatacagtgcaggatttgtaacaggattcaagatattcacattgatattgtaatacattctaaaacagtacattttcagaaatgatgaaattaggtattaagatctccctgcctgtttcaattcctttgttgtttcttttctcttttctgaaaaccagttgcaaatagttttactcaacttttcacactcaaaaacactttaaattttaaaagctaaaaactatttacaaattatccattttaattttaaaaatgtttgttgttggtttcattgttccatgttnnnnnnnnnnnntcggcctcgtccaacaaccatacctcagctgctaccaccattaacttctggctgccgtgaagaatacttagaattggccccttacaacttttcagaggtccaacatatattctgttccacggcccatgataccaaatgcacatacataaaatggccatttgacttccccaaactacacacctactacagttcatttcatgttgct

SEQ ID NO: 436725 - DNA, 480 bp, Homo Sapiens
caacccggattttattagactaggaaatataatttatttcataaaaattaattttgttacaataggaatgctaaaggttatttataggttgcagtttacagaataaacagaggtgggattgggggccatccctggggccctgcaccccccctctcccgggcatataaccatgtccacagacctggcaggggtccagccctttgccccaccaagagctccctgcaccaaagctcctggtcacctcccctaagggacccggctcagctgcctaggagctggggaatagggaccagagtgccctggagggtccagggagatgagaaggatcccctgcaccctcaggagaacccctacccctgagctctggagccgggggcacttgttagagaaggcagagggagaggcacgtagaagatacatttacttaccctgtgggctcagggagggcagaagacaggcacaccaaaccctagacgtcca

SEQ ID NO: 436726 - DNA, 1126 bp, Homo Sapiens
  misc_feature (956)..(982): n is a, c, g, or t
acttttactttgaaaggaaagtttattatttcccaatgttctttacattttcatttggaaatatcattcctgacagaaatagatacattataccttcgaaagcagaaagatcttaattaattaaaacagtttacatttaccttagcattaggtctggctggctaatttcaaaggattaaaaattgcacctatttgggccaactggggtcctgaataattatccagggtaaaagtataatatttcatactttatacattttgcttcatcacacatttactttccacacagtgttcaacttcacatttaaaaagcaaattagtctttaattccctaatgaatataatagtcttgatttgattgaagtttcaaatggaaaataaaactatgcggagttttcaataactgcttagcccaataaatgttgccaatagaagtttaaacacttgtttaaacagtttgcaaagtattatttcctttattctcttcaaaacaacacagacacacataaagtcacacattacaggcatctgaactggtaaaatgttacagattagtggcatgcaggtattttacatttttaagtgcaatgaaaaatgctgcttattcattttgcttgaatggatgaaaacaactaaaataaatgcttaattaaaatataactattccatgtatataagggtttttgtttttaaaccaaagtggcagagataagaattttaggtcagaataacttacttcttaactgaagattgtcactggcaacatttggtactaaaataaaatttcctcaaaaagcacatttcctattgatctcatttcgtcatatggccgattcctatctactcacagttagattacccacaggaagttttaaatcttgggccagcctctctcaattgcacagtatacttttgattgacttctctctttttcccagtcaatacttactcagaannnnnnnnnnnnnnnnnnnnnnnnnnnttttaaataagagcctacaaaaaaatgctgtgtttactatgctcagtttctttctttgccttccctcttcttccccactggttctgaggagcaagatagtatatattttattttattttttgagatggagtttcgttcttgtca

SEQ ID NO: 436727 - DNA, 722 bp, Homo Sapiens
gtgtgagccactgtgcctggccagtctctgtctgctttgttaactactgaaggtcttaaaacttaaaggagaatgtaaactacaaatgacccaatactagagctagttaacggaagtactgatactttttattcttttcagggaccgtttatctaaaaaatgttaaggcttatgctttcagatctcagtccaatttctagaaattaacaatgagtccttttatagcacttacctttctcttcctgccttccccacctccaccccaaacttgctttgggtgttctttaatctttcaagggagtgataaatgtcacaaactcttaaataaagggctgaaatggcagcgtatgactgttttgactgtctttaaagtagtattagtcttctagaatactaatctaattcttagaaacagaaaacagaggaagctcaatgttcgaagggaagttaataataattgattcatcctggctacccaggaaatgcacagtaaggatgttgtgttctatgtaaaggcagacaacaaatccatctagtaatacctattaatagaaaaagagctcaaggaccaagtgcacaaggactaacaagcacaggaagaaaacaaaataaatgtggagacgagaaggaaccagagctagataagacacacgggagaccaaggcggtggagaagaacaaagcaggactgaccgggctgagtggaacgtaagtggaccacag

SEQ ID NO: 436728 - DNA, 840 bp, Homo Sapiens
tcccggacaataaaacgggttcttctggttccccgggctttcctttatatcccttctccccaaatggggaaggattcccaattgttttctccccaacttttccacccgtttctggttttttcttcccataaatttttccttcatttcagcccggagtttcacctttggtagaaagcattcttccactttgatgtaatatggtgatttcattttctcctcaagaagctgtttttaaatcaatggttcatcttacagtcaactgtgtcttagattcaaatatggcacataggatttgcaggcagtcacttgacttctttggaaatcagtttgctcattttctcccaatatctagccccgtcttcaggacaacatcataccgaaaagactgaactgctttttccaggtctttatagtttttgactacagtaggatcatcctcaagctcctcttcctgctcactcatctcatcatgatggctttcttcatgagagtcctcttcatctactttttgcagagactttttagtagattttgtagaccttatattacttttgagtcttacggaaaaaggaaaaatacattctggagatagtaaaagccctgggagtctcagtgagaaaatattataaaaaagtgttttataatttggtgcacgtaacttggtactagaaaaatacaagtatcgattccaggaagtacagagtttgtatgatgaaggtgtccctcggagaacacccgagagtccaatccaggcatctggctttcttaaaacaccggcaagcaatttaacactagcgcatagccatggcgcttataatctgtacgtcaggccctctcccc

SEQ ID NO: 436729 - DNA, 1453 bp, Homo Sapiens
tttgcagatagaaacagctttattttttccattcaggctttatcaaatagcttgttcaaaaagcatatacaagagcaaaaaataccacatgcagtcaaacttcttttgccttatagtcattggctttcttttagaaaagagtgtgcacttgaataacttctaattcaaacattttccaactgtttctacttcatttttcaagttagcaacgacagatacattttagttaactgtttcatattccttatctttattcatactgaaataatataaagcctataaaatcaaagcatatactgttcagaaatctggaaaggttcttttacataatagattctgacacgttaagaaactacacacaacaaatatttgcaaaatgaatgaaaaataggataaagctatttaaaagtcaacatagtaatatttatctaaataattttaatcaaatgtacaacatatttatctgatatcatctatcttttagaatacaaaaaagtgctcagattacatttaaaaaaataacaaaaatctcttagaatggaaataatttaaataaggacggtagcaaggggaattgaaattacatctttgctcccaaaacaggaaggcaggtgtgatgtatttgaaaatcagaaagggacacaacactaagattgcaaatgcaaagctttcctgccttggaaagatataaactgtctttgaaaagtccttgtgtctttctttacagaaagttacgaacataaaatcagatctctcagctagactgctggtcaagtaacaaggtgggtcacttttcttgactatgcttttctagtccactatcagtattcactcagctggggctcaaaaggacaaataggtgtccttttaagacactttgactacttggatcaatacactagctattctcaaaccaacataatgcatgaatacagcagccaagtagaaggatctccaatgctcaagtcactctgagtctttgctggtgtcaacctacaatgccaccctcaaggaaagcacagtggttcacagacagggatgattcatcattttcctctgaaaatgaattctgcaggaagaaaccagagttgtggtaagatgttggagtcaagttttctcttcatctgatattcaagggttgtgatctttatgaataccattttacatgctaatcacaaagacaaatggagggaagatacagtgataacaccaagttggacattcaaatgctaagggagccaagtaccagccctaccctgcttatttttaataatgcagagattacttactacactttctgaagccttattttgaaatttatttcacatttcagacatgtccataatttactgttgaggaaataaaacagcatgtagaacataattctatttatattaaaattacataggtatgtgtgtatacatacatgacagttcttttctccatcccaaga

SEQ ID NO: 436730 - DNA, 401 bp, Homo Sapiens
  misc_feature (366)..(366): n is a, c, g, or t
ttttttttgcagatagaaacagctttattttttccattcaggctttatcaaatagcttgttcaaaaagcatatacaagagcaaaaaataccacatgcagtcaaacttcttttgccttatagtcattggctttcttttagaaaagagtgtgcacttgaataacttctaattcaaacattttccaactgtttctacttcatttttcaagttagcaacgacagatacattttagttaactgtttcatattccttatctttattcatactgaaataatataaagcctataaaatcaaaggcatatactgttcaggaaatctggggaaaggggttctttttacataatagggtttctggacacgttagganactacacacaaccaaatatttggcaaaatggaatg

SEQ ID NO: 436731 - DNA, 747 bp, Homo Sapiens
gaacttggaaatgcccccatatatactagttgtgatgaagcattatttttagttaagtcatataagaatgactgtgtatgaccaaaggcaaatatatgtggaagaaactcaccaggaattcttttgtgggtttttattcaatacatgtcagtaggggagttataccccctttttaataagtttgtgttaacctacagtctaaccaaggcatcttatcccagtgaatgccaccaccattcaccctggttcccaaactggtaacatagaaataatcttgacatatcttcctatcactttgtcatcaagtcctgtcatttttaccttgtaaacatctcttaaatgtgtctacttctcaccacaccctaatctaagctaccatcagcacctttttgcctgcatgactgcagttggtctcctaactgttctttcctgcagcgactctggcccctccctgtattcactcgactgcaagcaggaattctccttttttggttcgaagtttaattttaaatcaaaacaaacccccctaacctgcactttgcaccccctagcttaaaaaaggctcgaatagggcttttttattggcccttaatgggatgaaaagggaaatatttttaatgtggaaccaaaatattttttggaacctattgaggggtagaaaaatatttagggcgcaccttttcctaaaagccatagttttccaaggcgctttagaaaaaggttaccctggttttcaaaaattaaaaa

SEQ ID NO: 436732 - DNA, 2093 bp, Homo Sapiens
  misc_feature (25)..(25): n is a, c, g, or t
  misc_feature (56)..(56): n is a, c, g, or t
  misc_feature (75)..(75): n is a, c, g, or t
  misc_feature (91)..(91): n is a, c, g, or t
  misc_feature (148)..(148): n is a, c, g, or t
  misc_feature (612)..(612): n is a, c, g, or t
  misc_feature (615)..(616): n is a, c, g, or t
ggatccattaaccaaaagggccctncaaaccatactgctgaaagctgccatatagnttggagggcccagatttcnatttaccataatattncccattccataaagagtttatggacaccccgtacgattactgtcccagcactgttanctcagaaatgcccccacccatccttgcccatcagagaatttacagatatggatgggattgttaaaagtctaacagggcctccaaataggattgcacatgaaataattatgaactatgataaaactgtgacaacacagcctagccttatagaactgagtttttcactataatagcactacagaattatgacagttaaatatcagaattatttttccctgctaactattcagtagaaaaaggattttctgactgtaattctgatgaactgttatctttgatgactaggatactcgggaaaattggaaagtgaacaaaatgaactcatttatttttcacagatattaacaagcaaagcagtttacaaaaagatcaaaaattatcctaaaaacaaataaatataagatcaaatcaattatctttgaacaaaatatagctcattttcaaaagttttgtttggtttgtgnctnncttaaaaatactaaaataagccaaatagatgctaacaatactaatttgcacacaagatttgaaaaaagtaccttcaagttttatctcttatccctagagaaagtaaataaaaagtggctcttgcaaaaataaatgaaaacaaaaccaccaacaaaaactaatcatataagatactgtttttctttttgaatacttcaattggtcctatattaggataaggttttgatagcaaggacttcctagcttcttcctttatcttccattctctagtcacttcccgtgtttttatcaaacaaggctacgtgtaggctttcctacaaagtcaggttgagtcagaggtagcgttaggatgcaatatacttgatcatagtatgtagttagttcaaatgaacacatcattatctaaaaggattacaataattaaaaatgcaaaaagaacatgtactgccctcactgctttgcgctaagaaaaattctgagaaactgagaacaaacattggaagccaggaaacaggcaattaattgcctcatcttccatgagctcctttaatgcaccagttcaggctggttttccacgaagggtagcaccccactcacataataggcaatgccaagagacagcaaagcaatgacgaagatcaacagcaatactctccagaagcccagatcctccacaaactcctgccacgtggttcggaagctggagaggactccttcaccttgctgcaggttgggattgaggagtgaatggctttccatggcactttcactctcagctgtttgcatggtctccagtttcgagtgggttcctctgttaaatcctttcacctcctgttcttccaaagattccagcaatcggatgacatctttatttactcctctgcgctttgccagaactaaaggggtagcaccttgatgattgcaaatatcaattttgagtccattggaaaccaaaaattggatagtatccacatggccacagaggtgaagagctgtgtttccttgataatctgtggccagaagatcggcaccgaatttatgcagtaactggcagatgtctacattccctcgagctgctgcaaggtgaaggcctgttctgcccctgctgtcacgaatatttgggtcaaagccactttccaaaagccgcttggaataattaaagtccccatcaatacaggcttgcagcaagggcacgttagtctgagaagaatcatttacaaaaacatacgacattgttctgatgtggtggatggaacacgcgtaagccttaagattagatcttttcgttcagtggtcactcagcagtttctctgaattctcaagaaggttcaacaaaaatattctgtaatgtgctggcaaggatctgcgactcgaacgagcagcagcgacagcggcagcttcaaggaggcggtgacgggcggaggggaggggccacacccgctctcgacgaattcgagctcggccgatttggcctgat

SEQ ID NO: 436733 - DNA, 1278 bp, Homo Sapiens
ttttttttaaaaccaaaagaacaactttaataagcttttacggcactgcaattacaggaacatcgacccataacatgcaacaaaaatgattttgccttttggacatatttaacagataaacttgacattacaagtaacagcaacacattcccattctactgaagaaaacaaatgcgatttaactttcaggttagaaaacgtatcttcttactgcaatctcaagtagcatttagaaagtttagttttcccttttctaacctctaaaagatgatatgatttttaatgcaatcatacacaactgttttcacattggaaataatcacgaggaatcaataggtttaggctaactgactgattggttttatttccattgttaatttcaagagggctcctgcagtattgtggatttcagatggggaaaataatcagaccaggagtaaacggccttggtctttagagtgggggagggaacatgcagcggcacacggggcaggtgcctgacttctgaagccagatggacacacacggcttgtggaaatagtggtggcacggcagctcagttgccacctcccccttcacatattcgctacagcagatggggcagcacatctcctgaccaactgcgccatgatcttcagtgaccaggatctcgggaagagcgtcaatgctctccttgcttgctggtggattggccacctctacatccactgcgagagactccaagtgcgcaagggcagtttccattgcctgggccaggcgttcttcaagtgccatgtaggtgaggaactgagggtccacataggaaatggcttcagccactcctaacccatctgcaaatccatcaaagaggctccaatccacttctaggtcttcgctcacactggagtcatcttcaaggttgttgtttccatccagcatgaataccccaggttgcatcaactcgtgaccagaatcattatccccctcactgctactgtcattctcatggtactggagccaaggaatttctccttcttccagggatgcctgctcttcctgaagagatggttctcgaacttcttcaaggtaattgctgccattgctgccagcattggccccggcgccagccccggcactggcactagcaccggggccagggctggtgccagtgctggcactcaccttagcctgtggaggttcccgctcttctttccccggcagagtctcccagctttcgccactggaggacagggtttgctctcggcttcgatatttccgacgcagagcagaaatcccgct

SEQ ID NO: 436734 - DNA, 355 bp, Homo Sapiens
  misc_feature (3)..(3): n is a, c, g, or t
  misc_feature (5)..(5): n is a, c, g, or t
  misc_feature (27)..(27): n is a, c, g, or t
  misc_feature (223)..(223): n is a, c, g, or t
  misc_feature (237)..(238): n is a, c, g, or t
  misc_feature (246)..(246): n is a, c, g, or t
  misc_feature (276)..(276): n is a, c, g, or t
  misc_feature (289)..(289): n is a, c, g, or t
  misc_feature (297)..(297): n is a, c, g, or t
  misc_feature (327)..(327): n is a, c, g, or t
ttntntcccttctttctcccctacctncacagtccccttattacccataggtaaacactagggtgaactttgtgttaatctttctcatctttcattatagtgttaccactatgaatgtgttctttaattatgtaaatgaatccattattcaggcttctgtgatttaattatgtcagttaagattgtttgagatttatccacattaacatgtagttttatagtntctgggaaaatatnnaaaattgncaaacatacagaattttgctagttatattntcattatttgatntctaactnttttgtgttgtattcagggaatgtggtgtntgaaatttatgtaggggctgggcacagt

SEQ ID NO: 436735 - DNA, 688 bp, Homo Sapiens
  misc_feature (24)..(24): n is a, c, g, or t
  misc_feature (477)..(492): n is a, c, g, or t
aattttgtaattcgagcagccccnattttccagtgtgctttacccacccactccgaaattggataaaattaaatataaaccaaagtaatcgatgaatgtgaaagacccgacttgcagagttctaaaattcgaggacagataaaatccgccctgaggcagggggtgagaaggcagctctctgaggatattgcacctggccgctttatttcatgaattttatgatacatctacatcccgtgtaaaaaaaataacttaatgaacacatgtcttttaggtcattgtcaatgcatggcccattgttatacctggatcaaaatcggtgttgctgtctctattgtccaacctgaattattttgtctgttactaattttaacaccctttatgtttgtgaatttatagacaaactcaagcaaatgcatagaaatttcttttgagaaatagccagccagggtggctacgaattggttgattttccgnnnnnnnnnnnnnnnnccttgccattttgattcattacttagggaatttaaatttgtattgtttacatttaatactttcaacatctaagaacgatgaaatatgctaagaaatttagatttttgaatatatcaatactgactcatccaaccttcgatttctaaggcgaattttcactgcataagatttagtaaaccgccctgcctctttccgt

SEQ ID NO: 436736 - DNA, 887 bp, Homo Sapiens
  misc_feature (53)..(57): n is a, c, g, or t
cacgggtaacaatttttatttgagaacacaagtttcacaagaaaatcatcttnnnnntttaaattgtgacttttatcttaacactgtgtgaagtactcaaggtccaagaagcttaatggtcatttgtcaaaatagtaattatccaattttttcctatgaattatgaaattttttcaaaaccagaaataaaccaatgaaaataaataaaaattccctagaatttcctcaatggaatgcatgcccctattacctttgagtctgatgtatatgaatttaaaccattttgtaaaattgcaaatccaatcatacttaatacttcaggtttccaagcaaagcttgaagcctacaacatattacaggaattatctttactgacaactgatggaaacatctctaaaataagcttttgaagttagtacattaagcctaatttaatataaaggcaatttaatcttatcttcatatgagagaaaaatagactgtcaggatgaaggatttactaaagttacaattaactggagatatatcaccagtaaaaacctaattccctgttataattaaatcaaagcctcattaggttagagggtgtggaagggcatgacccagtgggaggtgggaatctcaccaataaaacgccctcatgtgccccttccgcacaagacctgagcgcccagtggaagcagctggaggacagaggagcttccagcagaagaggtgagcccatgcctgtgtgtgtgtttttcctccttagatgcctagaaatgggggttatgccttgggggatgaatgagagaaaattcgtaattaatgaattcaacaaaggctgtctgagtgctgcctcagagttgaaaaccagtcaccctggatccccagatctccagtctagg

SEQ ID NO: 436737 - DNA, 329 bp, Homo Sapiens
ctttggttcttttgaggtgcttttctctttagatagcacagatgttcagctactgttgaggtacctggcacccttccttccttgtaaggcaaggtgggcctcatcctacaggctttcacaagtcggttggagcaaactgaatcccaggaccaaagggtcccatccctgcagcagcacttactcctgccatgctaccagccaggtcccccactgcatctcacttcccttcctgcacttggctgggaaaagcccaggagcctgggctgactggccaggtaaaaaccaggtagaaagcaggggctcctgcctgtatctcagcactgtgggag

SEQ ID NO: 436738 - DNA, 198 bp, Homo Sapiens
tgattaggcaaacacaactttatttattcaccttggaataagggtatagacacccatacagaacagtccaactaaggaaaaaaggataaacaagaaaccacagttcagacatagtagacttaaaagctcaagagtatgctgacaaaagcatgatgcctagaccccaccccccagtgttagtctaccattaacttgcct

SEQ ID NO: 436739 - DNA, 495 bp, Homo Sapiens
gattaggcaaacacaactttatttattcaccttggaataagggtatagacacccatacagaacagcactcctttgctcatttcttccccatccattccagggaaatagctcaatgttctttcacgggagacacatacttttataatgttatcaaatacatcatcaacacttctaaaaaaatggcgtccaccacctggaagtctcatactgttcgcgtaaactaaaactgtttcctatttgtccaacatatccacttgaatgaaaacgtcacagaggtgtttgcaagaacttcttataagggaactaagtcaacgggttccatttctatctgctagtttctgggccttttttcactttgaaggggaaaattaaggtgcagtaacacattaaaaattgggcaacttgggtcaggctggcctttcttctgtggaaaaaaagagtaactatgaaattaaatatccaaccctaactgtccaaagtgtggggagtgagggt

SEQ ID NO: 436740 - DNA, 710 bp, Homo Sapiens
  misc_feature (16)..(16): n is a, c, g, or t
  misc_feature (41)..(41): n is a, c, g, or t
  misc_feature (46)..(46): n is a, c, g, or t
  misc_feature (299)..(299): n is a, c, g, or t
  misc_feature (668)..(668): n is a, c, g, or t
  misc_feature (683)..(683): n is a, c, g, or t
  misc_feature (694)..(694): n is a, c, g, or t
agccaagctctccttnccctatggaaggtagtaattctccntcccnactcttccctactcctcctgccctgagaaacatcccccttatgaatgagctcgacttttgcaaagttctgacatcattcccctactcaacacgcatggataagcccaactccctgttacagagccacgctttgtagctgaataaactctacagatttgattcagcaccatggaggatggactcctcaggctggggtcactggtgggcaaccatggcacaccggggacgagggagacagaggatccagattttnttcaacttttttattacacagtaaagaatacaacaatacctgaatcatactttaaagattcacaggttgacagaccatacattacagtccaactaaggaaaaaaggataaacaagaaaccacagttcagacatagtagacttaaaagctcaagagtatgctgacaaaagcatgatgcctagaccccaccccccagtgttagtctaccattaacttgtgggtacatgtctgaattaagttttgcacaacaactttaatttttcacaatgtcgcagaacccaaattaatattttaaaaaatttacttcaaatctgcattttcaacagtctccaattttttttctgtcccttggggggattcggggacaacnggggagtcgcttttntttccctaggnttttccagacgtgggg

SEQ ID NO: 436741 - DNA, 1220 bp, Homo Sapiens
  misc_feature (900)..(1032): n is a, c, g, or t
gtagcgaggcctgggtggcgaattcggcacgaggggcggctcccggcaggaggcagagggcacaccgccagccccaggccaggctgcgagggccgcggacccgagccgggaaggaccttgggcggacgagccgcgcgtcccgcagccatggagcaggacgacccggtcgaggcgctgacggagctgcgcgagcggcggctgggcgcgctggagctgctgcaggcggcggccggctcgggcttggcagcctacgcggtgtgggcgctgctgctccagcccggcttccggcgcgtgccgctgcggctgcaggtgccctacgtcggcgcgagcgcgcggcaggtggagcacgtgttgtcgctgctgcgaggacgccccggaaaaacggtggatctgggctctggcgacggcaggatcgtgctggcggcccacaggtgcggcctccgcccggccgtgggctacgagctgaacccctggctggtggcgctggcgcggctgcacgcctggagggccggctgtgccggcagcgtctgctatcgccgcaaggatctctggaaggtgagcctgagggactgccgcaacgtgtctgtgttcctggcccctagcgtgctcccgctgctggaggacaagctgcggacagagctgcctgctggggcccgcgtggtgtctgggcgcttcccactccccacctggcagcctgtgaccgcggttggcgagggcctggaccgagtatgggcttatgatgttcctgagggtgggcaggctggggaggccgcctcctcgcggatacccatccaggctgcccccggacctagttctgccccatcccggggggccttatttctcaggccagctgagtattagacacgataaagactctgtgggttctacacacccatcatnnnnnnnnnnnnnnnnnnnnnnnnnnnnnnnnnnnnnnnnnnnnnnnnnnnnnnnnnnnnnnnnnnnnnnnnnnnnnnnnnnnnnnnnnnnnnnnnnnnnnnnnnnnnnnnnnnnnnnnnnnnnnnnnnnnnnactaccctcccgggaggtgcgcccaccttacctgcccactcccacctttttcgccctaagccgccgcttccctaatccccggccgcctcttccagccgtaactcgccccggggcccctctttcacataaatacctgccccttctgcggcaaatgccaccctaccccgaatctgccttctccaacacag

SEQ ID NO: 436742 - DNA, 932 bp, Homo Sapiens
agcggacttccggtgtcgcgcggcggctcccggcaggaggcagagggcacaccaccagccccaggccaggctgcgagggccgcggacccgagccgggaaggaccttgggcggacgagccgcgcgtcccgcagccatggagcaggacgacccggtcgaggcgctgacggagctgcgcgagcggcggctgggcgcgctggagctgctgcaggcggcggccggctcgggcttggcagcctacgcggtgtgggcgctgctgctccagcccggcttccggcgcgtgccgctgcggctgcaggtgccctacgtcggcgcgagcgcgcggcaggtggagcacgtgttgtcgctgctgcgaggacgccccggaaaaacggtggatctgggctctggcgacggcaggatcgtgctggcggccacaggtgcggcctccgcccggccgtgggctacgagctgaacccctggctggtggcgctggcgcggctgcacgcctggagggccggctgtgccggcagcgtcttgctatcgccgcaaggatctctggaaggtaacctgggggatccctggccacccgctgacagcccaaggtgcgggctgacacctgcgagggcttgggggccgggacctcggaaagctgcgatgacccggtgcccaccaggcctctccccggccggggcgacttctcttccggcagctcccgctgctggaggacaagctgcggacagagctgcctgctggggcccgcgtggtgtctgggcgcttcccactccccacctggcagcctgtgaccgcggttggcgagggcctggaccgagtatgggcttatgatgttcctgagggtgggcaggctggggaggccgcctcctcgcggatacccatccaggctgcccccggacctagttctgcccccgggccggggccccttatcaatcagcaa

SEQ ID NO: 436743 - DNA, 550 bp, Homo Sapiens
tttttttcagaaagacccaaaacctttattgtccctaccagggagccagtgcttccagcccacaccccacaccccaggagcttcagcaaggtctctgcttgggaggatgctgcccagaactgcagccagggccaccggtgccacctgcaggcttcctcccattccagctaggcagtggccaggctgccccctgaccagccccactgggaaggcagcaggatggcagtggccagtggggtcaggctgggccatctccctctcagacctcagcacctgggtcctcggggctgctgctcttgttccggaagtggtctcgactccgcttcctgctgccatggaagccaacagtttccaccggcgggagacctggcacagacccactgtggacagaccctgacagtgcctccacctcctgcaggcctccatgggggctgccccactcctcagcctctgggctcccgggcccggccagatgggccagttgcacagggccctaagccctgtgtgtggttggatttccaaggtcgaccctgactgttaataccacctt

SEQ ID NO: 436744 - DNA, 880 bp, Homo Sapiens
  misc_feature (37)..(37): n is a, c, g, or t
  misc_feature (85)..(85): n is a, c, g, or t
aaggctgcccagatgcaggggggtgtccatcccccanggttcaattaacattggatccgtgcccccccgccatggatcaaacatnctcaaccacagcagaagcggccctcctcggcaggcccagtgcaagggggagaagcccatgatcgtccctttgaggaaggggcaatggtcattgagctggaggtgggatggggcaaaggttttgattcctgaaaaactgataattacatactctctgggaaggcttacctctctaggactttgattctcattcatgccagcaactcccaaagctgtccatttcagaccttcccctgagcttcaaaccaaaccaaccacctagatatctcaacaacctctataaaaaaatgtgttatcttcaccatatcccacatctcatttccttaggtggtagtgctcttcccctggtttctcttgcaccccttctgcaacatctattggtcctttctgttttccaccacatcttatatgtccccctacttcagcacttgttgcactggattgtaaaaatctgttaatggactgtcttgtctgttagacctttaagtttcttgagggaatggattgacagcagctgttcagtgcatgttagtgggggagaagggtgtcttggagaaggcaggccacaacttatagaagagggaacaaacttactatttggctctggtactgaaactaacatctaaaaatggaatggaatttaaatgatgttttggaagggtttatgttgaaaaggagaaatgcttttgactactgatgaggtagataacaaaccaccatgcaaagcaggattcccctacttagcaatcctgtgcatagaaaacagagaaaatgagatggctgtttgggataaact

SEQ ID NO: 436745 - DNA, 1634 bp, Homo Sapiens
cttgaatcatcagcaaatttattcatttactgttttaaacaatacaaaattctagcgaaaggtaaaactattaaaatatatcttattgtcgaaattaaacctgctggaaataatcgcttcagttgaaataaggtcaatacaaaaattgtgcagtaaaaagcgtatgtaatttgaaacaaaaaaggcctttattagagacaaaactcgagaggacaaaaacccacaccggacatagatcacaaaacttcctagaactctcctttaaatcggaagaaatttgtaaaatgtgatatgaaattacaactctacaaacatccaaaatacatttctggtcataattaatcgtatttgacattttcctctaagtttaatgcaactttaaataatttaggctttttcctaacatgatagatttttttcagtatcagaaatggacaagaggaaactccagtaaagagaaaagcaatgaatttaaaagggtgcagaatctgaaaacaaactaaccacaatgtacatttaattgtacttaattgtatatttcatttaaatagtccttctcaggggtttaataatttagaatcaatagttcccttcaaaacataataaaatatttacactttataaaatattaaccgattaacaatacagccgtgttgtttataagagtgtaactgaagtcctgcaaatcatgctgttgacacaagcctgtgaggttagcgaagtgatccttagcaaaatgtaaatgaagatcttcagacagtggtgtttataaaatagctcattaatgacttaggattgaatcgctccaaccattcgcatcatcagatataataatagtgacgaatcagacaggaaagatcctggctaaaccatttgcatttttttccagaagtactgaactcctaatatcaccaattcttctaagttcctggacattgatccggaggaggattcgcagttcaacatcaaggtaaggaaggatacagcattgttatcgttgttgagatattagtaagaaatacgcctttccccatgttgtaaacgggctaagtttgacagtggtagttggcttttgcaacacccccttcccatttcgacatattacagattgaagaaaaagtttgttgctcaaaacttacagtttgtttctttgcagccccaaaccttttagctaccaccacgggttgatttactagacccatttttgctctcaccgacttcgaactgtgcattttctcccactcttttgactgggggtggtatgcggggggaggatggggcttggtgaagaaaaccagggaaaggcaaacgctgcctaaaactcccagggtggctcccctaagaattgctatcctgcttgtttcttttctcggctgggatccgaccgactcccaggtcgcctcggacttctttggaacttggtgggcggcgcttaggtgcggggttcgtggtgatctgggcgccgacacttaggccgggggcaggtttccttcctgggaccctttctcttccagaggctctcaagcctctaagcccgtgcgcatgccgcctaccaggtagatgcggcgagtggaaggcagccttgtcccgggcacgatcggcggactcagcttttcgcagtctctgctcccagc

SEQ ID NO: 436746 - DNA, 287 bp, Homo Sapiens
caaacatttactgaacacaaacaccattttttccttttacacagcaagattgttagtttcaaattagctgagttattaaggactgtcaattgccatgaaactaaaaatgactctacatgtcaaactcaaatagaaaatgtcatgcaatatataaatcactaatgggacctctggtgcagtcaggcaagtttactatgtttattaaagtcacataaatggtttgacaaaagtggcacaataggaatgacatcaccggtttgttattaaatcacagtggaattactagg

SEQ ID NO: 436747 - DNA, 538 bp, Homo Sapiens
ggtagaatggcatacaaaatgaactcaaccatgtgaaagaaaacagatagggaagtaaatagagatagaaaaatatatcaggaaggcatccatgctcacaatgatggaagctataaaaatatttctactttctatatctttctgatttttattataaagaagatgtgctggctacatttctttgatatttttaagagcgatttttaaaatatatttaagttggcttattttagatatgaaaagactaagagccatacagctaaatataatgactcacatacttcttaaaagtcatcttataaataaccggggttaactgaatatgggctaggtattatagataatattagggaattatttttggagatatattagttgaagcagttatagctgctttttaaaaaatcaataattttaaacaaatagctctgaagacatttaacacatacatcttaacttatacttccaaatgaatattgcccttaagataattccctggccaggtgcggtggtagttcttaatcttttttgagcgaag

SEQ ID NO: 436748 - DNA, 1227 bp, Homo Sapiens
  misc_feature (117)..(126): n is a, c, g, or t
caccgacgaaacgcggccattacttttagttcacattttttaatgtttaaaaactatgttaacagagcagttatagaacagaacttcttatatttctttatttacaccacactctgnnnnnnnnnncccagttctatttgattaactatgaatagcaaagttttgtgacttgtgactcacttaaatcacccatctgaaattcatttacaaggtttttacattaataaaacagtagtgtggtacatgtattggactcagatgaagtctaaagtacactggactctagagagtggattacataccaacgaccaagattcaagtgtttggggaaaaaaataccttagacagtctatgttggcgtcaacactaaaataaaaggcaaacatgcaggactttcaaagcttgattagataatggttctttgttttctttccttcaaatttgtgctcataattaatattcaggttccctctccccgctttcatagatcccaaagtttgagaaatgcagcaattcaattgtgaaaaaaacattcttctccccagcttctgttttcatatgtactgtgtagtggtatcagtgttaaaaatggaagatcattatgaagaaacaatttgtcatttgggtatatctgtttctataggacaaggatttgtgtctaaatattccttacttgtatctcagaggactatctgttaaataattgatcttaatgccagcataagaaatcaagggaactatttctcagacatttctttctctaaattaagtagggtttcaggttccaagtttacattgagagaactatgttacctgggagagaatgtaaatttttctaattcccaaacaaaaccactaatttctaggaaacatttattgtttatatgcagatcctagagacttctatttcagtgcagatcaacaacttcaaaaatatacagcctcctatttatttacaataatatttacatacaaatgaagtatttcctgcaataagcctcagctgcatagattcttcctttaaaaacgtaaatttgagcctgtatacagatgggcccagtttcatagcccttccttagataaaagcctaaagaaggaaaatgtctgcaccttgtgaactttacatattttgcaagaactttctctttgagatttagtgatagtttttagttgttagacacaccaccttcagcttgtacctgaacctgcagcccgggggatccacta

SEQ ID NO: 436749 - DNA, 620 bp, Homo Sapiens
  misc_feature (101)..(129): n is a, c, g, or t
aggcaatgtatagttcactgagattacttagatctggatacactgggagataatatccaggaaagataatacattaacacaataatgcagtatatttcagnnnnnnnnnnnnnnnnnnnnnnnnnnnnntttaagctgtatttaacaggttaattaaaaatatggtaagacatagaaggcatcgtgaacatggctgcctgtttaccgaatcacagatctaaagaatgcatagataactgaagtgtcactaagatatcaggtaaaacattggcatccttttacaaacaaatacacacatactttcatacatactttttggccatggcagaaagtgtctgaacatactctttaacataattttacaaaattaatttgcatttactatacaatgccattttcaaaacaaaacgtctgcaaagttttcaatatgtaaaggctatcattcatcttaatgcatcctataattgcacatataaatcagtttgctacttaaagctagctcagaattcttgatcttgaaaacaagcaaatgtatgccttaaaaaatgaagagggagttctggtagagatttccaatataaaagtgggtaatttgtttagaattttgaaatttatcacac

SEQ ID NO: 436750 - DNA, 672 bp, Homo Sapiens
  misc_feature (507)..(535): n is a, c, g, or t
tttatcaccaagaacttattttaatggaaatgggtctaatgtcccttcatgcaacaagacagatgaacaaaaaacaatggtcctaattagctatgagtgatcttgtatccaggtggaaacaaagggcatgtgtacatgtatatatctcttagatgaaatcacacatgttgtgaagggtagaaaaacgaagcaccaagcagtgctttagtctgcaaaggaaagtttttagccataggcatgttggctagtcgttccccttgatgttgccaaggagcagatgtatgaggtggcaagtctgtgtctatctagctgcttttaaaaaataaaaggaactttaagcattttgccttttcttctacatatcccaatagaaatgtgactacaaatcattacaaaaccactttttaggcaatgtatagttcactgagattacttagatctggatacactgggagataatatccaggaaagataatacattaacacaataatgcagtatatttcagnnnnnnnnnnnnnnnnnnnnnnnnnnnnntttaagctgtatttaacaggttaattaaaaatatggtaagacatagaaggcatcgtgaacatggctgcctgtttaccgaatcacagatctaaagaatgcatagataactgaagtgtcactaagatatcaggtaaaac

SEQ ID NO: 436751 - DNA, 572 bp, Homo Sapiens
  misc_feature (45)..(45): n is a, c, g, or t
  misc_feature (114)..(114): n is a, c, g, or t
  misc_feature (118)..(118): n is a, c, g, or t
  misc_feature (172)..(172): n is a, c, g, or t
  misc_feature (436)..(436): n is a, c, g, or t
gcgctgcagggatggctggacctccacctgcccactgctggggtnaaaggtgaagaccttatcggtgctttctccgcgatcatcccgcccgccaaggatgtggaccttcccgtnacanacagtgactccacagctttccacagggctggggaggacagctgcctccccccanacatctgtgcctggatcataggtgaagattttgctcatgagaccccccatgacatagatggtgtcctcaagggagacagcctcgagacaccgctgtgagaagggtgctggtgaccgcaggctccaccggtcctccttggggtcaaagcactgcaccttgtccgtgttgacgccgccctgcctggcgcccccaatcacgaagagcttgcccgcgcaggacgccaccgccgccgagctcacggcctccgggagggccgcggcggcncccaggtgttggagaaggggtcgtagcgctccacgctgtgcaggcgcctcaggccgtcgaagccacccaccgcgaacagctgcaagtgaggacatgggccggggagccgggtgccaggccttagggccctcggcct

SEQ ID NO: 436752 - DNA, 433 bp, Homo Sapiens
aggtgttggagaaggggtcgtagcgctccacgctgtgcaggcgcctcaggccgtcgaagccacccaccgcgaacagcttgtgtcccagggcagccgctgcagctcgtgcctacctgcccctgcacaactgccatcttgtgcctccacctgcccttgtgcagagaggctaccttgatccaggtgtgcagatgggagctaaacatccacacatcatgactgttgatgtggcctcctagggagagagaagcagctgttgcccatcggctctcttgctatcccaagcacccccaaagagctagaaactagggcccccagatccaaaggaagggttaagggaaggcagcaggaggacttcttgagctggtgtaagactctggacctgtgacccagtgtgctttgaataagtggtgggaatgtctgagttacgaccctc

SEQ ID NO: 436753 - DNA, 656 bp, Homo Sapiens
  misc_feature (56)..(93): n is a, c, g, or t
ctttacaacaaggttttatttattcttttcttttatcccccccaaaacattaaagnnnnnnnnnnnnnnnnnnnnnnnnnnnnnnnnnnnnnnggatccaaacgagcatctatattataggatatccgcctggtcaacatgcagtgctgaactgtggctttaggagagatgcaccgatactctgggtgggccagcatcagctgccattcaaacaccgtgactgcaggggtgtcaggctggcacaccacagtggatgctgccctaaggaggtgtcttgtggggcatgacttgcacgttttagaatgcaggtagcagcattttaacagcctgaggcagagcacccaatttccctcctgatctcatcttacatgctcatcctctaggagcaaaacaaagagggaatggcctgaccatgggccccgaaggacagagggtgtggaccctgtagtccacctccttgcaatgttgttatttgaggctagaaccggtgcaccctgcagagtctgaaatctgttcctgatgaagctcattcccatcccactcactggcccttctcccatcccatggtattctcaccactaggaagttaacataatctctcctttattggtgctactatgttgaagagagcacacgcgactgagcacacgcgactg

SEQ ID NO: 436754 - DNA, 428 bp, Homo Sapiens
  misc_feature (2)..(2): n is a, c, g, or t
  misc_feature (14)..(14): n is a, c, g, or t
  misc_feature (36)..(36): n is a, c, g, or t
  misc_feature (63)..(63): n is a, c, g, or t
  misc_feature (73)..(73): n is a, c, g, or t
anataagcaacacnaaatatttagcaggagacaaantcagaggtgtatctgactaattttcantcttgctatnttttttgttaatcattaactatgtcactaatcacttagcctaaaaaaacctgcctactttgtaagactattactagtgacactgctaagatttagtaagaataagaagaaaaacataaagcagcataaaatcagtaatagtaagatgagcataaaacaacagtactttctgactttatctaatggctaaatttctaatgaaatttgcatttcattcaaaatttgctaatacatttaatcaacaactgcaaggtaaaaaattggaatggaaatttttaaaattatttattttttctaaatttagtttttgcataagtatatttaagttcccagagtttacgtatgtttctattttg

SEQ ID NO: 436755 - DNA, 330 bp, Homo Sapiens
  misc_feature (249)..(249): n is a, c, g, or t
caaattttacagctttaaaaaaattccatgaatgggttttcctcaacctcagaatatcataataaattacaagatatgaccccctggttcctattaccttgattaaagtggcggcaattaatttactgatgttttgtcagtgaaataaataatagcatcttatgaagtttgtgtatctctgatgaaaatgagtcatgtcagattccctctctgaagggaagttaaataaacaacatttttaaaattctntgaattctaaataaatatgctttgaaaagtgagttagggttttgtctaattgcactgaggcgagctagcttcggtgccatt

SEQ ID NO: 436756 - DNA, 788 bp, Homo Sapiens
  misc_feature (714)..(714): n is a, c, g, or t
  misc_feature (744)..(745): n is a, c, g, or t
  misc_feature (747)..(747): n is a, c, g, or t
  misc_feature (749)..(749): n is a, c, g, or t
ttttgatggttaaaagcactttattgattacagtatcaattcacaacatttcataaagccactgtacaaatagaggaatgaatcactgtgtaagaaagatctaagaacagttaaatcatgatacaagtccatagtttatatggtttagagctttaagagccttaatctaacacgtttacccttcccataattagactactactgacattcatgttcagttgaccacgagtgtgtacaaatcattctaggtaaagacaaacactttcagaatgctttaacagaaaaataattttaatcaactttaaaaacacacttagatgtggatgcctttggataggaaaatagaaatgcaagtgttcagatgcttctttgaaaagaaaacaataggatagagcaccattgtgtaaaagacaaaaggcttgagatatctaccaagtatatcactgaagttctattaattaagaaataaatactgtatgatgtaagattttgttgaatacatttaacaccagttggaatatagctttttccccccgtaatgctgctttatcacaactgtattttacaaaatcagcaactggatttaagaaagaagacataggagattttatcaacatcaaacatttgctaaatacaaggtgtaccatcaatgtgtgattaataagttactttttaaaataaagtgctagcttagatattctactataaaccatntcattgagtacctattatgtaaccaatatnntnanatatacactgaatctgaggcaacccaaaatgaacaatgg

SEQ ID NO: 436757 - DNA, 639 bp, Homo Sapiens
  misc_feature (579)..(579): n is a, c, g, or t
tttaaaagagaacaatgtgttttattaggtgctcctttgatttattggagctagattagaccagataaggggagcttcaggggcaaatattatagagaattggccataatacctttatcccttagaagagaagacaaggaaaaggactcgagtttaccctttaagcctgtttattcccttctgtcatactcacaagcattttttatcctctgtgaagaggttaagttacccacccaccaagtctttgctccagcagcttgtagtgacccactgaaataaaacagaacatgggaggttttaggtgttgcaaaggatataaatacaagggcagtgattagtagccttctgttattagctaataatgcagactttttcttggataaaatggagtccagggtcccacattaaaggaaaagggccctgatttcaagggtgatgtgatacgatactatgttggtcagtcagttcaggaagggagatgggctggatatccctcagagacagaagaaattttgtatgcagaatcaaagcatgacagaggatgtcagagctgttacgcattgttagctaaatcattgngaacataagcagtggaactggaggcttcaagttcatgtagatctgaaacctgcttaatct

SEQ ID NO: 436758 - DNA, 632 bp, Homo Sapiens
  misc_feature (320)..(337): n is a, c, g, or t
  misc_feature (571)..(571): n is a, c, g, or t
cagctacatgcacagaactggccaaagtgatacctatttctatagattattttatcacataatggagaattaagattaagtaacgcttttctgttagaatacactattgatttgaaaccacatgttagtccatgcctggaagctcacgtatcctgagaatgcctctcttgctagctaaatacagttctttagggtgtaggtaaggactggagtaagggtagcctaaaaagaatgaatctggcaagcaatgggaaaaatttctttgtgcgcgcatcatttttactcccttctttctccgtcatcacccttaaatgaacttnnnnnnnnnnnnnnnnnncagacacatgaaggtctctatttgatcactgttaactcttccctctgcctctgacctgaggaaaaaatgagtatgccccttcaagtataatgccctttactgcaaaaggggacctgctggttgtacattcttgcaaatccaagaacagtcaccgtatttaaaacctttgtttggaaatgggtgaacctcataaggcagatggttggagaaggcctaaatacacatggaatcctnttagaaatcttttctcttcaagctggatatgtggaaagtgaagtttcaagggtagtgaaac

SEQ ID NO: 436759 - DNA, 554 bp, Homo Sapiens
ttttcacaatccaattctcacagcccccagaccaaacactggtggcgatcattcaatatggctttattttctcatcggccggctgcatcccacaccagcctgagccccagacggtcagtcagtgcatccatcctgacgacctgtccaggaaggaaggaaggaagctccctccaaaatgctggccccgtggcacccagacaggagcctgctggctagcatgcaagcactccccaaattctctcatggtgacaaggtggcagctgcctgggtcccagagtctcagcacaagtgcccagaggccagtggtgatgggcccttgggcaagtctctggaggaggcgggcaacccgcagggcagacgggagaagagggtcccctgccaacctggaggaaagaggggtggttgtcccctcacccctccaggctgcaggttctggagggcagaggtgctggccgaagaactggtggccaaagtgagaccccctggtcctatctggacagaaccccaggctcccatgggccggcccaggtccttcggacagcaaacacctccct

SEQ ID NO: 436760 - DNA, 384 bp, Homo Sapiens
  misc_feature (14)..(14): n is a, c, g, or t
gatatgtttcattnctagaaatatttttgagctttcctcttggaagcagttaagttacttggaaatagtatgatatggtctagctttttacatttgctaggcagtagctgagtaatattcagcctattactaattattctctgctattaagttgaggccttctgagtgctctgctgaaggcactgtgaatataaggtttagcacctggctgacgagaacaggcttcatcccctgccctgggtcagcactgcacactcctcctgcaaggattttcaggtggtttttcggctggcctcaggcagtctcctcatagacttgtgctggtcaatattatgttggatactgttgggggaccctctgtgcacccccaggattatctctctg

SEQ ID NO: 436761 - DNA, 786 bp, Homo Sapiens
  misc_feature (283)..(309): n is a, c, g, or t
gtaaactttgctgtttttctttttcataaagcattctcaaattgttgagtttattgctgaaaaaaatctccatgactttacagatagaattacaaactaaatgatgtcttgtatttagaagcagagtacagacctaacgaactgttagattctccaccatcacttagggtttgcccagaagcaacaccagagaattacagacaacgcgcttttgctgaactgtccattttggtggttgtgtttttcagtcaaatataagcaggatgggcgatagagatatatnnnnnnnnnnnnnnnnnnnnnnnnnnnctaatgcctaaatatgggtattaaagggaaaatttttaaagtctgattaaatccaatatgacatgaaattaaatatatggattagtaaggaaaaatgttaaaaagtagagaggataccaagaagattaaactggactagccttatttgcaagtgaaggatctggtgctgctttcagatgtttatcttttatttttttcccttaagctttaatcttcgtcattgtcttaaagtcaactggtgtttcttgttcattgactttggtacgatggtgctttgcaaggatgtatttatgttataatggccaacatttggtcagcccttgtccacttattcacttccctccttttgtaaaataagtgctttaattataaactgtataaaaataccttgtataaaccccttttttgattattacaataaataagctgaattgtaacaaatgaaatttgatttttgtaataaaacagtggaaaagt

SEQ ID NO: 436762 - DNA, 617 bp, Homo Sapiens
aaattcagaaataaagatataatgaaagaccttttttttccacaagaataggttaaatacatacaattggtaaattatagagcaattctgaataaactgatcaaaaaacgaagaaagatgagcgcgtgcgggctgggcttgtctcacgcccgcctccggacagggtgggtttcttgccggcggccgtgccccacctcgacgcgatgcacctgcggtacatcccacccaggcgaagtcacggaacagacgcagaagaggggagacggccgagacccggggagccacgcggcccgaaacagcccctgctggctctggcgtctttccgggccggggtgcccctctgccatgttccgtggacagcgaacacccgggccggagccattacctactgtgaaggccagcgcagggggcacgggatgtgagggaggcccccgagtgcacggggccttctgcagggactccggtcctccgccttccaccagcataggaggacgggcttctggcccaccggacataaggaattcagagaaaaggctctgcaggtacccaaggccccccagcctgcagcaccgaggggcgcccaggaggcccggcctgcggagggcaccggcagcccc

SEQ ID NO: 436763 - DNA, 1106 bp, Homo Sapiens
  misc_feature (1057)..(1057): n is a, c, g, or t
  misc_feature (1075)..(1075): n is a, c, g, or t
  misc_feature (1084)..(1086): n is a, c, g, or t
  misc_feature (1095)..(1095): n is a, c, g, or t
ggccttatgtagcccaaggagtttagtctcctttgctcagacagacagatctttattagtgttttcaacttattttgctcacaacttcccagcaagaaatgtcttacattgcaaccagttctcacatttagatgtatgggtgaaaagtttcacaaaacagtatttgcctttactacatgatgcattctggcctactttattctgcttcattgctgtgtaatgctggtgaccacttgctaattgatttcccattttactaaatgggctgggacccacggtctgaaaaccctgccttaggctgcaagcatttctgtgatctctgcgagctactccatataggtaaacacacgcgaggtaaactaggaaacagcttctgcttttgcagattagaagtgaagttgacatcacgccaagtacgaaaaggctaaacagctgacaaaatttccacttgagcaaccctggggagcgcaaacaggaggaatcggggcaagggtgacttgaagaaagcactggcagatcacgcactttaaggcaactctacactgcacaatgtcaaataacctagcatggggcggcactaaatggctgcaggaaagccgagtcttcttccacatccggcggctcccctcggatgcgagcgctggcccagggtgtgtttacagaggtgagggcttcccgtggacccttctcgttgggagcgcttagcctcaggagcggattcagggcacaggcagaggacgtccacaaacaccacaggaagccgccacccaggggcgtggaaaggcccaatgcctcgtctgggattcacggccggcaaagcggccctccggaacgggacagcacagcggctcacctctgcgcctctgggggtgcggggggccctcgcccttcacgctctctgggggacgcccgccctagccccgcctgggcttcgcgggtggacggttgggggcccgggcgccccccagcgcgtactttttctccttctcgtgggtcttctggtgctcggctagggccaggctgaagtggaaggtctccagcagccctgacaagcgtngctttccggcggcatggntggctgtgnnntctatcagngcgagaccacg

SEQ ID NO: 436764 - DNA, 516 bp, Homo Sapiens
  misc_feature (302)..(302): n is a, c, g, or t
  misc_feature (442)..(442): n is a, c, g, or t
  misc_feature (487)..(487): n is a, c, g, or t
caccttatgtagcccaaggagtttagtctcctttgctcagacagacagatctttattagtgttttcaacttattttgctcacaacttcccagcaagaaatgtcttacattgcaaccagttctcacatttagatgtatgggtgaaaagtttcacaaaacagtatttgcctttactacatgatgcattctggcctactttattctgcttcattgctgtgtaatgctggtgaccacttgctaattgatttcccattttactaaatgggctgggacccacggtctgaaaaaccctgccttaggctngcaagcattttctgtgatctctggcgaggctactccatatagggtaaacacacggcgagggtaaacttagggaaaacagcttctgctttttgcagatttaggaagtggaagttggacattcacggccaagttacggaaangggctaaaacagctggaccaaatttttcccactttgaggcaaccntggggggagtcggcaagccttgaggggtt

SEQ ID NO: 436765 - DNA, 383 bp, Homo Sapiens
aattttgaaagcccagccaaaatgaggtgtgaatttgtcatactgttacattgaaattggtaacaaaatatatcccctcccatttggacttttagggtaaatgaaaattttattgtattttaaagtagtttctaagtgttagcaagactgactataattccagtttctgttttctatggacagacctgataaactggagaccctaaagcaggaatacccaaattatagtgtcaggattttagctgtaccagaggcctttatgtgctacacataatttgtataaaattttatatgtgcagattgggtacataaacagttctccatttttctaagggaatgcaataaatgtagcatcgtgaataaatataacttttataatccgt

SEQ ID NO: 436766 - DNA, 151 bp, Homo Sapiens
gtcggggcaaatacactttattcagtcctggcatcagactggcggagtcctgctgtgggtgccagtgccccagacagagggaccccacccctcagctacgagactagttctccaagaccacagacagtgacatctcttcactcacatgacg

SEQ ID NO: 436767 - DNA, 1661 bp, Homo Sapiens
  misc_feature (241)..(257): n is a, c, g, or t
  misc_feature (1262)..(1278): n is a, c, g, or t
  misc_feature (1433)..(1433): n is a, c, g, or t
  misc_feature (1447)..(1470): n is a, c, g, or t
  misc_feature (1583)..(1583): n is a, c, g, or t
  misc_feature (1607)..(1607): n is a, c, g, or t
gaggaaatcatattcgtaatttcatttcgttgaagccctgcctttgttttggttctgaatgtctttcctcctcggtagcagtgagaccggtttcatttcatacttagtccattcagggacttagtgtagcaccagggagccctagagctggaggatatcgaatagattaaattttgctcgtctcttccacaagccctaaccatgggtcttaaaaacagcagattctgggagccttccatgnnnnnnnnnnnnnnnnntttatctacttccctcccaaatgagagagtgacagagaattgtttttttataaatcgaagtttcctaatagtatcaggttttgatacgtcagtggtctaaaatgctatagtgcaattactagcagttactgcacggagtgccaccgtgccaatagaggactgttgttttaacaagggaactcttagcccatttcctccctcccgccatctctacccttgctcaatgaaatatcattttaatttcttttaaatagaatgttttgcctcaaagtagtccatataaaatgtcttgaatagaagaaaaaactaccaaaccaaaggttactatttttgaaacatcgtgtgttcattccagcaaggcagaagactgcaccttctttccagtgacatgctgtgtcattttttttaagtcctcttaatttttagacacatttttggtttatgttttaacaatgtatgcctaaccagtcatcttgtctgcaccaatgcaaaggtttctgagaggagtattctctatccctgtggatatgaagacactggcatttcatctatttttccctttcctttttaaaggatttaactttggaatcttccaaaggaagtttggccaatgccagatccccaggaatttggggggttttctttcttttcaactgaaattgtatctgattcctactgttcatgttagtgatcatctaatcacagagccaaacacttttctcccctgtgtggaaaagtaggtatgctttacaataaaatctgtcttttctggtagaaacctgagccactgaaaataaaagagacaactagaagcacagtagagtcccagactgagatctacctttgagaggctttgaaagtaatccctggggtttggattattttcacaagggttatgccgttttattcaagtttgttgctccgttttgcacctctgcaataaaagcaaaatgacaaccagtacataaggggttagcttgacaaagtagacttccttgtgttaannnnnnnnnnnnnnnnnccttaactatatctgtctacaggcagatacagatagttgtatgaaaatctgcttgcctgtaaaatttgcatttataaatgtgttgccgatggatcacttgggcctgtacacataccaattagcgtgaccacttccatcttaaaaacaaacctaanaaacaaaatttatnnnnnnnnnnnnnnnnnnnnnnnnaaggactgtgggttgtatacaaactattgcaaacacttgtgcaaatctgtcttgatataaaggaaaagctctggataacattattactacttgaatgcctctgtgactgattntttttttcatttaaatataaactntttgtggtatgctcatggtttttttcctttcccattccttgttacttttgtctt

SEQ ID NO: 436768 - DNA, 337 bp, Homo Sapiens
  misc_feature (74)..(74): n is a, c, g, or t
tttatctatgctgatatgggtttaggtacttggctggtgagtttggagggagagttggttcttggaaccttctnactcactcctcttctctgtggtcttccttttgggggatctctattacagtaatcatatttcattccagttttgtttccatggttctgtctcggtagcctgtacattcccagagagaagagatggactctgaattcagaatagttggtgcaaggtaggtgttccagtgaaagtctgttgattgaaagagctgctctttaggaaagagtgaggtcagaggcctctgtttcttccagggtgtaaggcagatgagggggaccctaaa

SEQ ID NO: 436769 - DNA, 802 bp, Homo Sapiens
gggtggaattgttaggtcatatatagttacatccaactcaagctctttcatgaaagaagaaagaatttactggatggagtttgctggctcaaaagaattgacagaaaactaagaagggaggtctgtaggaagataggtggaggcggagacagctcagcgagtccaaggagtggagcagaaatgacattccccaggacgctgccatccctggacattgctaccagtggacacaccatccctgcagcctgccagccctacccacctgccttgctgtatgactaccaaccccggaccacggtggcttccttgaaatgagtctcagcatcccttcatttgtgtcacattctccaggctcatagccccaagcaagggtccaggtagtccaccccaggtcaatgaccacttcccgactggtatggggctggaagcggggtgtgcctgagagacaggaaatacttcccttcttcagcttccacggtgggtactgcacaccactaagtttatatctaaggcatgatgtccctgctgtaggaagggaggggagatgctggacagttaagctgaaaacacaaaaatgacaactgtccccacagctgcactccacaatgcaagcaggctttattccattcatcttccactgacagagtgggggagctcagtgacatgtctgtggatctcacagctcatgtgcagaaatctccatctaagaagagggaactaggccaggcgcggtggctcatgcctataatcccagcactttgggaggccaggcgggcagatcacttgagtctggcttcagacc

SEQ ID NO: 436770 - DNA, 496 bp, Homo Sapiens
  misc_feature (373)..(393): n is a, c, g, or t
ttttttttgatgaagaaatctaatctttatttctatgattttagcacaatatactcacacaatagcttttatctgtacttaacaaaatacatttatagcactttacaaactttatcagtttggaaaacattgcataacatttttttaaacacagtactttatatatactatatatatttccataattttatttactttaaaaagataattaactctctttattcaatacttggttttatcagtaaagcacagcctaacaaaggaagaagtgctcccattaggcaaataaggataaatagaacactaaggaagagataccaccttttagtctgatttattttaaattaagggtaccagtggaatgtaaacaaannnnnnnnnnnnnnnnnnnnnacaaaagacatgttatcaaatatacatgcagaggtctgagttctagtgtctatcattatatgtccttaacaatgtggtacaatttgttaagtcattaaaaact

SEQ ID NO: 436771 - DNA, 460 bp, Homo Sapiens
  misc_feature (305)..(305): n is a, c, g, or t
  misc_feature (324)..(324): n is a, c, g, or t
  misc_feature (371)..(371): n is a, c, g, or t
  misc_feature (377)..(403): n is a, c, g, or t
  misc_feature (411)..(411): n is a, c, g, or t
  misc_feature (426)..(426): n is a, c, g, or t
gatgaagaaatctaatctttatttctatgattttagcacaatatactcacacaatagcttttatctgtacttaacaaaatacatttatagcactttacaaactttatcagtttggaaaacattgcataacatttttttaaacacagtactttatatatactatatatatttccataattttatttactttaaaaagataattaactctctttattcaatacttgggttttatcagtaaagcacagccctaacaaagggaggaggtgctcccattaggcaaataagggtaaatgggacactagggnggggggtaccccccttttngggctggattttatttttaaattaggggtcccgtggggggatggtanaccaannnnnnnnnnnnnnnnnnnnnnnnnnnccattggncctggtttatccaanttttcctgccgggggggctgggggttctggtggg

SEQ ID NO: 436772 - DNA, 755 bp, Homo Sapiens
aaaatctgtttggtcaagaaagatggaaagatgtaggaaatatcatactgcacctgaaatgctgcagcaggggtttttgtttgcttgtttttgtccttcagagtactaaaaccagcccaccttttcctctacaaacaggcaaagccagtatgagcgtcatgatggcggtggtggtgagaagtggggaaggcaacattttattcccactcccctctctgagaaggaaattgccagaagggatatggttgagtccatgttttattgccagagttttcaattctgctggtttcagctaaattcctaatgccttagaggttggtttttctagaaagctccacctttttcatgtggaaattgataatgatgtgatactattcatctgtaaacaactccttctgttattggaaagtgagctaagatcagatcaaccatctctgttgtttcctttcatccccttggcaatcatcaagtatatatcggaattcttatgaaatggcataaaaaaggtttaatactaagttccaagaactgagtatgtcttcatactttaagttggaaaacactccaaaatattttgtttttatcttcttcttatcaatggtattggtttgctttgatttaggctcaaggcttgattcaggataggtagcaacaatggttgtttgcatgttaaactaaaactgcacctattcagatattttgaagaaagtcattcttaatttgtaccgtgagatacttttacttaccaacatgca

SEQ ID NO: 436773 - DNA, 402 bp, Homo Sapiens
  misc_feature (361)..(361): n is a, c, g, or t
agtaaaagtatctcacggtacaaattaagaatgactttcttcaaaatatctgaataggtgcagttttagtttaacatgcaaacaaccattgttgctacctatcctgaatcaagccttgagcctaaatcaaagcaaaccaataccattgataagaagaagataaaaacaaaatattttggagtgttttccaacttaaagtatgaagacatactcagttcttgggaacttaggtattaaaccttttttatgccatttcataaggaattccgatatatacttggatggattgcccagggggatggaaggggaacagcaggggtgggttgatctggatcttagggcttcacttttcccaataacnggagggggtttgttttacaggtggataggtatccaccatcc

SEQ ID NO: 436774 - DNA, 345 bp, Homo Sapiens
  misc_feature (9)..(9): n is a, c, g, or t
  misc_feature (62)..(62): n is a, c, g, or t
  misc_feature (91)..(91): n is a, c, g, or t
  misc_feature (98)..(98): n is a, c, g, or t
  misc_feature (131)..(131): n is a, c, g, or t
  misc_feature (133)..(133): n is a, c, g, or t
  misc_feature (141)..(141): n is a, c, g, or t
  misc_feature (158)..(158): n is a, c, g, or t
  misc_feature (224)..(224): n is a, c, g, or t
  misc_feature (252)..(252): n is a, c, g, or t
  misc_feature (296)..(296): n is a, c, g, or t
  misc_feature (298)..(298): n is a, c, g, or t
ctcgtgccntttatacttaaatatacatttcatggttgtatatttattctgcatccaagttncttttcatatcaaataacagcagcttggncatttgngttgcttgctcataactcggcagtaagcatttntnagcatgangttattctttggttganttttattcttgatatggggcttaggagtcagatttctggtctacagaaatgatcatgctcatgtanttttgacatttatcgtcatgatgctttncacaagggctgcaccaatttagatcatctttagcggtgaatgantngattaattttactacaactactgatggtggtggtggaatttcagttg

SEQ ID NO: 436775 - DNA, 452 bp, Homo Sapiens
  misc_feature (336)..(336): n is a, c, g, or t
  misc_feature (353)..(353): n is a, c, g, or t
  misc_feature (381)..(384): n is a, c, g, or t
  misc_feature (397)..(397): n is a, c, g, or t
  misc_feature (399)..(401): n is a, c, g, or t
  misc_feature (403)..(403): n is a, c, g, or t
  misc_feature (435)..(435): n is a, c, g, or t
  misc_feature (441)..(441): n is a, c, g, or t
  misc_feature (445)..(445): n is a, c, g, or t
aaatgacgaagtatggttcttgaaaattctcctacttccagtgaacctattaaaagcagattttattcaggatctagttgttttataatatctagtctaacatacttgctggaagcaaaagtcttaattttatatattaaatatattataacagttatacagtaacctgagaaagcacgtattttatgtcatttcttactaatgggacttctctggaaaggttccctaccccttgatcagaacaaaacacacagtatacaggaactgagtgcacattagaaagctcctagaggatgaacttatcctaaagttgttgtctcatttggtagaaatttntctggtgctctattatntaagatgttacatcaacattcactgttnnnnttattattctttntnnntnaaatttacttatgtattttagagacaattctntgccgnattngcacgag

SEQ ID NO: 436776 - DNA, 1117 bp, Homo Sapiens
  misc_feature (916)..(916): n is a, c, g, or t
  misc_feature (944)..(944): n is a, c, g, or t
  misc_feature (950)..(950): n is a, c, g, or t
  misc_feature (978)..(978): n is a, c, g, or t
  misc_feature (982)..(983): n is a, c, g, or t
  misc_feature (985)..(985): n is a, c, g, or t
  misc_feature (997)..(997): n is a, c, g, or t
  misc_feature (1004)..(1005): n is a, c, g, or t
  misc_feature (1007)..(1007): n is a, c, g, or t
  misc_feature (1009)..(1009): n is a, c, g, or t
  misc_feature (1023)..(1023): n is a, c, g, or t
  misc_feature (1036)..(1039): n is a, c, g, or t
  misc_feature (1048)..(1048): n is a, c, g, or t
  misc_feature (1060)..(1060): n is a, c, g, or t
  misc_feature (1070)..(1071): n is a, c, g, or t
  misc_feature (1076)..(1076): n is a, c, g, or t
  misc_feature (1089)..(1089): n is a, c, g, or t
  misc_feature (1094)..(1094): n is a, c, g, or t
  misc_feature (1101)..(1101): n is a, c, g, or t
ttgttttctactgaaacttattatttgccattaagaattgcaaactatactactaagaatgaacaacattctcttcattaagcctttttcaaaacacacgagacaaagctcccctttggtcaaggtgtcccacacattaccactgcagctcccagcacagcggcgcaccatgaactcggacgtggagcccaaggaatggagatcgcaccagccttccctgcttccccaccccaactacacccaagggagaaaggatacgaggaaatacactatgtcttcaatgcttggggggctgggggtgtcctctgctaccaggtgggccggtcagtgccgactgtccggcgcgcgtccttggggatctccggctccccgacctacacaagcagcagcagcagcaagcggagtcctgccaacgccgcagtagctgctcatgagaaaggtgcccacgctccccaagccctcctgtttacatttcctagtggggcaaagctactttcccaggacaggcagcagagcagtggggcagagtgcactctgggacccgggacagcaggttacacagggtcaggcggtggtgggtgctggaatcggggctgaggttctggaaatgccaccaggtgatgccaccctgtggtgtctgcccaccacacaccacaagactcaagtggttttccccttttggccctaaaccacctaacacctcagcggcatgggagggcaattctcagcaaggcaaggacatggggaaggctcctgggagaggcacgccgtccaccctcaagcctgactgtcacaggtggaggccccgccccccccgtcaccacacctgggggaagctgccacagaatgccacagcactggaaagggacactctgagggcaggctccagcagcagctccaggacagccagccgccnttctgcccaggccgaacacgctgtgtcntgtgcnggccatcttcaagtttcccacacacccncttnncncaatactttctncccaaannangngggactcgccttcnttctccaactcannnnccatgaggnagccttggtaancaagctgggnnaaagnaaagcgggggggnccccncgagagngccatcttggggtggg

SEQ ID NO: 436777 - DNA, 803 bp, Homo Sapiens
  misc_feature (44)..(44): n is a, c, g, or t
  misc_feature (59)..(59): n is a, c, g, or t
  misc_feature (118)..(118): n is a, c, g, or t
ggaatccggataccgaacgtgtgaaaagggaacttttgaaaggngccaattttgggaantaagaggtttccattttgccttcctttgtgcccttttcctttggcaatttttaacactnccccgaactttcgcatgcatcccatgttccttaactctggagaacttttttagtacttaactgagcttttgatgtatttgcctgagcagaaacttttactactctgcctctgctgtgagcaatatttgaaaccttaaccacagcatttcttttctggctttcattttggtttttcccatccactttatggtcagttttcagttttttgttcacagtagttacactttcatttctccgttttttatcttcatatttagaagagtcagttgcactactaccttttctaatttcctttttttcagcaacaacactgtttttacatttatcacacagaacttgcctgggtcgtagtttaatagcattcattattgaagtgggttcttccctgtacatttttcgtttgggtcgcttaattttccgaggaggtggctgaggtattgattggttatatgtgtccctgataaacaaagggggaggataaggtgctccttcatggaagagaggtggtggtttggaagtccacaggctttcagccaagctcagctcgggatgcgggacaggagaagggtcatcgggaacagcaccatttgcttcacacttgacttctgtcccttcttggaatgtattactttggagcggcatggcttctggtttatccttatattcccttttgggaaatactgcc

SEQ ID NO: 436778 - DNA, 275 bp, Homo Sapiens
  misc_feature (29)..(29): n is a, c, g, or t
  misc_feature (106)..(106): n is a, c, g, or t
ccttgtgtttatatgtgtgtcaggtaacnttatacagaaatgtttaccacaaatatgtgttaatgtttggtgtagcttggactactgcaaggtcttttcaggactntcagtagaagcctgtgatgactgctagaaatccaccacagatcacaaattatgaccctgctttgtatggggtttataggtaaacagttaagtcagcataaatcacggaggacagtctgagagtgatcagaaatacttcagttctcacactgcataccttcctaacagat

SEQ ID NO: 436779 - DNA, 354 bp, Homo Sapiens
  misc_feature (248)..(248): n is a, c, g, or t
  misc_feature (323)..(323): n is a, c, g, or t
  misc_feature (343)..(343): n is a, c, g, or t
  misc_feature (347)..(347): n is a, c, g, or t
atcgggggtgggggaagatggtggccaaaaagcaggccgtcccttggatagggcagctgggacagctttcccggagcagctgctgtacctcacccttatttcctgacaatcattaaaattcaatttcaaagtttctgtctttaacaatttcctaaggggcctatgaaggatgccaaaagggtgggcctcctttccagtggcagtgctttggcagcaagtagacactggtcaggttgcctgaggctgtncccttctcacaatagtcctgtggagagtgtctagaatggcacactgcaggaacagctctgggaaagttttaaggngggccaagaagtggacaagnccancacctct

SEQ ID NO: 436780 - DNA, 406 bp, Homo Sapiens
  misc_feature (84)..(84): n is a, c, g, or t
  misc_feature (280)..(280): n is a, c, g, or t
  misc_feature (313)..(313): n is a, c, g, or t
  misc_feature (342)..(342): n is a, c, g, or t
  misc_feature (349)..(349): n is a, c, g, or t
  misc_feature (352)..(353): n is a, c, g, or t
  misc_feature (363)..(363): n is a, c, g, or t
  misc_feature (365)..(365): n is a, c, g, or t
  misc_feature (367)..(367): n is a, c, g, or t
  misc_feature (385)..(385): n is a, c, g, or t
  misc_feature (391)..(391): n is a, c, g, or t
cacaattccatctctggttgatgggcagaaaaagtgggcagcttgccaggtagacgtttccatgactcccagcccccaaaggtngatgcgtttttcagctaattcaatgaagagtgggctgaactttgggtctaaacgagacaatagctgccttcgcagtatcagcagaatggttgatgggagtgcactctacatttggcagagaatcatgtgaccttacgactgagattttgtgatggtgccaacggagacttggaaagcagcaaccgtcctgactttnttcttcttttctacatggctcagaaaaggtggncttaatacttgactttagccagactcagnaagcgtnctnntggttttgtngnangacttcgcctttattctnggtttntggcaagccaccagg

SEQ ID NO: 436781 - DNA, 373 bp, Homo Sapiens
aagatggtggtttggttcttcattggaacagatgccgtagtttgggtgttcaagtggccgcaagcaaactccgataagcctgtgtaacatgtaagcccaggtttaccatcctggatagtagtgcatgcagagagagacagcatacagttatctagcttagccatgggagaaaaataataataataaaggtgggatggggataaggtggggagaaacatgaatgctttaaataattctgagttcgggttattttcaaggaagggtaacagccaaaggtaaaagggcctacatttatttaattctctacgaaaaccttctcgtaaggaaaataaatgccagctcttcacgtaccctgtttacagcgaggtttttg

SEQ ID NO: 436782 - DNA, 432 bp, Homo Sapiens
  misc_feature (128)..(140): n is a, c, g, or t
tcttgcaaataaaaatcatccttttaaggaatccctgcatgtgagtatagggcagaagtggcaaacaaggagcccataaacccaagtaagcttaaaggcagctgttatttgactattgccagaaaatnnnnnnnnnnnnnctacttcatctaccagtaattgatgtgtttattatctgcctcagaagccagggttggaggaagaactttagatatggatattaatgcttttgccattatacctaatttttgagaacagcaagccctatttgaccactctcttcagcctgtgtgttcctgctgttttgaagtaatcaaatgctgtgcatggtattttacctgagctgcaacctgttatggacttgaacttctgtttaagttgaaagcaagagtccctgagtataaaggaaaaacagcaaaacaaaaagcaaac

SEQ ID NO: 436783 - DNA, 495 bp, Homo Sapiens
accagcaaatactttttattgagcatacaggtattacgctgggtctttacatatctcctccaaataagtgagtccaaatggcaggtaactcgaaaggtgagaaattcaagtcagctttgaaagacacattgcatttaaaggaaaaacggtattcgcagatgataatacaggatggagtggatcagaaaacacactgaggctactgatcattcccatttgccaactcactgcagttggcaagaaaactctgtgactccatgagatgggaaattacaccagcagtcaaggtagcaaggtaatagtttcggctaagttttgctgcataacaaactgcctcaaatagtggtttatatctctaacgtgggcaaggtgggtgattcttctgctagtttctcctgggcatattcatgtggcttcattcagcacaggttgctacgctgggcggtccaagatagccttattcatgctctggcaggtgctgcctggctgctaggg

SEQ ID NO: 436784 - DNA, 317 bp, Homo Sapiens
  misc_feature (81)..(83): n is a, c, g, or t
  misc_feature (290)..(290): n is a, c, g, or t
  misc_feature (294)..(294): n is a, c, g, or t
gctcttcaggcttctgtccaattttcagtagccttttctgtcttttccttccttatttttaggaactctttatatattttnnntgctagcaaatgataactgtgtatttgtaaacatcttacccatgtccttgaccggccttttcgctctcaaatgatgtcttgacaaattaaagttttagttttaatgtagttaaatataccattgttccactgtttagttttaagaaatctttcctttccctgaagtttttagcaatctatgttagcatctagaggctttatggtttnaccntttatactctgtggcctctaacc

SEQ ID NO: 436785 - DNA, 306 bp, Homo Sapiens
gcacgagaaaaatagcacctgtaatactgtgatattgacaatttaaaactggtctaataactgccggagatatggtgccttggacaattctctatttactcgggagagtttgaaaagtactgggcagttcagagaaacacatgggatgtgtcgatcaaagcaacctgtacagttcttgcatatctgacagcataagagaaatacaaaacataataggaaagtttttatgcgtgtatgaaaacaacaaatttttataatccctactttctagactaccacagattactggcagacatacattacaga

SEQ ID NO: 436786 - DNA, 545 bp, Homo Sapiens
  misc_feature (23)..(23): n is a, c, g, or t
  misc_feature (33)..(33): n is a, c, g, or t
  misc_feature (45)..(45): n is a, c, g, or t
  misc_feature (68)..(68): n is a, c, g, or t
  misc_feature (75)..(75): n is a, c, g, or t
  misc_feature (110)..(110): n is a, c, g, or t
caattttaaaactggtctaaatnactgccggangatatggtgccntggacaattctctatttactcgngagagtntgaaaagtactggccagttcagagaaacacatggnatgtgtcgatcaaagcaacctgtaacagttccttgcatatctttaacaagttgctccctgttgacgttcccaactccgcggatttcttggttgaggatggactgcaatatgctgaggttggctccgacatttactacagatgccatgctgagttaggtcatcacacacaggacagtgtaaggtagtaaaatattgtgaaatagtgcctttccgcccttcaggttcacttcgcgaggagctggtagctttatggatccttggtaattcatgataccagctgaagacatcaataccaataagtgagaagattcttgccaagggtggaaggatttgcttggtaatatagtaagtagcattcagtctcagagttgggtcctgcaggacttccactgggcgccttacaagctggataagtggtactcccgggggtccccc

SEQ ID NO: 436787 - DNA, 314 bp, Homo Sapiens
  misc_feature (135)..(135): n is a, c, g, or t
  misc_feature (145)..(145): n is a, c, g, or t
  misc_feature (264)..(264): n is a, c, g, or t
  misc_feature (311)..(311): n is a, c, g, or t
gttgtttcaaggttttgtgtagagtctataggtgggattggagtgataggaactccccttggattaattggcttctctgcttctttgtaggtggattgctcaggtaatgacctggtgcagttacacatcaaagtngacttcactngtgcagtcggatagagcagattcagtgttacagtgctaaagatcgcctggctcagtcagacatggccaaacgtgtagccaacctgctgcgcgtgcgtgctgagtctgcatcatcctccntgatagaccctccgcctcaacaccagaccctcagcgagtccctttgngcc

SEQ ID NO: 436788 - DNA, 1667 bp, Homo Sapiens
  misc_feature (1249)..(1249): n is a, c, g, or t
  misc_feature (1604)..(1604): n is a, c, g, or t
catacctggacttctgggacgctcatttcgtgttggttggggccccaactggactcttgctaatagtggagaacagctgaatggctctcatgaactagaaaatcatcagattgccgattccatggagtttggattcctgcccaatccagtagctgttaaacccctaactgagtccccattcaaagttcacttagaaaaactcagtttgagacaaagaaagccagatgaagacatgaaattatatcagacacctctggagctcaaattaaaacacagcactgtccatgtggatgaactgtgtcctctcattgtccccaatctgggagttgctgtcattcatgactatgcagattgggttaaagaagcatcaggagacttaccagaagcacaaattgtgaagcactggagcctgacatggacactatgtgaagccctatggggccacctgaaggagcttgacagccagctaaatgaaccccgtgaatacattcaaattctggagcgaagaagagctttctcccgctggctatcctgtactgccacacctcagattgaagaggaagtctccttaacccaaaaaaacagccctgtggaggctgtattcagctacctcacaggcaaaaggatcagtgaggcctgctctctggcccagcagtcaggggatcatcgtcttgctcttcttttatctcagtttgtgggtagccagtcagtccgggagctgctcaccatgcagttggtggactggcatcagctccaagcagactccttcatccaggatgagagactgcgcatctttgctctgttggctggaaaaccggtgtggcagctctcagaaaagaagcaaataaacgtgtgctcccagttggattggaaacgctccctggctatccatctttggtatttgcttccaccaacagcctccatttctagggcgctcagcatgtatgaagaagcatttcagaatacctctgacagtgacagatatgcctgctccccacttccttcgtatctggagggttctggctgtgtgatagcggaggagcaaaactcacagacaccacttcgagatgtctgctttcaccttctaaaactctacagtgacagacattatgatctcaaccagctgctggagcctcgaagcataacagcagatcctttggactaccgcctaagctggcacttgtgggaagtgctgagggctcttaactacacccatcttctcagcgcagtgttgaaggtgtgctacaanggccagttaacggctggccagcttggaaagtgaggggctctgggaagtgggccatctttgtcctcctgcacattgacaactcaggcatacgtgagaaggctgttcgagagctgcttacccggcactgccagctgttggagacccctgaatcttgggctaaagagactttccttacccagaagctccgtgtacctgccaaatggatccacgaggccaaagctgtgcgagcacacatggaatctgacaagcacttagaggccctttgcttatttagggctgagcactggaaaccgctgccacaagctcatcatccgacacttagctttctggtggattgctcaggtaatgacctggnagcagttacacatcaaagtgacttcactgggcagtcgggatagagcagattcagtgttaccgg

SEQ ID NO: 436789 - DNA, 1789 bp, Homo Sapiens
agttcttaggtttttttgattgaaccttctgtgcgggagttgtctatatattctcctggggggggctgggtgtttttttcagccctaactgactttgggaacttccccacaaggcgcaccccaaagtccccataatttttgtgggggaggcttttcccccaccaggaccactggtccaccattgttgaccccaaggggtttccctggcacaataagtaggtagccaaaaggttatgggggttccatgggaactcttaaaggggcagggaacaaaaaaacagcccctggaagatcaatccccttccgtgacaggcattcacttttggccctaagtgtgtcagaaagatcccattttgtttcttaactcaggccaaccctcctttgcctccaaaattcagtgttaactaaccaattacttaagagacggatccctcttccttctgtggatagttcatctgttaaggatccattatcacctgtctcactcctcctaaggagtcctagtataaaagggccagggtaggagtagggaagctggttggcatggagggtcacaagatccagaatggctagggatggaaaaagaataccctggttctttgggggattctgccaaagggagctttattgaccatttttttaaaggaaaaacactgaatgatcttgaggatggtaaactgtctcttcttctgggttccagaagcccttatgctacgttcagtattaagaaaagccctgaacaagtggaggatgctgcttctggcagcagggagggagggtagatgccacagccaacccagagaatggcaaacagtgccaatccaaacaaggcagggaaccctctgtgtggtgtgaatgggcatgtgactgtgatgcaaagtgcttggggctcacaggctcccaaacagccagttctcgcagataggactgggtaaggctgcgcagttcgtccatggcatagtcctcaggcatgggaagccggccaatgtggggagccaagaggcgcaaagggactcgctgagggtctggtgttgagtcggaggttctatcaggaggatgatgcagactcagcaccacgcgcagcaggttggctacacgtttggccatgtctgactgagccaggcgatctttagcactgtaacactgaatctgctctatccgactgcacagtgaagtcactttgatgtgtaactgctccaggtcattacctgagcaatccacctgctgtatatggcggagcatttcaatgactctaatatagtccaggtaaacaagcccagatgtttcccaatcctgaattaggctgctgcgctctggaggtgccaggtcttccaagaaccccttcaggtagtcatagttctcattaatgatggcatctgaagctaagtgtcggatgatgagcttgtggcagcggttccagtgctcagccttaaataagcaaagggcctctaagtgcttgtcagattccatgtgtgctcgcacagctttggcctcgtggatccatttggcaggtacacggagcttctgggtaaggaaagtctctttagcccaagattcaggggtctccaacagctggcagtgccgggtaagcagctctcgaacagccttctcacgtatgcctgagttgtcaatgtgcaggaggacaaagatggcccactcccagagcccctcactttcaagctggccagcgtaactggcctgtagcacaccttcacactgcgctgagagatgggtgtagttaagagccctcagcacttcccacaagtgccagatcccgggaattccggac

SEQ ID NO: 436790 - DNA, 893 bp, Homo Sapiens
  misc_feature (146)..(146): n is a, c, g, or t
  misc_feature (801)..(801): n is a, c, g, or t
acttgggcagaggagtaagaacaagtaggcttgttcttctactttgcttcagaattcagttaatgccaaaagcgaagatcaagcccatgttgatgtctcgttgctcacctgcatttccagagagtgtgacactcatgcagtccctngagaaaaataaaatcagggacatacttctccttttagccttttaaaaattcaaaaacgtttagtccaagggaactttttatgctatcaggaaaggtttttgctgtttttgattctgattatcacagccaagtactttgttttatttctccctaattaataactacattccatgaggcctcttccaaccaaagaggccttttcttccaggagagtcccgcagaagatgctggtatgatgggcaccattggttaagtaaactacatgcaggaagaagtccttggggccagtctgccagctgagtcctggttttggatgaagagttaatgagatattgggccaggctcaatgctgtagttttaatgctaagaggttacgtttacttcacagagtacacctcttagtaacctctgacttaggcagctgcttaaagcaaattgcaaaactggcttgatttggaatgtttttattagaggaaaaaagaaagccatattatctggaaaaaaattcattttaaataccatcattcaacaaattatgttcaaaaagtggtcagaacttaagcaagaaaagtaaagaaagaatgcagaattgtgggagcaatgcttttaagaaaatatttctaacctggaacactttgtacttccttgaaagtcncaaacaaaaattaatggatggaagctttttcccattcccccttttaggggttttcaaatcccctaagctcaaaagctttccctgggaaaccc

SEQ ID NO: 436791 - DNA, 1220 bp, Homo Sapiens
  misc_feature (577)..(587): n is a, c, g, or t
  misc_feature (1135)..(1171): n is a, c, g, or t
ggttgtacagaatgcttcagcagtatgtgtattttgaggtagacaggtaatatttattcatacacagctactcatagacccttatacagtgactctagaaaatgatttggatgaatagcaagcttaggtaactgagtaactcaaaccgtcctgggagttgatgggcttaaagaaagagatgaattttgaccaattcctaacaaagaacttgcttttgttttaaaaggccttacactgacaatcactcagatggaattaatatgcatgtttttctcatccctaagataaggtctcttgagctgctttttatgctaaaggaagcagaaggttaccgcgaaattccaagagaacaaatctcccaggttgttggcttcttggaaggcctgaatgttggcccaggaccacctgggctcccaaggagtggagggaggagggattcagttccacaggaaataaatgggaacagcccggtggagaagacaatgacaactgcaggacaacacctcaaccactccagaaaacagcccttgctcctccttctggccttttcatatttccaagttactgttttaaaggnnnnnnnnnnntgtgtgtgtggctgtttattctctaatgtgaccaaaacatgaccatccgggaggagaggggctaacggtgcaaccaactgaggctgaaacacagattcagctgaaatgcagcttctgcagagcgggggccggcttccctcctagcccttcagctgctcaccctgtccctgcagctctgaaaaacgcccttccagtaagcggccaaggagcacacgagctcctcccaccagcaaaggggaaggggaggccttggacagacggggcagtgagtgtgtctgggcatgagcccgaagccaccaccagcaaatcctccccacggatgccaggagagctctgatcctaaccaccaccacctctcccttcagcaaaatcaaaacagggaaagaaaacataggaaaccaaacggcggcactcaacaatttgggggaacaagtaatttttaaaagtaagagttgttccgtaaaccagcactgagctggtcacacggcctctggtctacctgctaagccgctctcgacgaattcgagctcggccgatttggcctgatnnnnnnnnnnnnnnnnnnnnnnnnnnnnnnnnnnnnncgccgccaccgcgatgaaccccggtcgcccatagtgagtctatacatcc

SEQ ID NO: 436792 - DNA, 835 bp, Homo Sapiens
  misc_feature (211)..(330): n is a, c, g, or t
  misc_feature (379)..(411): n is a, c, g, or t
  misc_feature (463)..(466): n is a, c, g, or t
tgagagcataggtcgggggtgctgtgatggtggatcatgaagtatagggcggggtaggttaactggtgggagagtagggtgtctgggtttacggacatatgccgtgggctgtgtccttagatattttcatgtggggaggcaggtttttggctgcggggagggggtgtagcgtatggaagtgggtatcgcaagtgggcgtgggtatgaggcnnnnnnnnnnnnnnnnnnnnnnnnnnnnnnnnnnnnnnnnnnnnnnnnnnnnnnnnnnnnnnnnnnnnnnnnnnnnnnnnnnnnnnnnnnnnnnnnnnnnnnnnnnnnnnnnnnnnnnnncggtaacggaggtttgaattgggggaaggaggtggatgcagtataggtnnnnnnnnnnnnnnnnnnnnnnnnnnnnnnnnntggtatatgggtgtgatatggttatttggatgtgtattgttgtgtttgttgnnnnaaggaacctggaaaagctggttgtctttatttacaagatatcaaaaatataaaaactgtacaaaatgcaacaaaggcaaaaactggcagtgacttggtctaaatcttttagtttcccaaagcaaggctcagtactggaggtaagcaactgaaatgtctgtctgacttcaagtgtactaggttgtatgtagctgttttagctgaagtagaacatggaagctaaatttcttcacctggtttatcgagtgtttgggtgcactcaaaactcaacaggtatataaattcagatgtcagtgggtggctgtacttcctctagatctaagaaaggaaccctaactagttacatacattccattaatcatgggccaag

SEQ ID NO: 436793 - DNA, 427 bp, Homo Sapiens
  misc_feature (2)..(2): n is a, c, g, or t
  misc_feature (72)..(72): n is a, c, g, or t
  misc_feature (76)..(76): n is a, c, g, or t
  misc_feature (162)..(162): n is a, c, g, or t
  misc_feature (284)..(284): n is a, c, g, or t
  misc_feature (342)..(342): n is a, c, g, or t
tnccaggtattctctttcttcctgcttagtctccgaattattagaatctatgttgaagacattttcttctanaagnttctggagggtgtcacgggattttatagggattttgaaactgatcttctgtcttctagatcccaagggttccttaattatcttgtntggagttataatcctgagaaaattgatttctcttccatttctctaagacacatttttcagaattgtctctaaatttactgtttcttcctttcttgaggttctttcatcttctctctctgaancaagtaaatgagaccatttattttgcacttgcctgccttcggctttaggtttcacatnactggcaatcttaggactactaaggcttttaattccatggtcaagcttgctcccagcatttgtcaatttgatatctttaggttta

SEQ ID NO: 436794 - DNA, 584 bp, Homo Sapiens
  misc_feature (42)..(42): n is a, c, g, or t
  misc_feature (272)..(272): n is a, c, g, or t
ccttaagaatcatagtaaaccttagcagtagttgggcactgncatgaaaaatgaagtttacatagtttatattatgtacataaactagtgatttacattgatttacacatgattggtgcctaatttattaatcagtcacgcaggcatgtaaatgtgctcaaaagaaatcaaggtttaaaataagttttccataatattcataaacattttcgctggtgtaaatgttaaacctaaacccaacgttaacaccagacttccttgccaagagaaangtgagatgtacatgctgggtgaaaacaaattctttcctaaattttggttggcgacatttgatcagcatagctacatgcatatgagattagtttacttcttttctgctagtatgcacataaatgtaaactccattttgcatttagtgagatgtttacagatattatgccaaccatgatggaaaatttacatcactgaggcaaatgcagtctttggagaagaaatattctaaacatttaagcaaggaggaggcttcctaaactgcatttttgtcttatctcaccatttttgtggtgtgtttcacatactggcgc

SEQ ID NO: 436795 - DNA, 512 bp, Homo Sapiens
  misc_feature (465)..(465): n is a, c, g, or t
  misc_feature (477)..(477): n is a, c, g, or t
ttttttttccttaagaatcatagtaaaccttagcagtagttgggcactgcatgaaaaatgaagtttacatagtttatattatgtacataaactagtgatttacattgatttacacatgattggtgcctaatttattaatcagcacgcagcatgtaaatgtgctcaaaagaaatcaaggtttaaaataagttttccataatattcataaacattttcgctggtgtaaatgttaaacctaaacccaacgttaacaccagcttccttgccaagagaaaagtgaggatgtacatggctggggtggaaaacaaattctttcctaaattttgggttgggcgacatttggaacagcatagctaccatggcaaatgaggaataggttttacttcttttctggctaggtatggcaccttaaatgttaaactccctttttggctttagtggggtgttttacgggttttttggccnacctggtggggnattttacctccccggggcaattgcgtcttggggga

SEQ ID NO: 436796 - DNA, 853 bp, Homo Sapiens
  misc_feature (120)..(180): n is a, c, g, or t
  misc_feature (184)..(278): n is a, c, g, or t
  misc_feature (825)..(825): n is a, c, g, or t
aggaaaagggtttttcccaaaaagtcccacaggggcggtttttcccccccgccgggttttataaaagagggccccggcccatttttaataaacgccccccttaggggcccctttttttcnnnnnnnnnnnnnnnnnnnnnnnnnnnnnnnnnnnnnnnnnnnnnnnnnnnnnnnnnnnnntttnnnnnnnnnnnnnnnnnnnnnnnnnnnnnnnnnnnnnnnnnnnnnnnnnnnnnnnnnnnnnnnnnnnnnnnnnnnnnnnnnnnnnnnnnnnnnnntactgtgcgtattaataaatattctttattttaaattttgcacattgcgctttaacattacatccaaacattttgcaagtggatgtctactttgtaaaaccatatattcagctcattgtcatttctgtacagaattataagtacaacattactttttgccactaagttgctttagtaagtctcacaggaagagaaacatttaatgaaaagagatggcttaaatcatatggcaggcctgcgcagccacgcaactaaagacacaagcctgaagaaagaactaatgaggatacctccaccgtctcccaaaacaagaaagaatcacattgatttaagataaaattttgccataagtcactaaattaagagtttttcgaaagagaaggcgcagtagtcatcgtgagtgtttcattgaaagacagagctattttatttatttaatttgctccagccgttgtcaaccagccactacaaatgggcctcttgtgatcatttaaccggcagtatttattaaatttctccttcagatgctgatcggtattgttcttcntattgctgatcccggagaattccggacc

SEQ ID NO: 436797 - DNA, 677 bp, Homo Sapiens
  misc_feature (518)..(543): n is a, c, g, or t
atgacttttgggtgggggcatccatgtgataaaaaaaggaaaccaaatctataaaagagataagggtctacctaaaaagtttaaaaattttaaagggagatatatcatcaataaagtcaagatgaaaacgtcataacacattagagctacaaatgattaatatgcactatgtagtaagaatttctacaaatttataatgaaaaacatcaatagatacatgagcaaagggtaagaacaggcaaatcagagaaaaatccaaacagaaacaaggacagcaacaacaacaaacctctttgaactcagacaaaaggcaattaaactaacaagcaatacaatgcaatttttagcctttcatattttcaagcattaaagagtgctggagaggacgctggaacgggcgctttcattttggatagtaatcttgtaatatttctgaaacatatgcctacatagtatttctgggaatccaacctatataaataaaagcaccagtatgtattacagcagtgttattttgnnnnnnnnnnnnnnnnnnnnnnnnnngacgatcaataacgaaatggttgaatgcctttttggtacatcaacaagtactgtgtattcagctgttagagtaagggagggagggggagagcaagagtgcaagagagtaagagtgagggccagagcgagccgct

SEQ ID NO: 436798 - DNA, 847 bp, Homo Sapiens
  misc_feature (438)..(438): n is a, c, g, or t
  misc_feature (526)..(526): n is a, c, g, or t
tttcacgcagcacggacgcactttatttatatgtgtacatatgtatacggaggctgtacagcgcggggccgatgacccccttggctatggtcccgggggtgcgggactggacactccttttttggtcaggcctgctgggggcacagcttcagcagggcaccgggaggtcagccccacttgaggcttggtgcctgagcccaagagggatgcgggtgggactggggtcactgcactgctgggtgcactgcacttcgctggggctagggagggtgtctggggctccggggagagctttggggaggcgggcttggagcgaggaccgctcagcgtggtgcgctcctccaccacctccaacacccagcgctccctgccccggggggcctcgggcacggaaggcgccaggggtgcgggttcctgcaaccccttggagtccgcgcnccagaggctgaggcaccacagccttagccccgggccgcgcaggctctacgacaatgggtaccaggggtgtgcccgcctcgccagtgcntgctgcgccggcctgtctcgtgttcctgcaccttgctcagcgccgccttggccacagccctggccatcccgccagtgccatcctccgtctgcacgctctgatgccgcgtgcagccgacgtcccgctccagggtccgggccacgggggttcttcgcgcggggtggggtgcacgcctcagcgcccccgggggattcctttttcttggctcgaaacttggggggctggatggcaccttttgtgcagtaacgtgtttcgcgccccagatcttaaagaagacctccggttgtgacacagccggtaggccggggacactgcccgtgc

SEQ ID NO: 436799 - DNA, 1201 bp, Homo Sapiens
  misc_feature (38)..(38): n is a, c, g, or t
  misc_feature (73)..(73): n is a, c, g, or t
  misc_feature (83)..(83): n is a, c, g, or t
  misc_feature (120)..(120): n is a, c, g, or t
gcccctggtttgccctacagtagtaataggaaaagaanccatgtagctgctgttttcccctgagggaaacccntattattttnttttaagtatatacatgtattttattttttagtgttnttctttttttaaacgcagaaggttaactctggcaatctaaatgcacctaaggatatgagaaagtgctaagccaattgatttctgaatagcattgagtgggtcagcatgaaaactcgcttattcactttagcacgcgcctcacagtatatgtactgtactatactgaaaaattttataactacaattttaaataataaaaaataaaactcagagcaaccgcaaagataatgtacaactatgttatgcatagcacattgcctgttctaaggggaagcatgtgagcatctcagtttatacaaaaagcaggacgtaactatatagttctcagtgcatcctgatgaaggcatttttgccttcagcttttttgaaaatttattataagctagatgctaatcagaaaatattttgtattttttaaaatttctttcatacatggtaaagacttattttattatttccccaaatagtggtttttaagcatcatacaaagttaaatttcaatagcatacagatactttatgatttcttgtatgaacaatgtaagcgaaatttgttccaaacctatggttatactcatttattttataccactaacatactttataaacgaaaatgctagcatcaccatacacagtctgaagcatagactatctacagacaaaatttgcaacaaatcttgatgcactgttacagttcaagtcctcaggacaacaaaagtgacttaagcatgacctcaagtaacaatgttaatgccatttacaaaggaaaaaactgatacaaaacattcaaaacctgaacatcacttggcatgtaagggaaaaaaaattaaattagctgaaaggttcataaacacaaggtcttatttacattacaccaagctcaggtgttagccttgaacgtaactttcaaaataccttcaaatatatccaactcagatcacttttgctgatttgctgcagtacaaatcatgtgcaacgtcttttttccttaagacaaaacaattcttcaaacaatactgcaagtacatcactaaacaccatgagctctatctgaagggatttctttaggaagaacagatttt

SEQ ID NO: 436800 - DNA, 335 bp, Homo Sapiens
  misc_feature (210)..(210): n is a, c, g, or t
aaacgtgtcgtcattgccataagtcctggcgatagcgttttgcacaacttcctctggcgaatcatccgcaaatcaccgttgtagatggcggtgatgagcgtgccgattccgtgctggcaggtctgaaagccgctggcgacgcgcagtggggtattggtgcatgacgccgctcgtccttgtttgcatcaggatgacctcgcgcgattgttnggcgttgagcgaaaccagccgcacggggggggatcctcgccgcaccagtgcgcgatactatgaaacgtgccgaaccgggaaaaatgccattgctcataccgttgatcgaaacggcttatggcacg

SEQ ID NO: 436801 - DNA, 932 bp, Homo Sapiens
actttgccatcatcctttatttaaggtacatggtagaataacagcacattgcatattgagcgagcataaaggaaagtaatgatggatacttaataaagcatgtttttgtaggagaggaaaaaggatgtaattccctctgcacagagcaaaggatgtgtacctatatttcggagtaagaatctaagaaaaggggaatatgccaacactatgaaatataaggttagcaccagcaatatgtgagtttgccagtatgtctgtttcatgtaaatttagggcaataaaagtgaatatatgtggcttttaaactgccaagtcccttctttgtatgcacatgtgtatgatgataaaaaggccacttaaaactcagatgttttttaaaggtagcaaggtgaatgctcaaaattagaaatgctactggacatgtgactctaaatatgaattactcaattatagtaaagaaaagactttctgcaggaagtccttattacaaaggctccaaatcttggcttcctgtttattttccctaaagaccaaagggaattttcaaacatgtaatgtcaataacctgttgcttcttgtaataaatggctgccttggggggttgctttattatttttactggctcactgatgctcttggagcgaatgaccccccccttcgaaggtcgaaaaactagatggctttagacccagtgcttctcacatttcttaaaccttgggatcctatccggaactgccttgaagagttttttccataatacatattattgggccaggtttccaaaggtctttaattggatacggccttatggagggtaccctcacccatcgtaaagagactactgtccttaggaaggagcgattcttcagagacacagtaagtgggactctggtcgctcccttaaccaaaaaatggtactttttttccacatt

SEQ ID NO: 436802 - DNA, 1094 bp, Homo Sapiens
  misc_feature (293)..(293): n is a, c, g, or t
  misc_feature (457)..(495): n is a, c, g, or t
  misc_feature (544)..(651): n is a, c, g, or t
ggtcaggtgattgaccggtggctggtgataagcgcgagtactttagtcagactgggagtattcaatgtcccggggaggatcgtgagggggtagatcgtggccgcggggtgcataatgtttagagaagtgccgtacgtagttcccgccagtcggagttgggggccctggtcaacgaggttagcgccgtcggttttctcatcaaccgcgagtaggggggtttgtcgccacccatttttcctatgagggtcgataggcccgagagggttgaggatttttccaaggttgcgcagccncgaagcgcagagccctgacccagtagatgccagcatttcctgtgaacagaaggatgctctagtcccgagtctttgctgctgtggggagtctggattccccagcgctttgcacaactttgggcttggcagctttccagggtgcgccctacgctcactcaccatgnnnnnnnnnnnnnnnnnnnnnnnnnnnnnnnnnnnnnnnctgagacacctgccttatgcagggctgtgaaaggcactcaaaatggccnnnnnnnnnnnnnnnnnnnnnnnnnnnnnnnnnnnnnnnnnnnnnnnnnnnnnnnnnnnnnnnnnnnnnnnnnnnnnnnnnnnnnnnnnnnnnnnnnnnnnnnnnnnntggcttccgtgaaccattagccctgagctgggaatgctgccgggcatcactcttggggataggatgacctgggggaggttctttcagcactctggatgtgtccccactgcctgggcctggtttctgatgagggcagctactaactttatcagggaccttctgtatgtgacaagacgcttttcttttgttctcccaattttgtctttggctttcagcatttttactatggtgagcctgcctgttttcttaatatcatgtttttggtttaactggttttccaatttccaggccaacagacatgatttgtgtgaataaagctggaatagatggccccatccaacatctctctctccaagatgaggtctagaggagggaaatggtgtctccacgtttgctcagcacactgaggcctcgtgccgaattcgccacccaggcctcgctac

SEQ ID NO: 436803 - DNA, 614 bp, Homo Sapiens
  misc_feature (19)..(19): n is a, c, g, or t
ccttctgtaagtgaacaanacgcttttcttttgttctcccaaatttgtctttggctttcagcatttttactatggtgaagcctgcctgttttcttaatatcatgtttttggtttaactggttttccaatttccaggccaacagacatgatttgtgtgaataaagctggaatagatggccccatccaacatctctctctccaagatgaggtctagaggagggaaatggtgtctccacgtttgctcagcacactgaggactccaaactctgtggggctgagaccatctccctccctccagccctctcctggttcctccaccccaacccaccgatagcattcagataccagacatggcctccccagcccagccacacagacaggctggccacccgcaggaacagaggcccactaagctgggctgtgttacggatgagaccaggggaggccacacagcagggaggattcagatagggatggagaaagccagcaggactccacagggggtggggcctagaggcacaagcctccagggcaggcaaggaggtggttaaggacaaggccttctgagcagcagcagccacatcagaaaggctcgagcgcctgtaatgccagca

SEQ ID NO: 436804 - DNA, 383 bp, Homo Sapiens
  misc_feature (12)..(12): n is a, c, g, or t
  misc_feature (50)..(99): n is a, c, g, or t
  misc_feature (215)..(301): n is a, c, g, or t
acggtccaccancacatttcccaggagcttgaagttctcaggatccacannnnnnnnnnnnnnnnnnnnnnnnnnnnnnnnnnnnnnnnnnnnnnnnnnatcatccaggtgctttatggcatctcccaaggaagtcagcaccttcttgccatgtgccttgactttggggttgcccatgatggcagaggcagaggacaggttgccaaagctgtcannnnnnnnnnnnnnnnnnnnnnnnnnnnnnnnnnnnnnnnnnnnnnnnnnnnnnnnnnnnnnnnnnnnnnnnnnnnnnnnnnnnnnncttgtgatagtagccttgtcctcctctgtgaaatgacccatggcgtctggactaggagcttattgataacctcagacgttcc

SEQ ID NO: 436805 - DNA, 458 bp, Homo Sapiens
  misc_feature (5)..(5): n is a, c, g, or t
  misc_feature (405)..(405): n is a, c, g, or t
  misc_feature (422)..(422): n is a, c, g, or t
  misc_feature (425)..(425): n is a, c, g, or t
  misc_feature (458)..(458): n is a, c, g, or t
gatcncttagcagaatagatttattatttgtattgcttgcagaataaagcctatccttgaaagctctgcatcatgggcagtgagctcagtggtatctggaggacagggcactggccactccagtcaccatcttctgccaggaagcctgcacctcaggggtgaattctttgccgaaatggattgccaaaacggtcaccagcacatttcccaggagcttgaagttctcaggatccacatgcagcttgtcacagtgcagttcactcagctgggcaaaggtgcccttgagatcatccaggtgctttatggcatctcccaaggaagtcagcaccttcttgccatgtgccttgactttggggttgccatgatggcagaggcagaggacaggttgccaaagctgtcaaagancctctgggtccatgggnagncaccaggggcttccagggttctcctccagcatn

SEQ ID NO: 436806 - DNA, 425 bp, Homo Sapiens
  misc_feature (83)..(169): n is a, c, g, or t
  misc_feature (230)..(230): n is a, c, g, or t
  misc_feature (242)..(242): n is a, c, g, or t
  misc_feature (286)..(335): n is a, c, g, or t
  misc_feature (341)..(341): n is a, c, g, or t
  misc_feature (377)..(377): n is a, c, g, or t
ggaacgtctgacgttatcaataagctcctagtccagacggcatgggtcatttcacagaggaggacaaggctactatcacaagnnnnnnnnnnnnnnnnnnnnnnnnnnnnnnnnnnnnnnnnnnnnnnnnnnnnnnnnnnnnnnnnnnnnnnnnnnnnnnnnnnnnnnntgacagctttggcaacctgtcctctgcctctgccatcatgggcaaccccaaagtcaaggcnacatggcaaganggtgctgacttccttgggagatgccataaagcacctggatgatnnnnnnnnnnnnnnnnnnnnnnnnnnnnnnnnnnnnnnnnnnnnnnnnnntgtggntcctgagaacttcaagctcctgggcacatgtgctgngtgaccgttttggcaatccatttcggcaacgcaattcacccctgcagg

SEQ ID NO: 436807 - DNA, 592 bp, Homo Sapiens
ttttttttgtgatctcttagcagaatagatttattatttgattgcttgcagaataaagcctatccttgaaagctctgcatcatgggcagtgagctcagtggtatctggaggacagggcactggccactccagtcaccatcttctgccaggaagcctgcacctcaggggtgaattctttgccgaaatggattgccaaaacggtcaccagcacatttcccaggagcttgaagttctcaggatccacatgcagcttgtcacagtgcagttcactcagctgggcaaaggtgcccttgagatcatccaggtgctttatggcatctcccaaggaagtcagcaccttcttgccatgtgccttgactttggggttgcccatgatggcagaggcagaggacaggttgccaaagctgtcaaagaacctctgggtccatgggtagacaaccaggagccttcccagggtttctcctccagcatcttccacattcaccttgccccacaggcttgtgatagtagccttgtcctcctctgtgaaatgacccatggcgtctggactaggagcttattgataacctcagacgttccaaaaagcgagtgt

SEQ ID NO: 436808 - DNA, 438 bp, Homo Sapiens
  misc_feature (167)..(167): n is a, c, g, or t
  misc_feature (169)..(169): n is a, c, g, or t
  misc_feature (172)..(172): n is a, c, g, or t
  misc_feature (178)..(178): n is a, c, g, or t
  misc_feature (328)..(328): n is a, c, g, or t
caggtttcagtgcaggtttatttcagttttatattttattccaggcaagtgcttattacatggatagtattcatgtctcggtaactaaagtcttggagcatgaacagccactagaatacagttcaatagtaaaaatacagtatgtacaaaattagggtttttgtagngnggngggtgngccacacagcagatgtatccaaacacataaaaatctctacagtctggggtcgctacagtttatatttcaggaaacagagacacagtggccgagtcctcactgtaaacaagggccacctctgggggttgggggtgggaccctgggatgggngggagaagcagctgtttctggagagagaaggggtcatgggtggccccccagttaccctccaggcattccctgccttctttggcccccaaggaaccaacctccccctctcc

SEQ ID NO: 436809 - DNA, 975 bp, Homo Sapiens
tttagcagtttaatttggtcctgagaatgttgcagtctttattaccccttttgcattaatccacttttctaaccaccttttaagctttaatttttaacactatacaccaagtctttgaaatcagtgatctgttatttaactctaaagcatttgacacttcttgccttaacagttttaaaaaccacacacaaaaaaactctgtaagtaatacagtaggccaaaagtttcatcctatctatcttgcagtttacctatctgatctgatctctgtaattatagttctgtcatttaaaatatactatttaaatctaatttttacatttcaaaaattatcttcagtagtaactaagtatattttctgtggattctgagaatgttatttttcagaatgtgagaatacatatgtacatttataatcctgtgactttaaagtctgttttcagatacagtatgtaaatacttgtaaaaaaatttgtataattttgtgataatgtagtttcccaaaaaaattatttagaaggcattatgttattagtaaatgagagcactgtatagaactgttcctattttctgcacttgccattccagctgcctccactgtccatacccacctcattcatcctgtcacagaaggcaggaaaactgggaactttaccaaagtagcactcagcctgagaggcctgtataatcatgcttttcacaacttaaagttcactttagaaattaaacaagcagaatttgacatattttaagcagccctcagttacctttggggcattgctgttttcactggtggattatggaccgttatataatcttctgtgaaaaggtgaaggcagtacgcattttcaagaatcaatgaccactgcttccactggatttctccacttccacaagagaaccgtgtaaccccttaagaggcagtaccctggactaacctgatgtgtattcactagcgactcaaaaggggcgcag

SEQ ID NO: 436810 - DNA, 1809 bp, Homo Sapiens
ggattacatgaagtagaacttttatttggaaagttgaatttcatgtataatgaaaatattttcaaaccatacatagtcataagcataatacaaacaccacctacaatacaaacacgttttataaagttctactatgaatattaatccaagccaaaagaaaaaggtaatcacgtgaacctgttctacatacctttcatctcttttgatgacgtaatcgaacaatttaaggtacaaaacaaagaaagctttggctgaaccctacttatttcactataggaacactaggatatatactaccacagataacaaacccaatcccattataattaatttaacattgttacatggatcatatcttaatggtatgtaaacatatttagggtttcaattggcaattatgttttaaatgcttagaaaagcacaccaacatttctcattattgtcccctctttagcttatctcttccatgagtataaaataggaaaaaaatattatttgagacttccagcataattccattgtgctctacatttttacaaacacgggtgcatctaaaatatcgatgcctttataccgatagaataaaaccaccaaattcacatttttcttataaatacgcatgcaaaattagtggaaaacacttttgtatagcaaagaccctgcttaattttcttctgattaataattttcaatggcatgtacaagtcatactgctcactaaacagtagatttattttatgtagatttgtttttctataaaaatatatttatgtgttcacaggaaaaaagttgagttggtatgtgggggtgactttcagatacataattagttaaaggtttgcttatgaagttagaaggcatcttagcttttatcattttcaaatttttcttcataaaaaagaacaccctgtgacaaagataaggtaactgagattattattagcactttagagttgagagagtttgaaataaaaaggttaagcaacctgcctaatgtttatgtacaaaatcagtgctggagccaggaagagaatttggattttcccaacccttggacagttctctaggaactcatgcccaccaaccattcttgagactatatacaatcaattacattaaaatgatattgacagtagactagagaaagttagggtaaagccagtaacgaacaaagttttaaatattggctgttgacttatcacgagtgggcaatttgcaaacaagcatcaccaatttataattaccattgcacgccgtggactccgttactcattttcctgagggaaaatcatgaaatccattttaaccgacttagatttattttatttgaaggttattctgattcataaaatatatgaatcatataatttcacaattaaaatcagggtcaatcatagatctattccttttgtgctgaagagtcccagtagttgccaaatagtattgaggaaaggtaacaatgatagcaaagcatagtcatcattcaatctcatttttcatatccataagttttagccactcagaagatctgagtaggagcaatcttgattttcaggcagctaaaggggaacacgaagtgtaggaagagctaatatttcagtatttgttttagtttctgacttaaaggttattaaattcctaaatatttttgacattatttctaacctgcatgactctctttaaaaaccacgttttggctgatgacaaagaagaggagacagaataacaccagaactaagctcgaacgtcacaaccttgccctcctcacaagctgtgcaccacagttttctcccagataaatcaaaacat

SEQ ID NO: 436811 - DNA, 3297 bp, Homo Sapiens
  misc_feature (90)..(313): n is a, c, g, or t
  misc_feature (470)..(563): n is a, c, g, or t
tctccttgcgtgcccgctccccctctttcttctctctcgccgtcctccttctcctttgtctctcgccctcgccttcccgtttcgtttctnnnnnnnnnnnnnnnnnnnnnnnnnnnnnnnnnnnnnnnnnnnnnnnnnnnnnnnnnnnnnnnnnnnnnnnnnnnnnnnnnnnnnnnnnnnnnnnnnnnnnnnnnnnnnnnnnnnnnnnnnnnnnnnnnnnnnnnnnnnnnnnnnnnnnnnnnnnnnnnnnnnnnnnnnnnnnnnnnnnnnnnnnnnnnnnnnnnnnnnnnnnnnnnnnnnnnnnnnnnnnnnntcctcttctcgcttcgtgacgttgtttttcggtctctcttttgttttgtgccccgtccgtcgtctacctccccctctgtcgcgggcgtccgctgtcggctgcatctcctcgcgggtcgcggcgtcccggggccgcccccctctttctttgttcttcnnnnnnnnnnnnnnnnnnnnnnnnnnnnnnnnnnnnnnnnnnnnnnnnnnnnnnnnnnnnnnnnnnnnnnnnnnnnnnnnnnnnnnnnnnnnnnactggttcaatggtccattctgtttattcagaacggtaacataaatacaccttaaatattaacattttttatatacagaaatgaccccactccccaaaaagtttgaaaaaatattgtctcctcctcctttataaaaccctagatgacctatgaaggcacagccaagcccttgatgcatcttcctcagcacaatttggccaacgctggagggaaggtcaaagaggtggaaggaaaatgttatgctgaaaatccctttccaacaagggtgccaagcgccggtcttgaacgaagtaccctgcctaagcatcatttcctaaagcgcttgaagagcgggtgtacatgtttgctgggcgccttgctccgcgatgagtggtactccatgtacacagtgtcgtcggccccagacatagaactcatggtgccaaagcgccgagatgcctggctggatctggagccaaattccccagccaccacctcctcctcggcatccaggtcagtggctgccaggactttctgtaagagctgctgttgctcttcttttgtcgaaaacgccaagtcttcctcctccatgccagcgagtttcgtgatcaccttgaagctataaccttgatctaccaagaatctctgccgcttggttgagtaagccatttcctgtgtgtcctgggataccagtgagtagaaaaaggcattgtactcttctgcaaccatcccttttttagctcgaagcacccgccctagcctttgggcttcctgacgcctggagccaccatgggatgagatctgaatgaggacatttgcttccggcagatcaaacgaagtgtcacctaccttggatatgaagatggtgttaattttggggttgtgcttgaaattctggagaatttgcatcctttccccctgagacgtaggtccgtagatatagggtttgttcagtcgaatggcatattcctttagggcaaacacattgtcagcaaagacaataatcttgtcattcctcctttcatgaaacttgatcagaaactggcaagctctaaatttgttggggttcatggtgtacagcaagattcgtttcttggttttgattgccacatattcccggtaaaattcaggagacatagggcaccagacctcagcacactggactttggcgatgtagccattattctgcagctccatccagttggcttcgtagagcttaggcccaatcagaaaatttaaatccacaattttgtcatcttcgcggacgagggtcgcagtcaaacccagcttacagtgggcctgcacgatggtgagcacccttcggaacatcttggctggtatggtgtgcacttcatccaggatcatgaggccccactcctgggtcttgagccactccatgactcgctcggcctcccaggaccttttggtggtgtggcccagcatggagtaggtgctaatggcaacggagcagccgatgggcttgtccttggcatcggaggtgaaccggcagatctggctgtcgtcaatggtggaccacatcttgaactgggctttccactgctccacagaaacagctgagttgcccagcaccagacagcgttttctgacagtgcatgcagcagtcacaccaaccagggactttccagcaccgcagggaagaacaatgacccccgaacgtgcacgcccgtttccaaacatctttcgcaagctcttctcctgatagggtctgaggacagctgtgggctttaggtcaatgttgatatcagggttgacagaatcattccggaagtcatattctgccaacagagggtactccaggtggatgcaacgtttctggagttcctcaatcatttcctgcttgacttcaaaagacactgtctgtgtctcttcttcttcttcttcatccttgtccatttgctcatagaagtcaaacaggtccatggggatgtcagatttaccctgtggatctgtcactcgggaagtggagggcccaccactgctttcagcagtcttagaaatggcagatttgcttgtgaaagtctctgtgatgagctcagtggcctccccttcagagtttcttaagcggcattctcggatcacggggtcctggagaagatgctggattacatcagggtggcaactttcaacgaagtatctgttgtgcttcaagaccagcttgacttttccatagctgacagtacacaacttaataaactgcataattccatcagggactccagtcttgctgagcttcctgaggtactcggtgatgtcactggtttgcagcccaacgctgacagctgcatacaaggagtaggcagttagtttgtactcatgcacatgggttggtcggcacactggctctgcaatagccaccaagaagtcttgggcatatttgtaaactggagagaaggcttccaagaagatatggccatcgggagccacccagaggggcctggaggtgtggtcgtccttcagcggcatttgcagcctgtagtccttggctccatattcatccactttggtgcctgactcatccacctgcttccccgccgccgagggaaccgcttcctgagggtcgttccccggggcgtcctcttcatcatcctcttcatcctcatagtgccgcttcctggatttcttcttgtcgcggtccgctcggtctcttttgcccatggcagctacagcagcagagagaagatgaccccgctcccacaggcccgccgcggcatccgctcttgggggactccccgct

SEQ ID NO: 436812 - DNA, 460 bp, Homo Sapiens
  misc_feature (78)..(78): n is a, c, g, or t
acctgtgtgcccccgggaataccagtgaattagaaaaaaggcaattgtaactccttctgcaaaccatccccttttttnagctcgaaagcaccccgcccctaagcctttgggcttccctgaacgccctggagcccaccatgggatgaagatctgaatgaggacatttgcttccggcagatcaaacgaagtgtcacctaccttggatatgaagatggtgttaattttggggttgtgcttgaaattctggagaatttgcatcctttccccctgagacgtaggtccgtagatatagggtttgttcagtcgaatggcatattcctttagggcaaacacattgtcagcaaagacaataatcttgtcattcctcctttcatgaaacttgatcagaaactggcaagctctaaatttgttggggttcatggtgtacagcaagattcgtttcttggttttgattgccacc

SEQ ID NO: 436813 - DNA, 905 bp, Homo Sapiens
aacttttagcagtgtttatttttgttaaaagaaaccaattgaattgaaggtcaagacaccttctgattgcacagattaaacaagaaagtattacttatttcaactttacaaagcatcttattgatttaaaaagatccatactattgataaagttcaccatgaacatatatgtaataaggagactaaaatattcattttacatatctacaacatgtatttcatatttctaatcaaccacaaatcatataggaaaatatttaggtccatgaaaaagtttcaaaacattaaaaaattaaagttttgaaacaaatcacatgtgaaagctcattaaataataacattgacaaataaatagttaatcagctttacttattagctgctgccatgcatttctggcattccattccaagcgagggtcagcatgcagggtataattttatactatgcgaccgtaaagagctacagggcttatttttgaagtgaaatgtcacagggtctttcattctctttcaaaggaagatcactcatggctgctaaactgttcccatgaagagtaccaaaaaagcacctttctgaaatgttactgtgaagattcatgacaacatattttttttaacctgttttgaaggagttttgtttaggagaggggatgggccagtagatggagggtatctgagaagcccttttctgttttaaaatataatgattcactgatgtttatagtatcaacagtcttttaagaacaatgaggaattaaaactacagggatacgttggaaattaaaatgccaaaattgcattcatgggatataccctaacatctctgtaaaaacttggtaaaaggaaaaaaccatttccccaaaaaagggttcctggaaaccttaaacaaccagtttgcttggggtt

SEQ ID NO: 436814 - DNA, 457 bp, Homo Sapiens
aactttgcaacaggtttttatttttgctttatatctattacagtgtttgaaacctaaagaaatacattttctcttcaaatttggatgtgtatataaataacatttgtctggactcagcacactcaatgccatgttttcttcgcctatgtctgctctgaaatcaagctgtgtctgtctacccaggggccctgagaacatggaaaatagagtttattgttattagaaaaataaaagcaaatgaatttgcaaagaaaaaccagtgagaaggattagattcatcttccaagggtccatagctggtaacccaagccattctcgggggatatccagtctcttgagtggctgggactccattacccactttccttctttaataggtcaaaggcaattcccacaaaagctggctaaaaaagccgacacccaactccagagtctgagggttcatgaagatgtggac

SEQ ID NO: 436815 - DNA, 780 bp, Homo Sapiens
ggtgtatcagtgtaacttaattttttattttcatactggcattgtagacacttgagaaagctgtatcttgcaggcttgacttaacttttttccttaaaaatctggaatataatcttacagcatttactggaataaacagtacaaagcattggagtgtaaaactctagatgttttggatttacagcgtttctttgataaatgaattgtataccactagtacagctctagtacagcgttcacaataagctaataatggataagttttcttcactccattaacacaagcagtgttttatttaataatcatcaatgaaataaatgtgcctgaaattgattttaaaaattacagtattagatcataaagtaaaaaccagcagtacatttttagtcacactgaaaatgaaggacttaattttccccacaagtttcagtgtttttagtaattaattctatgcattttataccaatagaaatatatatatataaaaaattaaatgtttaaaaaggagtagcctacgattaatttaaaagattatttacagatgacacatttatggggtcactatttaagtaaatttgctgccctccacagccttctaattttatttatatgttccagcagattattaggatctgcttacttcttaggaaagaatcaatgctggcaacacattgtttcagaaacaccaagtgcaaaggattgattgtatcacaacaggtacaaaactgacagagttttctttttgtttagggccatgtttactaccctgaaatggtgta

SEQ ID NO: 436816 - DNA, 1113 bp, Homo Sapiens
  misc_feature (605)..(666): n is a, c, g, or t
tgcgttcaccgctcgttctttaactatcaacatggcgggggcacggggtgtgtcgccctggtggtttcgtcccgcgctgccgccttgtgcgtgtgtggccccacagtacagcctccttcattttctctccttcttcgcccactgctctggtggaactgcaccgggatatcggggggggatgaatgtcgtcgtccggtgacgaagggtctctcttaggctcatgagctcctattcgcgggccccttggctgtgtttctgttgggggcggggtccacgtgaccaaggtccgggggatgtgctctcgcttgtgatagtgggtgagggggtcttcttccaggccaaaggggggccaattttggagtctgcctgttttgttttgttgccattcgactcacggactgtccattacgtacctattcacacggttcgcccctgtgctaccctctttcctgcctccgcgtccctccggctgggcagagtgggtccccggcccgggaaggttggggtatgggagctcgggtcccatacgccgccgcgctccttgatccgacgacgtagaacgcgggcgaagccagccctgcttactgttttctttcgtttttccnnnnnnnnnnnnnnnnnnnnnnnnnnnnnnnnnnnnnnnnnnnnnnnnnnnnnnnnnnnnnnctcctaccccccccggcccttctccctgcctgcgcgcccttcagtaggtgaaaaccaggttggagatgctggactcgagccagtctcccgagatcatctcgctcacctcgggcgtgcagtagtccgggaactcgaagtgcgagccggagccgggctcgaagttaaaatccaggtcccggtcgagcgccgacgacgaactgaagctgcccagggacatgctctcaaagtttgagctggggttcaggtcgagcaggtcgtcttcgaactcgtcgtcggaggacgaggagcccgaggagaaggacgaggaggagtgggacgaggccgaggaggacgcgtgcgagggcgcgctggacggggcgggcgagtcggcgcgcaggctggcgtcgccgcggtggtcggcgggcgagcggccggcggcgggggacgaggcggcgctgctgcggccgc

SEQ ID NO: 436817 - DNA, 736 bp, Homo Sapiens
ttttttttaaacaaaagagatcttttaattttttcttaaatgctttagtatctcaatgcataaacacactgtttacttttacagctggtccagtgttatttactcttggcaaattgtagacttacaaaacaaggcaaatccctacctattcaccttctcagcaagaatgacttctaactcacacagcacatactgggctccagtaaagggatctgctcatatccatagaactaatgaaagatatatgactaagtatacagcttaaatgaagccaaatgagcttaatacagaaaatatatatgatgatattaatcatatataaacaatgtaaaagattcataagcaaaattttattttgccatcactaattcttgtgattatgaagatataacctaacctaggaagaaaataggcagctgttctttttagaaattaattatctactgtacaagcccacaggcctgcaggtacaatgaaagcatgaaggtaacttctttacactgtgaatgggtaaagaaatccaatgaggccaatgttatcggtttcatcgatgccaatattttttcacttgtcttgatattaagtaaaggctaactgcctatgtgaaaactttggtaaaattattgtggctgcaataaaactacaacatacacacataacctccacagatccattttaaatgaagaaaaacaactacattcgtttttaaaaatgcttcaaaaacagcacatccgct

SEQ ID NO: 436818 - DNA, 568 bp, Homo Sapiens
  misc_feature (479)..(528): n is a, c, g, or t
gcaacattaaagtagtggatttttctgagtaaatttgctgaaaatataagagagaagctatctaataccttggaggtggtcatccacttttcaggtaacatttttcatttggcaaatggcataattatttgaaagtgacaggaatctcctcagaatgaagaataaagcctactaggtctctaactgttgaactcatgaaagaagatagtgtatgagacttaagccatgagttttgtatcatttcaattagaagactactagctgtgagctcagagtttaatgtaaatgaatctagatgattttgaagaaatgattattcgttcaccagatcactcattgtacattctaaaaagctcaaatgagtcttctagatactcttactcatcctgtctggttgctatgtttaaaattatgtggtgctgtgtaggtgaaactttaagaatatttttgaagcatatgtaatatatgcactgctattnnnnnnnnnnnnnnnnnnnnnnnnnnnnnnnnnnnnnnnnnnnnnnnnnnagagcaagagagaggaaactcaaagaggagtgtttgtctt

SEQ ID NO: 436819 - DNA, 764 bp, Homo Sapiens
  misc_feature (243)..(290): n is a, c, g, or t
  misc_feature (626)..(675): n is a, c, g, or t
ccttcaaatgttataatttatttcagcttcagaaatacagcttcacattttcacaataggtacatgtgaccttcaagaacgatacaggctttgagatttttcttcaaaaattccattctaagagtccatatatcagcattaagaaatcctgaaagtgccaagaagacagtggaaagtatccggctcatattaattaaagaatcagcagagaagacaagattttacttctgtatattccttctnnnnnnnnnnnnnnnnnnnnnnnnnnnnnnnnnnnnnnnnnnnnnnnntagacaagcaagcaaaacaaaggctgtacatgtacataggaaatataacacaaatcaagtagtactggtggaattactggttggggggaataatttttaacaaactggtagcagacaaggcaagtggttaggcagagtaatttttgtcataattttaaaacatttcataatgagcgaagtttaaggaattcaagagtaaaaattaaaaagagattaatgacttgagttgagccatatgtgaaacctccaaccagaagtgagaagtctcaccaatataccagtatgaacaggtcttaagacaaacactcctctttgagtttcctctctcttgctctnnnnnnnnnnnnnnnnnnnnnnnnnnnnnnnnnnnnnnnnnnnnnnnnnnaatagcagtgcatatattacatatgcttcaaaaatattcttaaagtttcacctacacagcaccacataattttaaacatagcaaccaga

SEQ ID NO: 436820 - DNA, 975 bp, Homo Sapiens
  misc_feature (304)..(349): n is a, c, g, or t
ggacctgtttaactcatgaaagaagatagtgtatcgagacttaagccagagttttgtatcatttcaattagaagactactagctgtgagctcagagtttaatgtaaatgaatctagatgattttgaagaaatgattattcgttcaccagatcactcattgtacattctaaaaagctcaaatgagtcttctagatactcttactcatcctgtctggttgctatgtttaaaattatgtggtgctgtgtaggtgaaactttaagaatatttttgaagcatatgtaatatatgcactgctatttgttnnnnnnnnnnnnnnnnnnnnnnnnnnnnnnnnnnnnnnnnnnnnnnagagcaagagagaggaaactcaaagaggagtgtttgtcttaagacctgttcatactggtatattggtgagacttctcacttctggttggaggtttcacatatggctcaactcaagtcattaatctctttttaatttttactcttgaattccttaaacttcgctcattatgaaatgttttaaaattatgacaaaaattactctgtctaaccacttgccttgtctgctaccagtttgttaaaaattattccccccaaccagtaattccaccagtactacttgatttgtgttatatttcctatgtacatgtacagcctttgttttgcttgcttgtctatttttactttcccttttttgggtcaaatttttcttttgctttgtttgaagaaggaatatacagaagtaaaatcttgtcttctctgctgattctttaattaatatgagccggatactttccactgtcttcttggcactttcaggatttcttaatgctgatatatggactcttagaatggaatttttgaagaaaaatctcaaagcctgtatcgttcttgaaggtcacatgtacctattgtgaaaatgtgaagctgtatttctgaagctgaaataaattataacatttgaagga

SEQ ID NO: 436821 - DNA, 408 bp, Homo Sapiens
  misc_feature (17)..(17): n is a, c, g, or t
  misc_feature (28)..(28): n is a, c, g, or t
  misc_feature (34)..(34): n is a, c, g, or t
  misc_feature (60)..(60): n is a, c, g, or t
  misc_feature (74)..(74): n is a, c, g, or t
  misc_feature (88)..(88): n is a, c, g, or t
  misc_feature (117)..(117): n is a, c, g, or t
  misc_feature (339)..(355): n is a, c, g, or t
  misc_feature (384)..(384): n is a, c, g, or t
tgtcccaggggaatttnccccaaaccangtggtncggggggaattccgggtgggggggantaatttttaacaancgggtagcagacanggcaaggggttagacagagtaatttttgncataattttaaaacatttcataatgagcgaagtttagggaattcaagagttaaaattaaaaagagattaatgacttgagttgagccatatgtgaaacctccaaccagaagtgagaagtctcaccaatataccagtatgaacaggtcttaagacacacactcctctttgagtttcctctcttttgctctcacacatacacacattctttcatatatacaaagnnnnnnnnnnnnnnnnnaatagcagtgcatatattacatatgcttnaaaaatattcttaaagtttcacct

SEQ ID NO: 436822 - DNA, 432 bp, Homo Sapiens
  misc_feature (367)..(367): n is a, c, g, or t
  misc_feature (411)..(411): n is a, c, g, or t
  misc_feature (425)..(425): n is a, c, g, or t
tttaaacttatctgtttattcaataaccaagtttcttgtttttaagttactttttttgtgtcagttccaccaatgaaaatcatttggcttgtactttaaaatctattcttccacataaagaatatgaaaatatgtttgtggaggacaatgatggaggctcagatcacactgcacctctttagtcttccaacttgtatatgcatcataccaaagtgtcttgatccacagcgcaccattttccaaaggagtatcagtgggcagctgacatgtcaccactatggaatatttattctaaactggagactgcagttgtcagcctgtggcaccagggaacagggaaaaatagggtagttgagattgttaaggngagttctaaaacagtttaggaaatcatgcatatgcatttacagnccatgtgatagtgncttttgg

SEQ ID NO: 436823 - DNA, 1814 bp, Homo Sapiens
ggccccacggccctgtcagagccgccactcctatccccaggccaggtccctggaccagcctcctgtttgcaggcccagaggagccaagtcattaaaatggaagtggattctggatggccgggctgctgctgatgtaggagctggatttgggagctctgcttgctgactggctgtgagacgaggcaggggctctgcttcctcagccctagaggcgagccaggcaaggttggcgactgtcatgtggcttggtttggtcatgcccgtcgatgttttgggtattgaatgtggtaagtggaggaaatgttggaactctgtgcaggtgctgccttgagacccccaagcttccacctgtccctctcctatgtggcagctggggagcagctgagatgtggacttgtatgctgcccacatacgtgagggggagctgaaagggagcccctcctctgagcagcctctgccaggcctgtatgaggcttttcccaccagctcccaacagaggcctcccccagccaggaccacctcgtcctcgtggcggggcagcaggagcggtagaaaggggtccgatgtttgaggaggcccttaagggaagctactgaattataacacgtaagaaaatcaccattcttccgtattggttgggggctcctgtttctcatcctagctttttcctggaaagcccgctagaaggtttgggaacgaggggaaagttctcagaactgttggctgctccccacccgcctcccgcctcccccgcaggttatgtcagcagctctgagacagcagtatcacaggccagatgttgttcctggctagatgtttacatttgtaagaaataacactgtgaatgtaaaacagagccattcccttggaatgcatatcgctgggctcaacatagagtttgtcttcctcttgtttacgacgtgatctaaaccagtccttagcaaggggctcagaacaccccgctctggcagtaggtgtcccccacccccaaagacctgcctgtgtgctccggagatgaatatgagctcattagtaaaaatgacttcacccacgcatatacataaagtatccatgcatgtgcatatagacacatctataattttacacacacacctctcaagacggagatgcatggcctctaagagtgcccgtgtcggttcttcctggaagttgactttccttagacccgccaggtcaagttagccgcgtgacggacatccaggcgtgggacgtggtcagggcagggctcattcattgcccactaggatcccactggcgaagatggtctccatatcagctctctgcagaagggaggaagactttatcatgttcctaaaaatctgtggcaagcacccatcgtattatccaaattttgttgcaaatgtgattaatttggttgtcaagttttgggggtgggctgtggggagattgcttttgttttcctgctggtaatatcgggaaagattttaatgaaaccagggtagaattgtttggcaatgcactgaagcgtgtttctttcccaaaatgtgcctcccttccgctgcgggcccagctgagtctatgtaggtgatgtttccagctgccaagtgctctttgttactgtccaccctcatttctgccagcgcatgtgtcctttcaaggggaaaatgtgaagcttgaaccccctccagacacccagaatgttaggcatctgaaggaaggccctgttgccctaaaagggacacccctcggcccccatgtttcatgggaggggggtcatttcagagccctcgggagccaatggaacagctcctcctcttgggagcttgaggatg

SEQ ID NO: 436824 - DNA, 451 bp, Homo Sapiens
cttcttggaagatggaaggggtaacattgggaggattagtatgaataaaagccatcttatcaatgaagtctttataaaatgacataacctctatatctgagaataaacattgtataggaggagagttctaaatatgtcaaaggttacatctaaaacattcaagcatgacagcataaaaatattcaaaataacttgatttgggattactatatagttccataaagctaaagttacatttaggtataaaccttcagtaaatatggcaacagcaaccataaaaagcatattccccagcagtgttctcttacctctatataaaatagtattccaaataagtacattttatagcaaaattatgcatttttcctaagactttcatcaccaatatcgccttataccctgcttttgttgggtgaaatgcagttatctcatgagtgttttttcatttttt

SEQ ID NO: 436825 - DNA, 2960 bp, Homo Sapiens
  misc_feature (2694)..(2712): n is a, c, g, or t
  misc_feature (2808)..(2860): n is a, c, g, or t
  misc_feature (2927)..(2927): n is a, c, g, or t
  misc_feature (2936)..(2936): n is a, c, g, or t
  misc_feature (2939)..(2939): n is a, c, g, or t
gggactgtgcatgatgtttattagtgatgacagtgaggtgaggcaggggcttgtggagcatgctctgtaggtcacacactagagccataaggcaagagtagccggggagacaggtcctctgtgccctgtctctccccatctaaccctaacctaacaagcggcagctatgagtcagggaacaaagtctggagcccggttctccaaagatgtatgagggacaagaacagaaatgacaggatgcagggcaaaagaatgagaaaggcaaggaggcccccctaagttctctgctacacatgccctccttccccaaacccccatccaggttggctcccatctgccacttggcttcaccatgctcctggtccctggtcctgtcacatgttaagaagcttcctggcagggtgaggagagcccttccctccaagagcttcagctgtgagctctctctggcccgagcgtggccagcctgctgctccagtcttggatgtggctgccacaccccagcaaacagatgggtgtgccaccctgggggggctttgattgtctcatttctaatgtatggcagtgaggtgactggaggccctggatgccaaagcagtcccttgactgtcaggacttgtgcctgctcagggaccttgtttcttcctcatgccatggtgcccacaccccacccttttgtcactttaatggggcatcccttccctgagtctggtgggaaggaccctgctaaggggatcctggcctgagggcactgcccagtggggcagcttcctgtgtgggaggagaggaaggtgccaggggtgcagaacacacagctagtacctggaatgggagcctagtaggggtcactgcccaggaggtgagggggtcccctgtttctcccagaaccttgggaccacaggcagccctgaagctggggctgggcagggggttttgggggctgagcctagtgccagcctgatgccagtctaacgccaccctgcctggagtgggccccccagccagctgcgcctgtgcctgccagggtagggcagcaggaggctgtcagtagctatccttgggccaaggccggttgcgctgccagttccggtcactgtggttgtgttctgagtcctgggctagaagccggtcttgggggtcatgcccgttagcactaggcagccccgaggtgtgttggcggtgaggctggtacaggtcctggtaggcatctgcatagtcctcctccaggtggcgggagctacgctgtgaagatcctgtccaggcttggcgggagctctcgctggcctcatcagagggcatcaagctgtcccgctcaaggggggagtgctcctcgccacgctcccccagcagctgctggttctgaagtccggggatggcactgggaggacccagaagtccggggccaggggctgggtggtgcgtggcccgccagtaaacctccaggtactcagccaggtgctcacaggcatcctccagctggttctcatccagaatcacatcaaatgactccggtgggcactgaaccagcttatcatatgccatcatctgtacggtcaggtgcttcatctgtgacttcccccgggagcgaatgagacgctggagtacctttggtgaggacactttgacaaagacgatgatgggggccagcgaggtcttggccagctgtgctgggtggttgatggtgtcagcgtccaacactactagctgcagggatttggccagctcaaatatgcgctcgatctcacttttgcacttccgcaaatgctggagcgggcagaggagccgctcaatgatggtcctcttgcccggattgttgagcacagatcgctttgccagggagaggtcggctgtgactcgggtgatggagatcctgccatcaaatctgtgtttgaggaagtcgaagagagccttctgcatcatgtctgtgacctcataacctttcagagagggtcccaccagcaccacaggccgcatggagggcaccacgtcatatgggggaacatgttccgcctgcttttgcttctgcttggctagagatggcggaggggagcgtcggttgccaatgtcactcaggctggaagggttcccagatctcctggccttctgctcctgtttgagccggatgctctccaggcgctgggggctggggatgaaggcgatgtccccgccctctttcactagccgcccgatccaccagtcattgctgtacttctctttaatgtgcagaaaatctttggcctcaaagttgactccagagccctggactgggcactcctcatccagtacgccacagtagctgacattggtcctcaccgcaaatgccacaggtttgtgcttggccctttcgagctgctgctgagcctggctctctacttcacgccgggcactctcccggtcctcctccagggagacgtctgagtccagagatgggcggctggtgtaggagtcggctgaacccgcctccgagtcctcaaacccgggcacgtaggagtcgtcatacatgggggagtccgggtcgggggagcgagcggcgccgggggcgggagcggcccggaggcaggggcaaggactgcgggccgcgcccgggagatgccaccgagccccgccgacctgcgggcggcggcagggagcgagagagcgcgaaggagggagcgagccgcgaagaccagctgctcggagctcagatcaccgctnnnnnnnnnnnnnnnnnnnaaacccagccggtcccaccccgagcgcggctgaggaatctggcgccggctcctacaacaatagtgcccgcccacctgaccccctccccgggagaannnnnnnnnnnnnnnnnnnnnnnnnnnnnnnnnnnnnnnnnnnnnnnnnnnnngaggggcacgaacccgtgctaggtggaaggtgggtccccgagcactacggggccgtggcggcggggnggaaggggnggngaggctgcgggcagggcggat

SEQ ID NO: 436826 - DNA, 1026 bp, Homo Sapiens
  misc_feature (4)..(4): n is a, c, g, or t
  misc_feature (9)..(9): n is a, c, g, or t
  misc_feature (17)..(17): n is a, c, g, or t
  misc_feature (25)..(25): n is a, c, g, or t
  misc_feature (31)..(31): n is a, c, g, or t
  misc_feature (38)..(38): n is a, c, g, or t
  misc_feature (41)..(41): n is a, c, g, or t
  misc_feature (54)..(54): n is a, c, g, or t
  misc_feature (77)..(77): n is a, c, g, or t
  misc_feature (79)..(79): n is a, c, g, or t
  misc_feature (1007)..(1007): n is a, c, g, or t
  misc_feature (1016)..(1016): n is a, c, g, or t
gccnaaganactattanacctcctntgcctnccctggnagnaaagcgcagtggntggggcccactccaggcaggtgncntagactgcatcaggctgcactagctcagcccccaaccccctgcccagccccgcttcaggctgcctgtgtcccaaggttctgggagaaacagggaccccctcacctcctgggcagtgacccctactaggctcccattccaggtactagctgtgtgttctgcacccctggcaccttcctctcctcccacacaggaagctgccccactgggcagtgccctcaggccaggatccccttagcagggtccttcccaccagactcagggaagggatgccccattaaagtgacaaaagggtggggtgtgggcaccatggcatgaggaagaaacaaggtccctgagcaggcacaagtcctgacagtcaagggactgctttggcatccagggcctccagtcacctcactgccatacattagaaatgagacaatcaaagcccccccagggtggcacacccatccgtttgctggggtgtggcagccacatccaagactggagcagcaggctggccacgctcgggccagagagagctcacagctgaagctcttggagggaagggctctcctcaccctgccaggaagcttcttaacatgtgacaggaccagggaccaggagcatggtgaagccaagtggcagatgggagccaacctggatgggggtttggggaaggagggcatgtgtagcagagaacttaggggggcctccttgcctttctcattcttttgccctgcatcctgtcatttctgttcttgtccctcatacatctttggagaaccgggctccagactttgttccctgactcatagctgccgcttgttaggttagggttagatggggagagacagggcacagaggacctgtctccccggctactcttgccttatggctctagtgtgtgacctacagagcatgctccacaagcccctgcctgacctnaatgtcatnattaataaac

SEQ ID NO: 436827 - DNA, 1272 bp, Homo Sapiens
  misc_feature (1175)..(1175): n is a, c, g, or t
  misc_feature (1209)..(1209): n is a, c, g, or t
  misc_feature (1222)..(1222): n is a, c, g, or t
  misc_feature (1244)..(1244): n is a, c, g, or t
  misc_feature (1253)..(1253): n is a, c, g, or t
taaggtagcgaggcctgggtggcgaattcggcacgaggagattttctgcacattaaagagaagtacagcaatgactggtggatcgggcggctagtgaaagagggcggggacatcgccttcatccccagcccccagcgcctggagagcatccggctcaaacaggagcagaaggccaggagatctgggaacccttccagcctgagtgacattggcaaccgacgctcccctccgccatctctagccaagcagaagcaaaagcaggcggaacatgttcccccatatgacgtggtgccctccatgcggcctgtggtgctggtgggaccctctctgaaaggttatgaggtcacagacatgatgcagaaggctctcttcgacttcctcaaacacagatttgatggcaggatctccatcacccgagtcacagccgacctctccctggcaaagcgatctgtgctcaacaatccgggcaagaggaccatcattgagcgctcctctgcccgctccagcattgcggaagtgcagagtgagatcgagcgcatatttgagctggccaaatccctgcagctagtagtgttggacgctgacaccatcaaccacccagcacagctggccaagacctcgctggcccccatcatcgtctttgtcaaagtgtcctcaccaaaggtactccagcgtctcattcgctcccgggggaagtcacagatgaagcacctgaccgtacagatgatggcatatgataagctggttcagtgcccaccggagtcatttgatgtgattctggatgagaaccagctggaggatgcctgtgagcacctggctgagtacctggaggtttactggcgggccacgcaccacccagcccctggccccggacttctgggtcctcccagtgccatccccggacttcagaaccagcagctgctggggggagcgtggcaaggagcactccccccttgagcgggacagcttgatgccctctgatgaggccagcgagagttcccgccaagcctggacaggatcttcacagcgtagttcccgccacctgggaggaggactatgcagatgcctaccagggacctgtaccagcctcaccgccaacacaccttcggggctgccttagtgcttaacggggcatggacccccaagaccggctttttagcccagggattcagagncacaaccacagttgaaccgggaattgggcagcgnaaaccgggctttnggcccaaagggttagttaattnaacagcttnttgttggccttaacttggg

SEQ ID NO: 436828 - DNA, 1998 bp, Homo Sapiens
  misc_feature (11)..(11): n is a, c, g, or t
  misc_feature (48)..(48): n is a, c, g, or t
  misc_feature (1033)..(1053): n is a, c, g, or t
ttttttttgangacggagctaagctctgtcacccaggctggagtgcangtggcgcaatctcgtgattaaatttttaagctaattttccccatccatttcaaagagtagccatggtctccttgctctcatgccacgctctgagcaccctctacacatagcaacagttgtagaaaaccaaagcatctggtgtgtggagcccaagagccccatcctgctgtcggaaaaaaagaagtcctcatccaatcagcttcctacctagactggggacctccattttctctgtgctctttaggacccggaagacaaagaaacaacctatggctggctgccaaggaagatctactgaactgaggcaaatctcaacaaagtctttgtgcttcctggcatagaagagtatctgaatatcttcataagcctctgctcacttcttcacccttctgtactctgctgtgttaaaccgtgcagtcctgggaaggcaagggtggtagagaaaggaacaggaagagtctgctcagtcaggtgggctgtgaacttcagtacaggcaggacttaaaagtcctttgcagccccacaaagccagctccttccatgaggggcttcaacctgcccttctttgttatcctggagcaccttccaggggctgaaggacagacagagccactgacaacttcagggccagtcagaaaagactgaggcagacacaagattgaggttaaggcccaggcccacgccctatcttcctatctcccaccagaggtttttggggtttgtgaatcaggaatgaatgatgccctccacaaaaagtgacttttctttcaagggcatgggcggtaagggggaggaaaaacatccctcagcctagcaccctgaagcagtggggtgaggggtcccagagggttcaaatggctcctgttccctttgctgcagaggactgactagttctaaaatggtcttcagtttatttcaccctttctttttattaaatgttaagttcaactgattagtatttagtgtttatatccaatttatcccnnnnnnnnnnnnnnnnnnnnncagcaggtgagaacaaaaacaaaataccccccaaaaataaagcagacccaaattccttgccctttctccaaatatgacctttaaaaacagatcacttcttggccaaactccctttcttgcttcaactaaaaatgctcccctcccacccataagtcctggtcatgccagcctccctaaatgatgaaatataatatacctgccaagcttcccccacagtggacaggagaaggaaggagtaccattctccaccctgccctaacagtgagttaattcatcacaacaaggcacctttccccaagaggaaggcagaagacacggaaacttgttcctcatgtggctagcagggcttgctggaggaaggatggatgcagggtttgagatcctactgtcaatatagagtctgatcaccaaatccagagatgagatgcatagatggaggtgagctgggaggacatttggagtctagggcttgattgcattggagaaacatgttaggagctctcatgcaggtttcaggggaatggaagggaccatctgagaagaagagaaggtccatccttttcctgaggaacgggaccaagccaggcttcacctgagaatgggtggcagaggtggggctccacgggcagctcggtttgttttgctgggatatatcctctgaaagtgtttatattcttctggagcaggaaagtcttctactggatggaaggaatactttgactcaaaatcatccaagaaagaccggacagtggtgatagaatctctgtggccattcctcaggggcggtggaggaggagggggtggcccagctggcgtccttgagggtgtaggtgggggctttcctcggctcgggggttctgacccatgcattcggtatggtggtgggggagggggagcatccctggcaccatttcggatcacaggtggtgggggtggaggagctgc

SEQ ID NO: 436829 - DNA, 1009 bp, Homo Sapiens
  misc_feature (113)..(128): n is a, c, g, or t
ttttgggttaaacagtatttattgaatgtaaagtaccccagccccatggggaagaaaattccaagaacggggaataatacagattaaatacccacctgtgcattcacactctnnnnnnnnnnnnnnnntgccacgcacatatccaagctccaacggtgacaaatcaaacacctgttttcccccagcctgagggacagctggtaggaggtggttcagaggtggggctccaggatgggctctaatagcagcagccttgtctctccctgccccctgccctgccccaggggtcaaagggagctgggcggggcgcctaggaggttggcggcaactcttccccactctgccgcagacgcttcttggctctgatctcattcatagcctcttcaatggagcgtgtgtccctcttattggccacgggcacacagccgtaggtcttattggcctgtagcatgtgggctgcgtctttggctgctcccttgccgatgaggtggctgtacttgtccttgtagtcgctggcagggctcaccaccacaggcccctgctgggctgcctcctcctcttgcctctgggccagctccttcagcttccgcttctcctcagccttctgggggtcccattcctctccacgacggtaagagtctagctcttcatctgagggtgcaaactcctttttgaagatcatgacatagcgacagtcatcatcttccccaaaggagaaggatgtcaggccagccacttccaccacatcatgtagtatgctcctctcgatcttgttcattggctgaaactttttcttgatctgcccactgtcttgaatgaaatctgacacctccttctccatccttttacgaaactccactttctgttgtttctcttgctcttgtagtttcttcaggcgggcggcctgttctcgggccttgcgccgagtctcctggtcaccgaggctgggtggcttctccatggagctcaggatggagcccagtaggtccgccatcttgggagtgacccc

SEQ ID NO: 436830 - DNA, 1252 bp, Homo Sapiens
cggtttgctctgtagcatgtggtgggttcttgggttgctccctgccgatgagttggctgtactgtcccttgttgtccgctgtcagggcttcgccaccacggccccttgctgggctgcgctcctcctcgttgcctctggtccagctcgttcaggttccgcgtctcctcaggccttctggggggtcccattcctctccacgacggtaagagtctagctcgtcatctgagggtgcaactcctttttgaagatcatgacatagcgacagtcatcatcttccccaaaggagaaggatgtcaggccagccacttccaccacatcatgtagtatgctcctctcgatcttgttcattggcgtgaaactttgtgtcgttgatctgcccactgtcttgaatgaaatctgacacctccttctccatccgtttgtacgaaactccactttctgttgtttctcttgctcttgtagtttcttcaggcgggcggtctgttcaaacttaccatgtgacctcaggcgagtgactcatttaagcttcccagtctgtccatgctcgggtgatcccccacttagacagtcatcggagcatttagagaattccagttccccattgcccatcatggcttcctcctttctcagagatttcaaatagactctgtctgcctgtaacgcttttgccttctctctctcatcttacggaattacctgttctgatctcggctcactgcagattgggggagaacctcaggtggccgctctcacagttatgtgtttctctcagagcacttatcaagttggttattaaacttacgtgtgatcactgcatcaatgagcgccccagccccggactgtggcctccctgaggggtactccctggtccctaacggttgttcaagaaacaaaggggacgaagtcgtaggcaaccagcaggcccttgaatacttggaaggcgtcctgcctgctctggtcccctggggcacgtggggagctgggacagggctcgtccgtggtcaaggtccgcaggtttgggagttggggtcctgcgttccgccagtatcatcccaagctgcaacacagagcagccccggggaggctcccaccagccctgcagggccgcgccctacgccaggccgccgaactccagcccacccgcagggaagctactccgagaacgcaggcggagacagtggccaatcaggacccggcagggtattctcatccctccaatcaacactacgatccgcaccgggcagctcgggaa

SEQ ID NO: 436831 - DNA, 1140 bp, Homo Sapiens
  misc_feature (115)..(130): n is a, c, g, or t
  misc_feature (1090)..(1090): n is a, c, g, or t
gggcttaaacagtagtttagttgaatgtaaaggtaccccagccaccatgggggaagaaaattccaagaacggggaataatacagattaaatacccacctgtgcattcacactctnnnnnnnnnnnnnnnntgccacgcacatatccaagctccaacggtgacaaatcaaacacctgttttcccccagcctgagggacagctggtaggaggtggttcagaggtggggctccaggatgggctctaatagcagcagccttgtctctccctgccccctgccctgccccaggggtcaaagggagctgggcggggcgcctaggaggtttgcggcaactcttccccactctgccgcagaacgctttcttggctctgatctcatttcatagcctctttcaaatggagcgtgtgtccctcttagttggcccaccgggccactaggggacagagaggagggtagggcgggccctaggaaatctgtacctcagcctccactgccctcctgccgcatccctatgctcctctcccagccacccccagccgcactgtggcctcaccacagccgtaggtcttattggcctgtagcatgtgggctgcgtctttggctgctcccttgccgatgaggtggctgtacttgtccttgtagtcgctggcagggctcaccaccacaggcccctgctgggctgcctcctcctcttgcctctgggccagctccttcagcttccgcttctcctcagccttctgggggtcccattcctctccacgacggtaagagtctagctcttcatctgagggtgcaaactcctttttgaagatcatgacatagcgacagtcatcatcttccccaaaggagaaggatgtcaggccagccacttccaccacatcatgtagtatgctcctctcgatcttgttcattggctgaaactttttcttgatctgcccactgtcttgaatgaaatctgacacctccttctccatccttttacgaaactccactttctgttgtttctcttgctcttgtagtttcttcaggcgggcggcctgttctcgggccttgcgccgagtctcctggtcaccgaggctgggtggcttctcncatggagctcaggatggagcccagtaggtccgccatcttgggagtccgct

SEQ ID NO: 436832 - DNA, 1078 bp, Homo Sapiens
  misc_feature (85)..(97): n is a, c, g, or t
  misc_feature (118)..(118): n is a, c, g, or t
  misc_feature (134)..(134): n is a, c, g, or t
  misc_feature (143)..(143): n is a, c, g, or t
  misc_feature (487)..(596): n is a, c, g, or t
ggggggggcttctccttggcccggatggaggggggggccgggtacctttgtcccctttgtaagttcgcttgggccagggcttttnnnnnnnnnnnnnaggggcccccgtgggtggggngtgccttccttccttnttggccttntgggcccaggctcctttcaaggttcccggttcctcttccagcctttctggggggtccccattccttttccccgacggggtaagagtctagctcttcatctgagggtgcaaactcctttttgaagatcatgacatagcgacagtcatcatcttccccaaaaggagaaggatgtcaggccagccacttccaccaccatcatgtagtatgctcctctcgatcttgttcattggctgaaactttttcttgatctgcccactgtcttgaatgaaatctgacacctccttctccatccttttacgaaactccactttctgttgtttctcttgctcttgtagtttcttcannnnnnnnnnnnnnnnnnnnnnnnnnnnnnnnnnnnnnnnnnnnnnnnnnnnnnnnnnnnnnnnnnnnnnnnnnnnnnnnnnnnnnnnnnnnnnnnnnnnnnnnnnnnnngtgtgatcactgcatcaatgagcgccccagccccggactgtggcctccctgaggggtacccctggtccctaacggttgttcaaggaacaaggggatggaagcgtaggcaatcagcggcccttgaatacttggaaggcgtcctgcctgctctggtccccctggggcacgtggggagctgggacagggctcgtccgtggtcaaggtccgcaggtttgggagttggggtcctgcgttccgccagtatcatcccaagctgcaacacgagcagccccggggaggctcccaccgccctgcagggccgcgccctacgccggccgccgaactccagcccacccgcagggaagctactccgagaacgcaggcggagacagtggccaatcggacccggcgggtattctcatccctccaatcaacactacgatccgcccgggcagctcgggaatttaagcctcgtgccgaattcgccacccaggcctcgctac

SEQ ID NO: 436833 - DNA, 445 bp, Homo Sapiens
ctcctaatccctccttttaggggggtccaagtgggctgccaccggggcagtgctggagctaggagggcaggtggggagggaggaacctggtcacagctgcttagagaacctctttggtctggggttatggggtctatggggaagagagatggaggggaggggacactggggactctggccttttgacaggacatgtgtcaaaatgccgagtgcccaggtcgatcagatttctgtggactcaatgcgctcgaggcgggagggggtccaggccttcttctcctcgccatgctggggagtgggcgtgcttgcaccccctgcggccccgcgctcccgcagcctgcgctccagctgctggttgcgctggtacatctccacgtagctcagctgcagctgcttctggtactcgatcaccttctccttctcctccagccacacgcggcgctcc

SEQ ID NO: 436834 - DNA, 1043 bp, Homo Sapiens
  misc_feature (16)..(16): n is a, c, g, or t
  misc_feature (37)..(40): n is a, c, g, or t
  misc_feature (43)..(43): n is a, c, g, or t
  misc_feature (49)..(49): n is a, c, g, or t
  misc_feature (59)..(59): n is a, c, g, or t
  misc_feature (61)..(61): n is a, c, g, or t
  misc_feature (75)..(75): n is a, c, g, or t
gggacacggcgcgtgntcccggtgccctccgcacgtnnnngtnctcttnaagtggagcncncgccccaagcccangcgcgggtgccacctgcgaaggcggcgcgtgtgggagtagctgatggtgtcgtcggtacgagctcccggtcccgacggcagcccggcgcctcccgaggacgcagaggctggggagtagctgctgagtttgtgtaaacgggaggttgctccggggccgcgtagacgcccccgggcccagccggggccccccggtagcgcccagggacacgttggggggtgtcacgtggttcatcttgtgcagatcgttccagggctttgacaaagccgtcggcgaagccctcctgctcctcggtgacgccgccccctgcgccccctgcacctccaccgctgccaccccccgcgggggtaaaagtactgtcccgggggtgtaggcgtcgtcgtgatcacgccgttgctgttggggacaatcaggcgttccagctccgaagaggcgagcttgagagacgcgccggtgtccgagccctgaccagaaaagtagctgccgccaccgccgccctctgggccgggtccgcgagccccaggcgctttgagactccggtaggggtcggccaggttgaccgccaggctcggtttcaggagtttgtagtcgtgtagagagaggccaccaggggcccggccgtatcccgtagctgtgtatgagtcgtcgtggtagaagggctgttccattttagtgcacatccgggcggcccaggcggtctggggagggtcctgcggggccgctccgggcctcgctgcagcgagcggcgagctctccgctgcggtgaccggactgggtgcctggtcgcgcgttctcgggggctggcgcgggcgggtagcagccagccggcagctgtgcgcaaaagccctgtcaggcttcccgagcccccgtcgccctttctggcgcgatagctttcctggcgtcgtttcccccagctcccagctccctgctggctccgatcccgggaattccggaccggtaccagcctgct

SEQ ID NO: 436835 - DNA, 1840 bp, Homo Sapiens
aataaagaaccaattttttttttacttaaatagattcaataaaaagaacaaacacacacaaacacaaacacgtcttaaaataaactctttagagactaagtgcgtgtttcttttccacagtacggtgcagagaggggagggcagggggcgggggtccccttcccaatgtccccgcgggcttgagtaccaggcggcggggccagctccgccgcgatcgccccctcttcccctccctgttaaatacacaaatatattatattcaatatgaatcgagtctgtttccagcagaaaaaaaacatacaacataaagtggaagggggggcttgtaaacgtcgaggtggaaggactgggcgcagggtaggagggccggagtccagtgtggtttgcggcgcccctaggtcccagggtgggtgcccaccgcctgctccctggaccccagtgggaggcgtgtgcccagccgtccaagcgagggggtgtccgtaaaggggcaggggacgttcagaaggcgtgtcccttgaccccaagcagcagctgacagccgttgctgacgtgggtcatgaccttctgtttgagctgggccacctgctcccggaggaggccggcggtactcgacagccccgcgttctcggccttgagcgtcttcaccttgtcctccaggcgcgcgatgcgctccagcttccgcttccggcacttggtggccgccagccggttccgcagccgcttgcgctccactttgatgcgctcttggtcttccatgttgatgggggacaccggcggcgtggcgtcccggctgcgcgcctccggcacggtctgcggttcctccttgaaggtggaggcgccgcggcccaagcccagctgcgccgggtggccaccggcgaagggcggcgcgtgtgggaggtagctgatggtggtcgtcgggtacgagctcccggtcccgacggcagccccggcgcctcccgaggacgcagaggctggggagtagctgctgaggttggtgtaaacgggaggtggctccgggccggcgtagacgcccccgggcccagccgggggccccccggtagcgcccagggacacgttggggggtgtcacgtggttcatcttgtgcagatcgtccagggctttgacaaagccgtcggcgaagccctcctgctcctcggtgacgccgccccctgcgccccctgcacctccaccgctgccacccccgcgggggtaaaagtactgtcccgggggtgtaggcgtcgtcgtgatcacgccgttgctgttggggacaatcaggcgttccagctccgaagaggcgagcttgagagacgcgccggtgtccgagccctgaccagaaaagtagctgccgccaccgccgccctctgggccgggtccgcgagccccaggcgctttgagactccggtaggggtcggccaggttgaccgccaggctcggtttcaggagtttgtagtcgtgtagagagaggccaccaggggcccggccgtatcccgtagctgtgtatgagtcgtcgtggtagaagggctgttccattttagtgcacatccgggcggcccaggcggtctggggagggtccctgcggggccgctccgggcctcgctgcagcgagcggcgagctctccgctgcggtgaccggactgggtgcctggtcgcgcgttctcgggggctggcgcgggcgggtagcagccagccggcagctgtgcgcaaaagccctgtcaggcttcccgagcccccgtcgccctctctggcgcgatagctttcctggcgtcgtttcccccagctcccagctccctgctggctccgaggctggcctcgtgccgaattcgccacccaggcctcgctc

SEQ ID NO: 436836 - DNA, 2657 bp, Homo Sapiens
  misc_feature (1894)..(1907): n is a, c, g, or t
  misc_feature (1981)..(1991): n is a, c, g, or t
  misc_feature (2625)..(2625): n is a, c, g, or t
ttttctcttttttaaggtagaaccaagtttattaatgacagcctttattacaatcactctcaagtgtaaaaaataaagggtgattaattaatatttaaaactcactcggacttgctgtttggcctttcagtggatgtgccaaagggcagggatcttgcctgattctgaatcaattggccagatggagttcactggagaatgaggcaatcaacaaaaaagacaaatgatgccaactggagagagctcgtgtcttctccatgttggaaggacattacaaaatggcaactgtggtgggggcagagatgaagtaagacaaccttacagtcggagtaagatgtgaatacctctacctatacagagacaaaaacacacacatgcagagccatacacacacccaaacagtgaacacagttttgaaaataatttcctttttgtcctttctctgagcagactgacacattcatcggccaccaccatgcaccatggggctgaaatggaaaacctcgcttaatttccacaaagtattctagctggctgcccagttatgtgctggcaaatctgtccgcaccgaaaaatgtgcctgtggttttcccagagttccacagactgatatctgctccccaggagggcaacatccggtggacaccagctggattaaaatctagagggcaaaactcgtccctcccacctaaagtgggggcaggagcggcagcaccaggaagtggtttcccactttgtgttacagagtacttgccccagttcaacgcattcccctccaaagtatttgtgctttgataccatcctgatggttagtctgcaataagagaactgaaggagctatggccatgcactattttctttttttaataaaagcaaactaaaactggaggaagaaaaagaaaccattagaagcttttgactgggtcaatgttgtttccaaattgggtttaattccattcaaagagaaagaaggggagggtgcagaaaaggccactcagatcgactctggaagagatcatcaagaccagggaagcatttggatggtacagctggtctcttcccagccagactgggaggacatgccacaacctcccaaggctgtgaacctaggaaataagtgctgaccaaataacatatttcaatgtttgtagaaaagctggcaggaaagggagatgatggattccagattcacaggtcatgcagattaagacttaatcaaaaattaatgcttgagctgagtaagaaaacactaaaatttaagtggaactgtatcatagctttcacctttggaagacgaaaaacaacaaacatacaaaacaaaatgacccagaatattccagagtttccaaaaatccaactgctaattttggcagggtgagaagaaggggatatttaactgatacctcttcattaacctcattttctccttgaatttcactgataaacaaagctcaggtctacttagaaaaacgatcagtcctgctaaaatacagcctcatgacgtcttccaatgcccttgctcggtgcacatgaaatacacaacttctcttataaggagactttccaggatagaccaagtgtgctcgcccaagtgacttgctgaataccatcacaaaatctgaacccaaagatgagttgttttcttcttcagatgagagttgcaagtgtttcctaaaatgtacatggagggatgcccacaaaccactgccctcccaggtgaggggctgagtctttgaggagatgcactccttcaggccatggaacagaaagaaggtggtccgtccaaggtgtggtgaagagcaaagctgcctctcccagccctccaattacggaagatgaggacaagaatgtattttctgcacattcaagtacatctgggtcccctaccctcccnnnnnnnnnnnnnnggtaagcatctaactgtccataaattcatggctacagtagagattcacggcgcaacgactttcatactggttannnnnnnnnnnaattctgtcagtgagcagcatttcccagttttacactcccctaatggcagctccattaggcgagactgcaggctgcatctgtgattaggtccatgcagctcgaagatcagttcggcacgcgggagggtcccgaaagctgggtctgtccagtgtcttgcagcagcggttgcagggggtctaccagctcgccctgacagcttcgatatcgctaaccaaattctgggccaggcatatcccaaatatctgcagcaatgcaatgcctatgaaaataccagcaacgatggttaaattgtcctgcaaccacttctcaaactggggcacacagcctttcgtgtagattacaatctgctggtcaacttctggtttttgcctggcatcatagccacactgagtgttgatgacatcttctgcgggatctttagtgcagcaggagaatggaacgccacatcgctctcgacttgcattggaatctgtgcaattgaagtaaatatttaggttccaatcatcagctccaaaagccccacagcactgccaatattcctgggtgaagtctatgaggttttgcaaatcaatgtcgtcccgatatgctctgatgttgttgtttataaagaaatacagctggtctttgatccantctttgaaaacaaatgctagaactcccgcagt

SEQ ID NO: 436837 - DNA, 813 bp, Homo Sapiens
  misc_feature (582)..(582): n is a, c, g, or t
  misc_feature (621)..(621): n is a, c, g, or t
  misc_feature (644)..(645): n is a, c, g, or t
  misc_feature (658)..(658): n is a, c, g, or t
  misc_feature (696)..(696): n is a, c, g, or t
  misc_feature (703)..(705): n is a, c, g, or t
  misc_feature (773)..(773): n is a, c, g, or t
  misc_feature (791)..(791): n is a, c, g, or t
tttttttctgtcagtgagcagcatttcccagttttacactcccctaatggcagctccattaggcgagactgcaggctgcatctgtgattaggtccatgcagctcgaagatcagttcggcacgcgggagggtcccgaaagctgggtctgtccagtgtcttgcagcagcggttgcagggggtctaccagctcgccctgacagcttcgatatcgctaaccaaattctgggccaggcatatcccaaatatctgcagcaatgcaatgcctatgaaaataccagcaacgatggttaaattgtcctgcaaccacttctcaaactggggcacacagcctttcgtgtagattacaatctgctggtcaacttctggtttttgcctggcatcatagccacactgagtgttgatgacatcttctgcgggatctttagtgcagcaggagaatggaacgccacatcgctctcgacttgcattggaatatattcctgggtgaagtctatgaggttttgcaaatcaatgtcatcccgatatgctctgatgttgttttttataaagaaatacagctggtctttgatccagtcttttaanaccaatgctagaactcccgcagtgagctccagggaaganaaatattcccaggaaacacagannaaaacttgagaanggaagtgttttcccgtagcgctcccatgcaccctgcanatcccannnatgacatcactcctctcaccacagggagagccaaactgggtcaagccccgcgagatcggtgatggganggatgttggacagaactnccttttcatttcatggccacag

SEQ ID NO: 436838 - DNA, 939 bp, Homo Sapiens
  misc_feature (73)..(152): n is a, c, g, or t
  misc_feature (183)..(249): n is a, c, g, or t
  misc_feature (854)..(890): n is a, c, g, or t
gttttctgggggaagtttattctgttttcacatctaggttgttggggaaagtgataaacaaagttctggattnnnnnnnnnnnnnnnnnnnnnnnnnnnnnnnnnnnnnnnnnnnnnnnnnnnnnnnnnnnnnnnnnnnnnnnnnnnnnnnntgcagtgtactatgttcccatttgtgaatannnnnnnnnnnnnnnnnnnnnnnnnnnnnnnnnnnnnnnnnnnnnnnnnnnnnnnnnnnnnnnnnnngggcaaagttctagatcctaactggaagagttaggccaagaaggaagaagaggttctgggagctgctggctactcctcatcctcctcactatcgagatacttgtgggtggcgtagcccatcagggcaccaatattacctatgacgacgctgctgccaccagccccgaggctctgcagcgtggccactagccccccggcgggcacgccgcccccattcaggatcgcagaccagctcatcagcgaggcagccaccgagttggccgcgatgccggcgccggtgaagcccagcgcgggcagcccggcgactgcgagtcctcctccgacggccatgaaggtcagggccttccagaacccggagccgctgtccgagctctccgagcactttttcttacctgcctccaccccactgcaagtgaagagcagcaggtagcacaagaaaagcgataccgccttctgccgcatggtggcgccgcgcgcgggctccgtcactagaccttggaggagagaagagaagcaatcttcagcccggagcctgctgatagatgggcacagcagcgagtaaacccgctctcgacgaattcgagctcggccgatttggcctgatnnnnnnnnnnnnnnnnnnnnnnnnnnnnnnnnnnnnncgccgccccgcgtgagctccattcgccctatagtgagtctatacatccc

SEQ ID NO: 436839 - DNA, 510 bp, Homo Sapiens
ttttttttccattttgcacaaaaatgtatttctgtgacttcccaaagtacagacatttccccaggccccagggggtaaagcaatgaggtgtgaagtctgccagggtctggccggggccgctgagcgtgggaaggaagggagcgccgcatgcagcccatctgccaagctgggggaacacagggctgcgcccacttcccagggccgggagggagaggctccaggagaaaaaggccaggtgtctctcccaaagctgctcacccctgccgtcctgcctggaggcagaaatgctaggaacacctgaaaacaggcccgcgggaggaaaagggaagaaaaagccatcacccaaaggctgcctccagggttagcgctgctccccaggcccctgcgctccacaagtgtccgatgagaagcaatgcagtgtccatcgatggaggagcaagagagccggcgcctctcaggcttccaaggtaaagcctagggcagggcgggaccgccagggaggcccaagcg

SEQ ID NO: 436840 - DNA, 1284 bp, Homo Sapiens
ccttgctctccaacaggttgctgaagacgctgatgaactgggaagtcattagttgaggcctcagctccttcacttctgccacattccccaaaagtcctagcatattcctatgcagttcctgcttctctgggaattccttcaggcagtccaggaagagcttcatgccgttgaaattgaggaacatctcgcagttgtccaggagtttccatctgtgaatgttcccacagggcactcccaggagaactcccatgacctggtcacatgtcttgtccagcagcttcttctgaatcagcttcagcatggtcacgacaaagcccatcttgcccacggcctccttgtggtcgttgtctacctggcagaccagggcattgcacaggtgcacggcgatccgctggatagactcgtccttgccgcgtggggttgaggatgctgagcaggagctcgttgacccggcggtactggaattccagctcctcggggatgctgaagttgcagagcgtcaggcaggagttccgctgcaccgtcacctcctggtaggattccatgccattcagcaccacctggataacctgccggcgcagcttcacactctgctctgagcggtactcggaatttgttaggtagaagagagcggcgctgcctgtcacttgaatgttcctgtcatatttgtggcacttgagggccgtgatgaccagcttcagggcccgcagcagctggttgcaacgctcgatgcgggcgatgtcaaaaagcaagttgatggcccgcgaggtgatctcaggccggtgctccgtgtaggcctcgatggcattcagcacctgctcttcgtttttgtcaccacttactttgtaggctggaatgtgcgtgaggcggcacagagagttctcaaagagcccgaggaactgcagcggcctcttcagagcccggaaaggtatgatgctgctcttggaaggctcaatgctggtctgccccgcttcctcttccattcttggagatgctgcagttctctaggatcatgtggccagagatgtccagggacattaggttccccagcttctgcacaaagaggctcagcacctcccgagtcagcttgaacttgtagtagctggagaggcggtctcgggagatgtccaggtgtcgcagcttgtgcagctgcacgatgacccggatgtggtcgtcggacaggtccatgttgtagaggacgagggacaccaggctgtctttccactgggtgaggaaggcggcgtcgctcgtctgaatgcctgagaggtccaaggcagccaggga

SEQ ID NO: 436841 - DNA, 2139 bp, Homo Sapiens
  misc_feature (77)..(77): n is a, c, g, or t
  misc_feature (193)..(193): n is a, c, g, or t
  misc_feature (1244)..(1277): n is a, c, g, or t
agaagggagccccctcattaaaacccctttttccaaagtgggggacacccaggggttgggcccctttcccccagggnccggggaagagctcccaggagaaaaaggccaggggttttctcccaaaaggttggtcacccttgccgttttcctctggaggcagaattgctagggacccattgaaaaacccggccgngggaggaaagggaaagaaaaagccatccaccccaaggggtccccagggtaagcgctgttccccaggcccctgcgctccacaagtgtccgagagaagcaatgcagtgtccatcgatggaggagcaagagagccggcgcctctcaggctttccaaggtaaagcctagggcagggcgggaccgcccagggaagcgccaagcggccactgcagggcagtccgagtgctggtctggaggcggctgtgtggccgttgtgggtcaaaggctggcatgggacctctgcctctgagaggcgtggggtcctctgggcagcggggcaggctgggaggaggaggcaggctcagttctgctggtgggagcgcctgggcagttgagggctatggagcgaggaagcaagcccctggccccagaagatgctagcttccagggctgagggcaggttctggatgtgtttggcagaaggggcagtggaatctgcccccgagttctgaccatccctgggctggggctttccacagcctgggacctggtgggagactaggaggcagcctccatagcagcgtggcctcaggcaggcctggctggacagcagcagggccactgggtgccctgctcctagagggtcttcaggggcagggctgcctggacctcagcctaggaatggctcactttcctgccccagatggcccacagccgggagcaccaaggcttttgggagacccagtggggtaagttctaatccccaaaccccatcagctgtgcccgggagccgagatggcgttctcaggcaggggcagtgggtcaggatgctcgatacgctgtccaaggcctgctcctctcatgaaaggaagccaggccgggatctgagtttcctggacaaggactggacactcacagcgttataggcatttagtctggttggggtaggagtgtgtgtgtcagcgatgaaggctgagtgggtttgagaatggccaaggaagctgcaaggactcaggagtgttgcttttgtttttgcacagaaatcatacacacaaaacttcacacttcctaaccnnnnnnnnnnnnnnnnnnnnnnnnnnnnnnnnnnctcactaacattaaggaaaagcgtcggttgtgcaaaagtcccccatgtctcttcactccgtgggaggctccctcggaaggggcccgcccgctgggctgcttgagcatgcttcctccccgcctgtggtccagagcggtggcggccatggggacggaggcctctatctagacgtgtccatgttctcctctttaaagttactgcagtgctcaatcaccttgcgggccatttccttggtctcctgccgtgcggtcgccatcttaattatgtccctcagaaggggcatccccccttctttgatcagcagagggcagtacttgtccgggtagacagacacgaggttatacagggcccaggttgcccagtgcttggctgacaggagagattccctgggggaaggaggcggagaattggttcaaatgacctgtaattgatgtttctccgagagtttatgtcccagctctggatggcagcccacatgcgttcctccacctcctcacgctggggctcacagacgccccaggcctcgggtccatcaaacatgatgtgggagaggacgccgcaggcattgtaggaaacctcgatcccatcggccttgctctccaacaggttgctgaagacgctgatgaactgggaagtcattagttgaggcctcagctccttcacttctgccacattccccaaaagtcctagcatattcctatgcagttcctgcttctctgggaattccttcaggcagtccaggaagagcttcatgccgttgaaattgaggaacatctcgcagttgtcaggagtttcatctgtgatgttccacagggcactccagcctcgtgccgattcaccacccggcctcgctacctagcct

SEQ ID NO: 436842 - DNA, 454 bp, Homo Sapiens
  misc_feature (56)..(56): n is a, c, g, or t
caacacctgctccttcgttttttgtcaccaacttactttgttagcctggaaatgtncgttaagcggccacaaaaaattcctcaaaaaaccccaaggaaactgcagcggccctccttcagagcccgggaaaggtatgatgctgcctcttggaaggctcaatgctggtctgccccgcttcctcttccatcttggagatgctgcagttctctaggatcatgtggcccagagatgtcccagggacattaggttccccagcttctgcacaaagaggctcagcacctcccgagtcagcttgaacttgtagtagctggagaggcggtctcgggagatgtccaggtgttcgcagcttgtgcagctgcacgatgacccggatgtggtcgtcggacaggtccatgttgtagaggacgagggacacccaggctgtctttccactgggtgaggaaggctgcgtcgc

SEQ ID NO: 436843 - DNA, 1688 bp, Homo Sapiens
tctgtctgttgcttgtgtgtttttttgtccttatatctggctctggtcttttttccttcgttttcttctctgtcgtctttctctttccacttcttgtgtgagccgctttgagcttcgtttcattctaaagtcgcacggcttgtctgtgttacatgtcctgttctctcatggctgtgtgcttttacgtgtcctgtctcctcagttgtttcagggctactgcagaacaatgccagtattgttatgccctgtatgcatccttgcaggggagttttaatagctcagtgcttgactggatatatttatggcatgttagtgttgttaagtgctctaattttctaggacatgtaacctaaatgattccattttcgtctctaagaaagtataaagggaagacgttctaataggaaaagatagaaacaagcagcagtagcaagctaggtaattgtcaacctgagattctaacgataacatacactgtgatataccaaaagtacagtcctataaggtacagttagcttggcacagtaaagactaaatttaagacacgatagacaaactgtgtaataaatagggccacagttgtaaactgtcctttttccctcctaagatgccaaaattgcactctagttgtgttgggaagcagcagagtttacaagaagagtaggtaggaaacagctgtacaggccaggtataatttatacattttttttaaaagttataattctacaatcccaagggagtagaggttatagtcattgaatgactgcttgataccatgttcctcttcgtacttcgattactttttaacacctgtgggtatgtataaacgattacacttgtttgcctcctccacctcgcactgccactggctggctgttctgaacaaatgcacctcctccacgaattgcacttgggtgagttggagaagctgctggatgttgcccgggacgaataggtttagcaatctgtgcagaatgccctcttctggccatattctttgacctgactgcttcctttatgcgatctacttcttgctgatagcgtttgcgatcacgagatgcattttctttagcttctttcagtgctgattccaaagctttcactctctcagctgtagctcgaagtcgcttttccaacttaggaagttcacagcggagatctgcattatcacgtaccaactgtttgtgcactttagtgagctgttcaagattattgttcaagaaaggagattttttgcttctgagcagcgctgcctccggtgtcatcagaatcaatctcagcactcttttgtaactcttgtagccaggtcctgaacaaagagtttgcgcaggttgtgtaaagtctgaagttcttttgccactgtctcttgcctaaccctgtcaagtcttgtcttgcttgttctcgtctatcttgcataaccgtaagttcatgtagttttctgctcttttcctgatctgtggctttcaacttctcatgttctactcttagacgttcctgctctaacatcattttctggttttggtcttgaagatcagtaataagttttgcttttgcttctacttcatctctcaaactactgatctgtttttgatgagtttctctatggctctggatctgctgttcaacagcttgcttaacttcatttgcagtctgaaccttatttaagtgctccttttccatttcatgga

SEQ ID NO: 436844 - DNA, 869 bp, Homo Sapiens
gattctatcaagggttcaacgtgcaatcttgcaatttcgtttttatgttttcaatgccctttggtcaagtaatacagaatacagaaaaagcaatactcccaaatttaggtttccccacaagttgaatactggtccaagacagcattctgtttaattctggtaaaacttctgaacgatctgtttgttgaaattatatgcatgaaatcgctcaaagccaagctcttcgacagcccaggcagaagaatgttccacttggcaactagactctgcaggactcccagaaatactagcagtttcctcagttgtctttcctcttaaccatgaaaccaagcagtatgatccagagtggtcacaacaagcactttctaaaatatcacacaaggtatgacaaaggagttccttctgctcttcctctgaacaatcccgccaagaagacttctccgaagaaaacaggagcttcttcaaaagaaatgcctgaacaggtgcaataacagcacaggggccaccttcaaactgttctaatgcagatccctctgattcactaaacacaaacccttgcgtccagcggcagaaaatggtgtccgagagaccggggctgctcttggtgccccacaccagctccatcagctctttagtcagttcggacatgatgaggaaccggcgggcggatcttcgctttgcggactcctgccccggaacatggggaaggggcaactccggaaacagcagctgcgggacggcggcggcaaacgaattggaaggtgaggcaggaaagaagaaggggctgagagccacttgcagagaccaagcctgtcaagccaggttggggcagcagcgagttttccgtaccggaagtgctggtgccactt

SEQ ID NO: 436845 - DNA, 343 bp, Homo Sapiens
  misc_feature (24)..(24): n is a, c, g, or t
  misc_feature (26)..(28): n is a, c, g, or t
  misc_feature (50)..(52): n is a, c, g, or t
  misc_feature (206)..(250): n is a, c, g, or t
ggatactacccatcacctaacatntnnntagctctggcttgaaaaaaatnnnttttcccctatttatctcaactctcatttttattattcagggagttccaaagtcatgattggaagagacatgatttaccttatggctacaaacagcatatgatcctaagaaatcatgcatcttctggctgggcgcagtggcttatgcctgtaannnnnnnnnnnnnnnnnnnnnnnnnnnnnnnnnnnnnnnnnnnnngacatgacgactttctactgaactatactcttgagtctctccaagggttatgactcttctgcttgctttacatttatccacatgcttcttgtt

SEQ ID NO: 436846 - DNA, 308 bp, Homo Sapiens
  misc_feature (41)..(41): n is a, c, g, or t
gtagcgtttcgctccggctgtgtgtcttgccgcatccctgnaattcaagactccgttcccctgcactaaggaattcactgaagtactcggtaagatcttcctagatggaagaaaaacatttcttttacacgtattctgaagaaacttttggctaccgacactcctcttctgagttatttggcagggaggtcactttccatgttcttcccaaccctggagtcctgctacagcctcgacccacgtccgaaccagcccaccacctcctcccagcagccgaccccagccgccaccgggcgggcttcccttcc

SEQ ID NO: 436847 - DNA, 1147 bp, Homo Sapiens
tagtttaaaaaatatttattatagaaatgtacatttaattagttttaaggaatgtacctgaccacagtgttaatatatatttcttcaaatttgcaaactttacacctttaagatatctacaaagatgatagtttatttacaagttttacaagaaatgatcacttcacaatactgttgacacagttacgattgaatcttcttctcactttttatttcactctgtacttatagaaagaacagagagtatgggtgaagttccatcccagtgccagggaaagcccgtagagcagaatcagaggtgcaaatggatacagaagaattactgtatttttcaaaaatggcaatgcactgtatcccaggaaagttacatagatataatagccaactgcaaccaaccataaggtatttccaactaaatatccaataaatgtgtctgtcaggataacatggttgatgaaaaaaagctggataaaatgcaaaatgaccaggagtggataaaaagcattgagatgcacatcaaaagcatagccccattccacatcatagtctctgctctgtcgtttcactaaatacttgttagagatgaaccacattaaagttgctatcagaagaccaacgcctacacaatctatgagtacaacccaaaggagaagctttattgtctcaaagaatcccatgtccagcacaaagccaaatcctatagtggacacacagagccagatacttaacaggaccaagaaagcagggtcatctctggcccactggtccttcgtctgttttcgataatgaaaatttctgtaaactctctgtggggatgtgaacaggtagagcatctgccaggcagcaaattcaaagtccatttgccgaaagcggaaaagccttctcagatatttgtagcgtttcgctccggctgtgtgtcttgccgcatccctggaattcaagactccgttcccctgcactaaggaattcactgaagtactcggtaacatcttcctggagtcctgctacagcctcgacccacgtccgaaccagcccaccacctcctcccagcagccgaccccagccgccaccgggcgggcttcccttccctcaacggagccggcccttccgctctcgacgaattcgagctcggccgatttggcctgat

SEQ ID NO: 436848 - DNA, 1117 bp, Homo Sapiens
  misc_feature (653)..(653): n is a, c, g, or t
  misc_feature (655)..(659): n is a, c, g, or t
  misc_feature (661)..(661): n is a, c, g, or t
  misc_feature (663)..(663): n is a, c, g, or t
  misc_feature (666)..(667): n is a, c, g, or t
  misc_feature (671)..(672): n is a, c, g, or t
  misc_feature (681)..(681): n is a, c, g, or t
  misc_feature (691)..(691): n is a, c, g, or t
  misc_feature (694)..(697): n is a, c, g, or t
  misc_feature (704)..(704): n is a, c, g, or t
  misc_feature (706)..(706): n is a, c, g, or t
  misc_feature (716)..(716): n is a, c, g, or t
  misc_feature (719)..(719): n is a, c, g, or t
  misc_feature (723)..(723): n is a, c, g, or t
  misc_feature (756)..(756): n is a, c, g, or t
  misc_feature (766)..(766): n is a, c, g, or t
  misc_feature (768)..(768): n is a, c, g, or t
  misc_feature (778)..(778): n is a, c, g, or t
  misc_feature (782)..(782): n is a, c, g, or t
  misc_feature (786)..(786): n is a, c, g, or t
  misc_feature (788)..(789): n is a, c, g, or t
  misc_feature (818)..(818): n is a, c, g, or t
  misc_feature (820)..(820): n is a, c, g, or t
  misc_feature (908)..(908): n is a, c, g, or t
  misc_feature (955)..(955): n is a, c, g, or t
  misc_feature (1005)..(1005): n is a, c, g, or t
  misc_feature (1039)..(1039): n is a, c, g, or t
  misc_feature (1045)..(1045): n is a, c, g, or t
  misc_feature (1057)..(1057): n is a, c, g, or t
  misc_feature (1105)..(1105): n is a, c, g, or t
  misc_feature (1111)..(1111): n is a, c, g, or t
tggcaccggtccggaatttccgggattgaattcacagcagacgccggtgggcacgcccaaagacaagcgagtctccaacacgcccctgaggacggttgacggctcccccatgatgaaggcagtggtccatgctgtggacggcaccgccgagaacgggatccaccccctgagctcctccgaggtggacgaactcatccacaaagcggacgaggtcacgctgagcgaggcagggtccacggccggggcggcagagacccggggggctgtggagggggcagcccggaccacgccctcccggcgggagatcaccggtgtgcaggcacagccaggcgaggccacgtccggcccgccggggatccagcccggccaggagcccccggtcacaatgatcttcatgggttaccagaacgtggaggatgaggccgagaccaagaaggtgctgggccttcaagataccatcacggcggagctggtggtcatcgaagacgcggctgagcccaaggagcctgcaccacccaacggcagtgctgccgagcctcccacggaggccgcctccagggaagagaatcaggcggggcccgaggccaccaccagcgacccccaggacctcgacatgaagaagcaccgttgtaaatgctgctccatcatgtgancnnnnncncnacnngccnnctttcatcncacaccacanatnnnnaccatcncngcccctcccngcncctncccaccctccacccacagcctcacgggtccacnacttggcgtntntttacatgtncctnccgngnnttctttcgctggaaagagggacaggggcncncacccgtcaccacgccccaacactccccccgaaccagagccgtgcacttgtgcctggtaggagagagacaggacagacgcgcttttcncgagacaaggacccccatgtcacggcagcttcacagacgcggctcgngccaccggggtcctggcgggtgggacccgcggcctccacgcggcgcaggncagcctgccaccctctgggcctcgtacatgtgcntttctntgaggggacacncgccagagagggccccgggagccgcgggtgtgtactgaggctgctcangcctgngagtga

SEQ ID NO: 436849 - DNA, 1588 bp, Homo Sapiens
  misc_feature (1429)..(1511): n is a, c, g, or t
tttggctgttcacgctgtttatttgcttctctgggaaaatcaagaacatcgggggcctcgtcacacaccagaagcagagggggttatagcaagggcacttcagcgaaggctcgcggctcgagggactcaggcagactccagggaggaggagggggttccacggctgacgcccaggtcacccccgagagggcctctcctcccagccacccaggggcagagcggaggcagggacccaggctcccatccgaggtggcccctgtacctgccctgccgaggctgcaggtggtgactggaccaggaggtggcctgagcactgggcaccaggctggaggtccctagggcagggaccaagttggggcctggttgtccaaagccaacgtgtgagacggtgtctgtgagaatgtgcacgaatgtgcctctggggacgagtgtagctgcccccaggagggaagccccttgccacttccaatgagagggggctgggggcaggctcacattggtctgggtggcaaatgagggtctcctgctccaacccaagaggcttcctgtcccaggctgtgtccctccctccactgcccggacgtgctccaagcccagtagagctggcaggtggggcctgatctcggggtatggttgggaagacccaggaccctggtccaagcaggatggagaagaggccgggggcggcccctggggtccccaaattagcaccaggaggaaggagggcccagtgggggcgggagctcgggacaaggagtggctcactcggtccctgccctgtgcagggggcaggtcaatgacccctggttcgccccgtctagaagatagcccaggggttaccggcccctcccgggtgggggcatgtccccggggttccccctcccccagactccattgtccactggttgggcccacacagggcataggggcacagcagaggggcctgtcctccacccaagacctttagcccccaaagaggcacggcctcaccccaactgcctgagattggggggccagcgccttggccagggaaccccatagagcctcacttccagggcctgagcaggcctcagtacccacccccggctcccggggccctctctggcggggtgtcccctcagagaaaggcacaggtaggaggcccagagggtggcaggctggcctgggccgcgtggaggccgcgggtcccacccgccaggaccccggtgggcgcgagccgcgtctgtgaagctgccgtgacatggggggtccttgtctcgggaaaagcgggtctgtcctgtctctctcctaccaggcacaagtgcacggctctggttcggggggagtgttggggcgtggtgacgggtgggggcccctgtccctctttccagcgaaagaaaactcggaaggaacatgtaacaacacgccaagtcctggacccgtgaggctnnnnnnnnnnnnnnnnnnnnnnnnnnnnnnnnnnnnnnnnnnnnnnnnnnnnnnnnnnnnnnnnnnnnnnnnnnnnnnnnnnncggctcacatgatggagcagcatttacaacggtgcttcttcatgtcgaggtcctgggggtcgctggtggtggcctcc

SEQ ID NO: 436850 - DNA, 1008 bp, Homo Sapiens
  misc_feature (72)..(211): n is a, c, g, or t
gctggtaccggtccggaattcccgggatcccgccgccgcccggacaataaacagcagctttgcgcggggcgnnnnnnnnnnnnnnnnnnnnnnnnnnnnnnnnnnnnnnnnnnnnnnnnnnnnnnnnnnnnnnnnnnnnnnnnnnnnnnnnnnnnnnnnnnnnnnnnnnnnnnnnnnnnnnnnnnnnnnnnnnnnnnnnnnnnnnnnnnnnggacccacccggacctcggcggggagatggaggtcctggcggcagagaccacgtcccagcaggagcggctgcaggccatcgcagagaagcggaagcggcaggcggagatcgagaacaagcgccggcagctggaggacgagcggaggcagctgcagcacctgaagtccaaggcactgcgggagcgctggctgctggaggggacgccgtcctcggcctcagagggggatgaggacctgaggaggcagatgcaggacgacgagcagaagacacggctgctggaggactcggtgtccaggttggagaaggaaattgaggtgctggagcgtggagactccgccccagccactgccaaggagaacgcggcggccccgagcccagtccgggccccagccccgagtccagccaaggaggagcgcaagacagaggtggtgatgaattcacagcagacgccggtgggcacgcccaaagacaagcgagtctccaacacgcccctgaggacggttgacggctcccccatgatgaaggcagccatgtactcggttgagatcactgtggagaaggacaaggtgacaggggagaccaggttgctgtccagcaccacgctgctccctcggcagccgctccctctgggcatcaaagtctacgaggacgagaccaaaagtggtccatggctgtggacggcacccgccgagaaacgggatccaccccttgagctcctccgaggtggacgaactcatccacaaagcggacgaggtcacgctgagcgaggcagggtccacggacgtgcgggagagacc

SEQ ID NO: 436851 - DNA, 415 bp, Homo Sapiens
atttattaaattcccctcagatgctgtcggtattgttctctattgctgtagaaagactggttattagccataaatgactgtatttcatcttgtgagataaagatttcctcatctgaagtacattcagactcatcaaggagttcaactaagctcttggcaccttttccggaatcgggaccaaacaacgtttctgtaggttctgcaaactgtggtacatttttcctatgctcaaaccaaggcaatggctgcccacccttttcagagctgcaacagctttcaggatgtgtatctttggtcttgtcacggtgaaacactgtgtgcatggtatttcctgaggtctctcgattacctggatctgtaatacagcttccaagcttctggatatgttcatcacatttcagtatcttgcttttct

SEQ ID NO: 436852 - DNA, 930 bp, Homo Sapiens
  misc_feature (122)..(139): n is a, c, g, or t
tggctaattatatgagtaaatgaaaggatgggttaacaacgacacaaggggttcattttttggttttaggggaacagaaagcatcaaaagttaattgttggagacttgccttttgtttttcnnnnnnnnnnnnnnnnnncacaaagcagatctatgtgttttaattaatttatttacgtactcatttaattaactggcatccacatacgtgaaacagagtgaatgtacttgatgtacttgccctcacatccatttaccaccaatgcatacatagtacatgaatgaagcatcattgatctttgctgataacagggacacgcctagtggttagactatgtattctccatgaacagtatttaaagaatggtgctccatattgcttgtaaacatatagacatggacatcaggaaatcagtggatatgaaggtcatttgctaatcttggtaccacatagctaaaatggcagttgtattgataaacatctcatggggcatggtagttgacagaaaattcctaatgggtttaactaacagactaaggacatgcactgattacaggactctgtcccagcagactctaggaccaaatggtctaatcgtcttcttcgtcttcctcatcgctgtccttcatgctgatgccttgcagtcccccaccttcactcactgatgctgtggcttcctccacagtgagacggttccggatcgtttcataggtcttctttaccatcctaattagtgttttcaactgataaatatgaagctgtaagtccatccggtccgtcaaccaggtgcagatcacgttcatggagctgttgtaccattgatcaaataacctttctatgtacatctcctcattgaccttatcacgcaggacatcctgagaatggcggacgaaagtcacgtaggcgtcggccacgtccatccctggtgc

SEQ ID NO: 436853 - DNA, 503 bp, Homo Sapiens
  misc_feature (20)..(20): n is a, c, g, or t
gtgaacttaacctcctgtcnccttaatttggtcaacaatttgggagggtcctcctccctgggttttccaaggaggaaaaggcatttaacttaacatcaaaataacctttcctatgtaacatctccctcattgaccttatcacgcaggacatcctgaagaatggcggacgaaagtcacgtaggcgtcggccacgtccatcccgggtttctgtaaagaaacaggaaaacatgaaaacgaattttcagacagccactcttccttgtttaccattcacttgtaccctctacttgccctcacacaccctgagatgcttctgctggatcagctttgtaggcatgggattgctgtccacagcctgggctggtaggaattgatattagaactgcttcctctttccagaaatcaagcctggctaagaagggcattgagattgtaggattttataaatagtttttctatgataaattttttcctggcaaatttatctaatggataaatcttta

SEQ ID NO: 436854 - DNA, 1860 bp, Homo Sapiens
  misc_feature (1692)..(1692): n is a, c, g, or t
  misc_feature (1772)..(1772): n is a, c, g, or t
agccatacatagtacatgaatgaagcatcattgaacctttgcctgaataacagggacacgccctagtggttagactatgtattctccatgaacagtatttaaagaatggtgctccatattgcttgtaaacatatagacatggacatcaggaaatcagtggatatgaaggtcatttgctaatcttggtaccacatagctaaaatggcagttgtattgataaacatctcatgggcatggtagttgacagaaaattcctaatgggtttaactaacagactaaggacatgcactgattacaggactctgtcccagcagactctaggaccaaatggtctaatcgtcttcttcgtcttcctcatcgctgtccttcatgctgatgccctgcagtcccccaccttcactcactgatgctgtggcttcctccacagtgagacggttccggatcgtttcataggtcttgctgtttaaggtggagtccaggaccccttgcaatcggaaatctctgtaggttttctttaccatcctaattagtgttttcaactgataaatatgaagctgtaagtccatccggtccgtcaaccaggtgcagatcacgttcatggagctgttgtaccattgatcaaataacctttctatgtacatctcctcattgaccttatcacgcaggacatcctgagaatggcggacgaaagtcacgtaggcgtcggccacgtccatcccgggtttaggtacatccacatatttggaagctgccttcacggtaaatgacagaaaagaagaaaacaaagtcccttcgtcatatctggataattttgccagcactccttccaagatagtaacgaactttgcaaccaagagtgttatcatttctttaacagtttcttcaattagttcgtctatttttgaatggtattgatgctcttggcccatttccatgctgcaaagttttgttgattgagctttggcatcaaccataacattaaacatggtgcatattgactgtgggactcgaaaatctgttgatcgactggttttttgcagcttaacttcaaatgcaatcctggttcttttgacacaagattcgatcatgtcacttgccatcaacttcagccgttgttccaggtgctttccaaactcttcttcaggccagtgcaggtcccgaatgaaggtctgaagggcgtcaagtttccaaaacagatcttctgaggtgcctgacccattattgactggttcccatgactcccgctcaaagcccctgtgaatggattgtgcaattgaggactccatcagatccacatatctaacaacaagtggggcaaacaggtcttgcaggtgtttgtgaaattttccattgcacaaattatagtcagtacggagaaaatcattcagcagctgaaatagtggaaaactgtcccatgtgtctggaggttgcacctctaaggctgcatccatgtctactgcaaagagtgacaggaacgtctccgcatgctccaccattaaatctgaccaccacgcaaaggcctctgcgtggtgctcctcattttgctgaagaacttcaatgactagttcagcaagacgtattgtatcttcaagctttttggcaggagtgattaaccggcctacattttctgcatccttttgattctgaatggttaaatccatcacttgggaggccaagcagaagacaggatgntcatacatttctctctttttcccttcgattttggcatactctgagagccgagaatagttgactaacgcagcctgttccanacatttacggataactgtttttacctcctcttgtggcactggggtaacaatatctttcattaaaaccctttccaagagtgagagagta

SEQ ID NO: 436855 - DNA, 791 bp, Homo Sapiens
  misc_feature (29)..(29): n is a, c, g, or t
ggtaatgaagctctggccccaattccccngctgcaaaaattttgttgattgaagctttggcatcaacccataacattaaaacatggtgcatattgaactgtgggactcgaaaaatctgttggatcgaactggttttttgcagcttaacttcaaatgcaatccctggttcttttgacacaagattcgatcatgtcacttgccatcaacttcagccgttgttccaggtgctttccaaactcttcttcaggccagtgcaggtcccgaatgaaggtctgaagggcgtcaagtttccaaaacagatcttctgaggtgcctgacccattatccgcatcatatatagcagccatccatgacggtgccgaaaaagtaggcatttgtgggatgcctagagggatgttaactggtagatttggtactttgggaaggttcacattgggtaggttcacattgggtaggttactggttaaactcttgactggttcccatgactcccgctcaaagcccctgtgaatggattgtgcaattgaggactccatcagatccacatatctaacaacaagtggggcaaacaggtcttgcaggtgtttgtgaaattttccattgcacaaattatagtcagtacggagaaaatcattcagcagctgaaatagtggaaaactgtcccatgtgtctggaggttgcacctctaaggctgcatccatgtctactgcaaagagtgacaggaacgtctccgcatggctccaccattaaatctgaccaccacgcaaaggcttctcctttatcaacacgct

SEQ ID NO: 436856 - DNA, 632 bp, Homo Sapiens
tactttcacaggtgggacagttttccactatttcagctgctgaatgattttctccgtactgactataatttgtgcaatggaaaatttcacaaacacctgcaagacctgtttgccccacttgttgttagatatgtggatctgatggagtcctcaattgcacaatccattcacaggggctttgagcgggagtcatgggaaccagtcaataatgggtcaggcacctcagaagatctgttttggaaacttgacgcccttcagaccttcattcgggacctgcactggcctgaagaagagtttggaaagcacctggaacaacggctgaagttgatggcaagtgacatgatcgaatcttgtgtcaaaaggtaagtataggtggctggacaggttctgcacaccctccccaccatacacagactcagggaagggtagatggctgctctttcaattggctgtagtttgaaactaattggagaaggggattgcttgtcaaagtcagctggagtagtggctgtcaacgtctaacttccattcacctgccctccatctgtcccaaacccaaataatctggctgccaatttttcatggttgttggctttaagaggaaagatccctgtgaaaagtaggaccgtccg

SEQ ID NO: 436857 - DNA, 619 bp, Homo Sapiens
  misc_feature (469)..(478): n is a, c, g, or t
  misc_feature (493)..(493): n is a, c, g, or t
ttttttttattcttaggacatctgaatatttattgagaagccacagttttccacacttccataactgtaggctttatataaggcaaaagcaagatggatccactactttacatggaaagaaatagctctgcagcaaaccccagggttgtgcagttacagatcaaaatgcaatgtacatgacagatataaaaaacagtgtggaacaaaataatttaaattatggttacaatctactgaaggaaatatccacatcttattataaacacatttttagtctagggttgtaatttaaatattcgttttttttacatacacagttgagacgtaaaagcaaaataacatttaagagggagaaaactttgacagaagacagtagttttgaactgcgcgcttgatgttaagtcatgataggatcgcccccttgccgtggcaattaagagaatcaatccattgggtatgtagccatccnnnnnnnnnngggctaattatatgnggtaaatggaaggatggggttaaccacgacacaggggttcatttttgggtttaggggaccagaagcatcaaaggttaatggttggagcctgcctttggttttccaaaaataaaatgaaaccccagc

SEQ ID NO: 436858 - DNA, 506 bp, Homo Sapiens
ctccggggtggggtctaggccctggatgctgtgggatgtatagacgatcggatgtctggtatcaggaagccggcaacgagtggggatgaggtggaactccatcttcccaggcggctgcgtacccgtcttctccccgtagatggcttgcaggtggggcactgcaggctgccatccttgttgccattggagtacatggccacgaggcacagcaggtggtacatgtggccacagcggcccaggcggcccacgagctcaggccgcacgcccttgtgccgaagcacgccctcgtagcctgatgctgtgaccagtcgctccatgcagatggtgcagtcctcatcaggtgggtttttcaccttctgcatgtatcttcgaaccacatcctcgggattcttactctttttaaggtgcttcttcttggtcttgcggcacaccccgggcacgccaggcacgggcttcacgtcgctcttgctcacgggcggcgggtgcaggatgggcttgggggcccg

SEQ ID NO: 436859 - DNA, 895 bp, Homo Sapiens
  misc_feature (16)..(16): n is a, c, g, or t
  misc_feature (90)..(90): n is a, c, g, or t
tgcatctggtggaaantctgctggtctttcttcaaacccaatcaattgtggcggccttgttcaattttcagtgctgtgcaagatgacgcnactcacccatgggaaactatgttttccccaagtggggccagggtgtgggctggctgatggctctgtcttccatggtcctcatccccgggtacatggcctacatgttcctcaccttaaagggctccctgaagcagcgcatccaagtcatggtccagcccagcgaagacatcgttcgcccagagaatggtcctgagcagccccaggcgggcagctccaccagcaaggaggcctacatctagggtgggggccactcaccgacccgacactctcaccccccgacctggctgagtgcgaccaccacttgatgtctgaggataccttccatctcaacctacctcgagtggcgagtccagacaccatcaccacgcagagaggggaggtgggaggacagttagacccctgggtgggccctgccgtgggcaaggatacccggtggcttctggcacctggcgggctggtgacctttttaatccaggccccatcagcatcccacgatcggccttggtaaccgccgcggtagatcatttttatcccgccaggagtgtgatgcaggaagaccacatgcgctcctggcttttaaacctgttcctgactgttctcttactgccgaaacccttgactgttatctcggactttgcaggagttcctttccctccgaacgctgctccatgcacaggaaaagggcattttgtacaatggggacttcccgggaacgcttgctcttaagtaccagaagccggcggagctctggctttcgtgtttttggttttctccttcccaaggcagctggattgaaacaacaaac

SEQ ID NO: 436860 - DNA, 815 bp, Homo Sapiens
gcctgtcgctctgtctcctctcgcttctgtgtctgcttcgctgcctttctggtgtcgctgcttcgcgcttcttggtgttgtttgctgttctcttgttcggtgcttctctggttcgcggcttctgttgctcttcgttgtttctgcaggcaggcctgagcaatctttattctgcagagggacaatgaccacagatccatacaccacgtggagaccgaggggcggggagccaggggccagtctttcaggggtgggcaggtccaggcggtgggcagagcctcgggtgggtgaggggcagatgggcagaaggcaggggcctaaaaaaaagatgaaccacacagcaggggtgctgggagctgctccccaccctcccccatcccaccagccagcacccagagggacaaccctaacacgaccggcccaggatccacccaggggcagagtaggtgggttggtgccctctgactaggggggcacatgcctgcccagcccaccacggtagaggcagctcagttcaggaaccaggagctctctgggcagggcctgaccggggccccccgactcccaggccgagcccccctactggtggctcagaagccgaatgttttctgggaggcgtataccatatagaggaagccgtcctcgtctttctcctgctcgtatatgtcctcgatgggcgtggacacactcaccatgctgtgctggttcatcagtaggaagaatggctgcgtggggtcaatcctgacatcggcacggatgatctttgacaattcgcttattgttacattgttcgggaccaaaaacttgactgtgcgtag

SEQ ID NO: 436861 - DNA, 860 bp, Homo Sapiens
gggtccggaattctccggatcctgacgtcaccgggcgagttacctcccgcagccgcagccgccgtgctcagcgcgagccccggagcccttgagcgcgaggcgcggagcccccggagcccccaaaccgcagacacatccccgcgccccagagccccggcctgcgcgcccagccgggcccgcgcgatgccctcagaccggcctttcaagcagcggcggagcttcgccgaccgctgtaaggaggtacagcagatccgcgaccagcaccccagcaaaatcccggtgatcatcgagcgctacaagggtgagaagcagctgcccgtcctggacaagaccaagtttttggtcccggaccatgtcaacatgagcgagttggtcaagatcatccggcgccgcctgcagctgaaccccacgcaggccttcttcctgctggtgaaccagcacagcatggtgagtgtgtccacgcccatcgcggacatctacgagcaggagaaagacgaggacggcttcctctatatggtctacgcctcccaggaaaccttcggcttctgagccagcagtaggggggctcggcctgggagtcggggggccccggtcaggccctgcccagagagctcctggttcctgaactgagctgcctctaccgtggtgggctgggcaggcatgtgcccccctagtcagagggcaccaacccacctactctgcccctgggtggatcctgggccggtcgtgttagggttgtccctctgggtgctggctggtgggatgggggagggtggggagcagctcccagcacccctgctgtgtggttccatcttttttttagggcccctgcttgtctgccctttgtcccttaccaaccg

SEQ ID NO: 436862 - DNA, 2309 bp, Homo Sapiens
  misc_feature (2164)..(2263): n is a, c, g, or t
ttttttttagtgtttgatcaataaatcaatttatttaaaagaatatgttacaattaattacactaagtgacattaccaaacaattttagagtggttagctctagaacaaggaatgaaagaaacaatgttagccattattgtgtctgtgtattttctcttcacatttcttaaatcacaaataaaaaatacaagatactgcagtgaaaatacaattagagtttctctgaaataaattaaatgtgcatggcctgggaaaaactgaagcccagctcactggcttaaaagggggtcatgatataaaattaatgtccaagtttagcaggcggccaagtgcccccaccccgtatcactcccctctttgattctattccttaccacagccctgaccttcccacataccctagattattgctgaggagtgagctgatgctgtcctggcagcaaagaggcctggcgtgatgtgctcaggtttaggggaacaggaagtcaagaggtggacctggaagatggggagctagagaagcatacccactatctctcttctccctccctctctctgagtgttctatcacatcatcctcccaaaggaagctactgtgacacaatgaagctggtgaagaaacagcagtatgctggggtcaacagatcaaacagcttctactgctgaatgaatctagccaaacagtatgatggcgagaagggagagcacagcagtccctcctggtctggaaaattcaggtcaactaggatgcagtccccttcaagaaaactacctcctaggagcccagcccagaagttggcaaattctgagataggagagagtttcatctcctgtcagtgccctattttgctgctccaagtgctgggtttggagctacaggaagggataacccaaagctactggcctgggtaactaaaggatgaaactaaatgggccaggcatgaggatgttggaatatttatctaattcccccctgagagctcagtccaggcctaggagctgccctgagcatgcacatatctgtacctgtgtttaggcctagggtaaggacggggtggaaaaatggagaatagaataaacatataaagagcagagggcccaaagcatggcccaagggaacctttctgcagggacaggtttctcagggtctacattttctcctgggccataaaaagctctgagcttctacccctgaggatagaaaccaagtgtggaggaaggccagtgagagaccaggaggatcctgctggttctgctgggatgaagctgggggcactgggagaccccctcttcccagggacaaattgcaaaagaagtctgggtagaagcctccctgggcagaagctgggactaagaagaacagtagggattacagaaaggaagtgcagaggaaggggagagagaagagtcacaacactgcttcatgcaaagaagggcttgatcctatgggatccacgcagccacagggaacccgcctccatcacccaaggccgtgcatgggtggaagagaagaaggcgctgtcctttggggtgccctccttccccacctccttgctgcagctgggtgctttgttactgggacactttcaaaagggctgttcctaaataaattctgccaacaggccaactacctatagggccctcacctaatctccaaagcaccaagtgaatgctatgccagaaagggaacataacaccatctacccattctaaggggcctccaaatccctatgtctcatgtctgaaggtcagcattcaagctgtcgcatggaatcccagctctgttcactactgtcccactctgagcgagtaggggcaaattgctatttttacagtttgaacaaagctggtgccaagtctctttagcatctaggagtgggaaatcaacatgtcttcttttcagggtcctttggctcattttaaattcatttaagtcaaaagaagttagttctgtgtcaaagtcttcaaattagggatccctctgcaactttacacattcagcattctcacgttttgtactctgtgatttcacctagatttggagaaggtgagggaggaaaggctgtcctctttgatcccataccatgcaggggcaaatggctgccagcataacaaaataagaaggaaagaaagaaaagtgggccaggcgcagtggctcactcnnnnnnnnnnnnnnnnnnnnnnnnnnnnnnnnnnnnnnnnnnnnnnnnnnnnnnnnnnnnnnnnnnnnnnnnnnnnnnnnnnnnnnnnnnnnnnnnnnnnatacaaaaaattagtggggcgtggtggtgtatgcctacatcccagc

SEQ ID NO: 436863 - DNA, 493 bp, Homo Sapiens
  misc_feature (248)..(248): n is a, c, g, or t
  misc_feature (253)..(253): n is a, c, g, or t
  misc_feature (293)..(293): n is a, c, g, or t
  misc_feature (373)..(373): n is a, c, g, or t
  misc_feature (413)..(413): n is a, c, g, or t
  misc_feature (440)..(440): n is a, c, g, or t
  misc_feature (456)..(456): n is a, c, g, or t
  misc_feature (465)..(465): n is a, c, g, or t
  misc_feature (473)..(473): n is a, c, g, or t
aatgctgaatgtgtaaagttgcagagggatccctaatttgaagactttgacacagaactaacttcttttgacttaaatgaatttaaaatgagccaaaggaccctgaaaagaagacatgttgatttcccactcctagatgctaaagagacttggcaccagctttgttcaaactgtaaaaatagcagtttgcccctactcgctcagagtggggacagtagtgaacagagctggggattccatggcgacantttgnaatgctggacctttcaggacatgaggacataggggatttnggagggccccttaggaatggggtaggatgggtgtttatgtttcccttttctgggcataggcatttcacttgggtgctttnggagattagggtgaggggccctattagggtaggtttggcntttttggccaggaattttttttagggnaccagcccctttttgnaaagttgtnccccattnaccaaagggcaccccagctg

SEQ ID NO: 436864 - DNA, 1169 bp, Homo Sapiens
  misc_feature (14)..(14): n is a, c, g, or t
  misc_feature (394)..(402): n is a, c, g, or t
gaatcgggagcgtnatagttgtactcattttacctatttttaccaggtggttgtaggaacaggattcattcattccttcattaatataatgaacactttgagaccccactatataacagggccatacatatgacaaggtgatagatggaaagacgttttgcagaatttttgaagacttgcaatgtttttgaagactacaggatagtttgtgatttttatattaaggtcgtatcaactctttatgtcaatatatcaaagtaattgacacttttagagctctgccaatcagtgggccatattcatagaatgtcagtaatctgtctgaatacaagttatagttggtctttagctgttctgtctctgaggagctagaaataaaatattaggttctaannnnnnnnngttcaaacactgatcatgtaacaaactgcaaatccatgttttcagcaggttcgccaacctttgagttgaatgcagacctttctttagaacaacctaactttgagtacaggcaaagtattaaatggaatagcttttcctcccctacaaagtggatttgaatacagtccttagaaaaattcttcccctgccaaaaaaggtccttcaatctcctttattatttttcttttgaagaatcaaacttgtccatctctcccctcccaagtgactttcctcactcatgtaatcattttcttcataaatgcccttttactatcccacagaaaaagtaaagatttaaaaaatcatttttaaggtacatccaagatttcatagcaatattttatttgtgttcacagtgcaagataaatctgactttctcaatatttttggtcttcatatggcatctgaaacagttgttcacattcacacatttatgtttcaccatatgcatactgtgtacagctctgttgttctaaaatattttattggttttcctttatatctcaactttttgatgggtgtccttgaagaactttcatgaacaaaaatgtaacattgtgaatgattcattccattttgaacatatgtaactattttaggagatcttcaggagattttaccctacatggagtaaccactgttcttagcagggaatgtgctttatattactattctactcacagtggatgctgcgatgtttaacttgctaaccttgtcttttctatcca

SEQ ID NO: 436865 - DNA, 1412 bp, Homo Sapiens
ttttttttggctgaatccatcctagtgttgcgttagcctggctctccccattttattcaagcacaaattactaacaagactcttttccagtcttagctttgccaaaactatttttagagcatcatttaggcttaggtgatataaaaattctgctagttttacaaaccagcagccttccaaggcaaaaagcaattcatgccaggaaagtagcaaaggattattcattttctgtccataggctggtaaggagttttgtatctaataggctgccttcaacacaataattgagaagaggaactcataagcaaagctaaagaactcatccttagagaatacaagttcaaactgagaaaggttttacttttaagacaaaacaaatagcattaacacacatccaaatgccagtgcaggagttcactgggtttataaaagagaaaactaaactcaagtgtcaaataaaaactggagccgtcaagaatgactgcttgtggcaacacaggtgtaacatgtgcttgtctaaagtcgttctgtgtttgtggatatgtggaaatgcatgacgagggaaacgatgcaaggcaaaatggcaggtgctcaaagctttaagatccttttcttcacgcttgtgtgctcttgttttgcttttgagaattagggtaattcgcaggtcattttacaaagaactgtaatatcaaagaacacttccaaacggctaaaataggctcaaggtcactattaaagtgataaagggaggtccgtgggggaaaagtttgtgttctcaaaagccagatttcacaccatggcaggcactaaatctagttacatgtgcttgcagtagaaaaagaagacactgatcttaatagaggctggtctttttcatgatgcgcaggaactcttgctcactgacctctccatctccatctcgatcagcttcatcaatcatttcctgcagctcctcatcagtcaggttctcacccaactccttggccacgcgtttcagatttttgaacgaaatcttcccagtttcatcatcatcaaagagcttgaaagctttcaggatttcttctttagtatctttctcagacattttctgggtcatcacagttaaaaagtcaccaaagttcatttttcctgtcccttccttatcaatttcacttatcattttcttaatttcttctttcttgggttcaaagcccagggccctcattgccaccttcagttctttaacatctatggtgccagttccatccgcatcgaaaagatcaaaagcttcccggatctcctgcttttgctcttcagtaagctcaggcttagggctcattctttttcgctgagaacttgatgccatgtttgccttcttaaagttggaggccatagccaaaggagtccgctgccggttgttaggccaccccgct

SEQ ID NO: 436866 - DNA, 801 bp, Homo Sapiens
ggaggaattaaggggtaatttcgccaggtccattttaccaaagaacctgtaatattcaaaggaacactttccaaacgggttaaaaatagggctcaaaggtcactattaaaggtgataaaggggaggttccgtgggggaaaaagtttgtgttctcaaaaggccagattttcacaccatggcaggcactaaatctagttacatgtgcttgcagtagaaaaagaagacactgatcttaatagaggctggtctttttcatgatgcgcaggaactcttgctcactgacctctccatctccatctcgatcagcttcatcaatcatttcctgcagctcctcatcagtcaggttctcacccaactccttggccacgcgtttcagatttttgaacgaaatcttcccagtttcatcatcatcaaagagcttgaaagctttcaggatttcttctttagtatctttctcagacattttctgggtcatcacagttaaaaagtcaccaaagttcatttttcctgtcccttccttatcaatttcacttatcattttcttaatttcttctttcttgggttcaaagcccagggccctcattgccaccttcagttctttaacatctatggtgccagttccatccgcatcgaaaagatcaaaagcttcccggatctcctgcttttgctcttcagtaagctcaggcttagggctcattctttttcgctgagaacttgatgccatgtttgccttcttaaagttggaggccatagccaaaggagtccgctgccggttgttaggcaaccgacgtgtacactccc

SEQ ID NO: 436867 - DNA, 1140 bp, Homo Sapiens
aatagaggtggaaaggtacatacaaccccttcccccacatacttccagtgaggcagctaagtccaccaacagagcgtgggagagtctttcatccaaaaatcccaacacgtcgcatgcagcgacaggaggctgtgctggggaaacccaaggcctggctcagcctccatactctaagggcctcgggccagaacgaccacgagaggggagcacccaaaggcacgcagaggggcccacctgggtgcactgcagaggggacagaggggctgtgagtgggaggtgggccagtgctgttcactgccgcctgctcaggaccaggggctgctgcagacccagcccggtctatgcccacccccgcaggtgcagcccagcttctgcacatcagatggagtgacgctgactaaaggacctggacagcgccggcagatactcccaacactgtgcttctctttgggagccaaagagaagccacggcagatactcccaacactgtccttctctttgggagccaaagagaagccacggccaggcagccaggccagagccatttcctcctcacaccagggcaggggttacagaaacctcttcccaagacatttacaagcacctctgagccatgactatcaacgggaaaaaagggcaaagtcagtgccctggaggaccaggggcatccttcacctgggcactgtccctacggggcacagccctctccccaggcgagctccctgccctctggcaccatcatctactagttcagagccaggacagaggcagggcaggggcagcgcggaccaccaaatcagagtccctgccagcacctccagcgacatcacgcccagcagcaggcgacaagaagccactgcaggggcagacactcaggagacctccggcctccaggccaccggacgggctgaagaggtcaaaccacccctggcccaccagggccacgctccctgggaaccacagaatgggcagaaaaagtttcccagagccaggaagcatttcccacacagaaacactcatgtggacacacatcctctgtctgcagggatgcagctggcgagctgtctcactcacaccccaagctgaactcgcctagagcgtccggagacagaagggcaggcgtccccagcccacagtggg

SEQ ID NO: 436868 - DNA, 1159 bp, Homo Sapiens
  misc_feature (459)..(459): n is a, c, g, or t
  misc_feature (468)..(468): n is a, c, g, or t
  misc_feature (475)..(512): n is a, c, g, or t
tgaagatcaaaaacaggcttgttttatttatacacagaacaacttatgtacagcactcaggtatggactatgtacatgacaatacaagaggcgtttgtttccacggtggtcactatataaattaagattataaatacgagggggtaagccccacctgagggcacagaaccttttctccaagactcttcagggatccttcctgcctctctctgcacagcagaccatgaggcccgtctggcaacaccacaaggggacctgggccggggcagcagagcagcccccagacagcgaggacaccccagtgcgggacgccagcccagcaccaaagggcaggttcctaaacactcatgttcattccttcctcacattctaacttgttagaattagaaaaatggtttttatgtaaacagtgttgttctaatcactgacaacatattaattttaaacacttttgatccnaaccccccnccttgcnnnnnnnnnnnnnnnnnnnnnnnnnnnnnnnnnnnnnntccttgccgccacagtcagctgtttatcctcctcatgtcccctccccacccaagtttcagcttgcctggggcttgttctgggaccctaagaaccccaggatgcccacacgggcaggccagcagggccaatggtcatgcagggactgcgggacaggttcccatcatctcctgtgttagcccattccacctgggaaaccaagcgactgccgtggctggcttatttctccctctgccaacccccatctacaatgttctggggaaaacaatgagaggtggaaaaggtaacatacaaccaccttccacccacatcacttccagtgaggcagctaagtccaccaacagagcgtgggagagtctttcatccaaaaatcccaacacgtcgcatgcagcgacaggaggctgtgctggggaaacccaaggcctggctcagcctccatactctaagggcctcgggccagaacgaccacgagaggggagcacccaaaggcacgcagaggggcccacctgggtgcactgcagaggggacagaggggctgtgagtgggaggtgggccagtgctgttcactgccgcctgctcaggaccaggggctgctgcagacccagcccggtctatgcccacccccgcaggtgcagcccagcttctgcac

SEQ ID NO: 436869 - DNA, 445 bp, Homo Sapiens
ggaagatcaaaaacaggcttgttttatttatacacagaacaacttatgtacagcactcaggtatggactatgtacataacaatacaagaggcgtttgtttccacggtggtcactatataaattaagattataaatacgagggggtaagccccacctgagggcacagaaccttttctccaagactcttcagggatccttcctgcctctctctgcacagcggaccatgaggcccgtctggcaacaccacaaggggacctggggccggggcagcagagcagcccccaggacagcgagggacaccccagtgcgggacgccaggcccaggcacccaaggggcaggttcctaaacacttcatggttcattcctttccttcacatttttaacttgtttaggatttaggaaaaatgggttttttattgtaaacagtgttgttcttaatcaact

SEQ ID NO: 436870 - DNA, 876 bp, Homo Sapiens
cttctggtgggtagtaacagctcgttaattggcaaacatgccccatgtccttatgaggaacagaatgatcagtagattaccaaatgtatcagaaggcagctgttggacataccagcatataccttaccagtaacagaacttttggtggaggttaaaatttcatcggaatgtataagcttatttattagtgtatttaatggttcatcaattgataaaacaggtgtagcaaatacatgccttccttttgggggatgggcctggttaatctccaaattggccgtttggaacaactcatcattactgtacaaagaaggtaccacttggtgggaactttcactttttaacaaaactggttcatatttctcacttgcataggaaatggtcaaaccttgaagtgaagcagagtgcatatgagaagtaggcgacacatcaaaaactggtacagatgtagagtgcagcatgttttcacttgaagcagaatttgatacaatgagatgcaacattgtagaactaattttatcaactttgggggtttcaaccaatattggatcactgggcacagctggaagaacagttttaagcaaggtgtcaacatcagaagcctgaaaggaaggttgtagcaatacttcagtactaaaagaagctgaggtctcataaaataagagctgagttgaaggagataacatttcactaggagcagggtcagaggatgctggctctgagtttgcactaagcacaggtttaagcgaagtgtcaccagatgcttgagagacagtatgtgtaggttgaactgaaaagttattttctggaacttgactaatcccttgctcataccaccactaaggtttttgatcatgagattagtcaagttccaga

SEQ ID NO: 436871 - DNA, 1592 bp, Homo Sapiens
  misc_feature (72)..(72): n is a, c, g, or t
  misc_feature (103)..(103): n is a, c, g, or t
  misc_feature (189)..(197): n is a, c, g, or t
  misc_feature (1511)..(1547): n is a, c, g, or t
ccggtgcacatgccagggctacagacaacggcccatttctaggcaccctgcagcttgaagatcaattgacanctgtaaattgacaaaaaacaacttgaattcnaatgtatgaggattgaattgatacttgaaaagtaattactctaaaacgcatgagtgattgacaagctttctgattccattgaaggnnnnnnnnngttgttttggattaaatagccaattaggtttctcttttcaaattttatatccttttatatgatttttaaaggcccaattgatagaattgaaattatatatgatgttaaaattgaagatgaacaggatgaattattatacaaatgctccagttctgaggagcctctcattcacagcattgtaagaagttcacagtaaaggaatattttacactatgttacttatcatttttacttagtttaacaataagaactggatagtgctttgtaattcaatggaagtttttgaaagcctagtcaccacttcaaaacacactaaaaattatactaaaaattttaagtgtttaaacatgcaagaataagagcggatgataatgaacatgtgaaagatgatgctgatgaaaagtgaaacttcaccgttagactcctcttcatgtcaggcaatttgagatatacaccatgttgttttctactgctcaaactgtgctttggcaattaaagcctgcctcttacatctctgtgtgtggcagcaaaatggagtctcagcaaccaggcaggaaaatgacacaaatcctgcagcagggtcaatggcagtagcaaagaattaaacagaaaaagagaggttagataaaacagttcaaggtagtagcaagggaccaggctaaaggaagtcaggcagtcccaggttagcacaaagcttccaggggacatcagaggtgtcactgggctgaagacaactcttgtgttgtccgttgctttgagtcctttgagttgctttctgaggcttttcatccattggcagcttcacatcagctccatcctctagagggacctttttcattacgtggattctgatccttttgaagtggttaccatcaagtaatgtggagctcactaaggaagtccacatcctcaagacagtgtccacagccctaattcctcttcttcaaagatgtcccccttccaggcataggagtgtgaatctgggtgctaaatcatttctcctctctccacacatcctaatgctacagtctaatgaggggactgaagatgaaatgcccagatgcatatggaggcagacacatggatagattcttccaaaacgtcagctggtgcttttccagccaattaagaacactcatgaaaattctttctgaagtaccaggacaaatctcttaagagttgggtatgggattttggagtccttttgatgtgctactctttagccctcaaaggtgattgagaggtggtcacatttcatgaacatctaaccacgccgctctcgacgaattcgagctcggccgatttggcctgatnnnnnnnnnnnnnnnnnnnnnnnnnnnnnnnnnnnnncggccgccccgcgtgagcccattccccatagtgatcgtatacatc

SEQ ID NO: 436872 - DNA, 1847 bp, Homo Sapiens
  misc_feature (149)..(675): n is a, c, g, or t
caaaggccccacatcccgaaaatgcctcttagcgcctgtacggggcattaactcggcgggtttggtgtttcgccaacgttaacggtacacttccaggtccctagggcgattcctttgactttctccgttccttctttacaactttacannnnnnnnnnnnnnnnnnnnnnnnnnnnnnnnnnnnnnnnnnnnnnnnnnnnnnnnnnnnnnnnnnnnnnnnnnnnnnnnnnnnnnnnnnnnnnnnnnnnnnnnnnnnnnnnnnnnnnnnnnnnnnnnnnnnnnnnnnnnnnnnnnnnnnnnnnnnnnnnnnnnnnnnnnnnnnnnnnnnnnnnnnnnnnnnnnnnnnnnnnnnnnnnnnnnnnnnnnnnnnnnnnnnnnnnnnnnnnnnnnnnnnnnnnnnnnnnnnnnnnnnnnnnnnnnnnnnnnnnnnnnnnnnnnnnnnnnnnnnnnnnnnnnnnnnnnnnnnnnnnnnnnnnnnnnnnnnnnnnnnnnnnnnnnnnnnnnnnnnnnnnnnnnnnnnnnnnnnnnnnnnnnnnnnnnnnnnnnnnnnnnnnnnnnnnnnnnnnnnnnnnnnnnnnnnnnnnnnnnnnnnnnnnnnnnnnnnnnnnnnnnnnnnnnnnnnnnnnnnnnnnnnnnnnnnnnnnnnnnnnnnnnnnnnnnnnnnnnnnnnnnnnngcacttaaccactaaatctttattgaatttttattgtaacagcaatgcaatattagcaaatagagagaaatatagagtgaagagaatacagcaataaagttagaaggaggggtaggggcaatggggttcagtggtaggaggagggctactgacaggggtaaaagcaagggtttttatttatcacttttataacttccatgaaaatttaccatccatcattgacaagttcattctagcagtaatttatcagaggtcactcatcctctattaaattattaatctaatcacctttgaactttctcccactggggtttttatccatgtccaattcgctctaaataagttggtctccctgcagttccctccgagtttatttgaaatctttaaggatagcaattatagggtaaagggttacaagtaagtacgcatgtccacttatagcgatatctaatacataatattattctaacattctaaataaccccacccacttaaaattacttaatagtccctcccaccctaaaatgcttatgattatatatcccctattacttaaacttgattacacaaagaaataaaagcaatgcaattttccacagaccaattcaataccattctacaatctaaaacaacaaagaactttcagtctcatcagatgtgcattctctctttggatgagcatgtagcatggttcccgcagggctctccatttctgcccaggtctttccagcaggttgttctctgttgtccactcttggaaactgttctgtatctgatgtgagatgtctgtggtggatgacaactggatcaattcagaagtccaagaggtacctacaaacttaaacagaattccagactgcaccatatagatgtggccctcttattttgtgcacctgcaagttcactgtattacttcacgatttgatcagactaattctccttttttccactaagacaatacctcactgtccaactaaattgacccttcataaatgtatgtaaactttctgtgtttcaatatcctagcatgataaatttagctagagctcccattgataggcaagcctagagagaactagctaaatttatcatgctaggatatgtaaactttctgtgtttcaatatccgacgcgtggtcgacgatatcccggaattccggaccggtacaggcc

SEQ ID NO: 436873 - DNA, 1385 bp, Homo Sapiens
tccttcaatggaatcagaaagcttgtcaatcactcatgtgttttagagtaattacttttaaaatggtgcatttgtgcttctgaactattttgaagagtcacttctgtttacctcaagtatcaattcatcctccatacatttgaattcaagttgttttttgtcaaatttacagttgtcaattgatcttcaagctgcagggtgcctagaaatgggccgttgtctgtagccctggcatgtgcacacggacatttgccaccactgcaagcaaaagtctggagaagttcaccaacgacaagaacgattagggaaaatatgctgctgtgggttaacaactcagaaagtccctgatccacatttggctgtttactaaagcttgtgattaactttttggcagtgtgtactatgctctattgctatatatgctatctataaatgtagatgttaaggataagtaattctaaatttattattctatagttttgaagtttggttaagtttcctttcactcaattgatttattttgttgttaatcaaatttatgttaattggatcctttaaattttttttggcattttccaacaaaaatggctttattcataagaaaggaaaaaaatcaatggaatttgatatctaaagaagttagaaagggagcaaaataaaaaacataaaggagatagatgaattagtaagcaaatcagtagtcgagtttttcaaactggcaaaattaattaattgacttttagcccaaatttacattgttaattaaatcaagaaggaagaagatctaagagctcccattgataggcaagcctagagagaactagctaaatttatcatgctaggatattgaaacacagaaagtttacatacatttatgaagggtcaatttagtttggacagtgaggtatttgtcttagtggaaaaaaggagaattagtctgatcaaatcgtgaagtaatacagtgaacttgcaggtgcacaaaataagagggccacatctatatggtgcagtctggaattctgtttaagtttgtaggtacctcttggacttctgaattgatccagttgtcatccaccacagacatctcacatcagatacagacagttccaagattgacaacagagaacaacctgctgggaagacctgggcagaaatggagagccctgcgggaaccatgctacattttcatctaaagagagaatgcacatctgatgagactgaaaagtctttgttgtttttagaatgtagaaatggtattgaaattgggtctgtgggaaaaattgcatttgccttttatttccttttggggaaaatccaaggttttaaagtaaattagggggaataataataaattcaataaacccatttttaaggggttgggggaa

SEQ ID NO: 436874 - DNA, 1155 bp, Homo Sapiens
  misc_feature (245)..(245): n is a, c, g, or t
  misc_feature (956)..(1019): n is a, c, g, or t
gcggccgccgcgcgcatggccggcgccaatccctacctgggcgaggaggccgagggcctggccgccgagcgctcgccgctgccgcccggcgccgccgaggacgccaagcccaaggacctgtccgattccagctggatcgagacgccctcctcgatcaagtccatcgactccagcgactcggggatttacgagcaggccaagcggaggcggatctcgccggccgacacgcccgtgtccgagagttncgtccccgctcaagagcgaggtgctggcccagcgggactgcgagaagaactgcgccaaggacattagcggctactatggcttctactcgcacagctaggccgcccctacccgcccggccccgccgcggcccggacccccagccagcccctcacagctcttccccagctccgcctccccacactcctccttgcgcacccactcattttatttgaccctcgatggccgtctgcagcgaataagtgcaggtctccgagcgtgattttaaccttttttgcacagcagtctctgcaattagctcaccgaccttcaactttgctgtaaaccttttggttttcctacttactcttcttctgtggagttatcctcctacaattcccctccccctcgtctttctcttacctcctacttctctttcttgtaatgaaactcttcacctttaggagacctgggcagtcctgtcaggcagcagcgattccgacccgccaagtctcggcctccacattaaccataggatgttgactctagaacctggacccacccagcgcgtcctttcttatccccgagtggatggatggatggatggatggtagggatgttaataattttagtggaacaaagcctgtgaaatgattgtacatagtgttaatttattgtaacgaatggctagtttttattctcgtcaaggcacaaaaccagttcatgcttaaccnnnnnnnnnnnnnnnnnnnnnnnnnnnnnnnnnnnnnnnnnnnnnnnnnnnnnnnnnnnnnnnnaattttcttgtgagataatattctaagaggctctagaaacatgaaatactcagtagtggatgggtttcccacttctcctcaatccgttgcatgaaataattactatggtgccctaatgcacacaaatagctaaggg

SEQ ID NO: 436875 - DNA, 2368 bp, Homo Sapiens
  misc_feature (1831)..(2046): n is a, c, g, or t
  misc_feature (2312)..(2312): n is a, c, g, or t
cgaatgctaggaaactttatcaaactgaaatgatagttaactttctaaaagcaaacttaagagtaaatcttaggaaatcagatagtagtcttgaaactatggaaaagacaggagtgatggataaggttcaggcagagtctgatggggacatgtcttcagataatgactcataccactctgagtgaatccttacaaattctaagtcggatgaagacaggcagttagctaagctcattagagagtgtagggccaatagataacgttcttcctagtggtggtattattgcctcagcgcctcgatggggcagtcggtcccagtctcttagcagcacagatagtagcgtgcatgctccttcagagattagtgttggtcatgggagtgggcttggaaaaggccaggagtcatcctttcgaagaaaagtccttctgctggcgacgtacacatattgactggctttgccaagcctatggatatttactgccacagatttgtgcaagatgcaacagaacaaagtgacccacctatcagagaccagatctgtgtctcagcaggctagtcaggaaagaaatcaaatgaccaatcaagtttcaaatgaaacccaatcagaatcaacagaacagacaccttctcggccatcgcaattagatgtctctctttctgcaacaggcccacagtttttgtcagttgagccagcgcattcagttgcatctcaaaaaacccccacctccgcttccagcatgcttgaacttgagacagggcttcatgtaactccttctccttcagagagcagtagcagcagagcagtctctccctttgccaagattcgaagttccatggtccaggttgctagtattacccaagctggattaacccatgggataaactttgcagtgtcaaaagttcagaagagtcctccagaacctgaaatcattaatcaagtccagcaaaatgaacttaaaaagatgtttatacaatgccagacacggataattcagatttagcttttagccataagaatccttccatggcttttatttaaaaatatgaaattttcacctcttggggtattttaattgtactgtctgaacccagggatcacaaattctgttcattggaaagggttttaaacggagtcggaacctgagtagatttccaaattttacagccaggactacagaagtgcatcattctagaatgtgtagacctgagtagcttatacactacagagcactttgcttatttgaaagtaattcagcaacaggtcactttgggatataacctgaacctttttttggagtggggtgggtagactacagtagacacaagggctggacatgcagatgcttaggggattagcgtttttcataatttgttctgtttgtcagttcattcctgtgtgttcttacctctacaaagtaaattacacatttagtttttagtgactttaacatgttactgaagcatttgaatataaagctattttagttttgatggcttaactgttccctgaggagttgagggttattgacactagagaaatgaattctcatttgatcctaattttccccgtattctacttgaacacattaaaaatactctgctgcctatacaatgtaaacctaggagcattaagacttgtcacacagtaaacctgatacatcagaggtgaataccagcacctattaggtttcattttgctgttttcaggaatgtaagaacacccatattggctactggaaattctagcagtcagtcaggttttaatttattccaggaggggcatcctcgacatcttatgtagatgatccacaacttcaaaatttagtctgnnnnnnnnnnnnnnnnnnnnnnnnnnnnnnnnnnnnnnnnnnnnnnnnnnnnnnnnnnnnnnnnnnnnnnnnnnnnnnnnnnnnnnnnnnnnnnnnnnnnnnnnnnnnnnnnnnnnnnnnnnnnnnnnnnnnnnnnnnnnnnnnnnnnnnnnnnnnnnnnnnnnnnnnnnnnnnnnnnnnnnnnnnnnnnnnnnnnnnnnnnnnnnnnnnnnnnnnggacagagcaagaccgtgtctcaaaaacaatttagtctgaaacacaattgtgctgaatctgtctgactataactctgaccacacagaaccagggctgcccctgtaatccccacagtaagaaagttgtatggcatattccaacaagtattggttcgtctggtgtctttagagctttactctgttgaagtgactgattctcaactgaacattatgtcgttactttgataagcattccacttttgttatttattagtgctatctttttnttttacgtgttaaatcttgtgattattaaaataaagtaccattgtaatttaaagtg

SEQ ID NO: 436876 - DNA, 1485 bp, Homo Sapiens
  misc_feature (11)..(11): n is a, c, g, or t
  misc_feature (15)..(16): n is a, c, g, or t
  misc_feature (40)..(40): n is a, c, g, or t
  misc_feature (43)..(43): n is a, c, g, or t
  misc_feature (52)..(98): n is a, c, g, or t
  misc_feature (110)..(110): n is a, c, g, or t
aattatctttntttnnttttagaaacagggtctcactctngtngcccacgcnnnnnnnnnnnnnnnnnnnnnnnnnnnnnnnnnnnnnnnnnnnnnnntgggctcaagtnatcctcccagcctcaacctcctaagtagctgggatcacaggtgcgtgacactatgcgtggctcaaattctttttactttgaaggccctgctagaaacttgctgctgctctaattcacgacttggagagacaaaactaaaaaagctgttgctgggttcaggtgctgtgggagaacccgcaaaaaatggtctgaactgaaaatctccatctccatcgccccgatttcgaacaggtgtattatccaaaggaaacttggagttgttacctaatgggaagccaagaacaccagactgtgcaatcatggatggttcaagggtgccttcatggttagcaatagtgatgtttcgtagcctaaggctatcatagaggccttggagcttttgatactgacgattgcgctccataagtttctcagagatgtcactgaactttttcttgtattcttctagtactttcttcatggaggtaacctcccctttcatagaggtcaattctacatccttgctttgtatttgctgagtatatatcttctccatctgtttcagatggccctcagccttgctgaaattgtattcttgatagagacgttcctgatgtacctgatatgtccagaaggccagcgctcgggagctaatgtccaacacgatctctggtcgcagtcctgccaataccatagctttatattcctctgatggactgagttctgtgcggacaatatctagctttccagaaagggtactgttgcaggcaggacagatagctggtgagcgactaaactcaccactgccatgctgatcacagaagatgtgagagcaggcagtgacccatgcatagccagagagtttgatgcgacactttcgataattacaaagcagcatgtcttcacacaaagacataataggatagtgaggtctccagaagctgaagagagtccataaaagaaaaacgcagtactcatctacagtatatccaggatttacagcaccaaagaggtccagactggaacagcgaaactcagatctggtttcagtctcttgaaattttactcctctggcatcacatgaatccagcttctatctagaaatccagttgaaccacaggatctatcaattatctaggatcatttgtgtaatgaagagaacttaaggcagcttatcttgatcaaaattcaagtaccaggctttaggtaccatcagcctttaaccctttctgttgagaatatccaaatccaagcccatatgattttcagggggtctacagatgggccagttctggactggcacacagggtgctggacttccctcctcagtggatttcatcttcaaccagcccaccaaaacggagagggaaagaaagtggagagacaggaagtcgcc

SEQ ID NO: 436877 - DNA, 1234 bp, Homo Sapiens
gatggtcctgaaactgaaaaatctcccatctcccatcggccccgatttcggaacagggtgtattatccaaaggaaaactgggagttgttacttaatgggaagccaagaacaccagactgtgcaatcatggatggttcaagggtgccttcatggttagccaatagtgatgtttcgtagcctaaggctatcatagaggccttggagcttttgatactgacgattgcgctccataagtttctcagagatgtcactgaactttttcttgtattcttctagtactttcttcatggaggtaacctcccctttcatagaggtcaattctacatccttgctttgtatttgctgagtatatatcttctccatctgtttcagatggccctcagccttgctgaaattgtattcttgatagagacgttcctgatgtacctgatatgtccagaaggccagcgctcgggagctaatgtccaacacgatctctggtcgcagtcctgccaataccatagctttatattcctctgatggactgagttctgtgcggacaatatctagctttccagaaagggtactgttgcaggcaggacagatagctggtgagcgactaaactcaccactgccatgctgatcacagaagatgtgagagcaggcagtgacccatgcatagccagagagtttgatgcgacactttcgataattacaaagcagcatgtcttcacacaaagacataataggatagtgaggtctccagaagctgaagagagtccataaaagaaaaacgcagtactcatctacagtatatccaggatttacagcaccaaagaggtccagactggaacagcgaaactcagatctggtttcagtctcttgaaattttactcctctggcatcacatgaatccagcttctatctagaaatccagttgaaccacaggatctatcaattatctaggatcatttgtgtaatgaagagaacttaaggcagcttatcttgatcaaaattcaagtaccaggctttaggtaccatcagcctttaaccctttctgttgagaatatccaaatccaagcccatatgattttcagggggtctacagatgggccagttctggactggcacacagggtgctggacttccctcctcagtggatttcatcttcaaccagccctcgtgccgattcgccacccagcctcgctaccttaggaccgtatagtactgccgtcgtttacaaacctgcgtctgg

SEQ ID NO: 436878 - DNA, 251 bp, Homo Sapiens
ctatgcatttagtaacataacttattgttttctgtgcctcattgtgtatcctgattgcttcttaaactgggttctaaatgataaaataacatccctatataagcatctttcttttccttttgtgtttgtataacattttacaatatataactttgtacccaataccttaaaaatcttttttcttttggaaccaggtacatcaggaacgtctctatcaagaatacaatttcagcaaggctgaggggcatccg

SEQ ID NO: 436879 - DNA, 1363 bp, Homo Sapiens
ttctttcactggagacaggaggttttattgatgctgatgggggtaggaaaggtccccagaagcatgggggctgagtcagtcagcaaatgcgtaaggcctaggcacagaggagcaggttagggcacattcaccttctcaggattctgtggctccctcattggagaagggagagagcatcttgggggcgcaattccaagagcagcgagggcagaggttagagatggctgagagcccctaacctgaggcggcaccacaataggcagcaacaactgtgtggaaagctggatgaactggtcagtagcggaaaatgggagggggcactgggttggcctcttggggaggggtccaaccttggctttggatgagctcatgagaatacccagtgttcccaagcagagggggggcagagccccaaagccccttttctctgcaggcctccttaagggagaaaaaggcactcagagaaaaaggcattcagggaaccccctggaaagggggtgccagaattagtcccttaaggcacagctgaggcggacaaggcaccaaggcacaactggtggggggagggcaggggcagcctccaagccaagtgccagggtcacaagaggatgcaggaccgcccacgcttgatcggcgtggggttgagcacagcccggacagcctcggcgaacacttccttgacaccatcctgttgcagggctgagcattcgaggtagcgcacagcgtggatctgcttggccagtgcctggccctgctgcggtgtgatgggcgcctggccctgctccttgaggcgccgtagggtgtcaggctgggctctcaggtccttcttggtgcccaccagcaggatgggcacatcagggcagtggtggcacacctctggatgccacttgtgccgcacgttctcataggacggcggactggcaatggagaaacagatgacgaaaacgttggtctgagggtaggagagtgtacggaggcggtcatactcctcctggcccgcagtgtcccacaggttcaggttcactgtgcgcccgtcaactgcgctctgcgcgctgtaattgtcgaacacggtggggatgtactctttggggaaagcgttagttgtgtagcagatgagcaggcacgtcttgcccacagccccatcacccaccaccacgcacttgatgctctgcatcgtgggtgcagttgctgtagtggaggcagtgcctcctctctcttctggacccctctggctgcagtgacctggtgccctccccgaggcgggggagctgggggcggcggcagcggctccgggctcgagaaggaagcctcgtgccgaattcgccacccaggcctcgctaccttagaccgctggggtactgcc

SEQ ID NO: 436880 - DNA, 380 bp, Homo Sapiens
  misc_feature (281)..(326): n is a, c, g, or t
gccacgcaattctgaataaagtttattaaataatatgtacagcaaatgtagtaattcaacacatctatttatcaaatcaatccactgcaatgaagaaaaataaatgaacagaaaaatctatgtctgcataggacatgctctcagtgtgtaatttaaatggcaatactttaaattaattggttatatataatgtcagttatttttctttcagaatataaccttttttgtagtaacctattctagcaataggacttaatacgactgcagataaataggactgnnnnnnnnnnnnnnnnnnnnnnnnnnnnnnnnnnnnnnnnnnnnnnctgtaactgagatcagagttacctttcctccccaatagaatacttatcgtaaat

SEQ ID NO: 436881 - DNA, 345 bp, Homo Sapiens
  misc_feature (192)..(192): n is a, c, g, or t
  misc_feature (257)..(257): n is a, c, g, or t
  misc_feature (265)..(265): n is a, c, g, or t
  misc_feature (279)..(279): n is a, c, g, or t
  misc_feature (299)..(299): n is a, c, g, or t
  misc_feature (308)..(308): n is a, c, g, or t
  misc_feature (319)..(319): n is a, c, g, or t
  misc_feature (324)..(325): n is a, c, g, or t
  misc_feature (334)..(334): n is a, c, g, or t
  misc_feature (341)..(342): n is a, c, g, or t
gcctgccaaaattgtatatttattattacagttaagcctatttaggtagttcaaatcaaatacaagagaacacatcaggtcatcatattttttttcactgttaaaatgaggtattctggctttacaatgttgtaagttgaagtaagcagtttaatcaaagttacaagaaagaagacgagatatatacttggncaattatttcctaggggtaaaaagccaagtgaaatgtgtatgaataagataattaagccacagantacatttncagattatcaagangcatatgtgcaaaattttanttctaaccntaaaattggtntactnnattattatnatcattnnact

SEQ ID NO: 436882 - DNA, 1613 bp, Homo Sapiens
  misc_feature (4)..(4): n is a, c, g, or t
  misc_feature (56)..(56): n is a, c, g, or t
  misc_feature (66)..(66): n is a, c, g, or t
  misc_feature (69)..(69): n is a, c, g, or t
  misc_feature (136)..(136): n is a, c, g, or t
  misc_feature (211)..(211): n is a, c, g, or t
  misc_feature (227)..(227): n is a, c, g, or t
  misc_feature (230)..(233): n is a, c, g, or t
  misc_feature (242)..(243): n is a, c, g, or t
  misc_feature (248)..(248): n is a, c, g, or t
  misc_feature (250)..(250): n is a, c, g, or t
  misc_feature (252)..(259): n is a, c, g, or t
  misc_feature (271)..(271): n is a, c, g, or t
  misc_feature (289)..(291): n is a, c, g, or t
  misc_feature (299)..(299): n is a, c, g, or t
  misc_feature (320)..(320): n is a, c, g, or t
  misc_feature (335)..(335): n is a, c, g, or t
  misc_feature (579)..(579): n is a, c, g, or t
  misc_feature (607)..(607): n is a, c, g, or t
  misc_feature (637)..(637): n is a, c, g, or t
  misc_feature (666)..(666): n is a, c, g, or t
  misc_feature (674)..(674): n is a, c, g, or t
  misc_feature (682)..(682): n is a, c, g, or t
  misc_feature (685)..(685): n is a, c, g, or t
gtanaccaataacaaaatgttcatccaaacaaaggaaaaaatgcctgccaaaattntatatttatnatnatagttaagcctatttaggtagttcaaatcaaatacaagacaacacatcaggtcatcatatttttcntcactgttaaaatgaggtattctggctttacaatgttgtaagttgaagtaagcagtttaatcaaagttacaaganagacgacgagatatangcnnnnccaattctnnccgcngngnnnnnnnncaagtgaaatgngtatgaataagataattnnnccacagantacatttcagaatatcaagangcatatgtgcaaaantttaattctaaccttaaaattggtatactttattattattatcattttacttagcaaacaacatgcaccatactgtaaaacaagcaatacaggacaaaatagcatatctattagagcatttatcaggttcacgtatcatctgaattgaccaagacttattttcactatgacaatttgtgtatttttctatttgctcatcagtgaggttaagtagtacagttggcatatacacacaaagatatgnatacacaatctgtatttaatacttattnttatattggggtataagttactaagtatantagcagcaaggtaccactatttctatttnattttctntttttttntcntattgagactgtagattcacgactgaagtgttattagtgctataaactaataacaaatgtaaaattgcaaatgtacagagctaccaaaggcctatttgacttttcaaagtgctgtgcttcttgttgggcttaaagtttgtgagcaagccccctgctatttgaattaagtattggtccccagtttctgggctccagtcaaggtatagtcctaatgattggatgtaggttgaggggtagaataatgcatttgaaaagagtaagaagcaatacccactgtgataagagtgtattggacatcactgaacacatgtgcctatcactgtaagctttgccagcatcctgtggttagcaataatcagcagatgatggagaatggccaggagacaaaaggaaaaagtagtattctatgaaggagacgggaaggaatgacacagaatatgcctctagactgttgatgggcttgcctcggcaaatggtgagcctgaattcccccccaatataagggtaaatatttatctaaactatttggcttagaaatgagtttgaaaagtcctaaaagttttgctggagaatataatagaatactatatccactgcagggtagaaagaattttcttgaattatttgtatagtgtctaagactgtgatattttgagaaaatcaatcgcattttgtggtgtattcttctgggttagggcctgtttagggttatagtgctattggagtccttgtttctagaaggaaactggggaatccagaagctacggagagcgtcccttggggtagtaatgagctgtttggtatcatttgaaattaagggtaaagtttctacctaaattacttatcactcaaacagttcactctgtgtgtcccaaggcaatggttgtaagtgacaacgctatggtgccaaacaccagggagcctcgtg

SEQ ID NO: 436883 - DNA, 1007 bp, Homo Sapiens
gggatggttctgcgaggagacgggaccagtgagacaggcaggaccgggtggaggcgtccctacgagcaggagggcaaggaagatggggcaagacgcggggaggctgcagaggaggagcagggtggggtttggagagaatggagcctgcagaaacggagcggcagaaactggcgctggaaggctcaaaaaaggggccctgtatctgtgctgccgccagtaaggctgcccctggggagggcggagccagaacctcacagcctcacagggcagagcaaggctggattgacggacaccaggccgagaagaaacccttggggttggcggcagttcttattgagggcaattcattcaatccagagccagaaacaggattttatttaaaatttattgtaatggggtccgcgcaaaaggaaggggtggagggtggggtacatgcaggggacacaggaacacgatgacatggccagggccacaacttcttctgtcgtggggaagagggatgaaaagacaagaccagggctggagctggggtggaagaggggagggggacactggctgcattcccccgcccccaggaagcacctttaggccctggacccctcgctcaccctggcccctaagactccatctcttctctgcctctggccctcctggctcttcctcctgctccccttgactttttcccctgacagattctcaagtaggacgatgttcagggcctgaccccaaccccccataccaccttatgaaggtacaacctttgccggccctgcttctgcccctcctcaaacctcaccgctttccctctttgggacagctctgatccccctccttcctctcctccctccgcgctgtaaaaaataagaaaaggaaaagaaagcgccatctccccggtgaggggctccaaacagcttgcggagaggacttaatggaaaaaagaagaccttctggggaggaagctacaattccctgcgaataacagccattggcttccacagaggacaggg

SEQ ID NO: 436884 - DNA, 567 bp, Homo Sapiens
ttttttttgctacaaatattttacatttattataggaatacaataaagaggttctgcagacacatgagtggtaactggtctattggaaaagaaaagacaattaaaaaatgatctaagtttacaaaaatgatgaatcatgctttaaaaatgtagaaacaattaaaaaatatcctacaatgttagccaaagttcaaagtgtatttcttttgaatgtaaaaactaacaaataaataagtgttaaatacagatctgagtaaaaatgataaaagatagacaaccaactgctttatatatttagctttcatccatttttcagacttgtttataaagccagataaacccgccaaagccttgtttgtgttttacactgaactttccagaaggaagcaccctatttccagtgtttatccacttcacaaatacattatcttaaaacaacaaaaatgattaaaggtgctttagcctaacattaaatggaccataaatcggcaaaccacagcagtgctttactcaaaatgctgcttgcaggtggaatgtctttaccagaagtgcctgagggccccacac

SEQ ID NO: 436885 - DNA, 529 bp, Homo Sapiens
  misc_feature (516)..(516): n is a, c, g, or t
ttttttttgagatatgcagctattttatttctctaaattctctattgccttgacaattatgctccagttgaatgttccttctccattcttgtgtaaatattccaaagccgaaagaacaaatgtccaaaagtcattgtcacacaattctgtaaaagacacaaataaatggaagtctcaaaacttctaatgtaaaacttgctggccaagacataatttggatgagcaaatttggggtttggattattttaaatatagactttgttcttaaaatttagtgtaacatacagaaaaacttggtttctgatatggctttacttagattatgtgagcaaaaatgaaactgaattatcaaatgagtaatagttgtgctggagaagtctatcttatcttcttcactgcagacccttctcagcattatacatgcatagaccaaactattcccaaagttctaaaactttccctgtttagctgggatatgatgtctacttccagtttagaatacagaagcagacaccnaaggaaagctttg

SEQ ID NO: 436886 - DNA, 904 bp, Homo Sapiens
atgtattttgaaaagtatttacttagtttaaataaattaattgcaaataaaaattaagctacaatatatagcctgaataaaaatgactagaacaaatacaacacaggacttgctttcttgcattagtcacaaagcatgtgacaatctagaaaacttcaaaatcaattacatttctttgaaaaaggggtaacagcagttactgatacatcacaactaataaacttataatacaagtttcctgacatgcatttcctgagtgaacccaaatgatcattttttaaaacaaggaagtttcgacagttgaagtaaaataaaataattcatggcttctaagcaacaagttttgttttttaaaaaccaaaagaaaattcagaacagttttgtaataggataaattaaaggtatgctaccacatataaaactttgctacagtcagttaagtattatacaacttttcaaactaaaggaaaacaaatcaaaatattaaaagaagatactgtctaatctaaaagtgtactggtttctacaagtgtcaaaaaaagatttgatgtagtgcaactgtctatacttgtggtgcctttgaaaaaagggtgggaaggaggggagagaagaaacttttcttgcttctggaagcaaaagacatattggaattagagaataaacagaccatgcagtgcgtcactccacgctgcagtcattggtgctcatctgccaaccaaacatttccttaagtctcactgtggcaatctccttaggattcaaacccagagttaaggctggtctgctaaaaacgggggcactattgtcattcaaccctttagatctctagatttcctaatgcccgaataaggccaaatacagaataattaattaagcatttctttttccaaaagcaaatcaagtc

SEQ ID NO: 436887 - DNA, 1681 bp, Homo Sapiens
  misc_feature (143)..(151): n is a, c, g, or t
  misc_feature (472)..(577): n is a, c, g, or t
tttaccgccaagaggggggacacaagggtttttgagatttccccccgtcggcgggattctcagaggttttatcacactacccgcgttttgtggaagggggtttccacaatgttggcgcaaaaaaattttttaaagggaatttnnnnnnnnntttctttccaataaaatgggcccggggcgggggggtataattttaataattgggggttccgcttggggactccccgttggaaaaaatccccgaaaaggaccctccagaaactcccatttgggaatttgtttaaaaacccctctggttttccccccgggcgtttttttatttggggggagaatcccaagccctatgtctaggcccggggttttccttgggaaccaggtatgggcccaggttcccttcccttctggggccccggcgcccaacaggaatgtttttaaaaaggtttttgaggggccgaggggggcccacaagggnnnnnnnnnnnnnnnnnnnnnnnnnnnnnnnnnnnnnnnnnnnnnnnnnnnnnnnnnnnnnnnnnnnnnnnnnnnnnnnnnnnnnnnnnnnnnnnnnnnnnnnnnngtttccccaacatgtttaattttaagaatagagataatggtcaactcttgagaagaaccaaatgctggtgccatcttggaagtgctacatcacctcctcctcttacttccttgaacagcaatatttctggatttcttctgcaagccccaggcagtgcaggatgcgtttcttttcagcagccagttccttctcagagaactggcccaagagtttctggacaaatatattttgatctttcagaaatatgttcttattcactcctacatttggcacattctccaaggacccagacttgaaatggaagcttaaatatctgtttcgttttagaccaggtcctttttcttcaatccatgacagtggacttttcttctctgtctccagacacactgtcattttcatatactgatcttcctttcgctcttccaaagtggcagacacaagagaaagctccccaaagagggagaccagccaggtcaggcgagagatgccgctgaatgcagggaagccaaaccgctcttcttccaacgggccagctgtgaagaggagcgaccctttcagcaggtctttccccaccacttcttttttcaggaaagcgaattcctccatcaagagttcaacatgctcctcgtgcaagacttttcctttctgctcagccagctcccacagttcctgagcggccgccaatgacagtgtcatggggtattccacaaggacgtgcttgccagcattaaggaactgcctgatgtagtcctcatggctggagctctcactgcagatataggcgacctccacctcttggctggaaagagcatcctccaaagaaatctgctggactccatcaatgctcccgagctcccttctcgacacgaagccaatcaggttcaggaacgctgaggaagggtgtggattccgcaagtccctcatccgcacggagccggctcggccaacaccaaccaccaccacgccaaacttcctctcgggctctgtattcatcttggtctcttccttcggtcactgacgcgggcaccgctctccgtgcagcctccgggcgccaccggctttgcccgctctcgacgaattcgagctcggccgatttggcctgat

SEQ ID NO: 436888 - DNA, 470 bp, Homo Sapiens
  misc_feature (149)..(197): n is a, c, g, or t
  misc_feature (333)..(333): n is a, c, g, or t
  misc_feature (388)..(388): n is a, c, g, or t
  misc_feature (402)..(402): n is a, c, g, or t
  misc_feature (413)..(413): n is a, c, g, or t
  misc_feature (424)..(424): n is a, c, g, or t
  misc_feature (430)..(430): n is a, c, g, or t
  misc_feature (435)..(435): n is a, c, g, or t
  misc_feature (451)..(451): n is a, c, g, or t
ggaagtttattatatgaagatggtatacaaaatacattcatcatgactagaaatataggaccaaaccatgtctgtcttatatctgtagcatatattcttggtttgtataaaagtaactttaaaattccagtttccttaaatagttatgnnnnnnnnnnnnnnnnnnnnnnnnnnnnnnnnnnnnnnnnnnnnnnnnntacagttacaccactgtcggccaaagatgcactcctcctttaatcaatttaaatgaggctagcgagtatctgtttgatgtttgcattcttgtgggctaggaaacaaggcacgggtccctaaaattaacatctcggngtcacttcttgggctgccaagacacagacttgcacatggtttcagccccattccncccagactgttccncggacattttntcagaactctngaaggnagtgntccgttctttgttagngccacctggggcggattct

SEQ ID NO: 436889 - DNA, 916 bp, Homo Sapiens
ctgtcttctttctttttgattgtaaatgttttaatagaaatacacaatctttcactttctcagacagcaataaaggggtttgtaacaatcactaagaatacagaattttgccacgaggatgcagcataatctactgcaaagctgatctgcccaattacacgtagtcagctgcaagaatatcagaaatcaatacaaacaagtattgacaggtgttacagacatgcaaaatatccttcaatgcaacgaatttttaagaaatcagctagcctatattaatcagatgttttaggtcaaaccaagtttccatcttgggctcagtgaaatagtattaactcattgagtctcctttcccccaggaatgttgggaatggcagaacagaaagagctatcactccttaaattcttttatgcaagtgttactccaacacttattttacttggtttacttggaatgtatgagaggaaactgatgttttttacaatggccaactgtatgtctaaattttcagttctcctttttgtgagtttcctgccagaaatccttgttaaaggatcagcgggtgttcaccccgaagttcttgctgttttcagtgtcctactgcagacagttttaaaaagccaactgaacagcagcagaatgaagtattttttgaggtcttttcaaaaatgtacagttcccaccatttacttgaacaagttcacaaggtaattggacttagccagtgccagaaatggaagcctgcctttttttatgtttggccacaggcttacagtttgaaggtgggtttggccctaccttaaaatttttaggttggaaaaggcttgtcacttgtacctggccagttttcacctaaaatactgggttccccttttggaatcccttgcttaacaatttgggacctccttgggtttgcgt

SEQ ID NO: 436890 - DNA, 372 bp, Homo Sapiens
  misc_feature (362)..(362): n is a, c, g, or t
ttttttttgattgtaaatgttttaatagaaatacacaatctttcactttctcagacagcaataaaggggtttgtaacaatcactaagaatacagaattttgccacgaggatgcagcataatctactgcaaagctgatctgcccaattacacgtagtcagctgcaagaatatcagaaatcaatacaaacaagtattgacaggtgttacagacatgcaaaatatccttcaatgcaacgattttttaaggaattcaggctaggcctatattaatcaggatgttttagggtcaaaccaagtttccatcttggggctcagtggaaataggtatttaactccttggggtctcctttcccccggggggntgttgggggg

SEQ ID NO: 436891 - DNA, 891 bp, Homo Sapiens
  misc_feature (78)..(102): n is a, c, g, or t
ttttttttgggttggaatccttttattcatgaaactatttgaatttaaaccacacaggtcaaaatgaccaaagagttnnnnnnnnnnnnnnnnnnnnnnnnngaagagattgttctttttaggttcaagatacacaggaagagcaatttgtactgatgttgctactggtttaaagaaaggtctcagttaccatcatcttaatcggtaaaatttaacatttcacacataataagttgccaaaggaacactcaaacagcaaaaacaaacctcagcttctttcaaacaaaaaagaagaaacaatgttttggccctgcttcatcaaacctttagacaaatacgtaagtctacaatttataatagtgtctagtaattcttagaattccattaacattacatatcagacaatatagtctctcttttatggaaaattaaacagtaccattatttggcaacagaagtatattacaatcaacagcacatccatcaaggggcgggcctggtcctacccctgggcagggctgtgagggaagcaacatgccactagcactgtggcccgcttgtcactggaagcacaaggagctcacgttctgatggattacattcttttccaaacaggcaaaggctatctgggagggttcgctagcactcctgggaagggagggccccatgttctagcttttcttgtccccagacttttttggaacaaccaaggcccaagggacagttgactggctgacttgtttccactcacagccctcttgccaccccagccagagggcatcgttctaaggaaggagagtcagggcctgtttggggttggtagaccagagctcatctcctctgctggcaggccttaggtggccttccaaggctgcgcctgaacaaagaaat

SEQ ID NO: 436892 - DNA, 1130 bp, Homo Sapiens
cttatctaattttccagttagttactgttcagcttaagtcactctacttggttgtcaacagtagttaaagcagtatcttaaaccagaggtcaaaattaaatcaatattttgattcgaaatgattacaaacatatccaaaggtcataaaatgctactgagaagagttgtgttttaaaatgcattttcttcttacagataagctgtaatatatacatgcgtatgtagctatatacctttgattgtggtagctacacctgaaaaatcttttctcctcagatgaacttacaaaattcaagagaccaccactgatacaagaccgtctaaagttaaaataaaactgagtgacttgttacacagtgagacagaaaaactgatatacattattaactttttcaagtaatgttatgtacagttttattgccagtatatgcacaacagtaagcatagaactataaatacacaatgtaattaacagtagaaaacaaaattgttacaggtagagggagaggatatagagaaacttttcctgctgctagaacagaaagaaaggggaaagcctatgacaaatcatccattcagtactcttgtcttaaattctttacatatatttctacatttttttcagttaaacaaagtacagataactctgcaacaatggcaaactgcttccctaatagctatttgccttttcaatcaaattcactttatattaggattaaaaaaaagtaaagatgagaaatcattagtatcctggttccaaattatctaatttagcctttcaccaaaactggtaatttttgagtcggctgcacatgaaaagaatgggtgtagcaagaggtgattaaaaaaatttgctaaaaagtaacagaaaatcaccctttaagtagttttccaaaagacactataggcagcagctcagttaaaagtattagccctgaagaggtagagaatttgagccccattatacaaagacagccttggcaccatcttctctctcatcaggatcaatattttcaagtaagacaatttcatggtaaaaggaaaccaggttccaccatttaaagaaaaggtgctggtcactcccatgtctcgataatttgtttattccgtgagaaacagaagacggtcaa

SEQ ID NO: 436893 - DNA, 1283 bp, Homo Sapiens
  misc_feature (1142)..(1142): n is a, c, g, or t
  misc_feature (1245)..(1245): n is a, c, g, or t
  misc_feature (1269)..(1269): n is a, c, g, or t
  misc_feature (1272)..(1272): n is a, c, g, or t
  misc_feature (1274)..(1274): n is a, c, g, or t
actgatgtttattcattttatttttctctaaattttaaaatagaagactttaatggaaaacatttagtaccatcatgtcaccctgaatgccagcaatacctcgacttttacacacgcaggaagcctagtaaaagccccgtcagtagtacacatttctctatggtccttcaacagttttgcatatacaaaattttctgctattttgctttagcaaacagcaataacttttgtgtttcctatatgacacctaatatccagtcctacagtaatatagttagaaaaataaaaggcttaaaaatttcatagtacgagttcatggtgctaataacagaatctctttaaacataagatcattttaagcctcttacataaccaccttctggtttcatttgaaatccttaagaattaaaatctagtaagattgttaaatcaacgtacgtcaatcattcattttcacttgccttgggagagttaattcccactgtccactgaatgaatgcctttcaaatattaataaatatattacagtatttacaagcattcttatacactccgacactgacagggagttaagccatggagagggaagcacaggtttcccaatagtgtgacttcatgacgtatgggacaaaaggaaccggtgctcaggcctggagggagctgagatgagagcagggaatgatggtttagatacggcacacatgctctaagacacatcagactctagctgagacccagccagacatttcttttgttgttggattagaagtaaaagctgaacaagaaaccaggacaaggaaggaagaactggaagctatgccctaaagtcagagccaggctaaggattttaaaaccaagctccacaagctcttagtgaattaccctgtggaaactatgtagctgacgtgaagtgtggaggggggtggtagaaaggggggttaaatgtaagactttgttttggcaacaaaaaatgatagtaatttgatttctacaactttaactgtgccatgtgccctttcttaccccactttctgcagattgtttcatatgaacgtaccctccacgtgacctctttaatgcacttggcaaactccgttaatgctgttgaagaatgtatgttctgtgctgtggtaagaggtgancgtaatgcccaaatcatccaatacactatcataaagtgaatgaaagacatgtactagatgtttgctttgtgaatgtgaatgaaagtcttattttgggggtgtngtttcttatgttttaataaaaacngtngncattatttt

SEQ ID NO: 436894 - DNA, 1262 bp, Homo Sapiens
  misc_feature (46)..(46): n is a, c, g, or t
  misc_feature (74)..(74): n is a, c, g, or t
  misc_feature (1208)..(1208): n is a, c, g, or t
  misc_feature (1234)..(1234): n is a, c, g, or t
  misc_feature (1247)..(1247): n is a, c, g, or t
ggttcctgtgcctgtgggtaaagaggtgcaccgtaatgccccaaanccaccccaatacactatccataaagtgnaagtgaaagaacatgtactagatgtttgcctttgtgaatgtgcaatgaaagtccttattttgggggtgtagtttcctatgttttaataaaaacagtagtcattattttaaaaagcacattctcctaggtgcatatttatatacatatacaaataccatttccttcccccttgtgcccttctgggtagtcattttaaaaactcaagcctggggtcatcaaaaggggtagatttatactcccacctaactgtctggagtatagagttcagatagtctcttaggaagttttataaatgagattcacccagtacaattctgaaagctcttaaacaggagtctttaaaataatgtaaacacttaagtaatcaataagggttctctggtggcccacttttacatgcaaatacagaccaactgttaacatgcattattttagtcaactggtaaagtttatttcataagtataagtaattttaagccttttactaaactgtaaatttcaatccattaaaaactactaccggagcagttttgaggtattactgttaatttagtatagaaatgttactgtattttgatgtggtatgaaatgcagccgccatgcctttcatgaaacggtgctatcgtggtgctgactacagacatgtcctatggctttcaggaaattattgtgcatgtgcattaacagattttccaaacattaatgacaatttgattggttagtcatttgtaagcataccaaaataatacagtatagcccacgtatgagccaaacacactgagacatttgaggcatacaatgctaccctccagtctactttcgtcagaaaccaaacctactcactcaaatcatttacaaggaaaactagtgcagaaagcaccccaaaaatgttgcctgtcagcaggttaattttcttctaactttaaaagaagtagatattttttcttttaaaattcatttataaaaataaattttagtttgagaccctaggtaccaaattgtgggcttaatttactcaaggatgggatgtactacaaagttatggaaaaatgtagctgaaaacccatgagctccagctcatttctgcagcgtggccaacagctgccactgtacactgtcacaacccttctcatnggtacccaaatacggtcacggcttgncaacttttggctncttgtcctgaactcc

SEQ ID NO: 436895 - DNA, 490 bp, Homo Sapiens
  misc_feature (450)..(450): n is a, c, g, or t
  misc_feature (464)..(464): n is a, c, g, or t
ttttttttctgatgggaaagccattttatttttctctaaattttaaaatagaagactttaatggaaaacatttagtaccatcatgtcaccctgaatgccagcaatacctcgacttttacacacgcaggaagcctagtaaaagccccgtcagtagtacacatttctctatggtccttcaacagttttgcatatacaaaattttctgctattttgctttagcaaacaggcaataacttttgtgtttcctatatgacacctaatatccagtcctacagtaatatagttaggaaaaataaaagggcttaaaaatttcataggtacgagttcaggggggctaataacaggatctcttttaaacatagggtcatttttaggcctctttacataaccaccttctggggttccattggaaattccttaggggttttaaatccggtagggttgtttaantcacggacgggcantcatccttttcacttgcctggggggg

SEQ ID NO: 436896 - DNA, 283 bp, Homo Sapiens
  misc_feature (119)..(136): n is a, c, g, or t
cagtttcaaaacaacctttattctgtttgaagatctaatacaatgcattaaagcaacttaaaacaagacatagctccattgaatctataacttgaacgaaatgtcaaggaggcacactnnnnnnnnnnnnnnnnnnagttgccttgtgaaggcaaagttacaactgaccgtgacatcctccctctcgtcaaaagaccaactttattttaacaatgtcatataaacagatttttaaaaacattgaacagattgtagctttaaaaaatacacaggtataaatgag

SEQ ID NO: 436897 - DNA, 1043 bp, Homo Sapiens
  misc_feature (494)..(494): n is a, c, g, or t
  misc_feature (738)..(794): n is a, c, g, or t
  misc_feature (943)..(943): n is a, c, g, or t
  misc_feature (952)..(952): n is a, c, g, or t
  misc_feature (956)..(956): n is a, c, g, or t
  misc_feature (994)..(994): n is a, c, g, or t
  misc_feature (1000)..(1000): n is a, c, g, or t
  misc_feature (1002)..(1002): n is a, c, g, or t
  misc_feature (1006)..(1006): n is a, c, g, or t
  misc_feature (1008)..(1008): n is a, c, g, or t
  misc_feature (1018)..(1018): n is a, c, g, or t
  misc_feature (1026)..(1026): n is a, c, g, or t
  misc_feature (1033)..(1033): n is a, c, g, or t
tgtggcaggggcaggacacgagcagctgccgtcctcctcccagcgtgcctggcatggtcgcaggggagcgggtgcctggagtcccggtgacaccacggggcacactgagggagctgaggagccggggccgcgcagcctcctggatgctcagcggatcgtgtacttgtcccacttcttttcagggtcgtagggttcccagcggctggcgggaaagatgtgcttgttcttctcgtaccagctcctcagcaccaccttgcctgcatgggactcatccttctccacagtggcgtcactgagcaaccgcacatcgtcatgaacatcaaagttgaagagtggtccactcttcccccgtgccttggtgacgatgaagtcgtagaagctgtgatggtgagggatgatcaagtcctccttgatgtacatgagctgctccacccctgcggacctcagctcactgaagtctttccgaagatctcgagcgccttctgcaggaactntgcatggtgttgccctttctcatcttgactgtccgccggtgcccagagccatcccagtagctgaaggtgatctcgatctcctcactcttgatcttctcctgcttggcttcccactcctgccgcagctcttcccgaagccgattctcctcctcctcacggtctcgatcaggcaagaagcttgtgtcaacgtctgggttcttccccagttttctcttcttcgtggtgatctcttccctttccatcnnnnnnnnnnnnnnnnnnnnnnnnnnnnnnnnnnnnnnnnnnnnnnnnnnnnnnnnnagggtgaaggacaggctggagatcttccgcttggcttctttcttacgctccttctctcgaagcttctccagcttcatctgcagctccttggactgctccttcttggccagctgcttctcccgctccttcaccagagcctcctgcttggncttcatgtnattnagggtcacgagaccacggtgctggacttgagcctgctncaccgngngtantngagagaactnttgtaatntggattnatgatgtctc

SEQ ID NO: 436898 - DNA, 999 bp, Homo Sapiens
  misc_feature (392)..(449): n is a, c, g, or t
  misc_feature (759)..(759): n is a, c, g, or t
  misc_feature (891)..(891): n is a, c, g, or t
  misc_feature (927)..(928): n is a, c, g, or t
  misc_feature (942)..(942): n is a, c, g, or t
  misc_feature (946)..(946): n is a, c, g, or t
  misc_feature (952)..(952): n is a, c, g, or t
  misc_feature (960)..(960): n is a, c, g, or t
  misc_feature (963)..(963): n is a, c, g, or t
  misc_feature (967)..(967): n is a, c, g, or t
actgcggccgcaagaaccgcatggctcaatacaagggcgccgcgagcgaggccggccgcgccatgcacctgatgaagaagcgggagaagcagcgcgagcagatggagcagatgaagcagcgcatcgcggaggagaacatcatgaaatccaacattgacaagaagttctctgcgcactacgacgcggtggaggcagagctcaagtccagcaccgtgggtctcgtgaccctgaatgacatgaaggccaagcaggaggctctggtgaaggagcgggagaagcagctggccaagaaggagcagtccaaggagctgcagatgaagctggagaagcttcgagagaaggagcgtaagaaggaagccaagcggaagatctccagcctgtccttcaccctnnnnnnnnnnnnnnnnnnnnnnnnnnnnnnnnnnnnnnnnnnnnnnnnnnnnnnnnnnatggaaagggaagagatcaccacgaagaagagaaaactggggaagaacccagacgttgacacaagcttcttgcctgatcgagaccgtgaggaggaggagaatcggcttcgggaagagctgcggcaggagtgggaagccaagcaggagaagatcaagagtgaggagatcgagatcaccttcagctactgggatggctctgggcaccggcggacagtcaagatgagaaagggcaacaccatgcagcagttcctgcagaaggcgctcgagatccttcggaaagacttcagtgagctgaggtccgcaggggtgngagcagctcatgtacatcaaggaggacttgatcatccctcaccatcacagcttctacgacttcatcgtcaccaaggcacgggggaagagtggaccactcttcaactttgatgttcatgacgatgtgcggttnctcagtgacgccactgtggagagggtgagtccatgnngcgaggtggtgtgngagntggtanagaagaanagncatntttccgcagcggtgggaacctacgacctgaaa

SEQ ID NO: 436899 - DNA, 746 bp, Homo Sapiens
  misc_feature (475)..(475): n is a, c, g, or t
  misc_feature (720)..(720): n is a, c, g, or t
  misc_feature (722)..(722): n is a, c, g, or t
gttggtttctcacaatgcaggcgctccagctctgacacgtgcacttctttattggaaaagaataaagcagtcactgatgtggcaggggcaggacacgagcagctgccgtcctcctcccagcgtgcctggcatggtcgcaggggagcgggtgcctggagtcccggtgacaccacggggcacactgagggagctgaggagccggggccgcgcagcctcctggatgctcagcggatcgtgtacttgtcccacttcttttcagggtcgtagggttcccagcggctggcgggaaagatgtgcttgttcttctcgtaccagctcctcagcaccaccttgcctgcatgggactcatccttctccacagtggcgtcactgagcaaccgcacatcgtcatgaacattaaaggtttgagagtggtccactcttcccccgtggccttgttgacgatgaagtcgtagaagctgtgatgctgggagcnaagggcaggaaagcggcgtcttgatggtccatctcggggcctccccacaccccccgcctgcgcacactgcccccaccagcctgagccaaagcccagggtgctgcacccactgcgggtactggggctgaagggactcacgtgagggatgatcaagtcctccttgatgtacatgagctgctccacccctgcggacctcagctcactgaagtctttccgaagatctcgagcgccttctgcaggaactntngcatgatgttgccctttctcatct

SEQ ID NO: 436900 - DNA, 838 bp, Homo Sapiens
agccaaggtcccacttgaattgtggccaaggggggcccaggaccccggaggcaagcttggccgttccctccctccccagcggtgccctggcatgggtccgcagggggaggcggggtgcctgggagtccccggtgacacccacgggggcacactgagggagctgaggagccggggccgcgcagcctcctggatgctcagcggatcgtgtacttgtcccacttcttttcagggtcgtagggttcccagcggctggcgggaaagatgtgcttgttcttctcgtaccagctcctcagcaccaccttgcctgcatgggactcatccttctccacagtggcgtcactgagcaaccgcacatcgtcatgaacatcaaagttgaagagtggtccactcttcccccgtgccttggtgacgatgaagtcgtagaagctgtgatggtgagggatgatcaagtcctccttgatgtacatgagctgctccacccctgcggacctcagctcactgaagtctttccgaaggatctcgagcgccttctgcaggaactgctgcatggtgttgccctttctcatcttgactgtccgccggtgcccagagccatcccagtagctgaaggtgatctcgatctcctcactcttgatcttctcctgcttggcttcccactcctgccgcagctcttcccgaagccgattctcctcctcctcacggtctcgatcaggcaagaagcttgtgtcaacgtctgggttcttccccagttttctcttcttcgtggtgatctcttccctttccatctcctcctcatacatggccgcctcctcttcctcctcgcctccctcttcttccc

SEQ ID NO: 436901 - DNA, 1658 bp, Homo Sapiens
  misc_feature (101)..(129): n is a, c, g, or t
  misc_feature (160)..(228): n is a, c, g, or t
aatacgtagttataaatatattttgtcaaaatatatgatcaatatggtcaaaacatttgcacgtaaagtcataaataaggtcaaggtgaatgtttagggannnnnnnnnnnnnnnnnnnnnnnnnnnnnaaataaaagtccagctataaggaagcagtcnnnnnnnnnnnnnnnnnnnnnnnnnnnnnnnnnnnnnnnnnnnnnnnnnnnnnnnnnnnnnnnnnnnnnatatctgtctatcctcaaggactgcctgatctcagcggcacccacatccctctactaccatctcctgataatttttcagtaccaccttatcatactcatccaggtacagcatggagatggcactcagttcagtgggcacacaacaggctttggggatactggaattgacagaattgaccagggtctgcacaatggcatggttggttgagttgaggtggtcagccagtggaaaggggcagtccccatggcagtagaaggcctggtagcctggtggggccacaatccagtcattccagcccacatcgctgaagtccacatagagcgagtggcgccggcagttcttattcttcttcctggcccgctgtgagtgatgcttagggctacgcttggccctccggcgtcgggtcaaggcatggccccggccatcatggccaaaggtgaccaggaggggccggagctgggcccaattcccactcccttgaggtaacgatcggctaatcctgacatgctggccctggtgggtccgagtctgatggaggtgagtcacctcaatggctagcccatagtttggctgcttctcccgggtccagcgaaggaccgcagggctcacatcaaaagtttcccaccgtgtcacattgtggtggaccagtctcgtgtccagtagtcgtgtgatgaggtgcccaggcaccacttctgctgggggcttcataacctcataaatgtttatacggtggaagcccctttcccaatcagggccctggtccacctgctcccggaagagccgaagctctgcagaggagatcgcctcgttctcagggatgctgctgaggttaaagaggaaacgaaaagcagagttttcactggtccctgggatgttcttcagatgttcttcgtggtggaagctcctcacggtgttggcccggctggccgggcgctcaggatactcaagaccagtgctgtggatctgctcttcctcctcctccccagactgaagccggtaaagatcccgcatgtagtccggaatgacggcactcttgctaggctgcgggcggcggcgcagcccaaacatctgcagaagtgtcgcctcgaagtcccgcaggagctcatggctctgccctgagcggcgtcctcccgcgtggccctgaatctcggcgacttttttcttccccgtctcaggtatcaaactagcatggctcgcgcctcctagcaggacttggcataataaaacgaccatcagcattcggttaccaggaatcatggtgtcttgacagaaaacaaggcatataataacagtccatgattcttgacagccaatcttgaacaaacttgctggaaaggctcagggaagctgcagcagtgcgttgctcgggatggcactacggaatggctcctagcttccgggccgggctcagcgctccttccctccctcc

SEQ ID NO: 436902 - DNA, 325 bp, Homo Sapiens
  misc_feature (23)..(23): n is a, c, g, or t
  misc_feature (100)..(127): n is a, c, g, or t
  misc_feature (188)..(227): n is a, c, g, or t
aatacgtagtataaatatatttngtcaaaatatatgatcaatatggtcaaaacatttgcacgtaaagtcataaataaggtcaaggtgaatgtttagggannnnnnnnnnnnnnnnnnnnnnnnnnnnaaataaaagtccagctataaggaagcagtctgtgtagtgtgtgggtgagtggatgggaacnnnnnnnnnnnnnnnnnnnnnnnnnnnnnnnnnnnnnnnntatctgtctatcctcaaggactgcctgatctcagcggcacccacatccctctactaccatctcctgataattttcagtaccaccttatcatactcacc

SEQ ID NO: 436903 - DNA, 748 bp, Homo Sapiens
  misc_feature (737)..(737): n is a, c, g, or t
atttgtatatgttttttatttttaactttcattttaagttcatgggtataagtgcaggtttgttacataggtaaacttacatcatgggggttcgttgtacagattatgtaatcacccaggtattaagcctagtaaccattactcatttttcctatcccaaagtcttatgagttgaatataaaacagaaaaacaccctttcttcacatgcatacgtttaataacatgaaagccaagacagaggtaaaaacactaaatcaacttggtatccgttttactccctaatattaggggggacagtgaacatataactcaagcaataaaatgcctttggggaaaccaagaagggaagggcccaagtttgataagggaaagccaacaatggctaaaacatccatgcaacacttcgtgaagtcccttctgccagcggctcccgtgtgtccatatcttggagtgtgttaggctactgcttcaagaacagaccgtggacctggcttcctcacttccccaaaagaattcctacagaaggctacaggaaaggcttcttggtaaccttctttgtttcaaacaatggaaaacatgagaaatggatagcaccctctcatccccaaaacaccatcatcatagcaaggataatgactcaatggagtttcgaatctgtatagtgctttatatgttttcaaataattttcacgtatatgatcttcattagccatgcacagccttgtggttacaatgngaagcagacac

SEQ ID NO: 436904 - DNA, 543 bp, Homo Sapiens
agtaaaatccattgtagttgcatctggattgaagagctttaatcaaaaagtgtattgcaccacagatgaatttgctacagcagttttcaagaatacaatccctatttacaacatggaaggagagctcaagatccatcgctcgtataaagggctatagataccgtcgctaacacagaaagttttatacaagtcaaagtgcattaaatcacttagaatatttattccactcttcctcttaaagctgaaggaaattcaacatgcaggaggaaagcctagtcagtgaagcctccctaaagtgagtacagacctaggaacgggccccacagctacacctgaaactgccgaggagtggggcctggggtgcgtgtgggaccagttcaatggctggagaagccacggaggcagcggacgggcttctgtggaaatgtagctgcctttggctggctgtgagctacccagtcttagagattctttcctggaacagttgaaaaaggaaatcctactttgaaaaaaggctacctcttacccatcaaacttgcagaa

SEQ ID NO: 436905 - DNA, 556 bp, Homo Sapiens
  misc_feature (469)..(469): n is a, c, g, or t
  misc_feature (519)..(519): n is a, c, g, or t
taaagatgaatgccttttattatgaaaattgctgttacattacagccaacattccaaaacagtattttaataaacacttgtcttgattataaagtagagcaaaaaccatgatcctttttcaaaagtaattaacatcttctcagtcacttaacacaaatcaggacactctgtatgctcaccacggtgtaggagatgagatgaggaagagcacctatgttattcaaaacagctactagtgttacttatacagtataaaccaacaacttacaatagggcattttttaaaaagcaaaacactgaaatgttgaggtgccacaatacttttgagatggaaaaagccaaagcttgtttcctttttcttcccatcctgagttcagtgtgaagtatagggaagaacaacaccaggctggggatcgatgcagttttttgcttatttccagttgttagtcctgctcgaaacacagcctgnatgcaaacttcctcaggctgccattcacaggccttgggatacagcgtttncacatggacaatgaggttcctagcactcagagtcggt

SEQ ID NO: 436906 - DNA, 595 bp, Homo Sapiens
aacagccacaataaccattagtgattttattgaagacttattcacagtattttgacctgagaaatggtgattttaacatacccttttaggtgcccacattgatcttagttaacagtcttgtagttccctctttaggcttcaagataattgtgatttcatcgcaccccagatacttccaagtggagccaggcctcagactgttctcagtcactgctctcccacagctgattacagacattgcctgtgcttcctaccccagcagctgtctagtgcacttgaaccacaaaatgggccctcacttctttcctaacccagctccatcttggtaaactgtaacagacagacaggagtccccaagggcacaaaatagtttctttccagatgattttaaaggaaggggggaaaaggaagcatatgtgctaatggagcttctatggctgaaacaatttatctgcagatgcctagccactcactgatcaatttgttatgcgccgtgactgaaatctgtgattccatctgaaggcagtgagaagtggtgttaccatctgaagtgggtcagggctcttacctgactaagctggtactttagcccata

SEQ ID NO: 436907 - DNA, 916 bp, Homo Sapiens
ttaagggatatataaatacatttattggtggtattcctgaatgatgaatgcagagaacagaatacaaagaaatcagcacataaaaggaaccattaatctttaaaaatgctatatacttacattttgaccaattttgcatatttgtttagatttacaaacaaatgtaaagctaattccaaagttttcttctgaatatacttcaaatttgaattgtagtgttctccattccaaagccagctgttttttgctggatttacaccaactatgatttactttgtttgtatctaacctaaaagcaagactctgcaagctgatcctgaagcagccagttactcaggaattttacaacagctattaaagagaggataaagccacatgaaagagcaagcctcaatactagatacatagatacaagagaaaataccaagaagcaaaaagaatcacagaaataccaattctattctaaagcataatttctaattctagcagcaattcaattagcaatagcttaggtgcctttattccaaaaaacaaaaccattagttctttcactacaatttcctgactttacccaataaataattatcaagccttgatattcttttttaaccactcaagaacataattgatacattacagaatcattaacaaaagaggtctttaaacatactggtgaaagctgtaatatagtttgagggccagatttcaatttacataatattaccattgataaagagtttatgacacccagtacgatactgttcagcactgttaactgagaaatgctccatccattcttgccatcagagaattacagatatggatgggattgttaaaagtttacagggccttcaaaatggattgcacgtggaattattattgaactattgttaaaactgtgaccacacagctagct

SEQ ID NO: 436908 - DNA, 748 bp, Homo Sapiens
ttttttttggaatcatcattaactttatttgtcactcttgatagacattggtccactccaacataaaaagtagaattcacccacttccacttaatattctatagaatgaagttgtaccacaaaccatagtaacttacacagggggaaaagttactgaaataaaaatgttttatattcatgcctcaaaatgtccctcagggatttttgtgtgtataatgaaaagcatctatatactccacaaggctagtttcttcttagatcaatgtagtatttttagtatccatattagcccatgtaggtcaacaaacttgcagaagagggttaaaaaacagctgtcctctgttactcagatacagttccaaaactaagcgattatataagcacatccatattttagggctactctaagttaaaaaccttttctcttgtttcagagttatttacatcaaattaagacatttacaaattgttcatagtatacaatagcccaaatatgattttcacctatgctgtgtaaagaagttaagcattcgtaagtttgtctaataaattcagtgcacttttttccataacacgagctattctaaatgttttacatttctttcagtgcatatttccaaattcattaaacagaatgaaatcaatgttattaaatggctatatcataatattcaagcatattatggaatctataccacagtgggattcacgtcaatactataattcactctagaaaaacatcaccgct

SEQ ID NO: 436909 - DNA, 401 bp, Homo Sapiens
atcgtgacgcgcgctttattgtttcaactcctgaatccactggccgaccccagagccagaagagtagcaagaattcaatcagcaactcctgatgtggacaaacaactgggcagtgggaataggcagttggggggctgtggctcggcggggccgggggctccacttactttcccgatcgggtttcgtcttcatccccagccagagcccagggctgcccttggtgacgcccaggagaaaaccccagcccgcaccctcaccacagttccatttgtacatccaggaagcccagtttgaaaaacaaaccacgcctgtaaactgagttggatgaaaagagctgccttgggggtgggaggctaaggaactgttcacggtcttctgggtgggccctggattcccgcact

SEQ ID NO: 436910 - DNA, 912 bp, Homo Sapiens
gaacaaagtactagtagtgtgttcctgttgtatgcattctcctaggtagagcctccatcttcagttgtgttgtgaaggtatttttgctttttaaatactggggaccgatatcactgttgatagtgcagagaaaccctccacatttttcagtgcataattgagttttctataaatgccttcgtgttttctgagcagaatgtacgaggtgtgccatcccaaaaccagctgctaccctgtccttttaatgtaagtcactccccttcactgtggcctcgctgatgtctgataagtattgtcagtgtgcaaaaggctttacttcagaatggtttatttatagcaaactaagttgaaaattttagaaacagtctttgtgggtggatgttattaactgtcattgttgttgcccagagccatgggttttttaaccccaaattatccacatggtgtgtattatgaattctttgaactcttaaggtttttgtgagaaaaggactgtgaattcaaaacaataaggcacttgtgggtgcactacatagattctgacagtgttgtgattctgtataggatttttaaaaatgacaacattcacaaaatttattactttttaaaaaataacatgcctattaactggttgcactgatataaaagaaatatatttgtgttttgtttgtactaaaatgcaaaagcaagagtgcaatttttaaaatctagaagttaggggttttgttggagaaaaatggactgatctttaaactattcagtcttactgggatttttatgcatagaaactcggatataaacatgaaaatagagagtgccagtattgataggaaagtgagaaactgtaatatttggccattattctattcgacaggttttagaggcacgccaccattttttccttatattcgg

SEQ ID NO: 436911 - DNA, 699 bp, Homo Sapiens
ttatggaataagggttatctttatttggattgcaaagtataaatatgaaccaggtttggaaatacaagttgtaacagttcagaaatggcaccagaaacttccagaaaggaccatgacagcataacttcatcgttttggtgaggtgggtgggattatacaaagccttccccacctccaaccttctcggtagcaattggcaggtaatcagttaccaagaacagtcagctccaatgttccctgttccttctcagccttttgctttgctaataccttctccagactgtcctctgctgcactgacccctgcatggagtagcaccagaagaatggcaggagttagagaaatgtcttgacacaagggaaagtgagttcccacgctgtgggcctggggccatgggggtgagggaccaggaaagctacaggcatggaagcccaacctcttctgagacttgacagggagaggacacggggagacactgatatctgttacactttgacatcagcaccttgggctttcaaaacaccaatggtagacaaaatcgcctaggcaagactgaagtccaactcatagagtggctctgaccaagttaacccctacatcctgaccatacagagctcccgcagtggcactctgaccacggaagatctgcagaaatgtagacagacaataaattactacagatgggtcacagaaccatcc

SEQ ID NO: 436912 - DNA, 846 bp, Homo Sapiens
  misc_feature (436)..(436): n is a, c, g, or t
ccgattataaaaattttatttgaacttggtaatatgatcagcgacatgaaagaaaattttaagttcctcaaaaacacattaaaggcagcaattaagctaattctcatttctcccttgggcatcaactttttcattgagttactagttgacaactataataaatactttaaaatatgtctaattaaagagaaggcagtctagcttatttatttcacaagaattaacactcagtgttatgcattctgctatcccaggaatactcttttctggtaaatgctgcatagatcaatgcaatcatatgaaagaaaattcaaacgaaatttggaaaaataagtaaatcattatcaaagcactaaatgaaaacagctccaactatactgactctaaaagacagtatatgagtatttgtgtcatacttcaggaaactgaaatattnccctcacttccatggaaaaaaatgtattatatatttaagcatttgaaacattctatagctgcagttcagttcacagcagaaagtaaacattagttttctctcacctcacaaaatgtagagatggccaacgccctcctactaacctttacctcctctagaatgttctgagaatattttctaccttaatagttattcattttatatttattcaaaaatgaatcaaagaaaaaagatatttcttcagtgccagaaatacttaacttgcctcttttatgatcgttaaggggattgggaaaaatacagctattgtggtactttagttttttcaatgtatttaagctatgatctcacctgagcattagctagaagttctaatcagtttagaaacaagaacttctttgaacactgcc

SEQ ID NO: 436913 - DNA, 695 bp, Homo Sapiens
  misc_feature (5)..(5): n is a, c, g, or t
  misc_feature (14)..(14): n is a, c, g, or t
  misc_feature (35)..(35): n is a, c, g, or t
  misc_feature (503)..(503): n is a, c, g, or t
  misc_feature (573)..(609): n is a, c, g, or t
ggtgnatccagggngttcctattaaaatttctttnctgcagacattaaggtatgtggagcactgaagatttatccccatggtaaccaataaattgtataactaatttcattttagtgataagtgaacattgctcaacaaacacacatactgcttgtcataccttacctggaaagaggctttattgaacatagctgtaaaattatattttaagttgaattactgaatttgcacaaacatttctacagaattgttttaaaaaacaagctttgtcattttccactacattttgttgtgcttttatattaatatttgcaaatgctataatttaatacttatattccaattgcttgcataatcattttttttaatcctgggggtgttgaaagaacatataataataatattcttcttaggacaaaagtctttttaaatgaagttaaaagctgaggataatttaaggggaaatggatcttcaaattttcataaccaacagggtttaagntgaaatttacaatgccttggaaaactggctggttaaagatatgatttgtcgtcaggtagctcaaaattannnnnnnnnnnnnnnnnnnnnnnnnnnnnnnnnnnnnataatcttggtaaaataataaaataatatttcacaatttgcacagagtctgactaaagggcagaggcatattaccctcagagttta

SEQ ID NO: 436914 - DNA, 538 bp, Homo Sapiens
  misc_feature (468)..(468): n is a, c, g, or t
  misc_feature (478)..(478): n is a, c, g, or t
acagcaatgatatccacttgtgtcaaccccatattttatgggttcctgaacaaaaacttccagagagacttgcagttcttcttcaacttttgtgatttccggtctcgggatgatgattatgaaacaatagccatgtccacgatgcacacagatgtttccaaaacttctttgaagcaagcaagcccagtcgcatttaaaaaaatcaacaacaatgatgataatgaaaaaatctgaaactacttatagcctatggtcccggatgacatctgtttaaaaacaagcacaacctgcaacatactttgattacctgttctcccaaggaatggggttgaaatcatttgaaaatgactaaggttttcttgtcttggctttttactgcttttgttgtagttgtcataatttacatttgggaacaaaagggtgtggggctttgggggtcttctgggaaatagttttggaccagacatnttgaagtgcnttttgtggatttatggctttaatataaggcttttatacgtactattgggatgaatttctt

SEQ ID NO: 436915 - DNA, 695 bp, Homo Sapiens
ttttttttccattaaaatagctctttgtttattcactttgatttggatcattggaaatattaaacaataaataaaacagagcgggggctgaggaaagcaggatcttgctgaagtcattcgaatgcatcccaaccagtgctcagctgcgtaacgacatggagagaggcaggggggaatagaaagcaaatttaaaaacaccaacacccaaacacacaagactgcacacaagaaaaagtgctcaagaaactttggctttgaagggaattcagtgaagggaagcgattgtgcaggaggaagggaagaaacccacgatcaccctaaggggcggggggctggagggcgaggccctgagacaggctagggttaaagctgacgtcccacagctcaggacgtacaaccgatggcagttttgtactaggaagaagctgagtgatgaggctgggtgatgggatcgcttgacgggctgggagggaggacaggaggtgtaaaggtggctcaccttcccctaggaaattcagtgctcttttggtaagaaaaaatagtcggtaatgccctgatcctgacaagctgtgagatgctgtcttgcctgtctctgccttttcttctaagttttcctccttttctttgcacaggtgtcaggtagcaccccagctaaagccgaaatcctgcagcccgaaggatccacaggttctata

SEQ ID NO: 436916 - DNA, 752 bp, Homo Sapiens
  misc_feature (548)..(548): n is a, c, g, or t
  misc_feature (563)..(563): n is a, c, g, or t
  misc_feature (588)..(588): n is a, c, g, or t
  misc_feature (613)..(613): n is a, c, g, or t
  misc_feature (635)..(635): n is a, c, g, or t
  misc_feature (657)..(657): n is a, c, g, or t
  misc_feature (718)..(718): n is a, c, g, or t
  misc_feature (734)..(734): n is a, c, g, or t
  misc_feature (737)..(737): n is a, c, g, or t
  misc_feature (739)..(739): n is a, c, g, or t
aggatagagaacagagaagtttattttacactatccgtccaagaaaacaatcgccataaaccagtgcaaaatgtgcaacagaatcaataagtgtgtcttagctctgagagcccaaattggtgatttcttctcctgttcctcagttgggcacgtgccccatccgttaatgctggttcgcaccacagacagaaacattcaaccaatttgtagcaggttatttttacaaattcataccagaatgtgtacaagggacagggaaaaccataccgaatgaatgataagtgatcagtgcttaaagtaaatacaagggacagcacgggcaagaatccacagtttcaataaatacaagtgaacaagcatggtgtgtctcaactgggtggaattagtctgcataataattcagcatcatacaaaatctagcagggctgttgagcagtgattggcaaaaacgttcacaataacttatgcccttgagcgagtctgcatgtaacacattctgtggtttcaaaggtgtcagttctctgttttctccttccctggccatcccnccgggaagggagggntgcagctgggccggcttggcggagncgccccgtaggaaggacgtttgccngagagccagtggtcagggtccngtgtactcaataccgagtggcnaattgggacttaattgacgacgtctgtgcaaagtccgcttctctccgttttccgagaaacnggtgtctgtaactccngcntnaaaagcagtggtg

SEQ ID NO: 436917 - DNA, 1294 bp, Homo Sapiens
  misc_feature (95)..(137): n is a, c, g, or t
  misc_feature (512)..(537): n is a, c, g, or t
  misc_feature (544)..(663): n is a, c, g, or t
  misc_feature (916)..(916): n is a, c, g, or t
  misc_feature (1249)..(1249): n is a, c, g, or t
tcaatactatccattctttgtgagaattcaagccagtcgtgcaagagcgaatgcattccagaactaactgagcctcatgagaaagcctgtaatcnnnnnnnnnnnnnnnnnnnnnnnnnnnnnnnnnnnnnnnnnnnctctatctatactggggactcaggcctcagcatgacttttggtgaggaccaaccatatccagaaccatagcaggaagtttaaaaaagcgagtggcggaagcctcagtggaaacgaaaacttctagaccatttaccattaatgcagaggctacattctgttcagtctataaggatctgttatctaaaagttaataaacatgctatcaacttagaaaggctgaagtttctcttcctttttaaatgttttcactttgtctattatccactatcattttagcaaagcatttaataaaaataaaacctttatttctattgtataatacaaaaggttttaagaatattcttctgtgcctcaaattatattcactttttaannnnnnnnnnnnnnnnnnnnnnnnnntcaaatnnnnnnnnnnnnnnnnnnnnnnnnnnnnnnnnnnnnnnnnnnnnnnnnnnnnnnnnnnnnnnnnnnnnnnnnnnnnnnnnnnnnnnnnnnnnnnnnnnnnnnnnnnnnnnnnnnnnnnnncactcttacttatagcaaagtaaggtaataaatgctggaaaacatccaaattctttttgtatggaatttggctaaaagaacccagtgctcaaaccacactgtaagttcatgaaacagagaaaaacatgtaccctaaacctaggttctgaatctttcgcatattttaacgtcagttctgtttatggaatttgggtctgttttcctggtgtggaagtgtacttgaagtagggtgaaacaaaggcaggttgagatnacctgtgattaataaaagtaaaataatttcaagtcaacttaattcatttctccaatctcatagtgcacacccccccaggttctttaattatggaaagatggtctttctgcatccagagaaaacatctgatattacactgaaaatttagtgaaatctataaaacactattactttaggtcatccaagagggcaggaaaataactgttacaaaaaatatttttgtatttttgtaatgggattttacctataacaatggtaaaagctcacatttactgagtgaccagtatgtgtcagataattaagaattttacacggattgacttaatcctcccnaaaaaccctataaattagatgtgattaccattattagccctgttt

SEQ ID NO: 436918 - DNA, 974 bp, Homo Sapiens
tttttttgcatccgtttcctgaataattcctgggtacttccaactaacaggtaaatacattttaaagagtatattcttcttctgtctggaactactcaatgagcacaaagaaaacattttctgtcttccttaacagatttaggtattggtgggtgtggggcacagaacatgagcaaacagcttctgtttatcctctcagccacaaattcgcttttaggtatattttcctatacccttttgcaaattacaaaatcaccttcagaggaactatgggtagatgggattccaatatgcatatctggcaacaatcagcttcaaatcaaaccctttctggggtggctaagatccagctaatgtgtcatcagcaaaggcctctaatatgtgtttgcgtagtaatggaacagtttttaattgggcctgtttatagttgactgacagtaagttctatatggtatataacactaattctctagtcttcttgggcatatcttacgaacaaatacaatccaaatattatgagtaactgggttgtgaccactgcatgcattacactgaaagaaacaccaactcgaagcacaaatatattattcttatatttcggctcagctctcagtggggagagcagctacctcggaccacaatgccatttaaaccagattcttttcaaataaaattctcaatctaagtggaaagccccctcagagaatgccttattcccctactaagcaatccaggcttgtataaaacgtctgataaggcctgtagtgcccattgagtatgagtctgctgtttacattctgcacaggccaggaggggaacagaaggtgtgagccacaggtgctcctgggtctgaccagcaagtctaacccatgaagatctcgagctccaaaaccattctagagcccaccattttgattgttacacatgtgtttcagatgtatgttatggcatatctgaaacagcagagttctcag

SEQ ID NO: 436919 - DNA, 923 bp, Homo Sapiens
tgtggcccacctagctcatcttgtagtaggtcacaatccctccaaggggatgtaacagactttggcatggccagaggttacagcttattggtcttcacaaggccttttatggggtaatcgtcctggtgtgtgttctggttatcaacctgactgatgccggctgggtatttgtgttccagacgaagtggctctcgccttggttggttccaaggcaaataatcagctttagtaagtaggcatacactccatcttgtcgctacatggatatttactgtcccgaggtttgatggggtccactcgacagacagggtagggattgtaatctttcttatacgtcgtgagcaaatccatattctcttcactcgggacgaactggtcatactggtggaccttcactggtgccactttgtgaggcccaaaatctctccttgatgtagtcaggccttccattggtatagaccctttctggtactcccgccttggcttgaaggactctctgggcaggtaggagtgatagaaagggtagttctcggtatattcggagagaagacatggtttctctgtttcatcataaatcttggtagggagatgtggacagtgatgccgcccgcaggagcacagttcacagatgcacttcgtcttcataggggcgatcctgaggccctgacgtcccctcagagcatcgccagctgcagccgactcctagaccccaaccacctgtcttggggcacgcccaggctcgagggtcttggcaggtgttctgtttactcgaaggaaaatttaagtggcccttttgaaatgtcctgtcgtctgttgccctcctggagctggcctagcgcgaggtagcagcagggggcttgcacgcgcgccagcccgggagacctcaccctgcacgccaccgccccggcctccgcagtccagac

SEQ ID NO: 436920 - DNA, 3425 bp, Homo Sapiens
  misc_feature (95)..(219): n is a, c, g, or t
  misc_feature (236)..(247): n is a, c, g, or t
  misc_feature (259)..(410): n is a, c, g, or t
  misc_feature (415)..(475): n is a, c, g, or t
  misc_feature (492)..(612): n is a, c, g, or t
  misc_feature (2283)..(2283): n is a, c, g, or t
cccccacaaccccgggggagggtgttccccccctgttgtttttaaaacgggggccaaatagggaaactttttttgtccccccgtgttttcccccnnnnnnnnnnnnnnnnnnnnnnnnnnnnnnnnnnnnnnnnnnnnnnnnnnnnnnnnnnnnnnnnnnnnnnnnnnnnnnnnnnnnnnnnnnnnnnnnnnnnnnnnnnnnnnnnnnnnnnnnnnnnnttcccaaaaagtgcccnnnnnnnnnnnnaaattaaatttnnnnnnnnnnnnnnnnnnnnnnnnnnnnnnnnnnnnnnnnnnnnnnnnnnnnnnnnnnnnnnnnnnnnnnnnnnnnnnnnnnnnnnnnnnnnnnnnnnnnnnnnnnnnnnnnnnnnnnnnnnnnnnnnnnnnnnnnnnnnnnnnnnnnnnnncccannnnnnnnnnnnnnnnnnnnnnnnnnnnnnnnnnnnnnnnnnnnnnnnnnnnnnnnnnnnnggggggccccaaaaggnnnnnnnnnnnnnnnnnnnnnnnnnnnnnnnnnnnnnnnnnnnnnnnnnnnnnnnnnnnnnnnnnnnnnnnnnnnnnnnnnnnnnnnnnnnnnnnnnnnnnnnnnnnnnnnnnnnnnnnnnaaattgctaacacgtttatttatgaatgaagccaagaagaatttataaatgcattttaataccttgctgataaaatagtaacattccgtctttgcaatctgatacggaatacaggaagatactggtaaaggctttgatgtgcatatctatcataaccaggtaatgagaacacacacgaaccacctactttagtgttacaccataccaacttctcagaaaggtcagcttcaagctctactgggtagctgagtaaatagcgtccaatgtttaaagactggggaagcggggagaaagatgaaaggagtaagcagcacacacttcaaagcccacttttaagcacacgacattatgaatattaaaaataaaggatgcaaacaaaaaaggcaattcagcattttcagaaagagcatttggcaatattcaacgcataaggagactgtgcttggggccatccactctctccagcttctcaaagtgtttccgggcattgcgaatgttgatcagagtggccgcagaagggatcgacggatctgacatgaccaccatcacgtacgtatttgaggtgaagatgtcgatgaaagcagcgaagttggaattcctaacttccatgctctggaaggaagcggccaatttactgcagctcagcttgaactgtttgatgatgttgctgatcttctcaaaccggtggacgtcgcgctgctctttgcactggtagtgggaaataaccaagaatgtagctctttcgaacagcagaacttcatcggcctcaatgatttgggcaaaattcctgaggttcatctccagctgctgaacgttgggaatcagctggtagacgatgctggaccaggctttgtagagcgtctcatcccagatggacgttcgaaaacaagcacactccagcgggcgagacagacgcctcaggtcttcctctcgctctttaaaaatcaggtcacgctgatcctcctgaaccagatccattttgtgcaccaggcagaagattttggcgtcaggagagttctggaggatggcctccagacacgactggtaataatgcatgtccttttccagttcgcggctctccacgtcaaacacgtaaatcaaaacttccacgttacggaagatattgtctcgctggctggtgaagtaattttccatgaaggtgtcctgaccgccacagtcccacaggttcagcaccaggttccctaggaatcggacgtgggagtgttccacgtcaatggtggcccccaggcgccgggtgtcgcgagcaatgtaattggcgaagattatcgacctcatgctggtcttccccgacccgctcttccccatcagcagcacctttttcttcatggctgtatttggcatcacccgccggggcaccgcggactgggcctgagggcgcggcctacacgcagcgccgagggaggggtcgggggctgccggggactcgcaggccgcgcctcgctccgctccgccgcgcagctgggcaggcaggagagtcgagagcgcgaacccggggctggagaggccgcggacgggctggctcttactcagatgggagcgcccgcggctgtcagtggcaacggctcgggagatacgctcgctttccgggagggagccgctgcgtccccgccaccacccacttccggcggcgatctcgcgagagctccctcntccgccctccgtgcccgacgagccttgaaaagccgctgctctaatgaaccctaaccggggcggcgtgagccctaagatggaagggaagctcgaggacttcggtcttttgttctgttgcagctgggtttgcggttgctaggggcggcatcactgtccacatctccctaccaagatttatgataaaacagagaaaccatgtcttctctccgaatataccgagaactaccctttctatcactcctacctgcccagagagtccttcaagccaaggcgggagtaccagaaagggcctataccaatggaaggcctgactacatcaaggagagattttgggcctcacaaagtggcaccagtgaaggtccaccagtatgaccagttcgtcccgagtgaagagaatatggatttgctcacgacgtataagaaagattacaatccctaccctgtctgtcgagtggaccccatcaaacctcgggacagtaaatatccatgtagcgacaagatggagtgtttgcctacttataaagctgattatttgccttggaaccaaccaaggcgagagccacttcgtctggaacacaaataccagccggcatcagtcaggtttgataacagaaccacacaccaggacgattaccccataaaaggccttgtgaagaccataagctgtaaacctctggccatgccaaagctctgtaacatccccttgggagatgtgactaactacaagatgagctatgtgggccaccccgtggagaagcgctttgtgcatgaagcagagaagttcaagccctgtgaaatccccttttgaaggcttaccactcaaaaacaaatcctaccggggccctgaatgggggagcctgccaaggagctttgaaactctagcccaggcctccctggggctagacatggcctttctgttaacaccactgaattttcgagataaagttaccaagcttggccaatggcccccggaagttcttccaaagttcccattaccctaacgtccctccccaaagaacgggatggaatcttctgaaaaaagggggaagccccccttacacatggcccttaggtgggccccaaatttaattcctgccggacctggactttttgaaaataaaaaaggggcgggccccctttta

SEQ ID NO: 436921 - DNA, 479 bp, Homo Sapiens
  misc_feature (61)..(61): n is a, c, g, or t
  misc_feature (74)..(74): n is a, c, g, or t
  misc_feature (134)..(134): n is a, c, g, or t
ctgcccccactgcctgttaataactgcctgggaatcggaaactttcctttgccaaccatangatactgtagacntaccctcctggcactccagaggaaacccgtaatagtaaatttagggggtccgaatgccanaccttatgtctgctgacacagaacacagaggaggtagcgcaaagtaggcagcctctgtggtggaagtgtgagaaaggaatgagtaatgcgcaatcaggaggacgtttgtgggtccgaagcaaatgatgaagatgcagaaaacagcagctgacaggaacaaagcccgggacttcttgctgcggttggcaactgcggaagagctaagacatcgaatgatagacacataacagaccgtggaaatgatcagcggcacaaaaaagaagacagcagagaaggctgagaagtagtagggatagtagccttcgagcagggtttcattgagcacatcatgacaggtagtgatgt

SEQ ID NO: 436922 - DNA, 346 bp, Homo Sapiens
gcacgaggttaagacttagctaggttccatttagatcttccgtgggctttctttccccttgtaacagtgttttactttatagatttatttaaagaaaaaaagttttatcttccccaggtggtcctggtgttttcctgacgcagttggtgagaagcctccgtgctcctgagcggccgcgtcacctgggcagggaccctgtgtggccatggggctctgagcatgggagtgcgtctctcctcttctttcctgccctccttgtcttctttccccccttcttcctgtctccccttttctttcatttgtttattttttacttgtttcacttgttaaaggaagtgggcgttat

SEQ ID NO: 436923 - DNA, 1032 bp, Homo Sapiens
  misc_feature (12)..(12): n is a, c, g, or t
  misc_feature (49)..(49): n is a, c, g, or t
  misc_feature (926)..(926): n is a, c, g, or t
  misc_feature (932)..(932): n is a, c, g, or t
  misc_feature (943)..(943): n is a, c, g, or t
cgttcagaaacnccaaagatttaaggaatggcagtgactcaataaagcntcatacattttctctttttggcattgtttttcacaattattctcctgaaggttaccctgtccaaaccccacagagcaccaggagaggtagcagtgattgtagctgctctgggtgtattgtacattaaggccagttcgccgaaactcccacgattatcatagttaccaacacatcttccaacaccatcacatttcacataaatatcaaatgtgcctctatcaattacataaaagttgtcaccatcgtcaccttgatcaattacatgctccccatctttgaccaatttttcaaacatggcatctaatacttgagacatctgctccggatccagattcttaaacagcaggatgtctttgcaagcctcttgcaacctatttctttgatcatcagtttttggatgtataatcctggactctgcatcatcttcttcttcatcaggattataagcttctgcacatactgaggcacgccttgtgaatcggtttattactggagcattgaacgcccctgcgtccgcgggcgccgcctcctcctcctccccgtcctcggagtcggactgcatgggctcctcggcgaagttgacccccttgctgggggtgccgcccccggcagcggcgcccaggtccccccaggtcctgccctcatggccagaagcgcgcggtgcctttgcgctcgttctcctgctgcaggcgggtgaagtgctgcagcgcgaactccagcagttccgcgggctggtgcctcagcacctccaccgtgaagccctgcagcagctccgtcagtcccgccgggatctcgatgctcatcctgcctccggggcggcaggcgcctgggcgccgccctcgccccctccccggcacggcctagggccccgcggctnccgagncgccgctacgnctggcgcgctaccggctgcgagcgcggcgcactgggccccggcggcccggctggcccggcccgcggctcccggcgcgcgtctgctccgt

SEQ ID NO: 436924 - DNA, 1060 bp, Homo Sapiens
  misc_feature (224)..(286): n is a, c, g, or t
cgtggttgtgtccccattgtgtgtccccgatagtggggttttctcacgaatgttccggtgctgctcgtttttcctgcctcgcgttgtttaatatgctgcgctctttctctttctctttattgtgtcgctcctctttgtgggggccgctcttttctcaatatatttgtgttccgcgattttttggtccccctctgcgggtttcttttcgcgcccccccctctgannnnnnnnnnnnnnnnnnnnnnnnnnnnnnnnnnnnnnnnnnnnnnnnnnnnnnnnnnnnnnncctgaagatatttattcccatccaaacattttcaacagggaaagacacaatccccaatttccccctaggattcacattttcaattttccagggaatctctctttcctggaatgctctcgttcctctggagtcaggaacaagactccagagctgtttatttttctcacacaggtggggggaatctcattctccacaaagggttatcagacacctacttcctctgccaattcctgggctgacctgcaaattccaccttattattgcccttgggcctctggttcctttttgtctgaggtcatatttacatgtgtaatctgccaatgggcacttcctgttagggccatcgtagggcacgtggtggcttgatctggactgcccatggcttcccaactggggccttcgggacagctgcaactcacaaccagtcttttgttgaccttcagctgatttcccagggtacttggcccctcttctttggtctcaggggccccggaagcccaaatgctcctactgaatgtcccaaatgaggaagaagtatcaaaaacatcacatggattcccaaacttgttaaggtaaactggacagtcaggtgcccaaatcgcaccttggctttaaaaggaccaagagggtaggagcactctggggcagggtggacttaacagagaattccaccctgaggtcactctcagagacttgccatcctttctcatgcagacagactccttttcagttttatgtcaatcctctggctgcgcgtctgcacctccctcacaa

SEQ ID NO: 436925 - DNA, 634 bp, Homo Sapiens
  misc_feature (558)..(570): n is a, c, g, or t
ttttttacagaaattgacctttatttgttgtactaaagcctgtttaacttttgatacaaagtaacattttagtacagaaaatcccagtctgtcagctcagtacctgtctgtgcacactgtaccatctcagtcccactctgcctgtaacttagaaaacagcccctacccccagagggtctgcgagttaataccttgagaatagtctacagtttttcatagtttgtctgagctagaaaacttgtacctgtaaaacaaaggacagcattgaggactgaaacttgtctcttttttgaacaactgtgcaagaaaatatatccctttttaaaaaacatcagttatggctaaactacaatctagtgtctagaattacaaagaataaaatgaaatcaaagatttctcgctagtaaaatgaaatgttaggaacagtattaaaatataggtcctaccccaacgacacttacacagagcccagtacagtacctattattaacaggacgcatagcttaaggaggaaccacatcaaatcttcagccagacatatctagcctcagaagtgcnnnnnnnnnnnnngcccccaaacgaagacacccacactgagtagggtgcatgccgtgagtgctgtaatcaagattcc

SEQ ID NO: 436926 - DNA, 1522 bp, Homo Sapiens
  misc_feature (4)..(4): n is a, c, g, or t
aaantttttatcataacatgatttctttcacccaccagcttttttatcttacaatagataaataccaacatgttctcatttttacactaaaccacacaggattgatgcatttggttagactaccattcgcattgttaaattcaattttctctttatataacttggtaaaatttcatttcttctagattccaaaagtacctacaaaacccatgcaattttaccatttttaatatactatggaatatcatacaaagtaaggcatttcagtgtcatgtataaccaagttactgtcaatccaaaaatttttgcacatcaataaaaagatatctaagaacttaggaacaatattcttctcactactgtataaaaataaccacaatgaataagtatttgtgtaatatttactccattgtctcatttccagaaactgtgacaagctgtaaaggtatttcagtgttggtaaggatatcttgattgctggtggcggaagtattaacagttcctatccctgaaacagaaccttgttgaatatttgcaaggataagcgttgttcctcctgcagtaatcaaagtatcatctcgcgcagcttccacagatgccagcactgtactgctagagtgaataccttttttattctggtgtgttttaatatgtttggcaaggtggtcacttctcataaagcgttttgaacattctggacaaacaaatttcttctcacctgtatgtgttcttctgtgcctctgtaattcatcacttcgagtaaatcttttaccacagtacatccagttacaaacaaaagggcgttctccagaatgccaacgcagatgagctctcagatgtgagttcttcccatagactttaccacatcctggtatatgacaaatgtgttgcttctttttcccaagattggtacctcttccaccaccttctttacagttgggacaggtgcaagctaccctccgaagtctttttccttcttgatgttgttggtccccttcttcatctaccacctgtactcttaagtgtgttaggtcattggtattcaaggtagaatcaccactgagctgccactcttcaggatcaggttcttcttccttgatcctaatatctgcaggactgtcagcattctctcctggatgtagctgtataccagcagaatctatagagttcactgtaactgtttgtagatttggcaactgaccagtgcttagactaactggagttgaagtgaaggctccacctgccgcaacttgaccaagtgtgagggtttgaacaggcgtcaaagttatttgttgggcagcagtattctgtatttgcaaattctgcaagttctggaccccttgtacttgaaacgtttgccaagttacctgtccagaaggggtcactgtctgtgcctgaattaaaaaggttccaggattcagctgcaactgaagattttgcaaagcctgttgtgatatattttgaccactggcttgccacacaccgctctcgacgaattcgagctcggccgatttggcctgat

SEQ ID NO: 436927 - DNA, 808 bp, Homo Sapiens
  misc_feature (533)..(533): n is a, c, g, or t
gggtgtaaaaatgagaacatgttggtatttatctattgtaagataaaaaagctggtgggtgaaagaaatcatgttatgataaaaaattttgtaattttcttgatgactggaatttttattatgcataactgacaaatcaagtttccaagcaaatgttacatagtgtaggctttacttagcttatcaatttgtcattttgaagctaattattttaattaggttaactatgtacaatattttaagcattactcttgtaagattttgaaaactacattttaacatggaactctagggatagtcaccttttaaatcctgttgaaaagccatgtttaagatttaatttgccaaaataatgtcttgttaatattctttcaataacgaagttgggcaatataaccaatgtttaaaaaagtttaaaatgtataagttgaggcatttgggtggtaagagaatgttatagtgaattatcccttttcttgactattggaggaccaaaaaaataaggtgtattgcgtcttagcagtgatttttantccaatcttgtttccaaaaaccatgtctccccagggccttaaaagccatcatgtaaattacccgtaaagtgtaacatattgccacctaaccaaccgcggagaataccctccccccccatacattggcgggacggccttcggggcccttcgaaaaagccttttcttagaaccatttcgcgtttggggggcgcggggggcccccaagttagcggtatagggtggaaaccactgggctccaacaagaccctggtttttccccctaagggagagaatac

SEQ ID NO: 436928 - DNA, 235 bp, Homo Sapiens
  misc_feature (170)..(170): n is a, c, g, or t
aaaaaacttcaacaaggatttttatctttaaggctgtaataattaggtaagcatttatttctagaattctccccctttaaaatctctacaaaaacaaatcttttgttaaaccattcaaagttcacataaaaggtaattaccactaccttaaaaaaatgcccatctacatnaaaaattcaagaggcctaaatatcccctcataagcactgcagttcctgaagtatggccatttctt

SEQ ID NO: 436929 - DNA, 2365 bp, Homo Sapiens
  misc_feature (5)..(5): n is a, c, g, or t
ttttntttttgctgccagctgcatttattgtagcatgtacaaaccactcacagccagcgcctgtcaggggcccaggacactggccagcggggccaaggagccacattgctgggcacatgccccataccctggccacccggcagcagtgcccagcatccctcaatgacagagcagccaggaccccagcggtgactgtcccagagggacctacaggggcatggggccaaagctgggtcctgcaccttgtttggcctgcagatttgatttctgaattaatttctgccaacaacttaaaaaatcaggacatctcacatacaaatctgtatttctggcttctccagatttctgtcattaggcctgcattcccacaccagagcaattagctacacctgaatatggcagcggccactgtcagacggggacccgtgctctcccccccatccccaccgcactctcttggtctcaaggaaagtggctgttaccgactagattgtgcgaactttctctcatcacgatgtctttgtctccagcaacagtgggaaagtcaaagtgaagcaggctcccaactcaagggcctgtttcatccatttacacaacatacgtggccccaggggcatcggagtttgagatctctggacgagcccagggagggggcggcaggatcactccatacacaccccttcacatagctgatgaggcggagctgagggcagcagccagccttcccaagcctgagccagttggctctgagaaattcccaacctctccgaaccccagagcgctagtaggcaggcacaggctctactagagtgaggttgcgggaggaagccagacccagggagtgtggggctggcgtgccctctagtgcccatcaggcagctctgcagccacggcgaagatgctgaacttgactcctaggagtcaaccatccagatcccccaaacaggctcccgccagtcccatggcttccagctacttcttttgcaaaattgtcctgacccccatcccacccctcagaccctctcctgggcactctactcccaccgcagtccccagcaaggccgcccttcccaggctgcaccctcttcaaagcggggtccagcctctccatccttcaggtccccgtgtttcactccagattggcccgcagcggcctcgaggtgcaggaaataaccctgcagaggtgggaggccagctcctagtgtacaagggtcaggcggcacttaggtgagtagaacgggccagctggggcccttggtgactggggaggcagtgtcccaggtagtgttgccaccgaagagccggcgtagccaggtggtcattcttcaagagaagctgtggatctggacttttatgtgaaatctaccaatttttaaaggttggctcagggtataaaccacccaggccaaagaaaacatgtcggctgggtggggccgggccaggggccccagtcagagagttttgttgaggccccgccgtggacaggacttcggaaatggtgggcgtaagccagtggttttcaaagtcatcattccatttgctccagttggctttcactgccttgatgtcactcacgaggttctgggccaggcagatgccaaagatctggaggagggcgatgcccatgaagactcccgccaccacaatcaggttgtcctgcagccacttctcaaactggcccacgcagcctttggtgtggatgaagccctgctgctccagctccagtttgagccggacgtcgtagccacactgggtgttgaggacatcctccgcagggtccctgacgcagcaggagaagggcaccccgcagcgctcccggctggggttcaagtcagtgcagttgaagtagatattgaggttccagtcattggggcctcgggctccgcagcaagaccagtattcctgagcaaagtcaatgaggttctggaggtcaatgtcgtcccggtaggccttgacgttgttgttgatgaagaggttgagctggtctcgaatccagtcaaacttgagcaggaaggtgttctcccggagggccccaatgcagccagcaaagcccagcaccgacatgacgcctccaactaccacaaacagccacacggggtcaaggcctcccagatctgtcagcgctgagatgttcgagagaacgcccttctcaccccaggcccagaggccgatagccaggaacagggctcccagcacccagaagacaatgttgaagccaaacaggaagtatttcccgcagcagccgacctcaggttcctggaaatgctggtgcttgccgggcatggtgagcggccacccgccggcccggaaaccggagccgggagccaggcccagcgcccctcgtgccaaattcgccacccaggcc

SEQ ID NO: 436930 - DNA, 988 bp, Homo Sapiens
tggaaggaagggtcggattccccatgaaaggtttcccgcccacccaccaatacagggttttccttgcaagccattttttcaaaactgggccccacgcaggcctttggtgggggatgaaggccttgttgttcccagctccagttggagctcggacgttgtagccacactggttgttgaggacatcctccgcagggtccctgacgcagcaggagaagggcaccccgcagcgctcccggctggggttcaagtcagtgcagttgaagtagatattgaggttccagtcattggggcctcgggctccacagcaagaccagtattcctgagcaaagtcaatgaggttctggaggtcaatgtcgtcccggtaggccttgacgttgttgttgatgaagaggttgagctggtctcgaatccagtccttgaagacaaaggccaggatccctgttgccagctccaggaagaagatgagaccgaggaacacggagaaaaacttgagcaggaaggtgttctcccggagggccccaatgcagccagcaaagcccagcaccgacatgacgcctccaactaccacaaacagccacacggggtcaaggcctcccagatctgtcagcgctgagatgttcgagagaacgcccttctcaccccaggcccagaggccgatagccaggaacagggctcccagcacccagaagacaatgttgaagccaaacaggaagtatttcccgcagcagccgacctcaggttcctggaaatgctggtgcttgccgggcatggtgagcggccacccgccggcccggaaaccggagccgggagccaggcccagcgccccgcgggccgccctgggctagagccgcccggggcctagccgggcggctgcggcttcatggcctcggccacacagagcgccggtcgggcatccaaggaattccggaccggtaccagcctgttgtgacgagttttgagggtaggtgtggtttaattaggtcggtgt

SEQ ID NO: 436931 - DNA, 474 bp, Homo Sapiens
  misc_feature (340)..(340): n is a, c, g, or t
  misc_feature (375)..(375): n is a, c, g, or t
  misc_feature (431)..(431): n is a, c, g, or t
  misc_feature (461)..(461): n is a, c, g, or t
ttttttcgtttttcttcaattgatgcaactcagtaatttttattgcaactggaagacaatacatcacagaaactttatggtaggtctggggaaaagtgttatttacaataaatgatgaaatagtttgtctttggcaatatgattacatacgaagaatgcaaaatgcaggtatggatgccttccaagcaacaccaagtccctagagttcggctgatcgcgcctgcctccacactgtttctttaggtttacatgaacataacagaacatcacgttctttctcctttatggttctccctttctattcatgatattggcagtttcatacagaaaatacagaaanaaaattggcttttgaaaaattattactctcgtaanttaatttggcccgtgtaggttctattggccagccaaggtcagacgaccctaaggcntcattagtaaaacctcttgggtcttctgantgctttatccacg

SEQ ID NO: 436932 - DNA, 2118 bp, Homo Sapiens
caattgtaacagttctccatccttcctcttccctttgaaataaacacaaatagaatatatcttacagctgcaagaaaacctgagtcctttccaaaacaaaggtgactgaagtaaattatctctaaaacttattccatagacttcatttattaataagcatattgtgaaaatctacatttgttttagatttcatgtttacagagcttttcacaattgtattaggatctttcacaactactctctgggttttatgaacagtaaagaatctggctcatgtgaccctctattcatagctcccctttggctcctgtgaaggagctgatagttccctggagtaaataaatcaaaacaagatatccttgggagatttttagctgttaatctactcctggaccccatcctgggaactgagggaaaactcctagagagatatacaaatctttgaacaaaatatttacatgaaaagtggccagttttcttccttggagtagcaatctgtaaaaataagtgctgctgtttaaaaagtagcatgccctacaccataccaatgtattagtgagaatttggcgattctcaccaaacaacaatgaagtttcacatttggtactggatggagcttgggttagatctgccttttaaggcaaagtcaactctttcaacttaattctttttcaagggagtaatgtactgtctacacttggcttaaactaacttctattatggactactttcaatgtacatgtaaatgttcatgcatcagaagccaatttcttttaacagtacatagaaaaggtatattttggggtgctaatgaacacttcaaattaagtaatgatattggtaaggatcaaactgcactattagtcttgttaataccacactggcacacacactgcatatatatgtattttcctaagataaaactcttctcagaatttcattactttttattatacaccaactagtttatattgtagttctttacaaagaaaatgctaagaaaaattataatcacatgttatatggttttaaaataataattccagatttctttacatataagatggaatggtccagcagctatatccactgtcacagactttagttccgttcaatgatatggcacatcctgcaaaattaactagtcacacacaaaaaatgtctcaaatacagtaaaaatgtacacacaaaggtaatttacaatgacaaggaatgtaatttttcttggctgtgcttcagaaatttagggtcagtagccttaatcaaggcacaaagcaggaaaaggtgagcacagctgtctctaggagtgggcaaggtatgtacaatcactgatgaggtatgcatgcacgcaaaggatttaaaactgctcagtctcactacaaaaattgaactgagttaaaaggaaatgctgtggcttccccctactatctggctctggattgagtccacagtcttacttcatcaaatagaaaataaaactgacaaggatctccaaaagtaaatcactatttgtgtaaatgaaacaaaatgcttcattaatcccagttcttggttgtgcctcctggactagaagcattttgtagacaaaagagtgtttcacaaaattgaaatgtaattcaggtgaaggacaaaacattttccacagacacttaaaattccaaactttcaaatggcccttacagctgaaccgttgtatgttacagtagtgagggttctgggtatcctttagcagcaaatgccggtttaaagggcacggggtctcttcgggttgatttgcttgctggcttgttcctcctcttgtagagctgcacggaaagatttcactttatcccgcagttcagttaaaatgtctattttttgctcaagaatagcttcaagttgtgtagcatatgaatcgacatcataatctacttcttcagtcatctctaagagggccttttcatcttctaaccaccgaatagattcctggaacactgtcctgtgatcttctacaacttgttcttccatttctaccatttgtgaaacagcttcgtggaaagtaaacaactgtggagagacttcttcttcattttgttcacaaagaagtttcagatcatctctctcttcactcaacccggg

SEQ ID NO: 436933 - DNA, 958 bp, Homo Sapiens
  misc_feature (46)..(46): n is a, c, g, or t
aatggtccccaatcaaagtcctcctcaccatgctttagcacgtgtnacgaggaagtttcctttgacactggagggtggccagggcagggggaagaggccaggtggacacacggagacgaagcaaacgagctgacacaaacccactttattcagcattgagccagcccacacgctgggcaggtcaaactcacagacatcgcaccaagggccggggactcagaagggctgaaaggcttcatctggaaatgggcaccgctcacaagcccggctatccccaaatctcaacaactgtctgcatctatgtccccgactttgcaatcctgtccccagtgctgagtttctgtcgactaatttatctacacacaaggatgctgcaggcaactgagctactgctacaagctttgcaaaattcaactactaaaggaaatgggaggagggaaagagctagagataacagcaagatgagacaccatggcagggcctggagatgctaaatggggttagccacctgccagccccctcacccagggaaacagagaaagaggcttccttctgcggaggcaggtggagcacagggagggctcctgggaggcacaggagtggggtgggggccaggaagggggaggtggacagagcgacttggataaggctgggccgggcccacgcccacctcaagaggggggccgcctcctcaggaggcatcaaggtgcaatccagtcttcctttctctccctgaagacctgagttccagccttcacagagcgtcatgcgcattcttctttctggatgctaaccccaaatccgacactcaatggtgcacctcaggtacctgccaaggatctgtgggcccacatggaaggtgcagggtctgggtccctggatgacgaggtgaggggcagatgggtgaccagggaagggcatgacccagagcttgccgggactcatggagatgggctgt

SEQ ID NO: 436934 - DNA, 1952 bp, Homo Sapiens
tccttcggccggggatctgtggggcgggcgacaagagctgtcaggtgtttctccctcaagggtgggggaccccccttgccagggcccttgggagatggctaaattggcgtttcagccaccttgcccagccccccttccctccaggggatcccggggaaagagggcttcctttctgcgggagggcagttggaaccccggggagggctccctgggaaggccacaggagtggggtgggggcccaggaaggggggaggtggacaagagcgacttggataagggctgggcggggcccacgcccacctcaagagggggggccgcctcctcaggaggcatcaaggtgcaatccagtcttcctttctctccctgaagacctgagttccagccttcacagagcgtcatgcgcattcttctttctggatgctaaccccaaatccgacactcaatggtgcacctcaggtacctgccaaggatctgtgggcccacatggaaggtgcagggtctgggtccctggatgacgaggtgaggggcagatgggtgaccagggaagggcatgacccagagctgccgggactcatggaggatgggctgtggctaggacttcaggaagggacgggcacaggtgggaagggtcctcaggtccagcctctaccgggaggtgtttgcagcccccaaaacacgcctcggggtgaaggataaatggacattgttgaaacacgcaactatgtagatggacccaaggccaggcgcctgccacgcttccctggcagccacacgctgacacttcccatggagatgaggatccatcctcctgcctccagctctgggactgccacgggttggcgccatcactgcagcagcatgctgaggcccaggttgcgatgcttcttctccagctccgagaccgcctgcagcagtgacctgaaccgctcagtggggtcagccagctcgtcctcagggagcccctcctccttctcagcctcctgcaggaaatgctcctcctcctccacaaagaaggcccgcagcttcttgtagtcggtcagtgccttcttcctacggtccatcacgtgtcccttccacactgcagctgctgactctgcctggccatgcaggtcccgggcgtcattcaagtcctttctcatgatttccacagaccccttgttctccttgccgcgcagcgccttcctccagcgcggttcccactcgggcggctcggggcccgcagccatacggcaggcggcgcagagcgggccggcgtcggcgcggcacagcagctgcagcgcggcctcgctggccgggccgtcgcgcgcgggcgccgcggccgcctcctcgagcgccagaaggcggcggctgagcgggggcctgccgggctccacggcgcgctgccagcagtcgtcggcgcactcggggcacgggaagggcccgtcctcctcggcccagaagcgcaccacgcacgcccgacagaagcggtggccgcagtcggcgcgcaccggttcccggggcgcgcgctggcacagggcgcaggcggcctcggcggggcccgcagggagcgccagggctgcgggcggcggggccggcaagggcgcaggagcggctggggagggccggagacctagacggccggcgaccggacggagaccagcaacaggacgaagacgccaacgccggggacgcgcacggggcggggtcggggacgcgcacggggcggggtccggaccgcggagcgctctgccgataagatcctggcagcggtgtgctgcagccggaggtcctggcccgcgctgcgctccacagacaagatcctggcagcagtgtactgcatccttaggtcctggccgcggtgggcttctccgcctggatcctagcggcggtgcgctcctccgccttgatttgggcaactatgctctccacctgcaaggtcctggcagcggcgcacgtcaccgtgcaagttcctg

SEQ ID NO: 436935 - DNA, 431 bp, Homo Sapiens
  misc_feature (294)..(294): n is a, c, g, or t
  misc_feature (318)..(318): n is a, c, g, or t
  misc_feature (361)..(361): n is a, c, g, or t
  misc_feature (406)..(406): n is a, c, g, or t
tccaactaagactttattgattttacaagtcaacagtttgtacataccaacaatgaatcagtaagaggtcaaaaaatacattttagtaatagatacaaacgcagtgttaaaatgagactgtcaaactttacagtataatcaaatcaaattacaaagttagatgaccagtattctcatcttcagttctttgataaaaccatgaactatgtttcaaatacaacactatgtgataacgcaagggaataaaaatcagtatcagggccaagtgcagcggcttcatgcctattaatcccngcattttggggggggccaaaggcnggggggttcacttgagcccgggggtttcagactgggccttggncaacatgggtggaaacccccattttcccccaaaaattacaaaaanttaggccgggtttgggtgggccttt

SEQ ID NO: 436936 - DNA, 747 bp, Homo Sapiens
acattttgcccaaagagaacacagagattctttttatttaaaggggacggggtgaaacatgaacatttgaggctgattccctgtgggaaaaatcattcaaatctattcactcatctgatggctgttgcttgttttattttttgtccaagagaggtggtgttggaccgaggtagagaagacagtggtacaccagaaataacccaaaggattgccccttctgtagaaggcccttagactccatgatgcctttcagctgggtgctatacttgcacctaactctgggggcttcactttctatccctacaattactcaaacagataaaaggctggatgttaacatgtagttataaggggcgtgatctaatagtaaggaatatcacttcccacaagtccttcaaacaagatttgtgaggagctgggatttgtcagcatgttcagatctttttgaaaaccagagagtagaatgtaagcaatacccttgtcgtaattaaagaccagactccatccttatacactgatgcctctggtaccttaatccttaaaatatttagtgacccttgccttctaattcttgacacaaatatataatcgaccattttagatcggggaactccctttctttgaaggcagtttagggattccacagatgggctttgaacctggctaaatgtgtatggaaaactggagtgaattacaaatgtctttttctcaaaagtgcgtttctggtttctgtcagattcaacaggt

SEQ ID NO: 436937 - DNA, 1742 bp, Homo Sapiens
  misc_feature (266)..(302): n is a, c, g, or t
ttttagaaaaatgtcttcaatgttaatagaaccaatactttatactcaaaggtcaaagtcaaggctcaaaggtacaggaaagataccaaaggtacctttaagagacgtggtcttgtttatgattaaaaaggtaaaagtttataaaagttaatttacaacccaagaccaaaagtagtatgcacgcattatgtacaagcatccttaaaacatcaaaattttcaaatgcatagccagaaagaacagaaaaccaccattgccccttgtcnnnnnnnnnnnnnnnnnnnnnnnnnnnnnnnnnnnnngatatccccaaatcacaccactattttcttctgggtgataacacatttctgaaaccaccaaatgcacaacgtactcagtctttgtcatgatacagtatctagataatgcacaaaagccataaaaacttagtaacacaaggagaatgagctaagaattaagaacatgagggtaaggcatttctgctggttagtatgtctgtggtaatatggtgaagttagagatctgaagaggccatggaaccagtctcacatgcttttgtatccttccctaagaaaaatgtgttttcatgtacagtaagtcattgtcttcacttcaccctcccccagttgtaaaatctccttgctgtacatttctgttaaatccacaacactggttatatattccaggtgcatttaaaaaatgtgtgcatattacttcatgcataataaaataaaatgtgtacgtatgctaggccagggccatagtaaagtttgaaacagtgtactttggaaagaacagacctcaaatgcacccccatttactggctggtattttaacggaaatcaatatgtgaagttaagcagtgacgataaaaaaattacaaaaatcacaaagcaaaatatctttgaacctctagccaataccaacagtcccgtcaatcacaaacatgcagtgtgtagcatgttttccgaccatggttcaggggcatgctcactcatctttatcagttcaaacaaatgcctcatactaacaaactgtagtatcaactctaaaaaaggtataatacttgatagagtggttccatttagattaagtttaatccagtttcacattatttaagttcctatatttcaagagttaaaagtggtcaataaggacagaaacacagtttgctccaacgagataatttggatctccgggaagacacttgttttgccaggttttaggatcacccgacgaggagtcggatgattttagagcaaaagaccaaccgtcaggagtcatggacgcacagtgtggtaagcgcagctccacaggcttcaggaacttgaggccatggggaccacacatcaccaaaggactcagcagtgtttcacctttctctttatctaaaggtggaaggatgctgttgtcccggcagaccttgaaatagatttcctgctcaactccttcgggaatggctccttgagggataattatactaacaccagtttctatggaactcagcacgcccccattgctgttaaatatgcctcgggctgtggccaccacagtatgaccatcttcatcttcatcctcttccacagctgaaggactcacaggaatagctttaggcactgtgctgatattatttatttgatatttaggcttctctgcatggatagagaaagtttcaactccactgtcaaactcaggcggctgtgccaaactgtgcgatttcacaagagtttttggagaag

SEQ ID NO: 436938 - DNA, 465 bp, Homo Sapiens
  misc_feature (447)..(447): n is a, c, g, or t
ggctgctttgaaatacagcaatgtgttttgatacaaattcaatatgctgaagaaacagaagaaaattatgtctaaatatacgtatttgccctataattgcaaagcattacggatagcagtttactgaactgtaaatgacatcaacttcttttctctcataggtgatcctaaaacctggcaaaacaagtgtcttcccggagatccaaattatctcgttggagcaaactgtgtttctgtccttattgaccacttttaactcttgaaatatagggaacttaaataatgtgaaactgggattaaacttaatctaaatgggaaccactctatcaagtattataccttttttaggagttgatactacagtttgttaggtatgagggcatttgtttgaacttgataaaggtgagtgaggcatgccccctgaaccctggtcgggaaaacatggtncacactgcatgtttgtgg

SEQ ID NO: 436939 - DNA, 935 bp, Homo Sapiens
ggaaaatacagcttcaatgcaccccttatgctggtatttaacgaagtccatatgggagttaagcatggccaatgaaaattaccagatcaccaaggccacatattctgtgaacctctagccgatacccgacagtccgtgcgaatccacaacatgcagtgtgtagcatgttttcccgacctggttttcaggcggcatgctcacgtcatcttttatcagttcaacacaaatgccctcatactaacaactgtagtatcacttctaaaaggtataatacttgatagagtggttccatttagatttaagtttaatcccagtttcacattatttaagttcctatatttcaagagttaaaagtggtcaataaggacagaaacacagtttgctccaacgagataatttggatctccgggaagacacttgttttgccaggttttaggatcaccgtcaggagtcatggacgcacagtgtggtaagcgcagctccacaggcttcaggaacttgaggccatggggaccacacatcaccaaaggactcagcagtgtttcacctttctctttatctaaaggtggaaggatgctgttgtcccggcagaccttgaaatagatttcctgctcaaactcttcgggaatggctccttgagggataattatactaacaccagtttctatggaactcagcacgcccccattgctgttaaatatgcctcgggctgtggccaccacagtatgaccatcttcatcttcatcctcttccacagctgaaggactcacaggaatagctttaggcactgtgctgatattatttatttgatatttaggcttctctgcatggatagagaaagtttcaactccactgtcaaactcaggaggctgtgccaaactgtgcgatttcacaagagtttttggagaagtgggagtttttgaagacattccgct

SEQ ID NO: 436940 - DNA, 904 bp, Homo Sapiens
  misc_feature (105)..(105): n is a, c, g, or t
  misc_feature (417)..(454): n is a, c, g, or t
gagaaccttgccgacaggattttactcccgactagggaatctcttggagtacctgttatctgtgtaaagccgcgagccactttaaaagtgtgaacaccttctggngcacccccttgttgttgtacaaatatgcgccccttgcaaatggggttcataagaaaaccgcggcttttaattcccggccaggaggtcccaaagttctcaaagcgctccaagaggtcacgagggagtatcccaaggtcccctttagaagcggggtcttgtttaagtataaaaaaggtaaaggttataaaagttaattgtcccaaccagggaccaaaggggtatgcaccgcacttatgtacaagcatccttcaacatccaaattgttcaaaagcatagcccgaaaggcccggaacccccccggcccctggtccnnnnnnnnnnnnnnnnnnnnnnnnnnnnnnnnnnnnnntatccccaaatcacaccactattttcttctgggtgataacacatttctgaaaccaccaaatgcacaacgtactcagtctttgtcatgatacagtatctagataatgcacaaaagccataaaaacttagtaacacaaggagaatgagctaagaattaagaacatgagggtaaggcatttctgctggttagtatgtctgtggtaatatggtgaagttagagatctgaagaggccatggaaccagtctcacatgcttttgtatccttccctaagaaaaatgtgttttcatgtacagtaagtcattgtcttcacttcaccctcccccagttgtaaatctccttgctgtacatttctgttaaatccacaacactggttatatattccaggtgcatttaaaaaatgtgtgcatattacttcatgcataataaaataaaatgtgtacgtatgccgct

SEQ ID NO: 436941 - DNA, 825 bp, Homo Sapiens
  misc_feature (568)..(606): n is a, c, g, or t
  misc_feature (781)..(781): n is a, c, g, or t
attttaaaaagttttattttggagatttagaaatttgagatttttaataacggcaaaagaaattcagtcacacctaatgattaacagaatgtagtggtgtattatctaaacagaaatcgtgctgatgtgccataataaattgtctattagtaaaaaaatacactttagggcacagcattgtatcacaaattacagtagggatactttgcaagaatttaatcaaactagagaattctgagtaactgtatcttttaaatgcagcacttaaaaatgtaacaactctgtgcatcctttttcttaaaaaaaatgaccttgcatgtgtcatagaaacgctgctttattgctgcagaggtcaaagttcaaggctcaagaggtacaggagagaatacaaaggtagcctttagaaacgtggtcttgtttatgtataaaaaaggtaaagtttataaaagttaatttacaaaccaagaacaaaagtggtatgcacgcattatgtacaagcatccttaaaacatcaaaattttcaaatgcatagccagaaagaacagaaaaccaccactgccccttgtcnnnnnnnnnnnnnnnnnnnnnnnnnnnnnnnnnnnnnnntatccccaaatcacaccactattttcttctgggtgataacacatttctgaaaccaccaaatgcacaacgtactcagtctttgtcatgatacagtatctagataatgcacaaaagccataaaaacttagtaacacaaaggagaatgagctaagaattaagaacatgagggtaaagnatttctgctggttagtatgtctgtggtaaatatggtgaagttag

SEQ ID NO: 436942 - DNA, 260 bp, Homo Sapiens
atcttccgcttactttatttacttgttttacaaaggcagtgaacaccaaaggatatcaccaacaactaaaaggagttcaaaatgcaggggaaggaaaactagctgaaacttgagtaaaggctcctgtgcggtgtgagcccttgggcccttttcctccacccatcattgagtatataaaggcgcttgtggtggagcgagatggggcgcgttttctttttttgagatggaatttcgcttttgttgcccaggctggctcgtgc

SEQ ID NO: 436943 - DNA, 1251 bp, Homo Sapiens
tttttttaatgtttgggtaaaaatatattttcccccgctttatgtcttggcactagtgatatatgcatagattatctgttcaccactctcctaccttaacagatgccaaattaccaagcatgttgctaagtgatcactttcatatttgaaaaaatgatatgcttcacatcaatacaattactttagtttaaaaaagacaaatgtctaacatgcagcttacatatatgacaattctgcattaacaatgaaagtagattacacgacagttttagaaaacacattggttattttcaaacagcaaaatgacaaggatctacaactacagtttaaggcatatcagcatattttaaaattaagaaatagacaaagttctaatgctgttcacagcttttcaatttatttaaaaaattcccttcatacctacatacaaactagactttgtaggtcttaattcccactaaagaatgtgtcctgtcagtggaaccaggacttttcgaagctgagacctgacaattccagactcttgcaaatggcaaagcaaaggggtgggaatggacagtttttgtaggaccacacagagacagcaggacgtgggtcggtaacagctgaaaaacctcacccaatagtttgtatgtgaaacagtcatggaaatgtcaagaaagcaaggaaaccaagtctgttcatttgaggtgcacaagatgtggattgtgtgtgttactgctggtgagtcacaaagcagagaaggaagataagtaatctgtgcccactgttacattaaataattcccattgttgaaatgccctttttggagaaaccttaacccagttaataaagagcctaagttgggaaacaccatctgaactgcccataaattctcatcaatgcttttccatcacattctacagtacatgtgttatggagatctaaagttcagaagaagccaaaagatggtattatgtttggaaccaaagatatggggtaaggccagctagttatgtaggcccctcaacccccaaaaaagaggtggccactgtcagcagttagcaccagggagagaccattaaactaagattaaaaaattaagtggtcataaaggcatcctagcataaaaatttttctcttggttttctctagtagaagatggtaatttctcattctggctttatttgccttgccagaatcaagggccctctgagctatccaatgatgcccatgaggctatgtagagcacaggcagggattaataatttc

SEQ ID NO: 436944 - DNA, 644 bp, Homo Sapiens
  misc_feature (501)..(501): n is a, c, g, or t
  misc_feature (618)..(618): n is a, c, g, or t
  misc_feature (623)..(623): n is a, c, g, or t
tctacatagcctcatgggcatcattggatagctcagagggcccttgattctggcaaggcaaataaagccagaatgagaaattaccatcttctactagagaaaaccaagagaaaaatttttatgctaggatgcctttatgaccacttaattttttaatcttagtttaatggtctctccctggtgctaactgctgacagtggccacctcttttttgggggttgaggggcctacataactagctggccttaccccatatcttttgttcaaacataataccatctttttgcttcttctgaactttagatctccataacacatgtactgtagaatgtgatggaaaagcattgatgagaatttattggcagttcagattgtgttttcccaacttaggctctttattaattggttaaggttttctccattatcttccttctctgctttgtgactcaccagcagtaacacacacaatccacatcttgtgcacctcaaatgaacagactnggtttccttgctttcttgacatttccatgaactgttcacatacaaactattgcgtgaggttttcagctgttaccgacccacgtcctgctgtctctgtgtggtcctacataaactgtncattnccacccccttgctttgccatt

SEQ ID NO: 436945 - DNA, 427 bp, Homo Sapiens
cagacatttaactgtcatttttttcctttgtcatttgtgagttttatttgtacagttcctcatgaagttgcatctgagatgtgtgtatatgaaaagattatacaagggtaaaattaagcaatatattaactatggttcttcaggagaaagcttacagtgtttcaggttgtgatttattttcaaaatggagttgactctgaacatcactttgttcacctgcattgatgtttgtatttctagtgtgagcagtttatgcaaaggtagatatattcagagaaattttaaatacatttatgcaagttaatattgctttgctgatgctatttgcttatttgatgttaaataatgctattgtaaataaagaattctgttgttattgcatcatttaataaattttaatgccttcgggttttacatggctttagag

SEQ ID NO: 436946 - DNA, 517 bp, Homo Sapiens
  misc_feature (388)..(414): n is a, c, g, or t
ttttttttcataccaccattttcatttattagcaataacagaggaaataccaatagcaccaattcaaaatgaatccacatgacgtgttttatccttacagctgtaataactagtaactaacatggattggaaagcacttcgcaaatgtaaaaagtgctgtacagatacattataattatcatcattaataaattagcccgattctcctagttcaaaaggcacgtaaggtcagatacatgggcttcagtggggcaaaatgatcacaacctacaatgtagcaatggttcacatgtgttggtaacaagttttaccccatgcaatcctgcagagctgaagttacacacccttcaaaatatgggagaatgaagctaaaagtagacaagacagnnnnnnnnnnnnnnnnnnnnnnnnnnnaaataacagactcctacctcttttatattaatgcctaaatagataatataattaatcaaacttctaaattgtccattataacaaaattaaaatgtcttattta

SEQ ID NO: 436947 - DNA, 1240 bp, Homo Sapiens
  misc_feature (838)..(864): n is a, c, g, or t
ctcttttctaagaaacaattatgtgcactttgatacacaaccttctctaaccaactatatatcaagacccaaaaattgaagaaaaatattgttttctcatacagtgagcagatttttcaatctactaattctgtgacttgtcttggtgtgctagcctacaccttctctttggtttagttttccttttctataacactctgaattgctaatcttactaacacctatgatgttacctgaaatcaatctcccatatgtatgctgtatgctatgctaagactcctgaaatatacttactctgtgcttgtgtatgtgaatgttaatgcaactattacctagagtgaactttaagctttattgttgaatgtaattccattatatttccttttgtacacctgtgaaaaagtggagtagtgtttttttaaccattgttaatcagcttttgtgtatgaaagacacagtaaaatttctttcttaaatcaagatactggtgattcaaggaattttatttatggtccagccaagagccatctcgtgccaagacttctgctggcaagggaatggataaagctgtttggttctagtaacaatcttggaatgaatactgacaatattccatgagggtgtgcaagcacaaattttaccaatctgacctctttgaagttgcagaatgctttgaaattctaatggtatctgaaatatcagctcatagaaagtaacaaaatttgctgtcaccttaaataagacattttaattttgttataatgtacaatttagaagtttgattaattgtattatctatttaggcattaatataaaagaggtaggagtctgttatttnnnnnnnnnnnnnnnnnnnnnnnnnnnctgtcttgtctacttttagcttcattctcccatattttgaagggtgtgtaacttcagctctgcaggattgcatggggtaaaacttgttaccaacacatgtgaaccattgctacattgtaggttgtgatcattttgccccactgaagcccatgtatctgaccttacgtgccttttgaactaggagaatcgggctaatttattaatgatgataattataatgtatctgtacagcactttttacatttgcgaagtgctttccaatccatgttagttactagttattacagctgtaaggataaaacacgtcatgtggattcattttgaattggtgctattggtatttcctctgttattgctaataaatgaaaatggtggt

SEQ ID NO: 436948 - DNA, 1503 bp, Homo Sapiens
  misc_feature (1184)..(1247): n is a, c, g, or t
tcattttatttagtaatacatgcaagaggcagccccagagtgacctgaaagagtaaagctgtgattggcaggtggccgatataatacagatgtttcaggcaattctcttaaagcacttctgtagcagcaatgatcatttaaatggctgtagactgaattctcttttgaggagagtttaggggaattgtattcatatttctctttaaagatttatagctatagactttctctttttttaaataaatctatgaaacaacaaacagcgaaaggtgaggtgtcggggttttcttttgcttttgcataagtattggaaaaggatctggccttttcataaacattgtgtgcaaaagaatttttaataaagtgagcacaggacatgtataggaaacacatcagatctgcttctgtttcccagggtggttctctgttaaaacactgaactgttggcttgcaggtatgatgcagattttaggtataatgacgtcacagccaacagactttagggtctcctaaagccttgtcagtgggggtagttttgtctcctagagggtggctgccacctcttgagttgtaagatttagaaagtctggtccctttaagtttacacttcccctccatactgataacttccgctgtttatttgtctttgttttcttgccttccttgtaccaattagtctaagctggctcgtctcagccaatatctggcactcgcatacccgcggtagccacacatacccagtggccacaaactcccaagctgctcaatctcaaaacttttcagcctgccctgcaagtgtcatcaagacaggatccccggagcacaggggcagagagtccaacctctcactggcggggctgggcagcctctcctttgcggcggaggagaaaggaaacttgggtctgctttttaggttctgaaaacaagccagagtggagagaaagagttaacaccagacttagtaaagcttttacgacaaaacctgttaaatgcgttctagacagacacagggaactttctgcagatttctgaggtctctaagagggctcatgtagataggaaaaaggagcagggaattgctacatgggagagatttgccattattacaaaaactggctaagtggcttgtttccatttgaggacctcactggtcactgttgtcagtcgtgctgttccctttctcnnnnnnnnnnnnnnnnnnnnnnnnnnnnnnnnnnnnnnnnnnnnnnnnnnnnnnnnnnnnnnnnccgaaggttatgaagtcacttttgtcaatttggctgttagtaggctcctgccggatggagatgattgcaggagatcctgggataatgaatttgtcgggcaactcaccgggaccggattgtttggggttgcctggtccgtatttaaaggtccagctgttgctgttgacacccgcaccgactggaggggacacttctcctgcctctggttctggtgttgcactggatactgttggccactgctgatcaggccctcctg

SEQ ID NO: 436949 - DNA, 872 bp, Homo Sapiens
  misc_feature (785)..(821): n is a, c, g, or t
tttcttcttttttcttgtctcctccctttttgccgaagttatgaagtcacttttgtcaatttggctgttagtaggctcctgccggatggagatgattgcaggagatcctgggataatgaatttgtcgggcaactcaccgggaccggattgtttggggttgcctggtccgtatttaaaggtccagctgttgctgttgacacccgcaccgactggaggggacacttctcctgcctctggttctggtgttgcactggatactgttggccactgctgatcaggccctcctggaccagcccgtagaatgccagcctcctctaggtgcacagagctgtgcatgcctgctctcagggaggcagagtaacgccagtcagggttgggctatcgtggcttcccagttgaatctgaggaagcagagggttctcccgttcgctctgtagatccagcacaaggagaaaggcccgggctgaaggccatgaggtcggtcttctgcggaccctcgccagagcacaccctctgcctcctctgctgcgagtacgaccaactccccaccgcgctagaacacaccagcgtcggcttgccaggcgcgcactcgccctcggtgggcatcgccgagcaccgcagcacagtgtacagcagcagcgtgagaaccaacaggctagacaccgcgcagatggcgatgatcaggtacacgttgacatccaccagcgtcacctcggggcccgtggcacccactgacgcccgcgaccgctctcgacgaattcgagctcggccgatttggcctgatnnnnnnnnnnnnnnnnnnnnnnnnnnnnnnnnnnnnncgccgccaccgcggtgagctccagttcgccctatagtgatctatacatccc

SEQ ID NO: 436950 - DNA, 273 bp, Homo Sapiens
taacgatacattccgctcttttctaagaaacaattatgtgcactttgatacacaaccttctctaaccaactatatatcaagacccccaaattgaagcaaaatattgttttctcataccgtgagcagatttttccatctactaattctgtcgacttgtcttggtggcgctagcctaccccttctctctcggtgtacttttcctcattctacaacactctgcactctccatcctactacacctatgatctacctgactcaccgtcagtaccctcc

SEQ ID NO: 436951 - DNA, 263 bp, Homo Sapiens
  misc_feature (209)..(209): n is a, c, g, or t
ttttttttcataccaccattttcatttattagcaataacagaggaaataccaatagcaccaattcaaaatgaatccacatgacgtgttttatccttacagctgtaataactagtaactaacatggattggaaagcacttcgcaaatgtaaaaagtgctgtacagatacattataattatcatcattaataaattagcccgattctcctnggttcaaaagggcacgttaagggtcaggatacatggggcttcagtgggggcaaa

SEQ ID NO: 436952 - DNA, 1752 bp, Homo Sapiens
  misc_feature (20)..(20): n is a, c, g, or t
ctgataaaaagctcagcttntaaatcacgttttgtttctgcaaatttgggagacaaattgagttcttactggaatgtggcctatcgctggttgacaaatctgaaatggaatgtctccaaatggcagtgcctccctttccgccctccctaggaccacaccaataaccagctcccaagcacaagttcttgctcccattttttctgtaggggtgggggtgggaccttcaggctgctatctttgccatctgctgttctaacttggaaatacgctcatcttgattgcagattgtgtcttttatagatttgatctcttttaaaatctcatccaacttggcttcattttgcacactggccgtgtctgtggttttcttggggatgctgatcaggtcgcacttcttgtttgcagtgggcttgcgtatccagaatgttcttcttgaccaccttgagatccctgtttttgcctggaatgtacccgtgctgtcaaggagatgaggattgggtctgcattcttgcccttcgaaccactcttctgcctgccagcgcggcctctggccccgctgtgtcaggatacaggtcatcttggaaaaggtcagacttcctgggaacagtcataataataggttcacactttctctcatgaagtttgaagaatctggcaatctcacatttgttaacatcaagtcccctcttgggcatgtaacccatccctctctgaggctccttgctgctgaatgtgttgaggtagtggacgtacggggattcatccgtgatctcaaaatagcgaatactgctgtcaccctttccacataagtaaatgatgctggtgtcagggtcatagaaaggcagcaacaccccattgctagtgtccatctcatgaagagcaattggttcctgcatatttttcggattccagagagcccactgccgctcgctcatgcggctgaacccagtggtgaagacattgccatcggccaggaagatggctctcatgggtcttgctccttcatgtgctttctccttctcagcaacaatctcttgtttcctgggatcaatgactctcactttcttgtctttggaagctgtgcagatcagactgccattccggttccagctcacattgtaaatcatgtctgaatgcatatcgtccaagtttataagggcttcccctgttcccacattccagatgataatggcattatcacagcctgcactaagaagcacattgcgggccgttggatgccaagccacgatgccgactctctttgagtggccttccaaaatcaccacaggttcagtcagggaaagggtgagtccattttctgggatctgccataccatgaccgtgcagtcctctgaaccgctggcaatgacctgatcgttatgtgggcaccagtctatgtccagcactggtcctgtgtggccacatactgtagggtaagatttgtcaattcgaccagtcttgtgcagagggaggacaaggaacgctcctcccccacttgcctctatgattatggcaacaaatctgggattgacagcacaaaaggaactatcccaggtcacacgagaaacccggatgtcatcatagcactggtcatttttcaccgcttgcccaaatacatgccgaaacttgctctgtcgtaccactcgcctcatcgtgtccgggccgaggtgcctgaggcgccgccgccgaagtccccgctgcaaagccgggcgaagcctccaaccgctgccgcctccagcctggcactccgct

SEQ ID NO: 436953 - DNA, 1034 bp, Homo Sapiens
ggaagggtctgacaacaccaagtttgccctggaagttgggcagccttaaaggaaggcctttggaagctggcctggtgctgtgggcttgagggactttgtgtccaagccctgtcgccctggctccagcctaggctccagcactccatttcttccactgccacctgctgaccaggaataccaggacagaaggttttgttcagctgctttctttattagaaacaagtgagatgtattgagcagaacaacaatgcatttggtatttcctccccgaccctggaaatggatgcccccccacagcccaaagaaaagccaagacaaaaaggtgaagctcccccgtccctgttcccagacatggcacctgcctgccagccagtcagtattttttaatttaatggaatgaaattgtcctcaacagcctccgtaggtgtagtcggcttgcaggcccgccttcattttgcagcagagtaaaactgaagcctcaggcctcccctggttctggggaaggtgggccaggccatcagaaggctgcctcacaggtgggtaggcactgacgggagggacactcctgctccctcccctgatctaacatctggttcccctccttctcctagagtgcagctccatgcagttgtccaaggcctttgggcccttaggttggttaaatgctggtcgtctttggggaaagaattcaggaccacagggactcccctaggcttctgagagccagcaagtaggggggcgacagcagttagacgggagttgtggggaaggcctgacattttccataaacctggtgttaaagtagctgggtgtgggctggccttcaaataagacagaagcctcttcagaaataggcatgtgtggggaaacgagccctatacaggcctcgatccggagtggaggcctcctactcagctctctccctacacacagactggagtccgtggtcaaatgcagggtcaatccaaaggcaggaggtaaagtcgtctttgaaacatggaatctgggcagagagggatactctagaatcagct

SEQ ID NO: 436954 - DNA, 403 bp, Homo Sapiens
cattaaataaatttatttgttaaaataatttaactccaaatacaactgttgaatttgcattgagttataactacaattcatgttttaattgaaatgtcaaggtttaacaactgacattgttacaaaacaataaacttgttcaattttaaatggtcagttgtattagagcgcaacaattaactgtgaactatatctctgggaaacctcaaatcaataatgataagtctgtttccaaaacccactgcagtcattcttgaaaccctgatcaagatttaatagatgaacaatgacatgttaaataaaaggaaaaaaagaccctccatagtccttaatggtttggattgggctaaagggacaattaaagcttaccccagtggctaacaccaagactggctggttaaga

SEQ ID NO: 436955 - DNA, 1144 bp, Homo Sapiens
  misc_feature (1132)..(1132): n is a, c, g, or t
acctctctgggcagatagaccagtttcaccatcttttttattggatacagagccataaattctctgatgcccatgtgagtccttttaaatacatacactcaggtacattcagcaaagggcatcttacgggtgacatggagcaaagtgctgggatggcgatgcctgggtggggcagagaagtgtggccagggaaggccccctgggggctggaggtacaggcaccacttcagaaacaaaaataaaaccaaaaattgctctccacccctctgcctgtgcttggggctggggaagctaccctctcactcaggcccattatagcctagctgtgtaggaaggtagggcctaagggccagttatggaggttgcccaccagtggtgcccactagaaccaagcctgctggcatcagccacaaagcaagcctgggtcacctcaggcctctgccctggatacaagacccttgtcagggcagagctgaggctggcaagcccaaggccaagcctcccttgggccatgctggcagtggcagaggaggcttggcctcacggtggggagcctgcctgattgtcagggcagccttgggactggctgaggtcccaagggtttggggagggagtcgttgccttagctggccctggtattctgatctttacccaatcctaaaccttatcctcaggcaagggctgcagatgaacacacttgtcccaggaatacatacatacacacaatacacagcaatatatacagaaatgcaggccgggcacaaggctgggtgagaaagcatggccactgggttggagagaaaggcccaggtcccccaggggaaggaagttacactcatcagggactgacaggctgggacaggtcccatgggttcgagttaacttctctgggcatttgggccttacacccactcaccatctcctgtttttaccccaagtccaacaggaactgggactttggcaccaatagtcactctgggaaggcctccttcaacttagcgccttagagggattggggcccgggtgactccccactggtggccccaaagataagagaccaggagtggggaaataggcaggacccaaaggcaagggatggagccaaaccttggagtagcaggccttgggaagnaggacttttttt

SEQ ID NO: 436956 - DNA, 518 bp, Homo Sapiens
  misc_feature (438)..(438): n is a, c, g, or t
  misc_feature (445)..(445): n is a, c, g, or t
  misc_feature (473)..(473): n is a, c, g, or t
  misc_feature (493)..(493): n is a, c, g, or t
tgaccagtttcaccatcttttttattggatacagagccataaattctctgatgcccatgtgagtccttttaaatacatacactcaggtacattcagcaaagggcatcttacgggtgacatggagcaaagtgctgggatggcgatgctgggtggggcagagaagtgtggccagggaaggccccctggggtgggaaggtacaggcaccacttcagaaacaaaaataaaaccaaaaattgctctccacccctctgcctgtgcttggggctggggaagctaccctctcactcaggcccattattagcctagctgtgtagggaaggtaggggcctaagggcagtttatgggaggttgcccaccagtgggtgcccacttaggaaccaagcctgcttggcattcagccaccaaaggcaagctggggttcaccttcaggcttttgncttgggnttacaagacctttttcagggcagagttnaggtttggcaagcccaaggncaagtttcctttgggccttgtttgg

SEQ ID NO: 436957 - DNA, 526 bp, Homo Sapiens
ttatataaacaaaatactttattattgagagagtaaaggcccaattacaaaatttttatacttaagatctgtttattaccatgccaatggtttataaggactgtagtttccataactgttaggctgaaccccatgaaactccttctttgtagataaaagccagcctaatattggcaatttcacgtggttcaacctcacatacaatgagccactgcctaggattcttttggcagcaagatgttcccagtcacatgtctgtttatattataaacagatgtccaagtgataaatacatccctcttgagaaaaacatcctgtgcttatgtatactgggaatggtcttttgtgggtattgaggcagcgcagctctggctttgctcttcccagcttgcccggccacccgattcctcagtttcatcacaggaggattctttacagatgtcagccacccgtccaaggccacgcagctagtaaacagacaagcctgtcggactttgaaaccaacttgaccgggtcatttataaag

SEQ ID NO: 436958 - DNA, 1375 bp, Homo Sapiens
  misc_feature (1363)..(1363): n is a, c, g, or t
  misc_feature (1365)..(1367): n is a, c, g, or t
taatcacgtggctgccacccaggtaagaagaggccgctcttcctggggttgtttctccgtgtgacgtgtggcctttgagatcaactctcctgtaccagcgtaggccgcatgagtggggggcgggctcccgcggtcctgctcggcggagtggtgagtgaccggccccgccccgccccttccggtcctcgaagcctcgaccgctacccgcaccctaaatcccagaggttggccccctgaggtgtgagtgaaatgagcttttgctttattttccaagtttctctctcaccttcaggggcattcttcgggggtgcatcagagggagggcagagcctgaggatctaagcgaaggcttccccgggtgtaatttcctgggctgtttgtgaggagagatcgaattcgcctcctgctctcaggcctctctgctcctgtcttttgtttggatgccggcgctgctgcctgtggcctcccgccttttgttgctaccccgagtcttgctgaccatggcctctggaagccctccgacccagccctcgccggcctcggattccggctctggctacgttccgggctcggtctctgcagcctttgttacttgccccaacgagaaggtcgccaaggagatcgccagggccgtggtggagaagcgcctagcagcctgcgtcaacctcatccctcagattacatccatgtgagtcataggagttggggggttaacctaactgtaggagctgactgggaacctctttcctgggggaaattctttgctccccacaactctccccctctgacctttcagctatgagtggaaagggaagatcgaggaagacagtgaggtgctgatggtgagaaacatttcccccacccaacaaaatatccccaatccctgacccctttagcccttacccctcttctgagaaactgaactcaatcccactccttgatttaaccatgtttatctttgtcccttagatgattaaaacccaaagttccttggtcccagctttgacagattttgttcggtgagaactttgagatggatggggtgagggtgtgtactgtgtgggtgtgacttgctgggcagtctagggcttgcgtgtaagggagtgggttcttttgggtaaatctttgagtgatccccttcccccacccacctattttgtagttctgtgcacccttacgaagtggccgaggtaattgcattgcctgtggaacaggggaactttccgtacctgcagtgggtgcgccaggtcacagagtcagtttctgactctatcacagtcctgccatgatgagccctgttcctgctcatcatgaagatccccgcgatacttcaacgccttctgattccagggattactggccncnnntaaatccc

SEQ ID NO: 436959 - DNA, 509 bp, Homo Sapiens
ctgcctgtggcctcccgccttttgttgctaccccgagtcttgctgaccatggcctctggaagccctccgacccagccctcgccggcctcggattccggctctggctacgttccgggctcggtctctgcagcctttgttacttgccccaacgagaaggtcgccaaggagatcgccagggccgtggtggagaagcgcctagcagcctgcgtcaacctcatccctcagattacatccatctatgagtggaaagggaagatcgaggaagacagtgaggtgctgatgttctgtgcacccttacgaagtggccgaggtaattgcattgcctgtggaacaggggaactttccgtacctgcagtgggtgcgccaggtcacagagtcagtttctgactctatcacagtcctgccatgatgagccctgttcctgctcatcatgaagatccccgcgatacttcaacgccttctgacttccaggtgatgactgggcccccaataaatcccgtctttgggtc

SEQ ID NO: 436960 - DNA, 638 bp, Homo Sapiens
cagggctcatcatggcaggactgtgatagagtcagaaactgactctgtgacctggcgctcccattgcaggtacggaaagttcccctgttccacaggcaatgcaattacctcggccacttcgtaagggtgcacagaacgaacaaaatctgtcaaagctgggaccaaggaactttgggttttaatcatcatcagcacctcactgtcttcctcgatcttccctttccactcatagatggatgtaatctgagggatgaggttgacgcaggctgctaggcgcttctccaccacggccctggcgatctccttggcgaccttctcgttggggcaagtaacaaaggctgcagagaccgagcccggaacgtagccagagccggaatccgaggccggcgagggctgggtcggagggcttccagaggccatggtcagcaagactcggggtagcaacaaaaggcgggaggccacaggcagcagcgccggcatccaaacaaaagacaggagcagagaggcctgggtggcagccacgtgattagaaaacagcgcgcaccatgtgacagtagaagaaggaccacctgcgcctccagagccagccaatcccgaccctatcatggcgcggtttgcccacctcctgatgaaggaga

SEQ ID NO: 436961 - DNA, 723 bp, Homo Sapiens
ggtttgtttttgttgacccaaagtacgggatttattgggggcccagtcatcacctggaagtcagaaggcgttgaagtatcgcggggatcttcatgatgagcaggaacagggctcatcatggcaggactgtgatagagtcagaaactgactctgtgacctggcgcacccactgcaggtacggaaagttcccctgttccacaggcaatgcaattacctcggccacttcgtaagggtgcacagaacgaacaaaatctgtcaaagctgggaccaaggaactttgggttttaatcatcatcagcacctcactgtcttcctcgatcttccctttccactcatagatggatgtaatctgagggatgaggttgacgcaggctgctaggcgcttctccaccacggccctggcgatctccttggcgaccttctcgttggggcaagtaacaaaggctgcagagaccgagcccggaacgtagccagagccggaatccgaggccggcgagggctgggtcggagggcttccagaggccatggtcagcaagactcggggtagcaacaaaaggcgggaggccacaggcagcagcgccggcatccaaacaaaagacaggagcagagaggcacctcagggggccaacctctgggatttagggtgcgggtagcggtcgaggcttcgaggaccggaaggcctcgtgccgaattccacacccagcctcgtacctagcctaggtt

SEQ ID NO: 436962 - DNA, 1145 bp, Homo Sapiens
  misc_feature (1117)..(1117): n is a, c, g, or t
agcgcgtgtctgcgtgcgtctgcggccgctgtgctcctgcttttttgtgtatgagggcccacgtcctacgtgtggtacgtttgtcgccgttgcgttggtttagttcggataggttggtgcctgcttgccgtgtgacaggatgttgttagctcgccactgcgcgggcgatcgtcagtctggttgcgcgtggcgtcgcgttcacttcttccttccgttttctgtcgtagtgttattgtctgtgtatcatagtgattcttgctctgtgactcttgttctttgttgcgttgtcttctgttctctatcttgtcttttcttgtttctgtctttgtgtagattggttttctattctttgttgttttctgtttttctggcagagagacccaaagacgggatttattgggggcccagtcatcacctggaagtcagaaggcgttgaagtatcgcggggatcttcatgatgagcaggaacagggctcatcatggcaggactgtgatagagtcagaaactgactctgtgacctggcgcacccactgcaggtacggaaagttcccctgttccacaggcaatgcaattacctcggccacttcgtaagggtgcacagaacgaacaaaatctgtcaaagctgggaccaaggaactttgggttttaatcatcatcagcacctcactgtcttcctcgatcttccctttccactcatagatggatgtaatctgagggatgaggttgacgcaggctgctaggcgcttctccaccacggccctggcgatctccttggcgaccttctcgttggggcaagtaacaaaggctgcagagaccgagcccggaacgtagccagagccggaatccgaggccggcgagggctgggtcggagggcttccagaggccatggtcagcaagactcggggtagcaacaaaaggcgggaggccacaggcagcagcgccggcatccaaacaaaagacaggagcagagaggccactccgccgagcaggaccgcgggagcccgccccccactcatgcggcctacgctggtacaggagagttgatctcaaaggccacacgtcacacggagaaacaaccccaggaagagcggcctcttcttacctgggtggcatccntacaccccagaccagtaccagcctgctt

SEQ ID NO: 436963 - DNA, 702 bp, Homo Sapiens
ggggaagcctcgaccgctacccgcaccctaaatcccagaggttggccccctgaggtgtgagtgaaatgagcttttgctttattttccaagtttctctctcaccttcaggggcattcttcgggggtgcatcagagggagggcagagctgaggatctaagcgaaggcttccccgggtgtaatttcctgggctgtttgtgaggagagatcgaattcgcctcctgctctcaggcctctctgctcctgtcttttgtttggatgccggcgctgctgcctgtggcctcccgccttttgttgctaccccgagtcttgctgaccatggcctctggaagccctccgacccagccctcgccggcctcggattccggctctggctacgttccgggctcggtctctgcagcctttgttacttgccccaacgagaaggtcgccaaggagatcgccagggccgtggttgagaagcgcctagcagcctgcgtcaacctcatccctcagattacatccatctatgagtggaaagggaagatcgaggaagacagtgaggtgctgatgatgattaaaacccaaagttccttggtcccagctttgacagattttgttcgttctgtgcaccccttacgaagtggcccgaggtaaattggcattggcctgtgggaacaaggggaacttttccgtaccttgcagtggggtgcgcccagggtcaca

SEQ ID NO: 436964 - DNA, 386 bp, Homo Sapiens
cgcgtttaagtaggctatactttttaataaaataaaaacttctgtgttactttaaagatattgtgtaggcatctaggggtcgatctggaggaggaacgcagcgcatgggggggcgctggcggaaggtgccctgtcttgtcccttgttgacatttgtccctaaagagacccatcacagacgcctgcaaaaatcacacaccccactcttggcactgtcccagacgctcactgccccgtctgcgagtctgcctgtgaggccaggctgcccaggctccgaagggccgtgtgcccacccccgatgatggtgtcagcacccgtcatcaacaagcctcacagctcacgtcccggccaacttttgtcccccacgtgcccagaacgggggcaggg

SEQ ID NO: 436965 - DNA, 1213 bp, Homo Sapiens
ggggggggattgtcatctcctttggggtgcgatggcttcaaatccaaactgaggctctccgggtggtaaggatgtgcgaggaggcctcttgaagaactccaggcctatcatgctgtctctccgctaaagcctgaggcccgaggtcagaggattcaggaaggctctgcagtcggcccaggagggcggggtcccgtggggactcggggagagggaaggaccgcacggagcaccaacccctgctcggccccgtaccaggaagcgctggggggcagagtgagcggagttgaggcagaagccagtcaggatggtggtgccttcgctgaagcttcaggacctcatcgaagagattcgcggggccaagactcaggcccaggagcgggaggtgatccaaaaggagtgtgcccacatccgggcctccttccgcgacggggacccagtgcacaggcaccggcagctggccaaactgctctacgtccacatgttgggctaccccgcccactttggacagatggagtgcctgaaactgatcgcctcctccagattcacagacaagagggtgggctacctgggggccatgcttctattggatgagaggcacgatgcccacctgctcattaccaacagcatcaagaatgacctgagccaggggattcagccagtacaaggcctggccttgtgcactttgagcaccatgggctctgctgagatgtgccgagacctggccccagaggtggagaaactgctcctgcagcccagtccctacgtgcgcaagaaggctattctgactgcagtgcacatgatccggaaggtccctgaactctccagtgtcttcctcccaccctgtgcccaactgcttcatgagcgtcaccatggtaaggctgtggggccccccatcctttgcttcaggtctatggacagaagaattgaaaatcggatgggaaccccagctcacaggagaagggtagtgcacacacacaggcacacacgcaatagactctctgtgcccctggcccccaccattcacttccccgacgctgaccccaggcatcctgctgggccaccatcacgcctgatcacgggagctctgcgaaacgaagccctgcagccctcaggcacttcccgaaagtgggacccccagctgggtacacatccctccggactctgggtgaacatgggggatactccacagaaacaccagcatattctggggagc

SEQ ID NO: 436966 - DNA, 2461 bp, Homo Sapiens
ttaatatggctttcctcacttctcaggctttattgggctttatttgtgggagaagggggctggtccccagtttttgcagtgcaaagccagagcgccacctgctggtagccctcaggtgtaggttcgaagctgctggggccccctggggtttgggacacaggagaatttcaggctgtgagtggagacagttactgccacgattccacaggcaagttgttcacctcaaagatctcctgcaccgactggtgaaagtggtcgtaggtgaggcgcagctttagccgcaggggggccttgttaggattgaggattctgaagagctgggtgataggaaggccaccccgagctggaactgtgttcccactgggggcctgcagctgcagctggagactcttgggcacagcagcctggcagatgaaatgggtgacatcaccctctgagaagttggtggcagtgatggtgattaacagcaaagcagggttttcagggggtcgaatgaaagacagattcagctgtactccctcacgctcaaacactttgagatctgggatgggagctgggggtggaggtacacagggaaggtcaagcaggtgtaccagggcacctcctggggaggggtccagatggggaggatgctggacatccccagaagccccatccaggagatctagcagatccaggagctgtgagggcctggggctctgtgggcactggggctgcttctgaaagctgggctgcttctttgctttcctttgcttcctcatcagcctgagggccatctcgctccacaagaggcattttttccaggatggcagccctcatgtggtcgtatttccggaagagtgtgtcatactccacagcccgctgctgcagctccacgtccaagcagctcccgtagatggacaccacctggcggatgcggttgttgtccccacagaggcgagtgctgagcttcatgagggctgtgagggcatatcctcgagtggctggccgggacatgtgggactgccgcaccttttccagctatgccagcacttcctcttcgtccacctgaaggggctcaatctcctcgcagttccctgccagcaggaggtccgccatactccccaatgcaccagggtgccacctgcaccagtggttgctgggaaatgtcttctgccagggcattgtagaggcggcgcacagagtaggcatgtagctcctgggcccccccaatcagctgggtcaggttggccactgcatcatcccgcacatgggtgcccgccgttgtcagcacatgcaggatggtgtctatgtgccagcgtttggttggagcaaacctctctgcagccagcaggatgcctgaggcacagtcagcccgtaggtcaggagggcaggactccagaaaggcctgcagctcttgcatcatggctcgcacattggagctatttaccagagccaggcttagttccagggctctccggctgagggaggcatcagtttcccgtagacattccaccacagtgggccgatgccgctgcacagcactgtgatcagactgcaccagtcgaagcagtgatgtcagggctacatacctaatgttcctgtcactgttgagtaggaagcgaccaagaatgttgacagctagaacccgtaggccagctgcagagcggatatccatgatggtgagtactgtctcaaacaggaccgcatttccggcatttcggctggtgtccgtgttagtggccacctgggccagcaagtcattcatggtctcactgctctcctcgtggttccggcccaggatccgaagcagacgaagtatctggacctgcaggaagggttcgctgactccagatatgctgtgttctgtggagtatcccattgtcaccagagtccggaggatgtgtaccagctggggtaccacctttcggaagtgcctgagggctgcagggcttcgttcgcagagctccgtgatcagcgtgatggtgcccagcaggatgccatggtgacgctcatgaagcagttgggcacagggtgggaggaagacactggagagttcagggaccttccggatcatgtgcactgcagtcagaatagccttcttgcgcacgtagggactgggctgcaggagcagtttctccacctctggggccaggtctcggcacatctcagcagagcccatggtgctcaaagtgcacaaggccaggccttgtactggctgaatcccctggctcaggtcactgtccaaagtgggcggggtagcccaacatgtggacgtagagcagtttggccagctgccggtgcctgtgcactgggtccccgtcgcggaaggaggcccggatgtgggcacactccttttggatcacctcccgctcctgggcctgagtcttggccccgcgaatctcttcgatgaggtcctgaagcttcagcgaaggcaccaccatcctgactggcttctgcctcaactccgctcctctgcccc

SEQ ID NO: 436967 - DNA, 361 bp, Homo Sapiens
gtagcccaggtcatcctggtccatgcctcaggccctctgcttcccccagggacctgtcccccttagtccccttactccagctgctctaaactggctcgagtcttggccacagggcactgggaacctctgccctgccctcctgtcccctctatcactgctcaccggctgagggaggcatcagtttcccgtagacattccaccacagtgggccgatgccgctgcacagcactgtgatcagactgcaccagtcgaagcagtgatgtcagggctacatacctaatgttcctgtcactgttgagtaggaagcgaccaagaatgttgacagctagaacccgtaggccagctgcagagcggatatcca

SEQ ID NO: 436968 - DNA, 712 bp, Homo Sapiens
catatagaaacttctttttaatattacaataccaggatcctcgcacattttatatacatcattccacatttaaaatatatttcaggtttacgtaaaaaaagaaagtgctaaactatttacaaaaatacattaaatacccctaacattaaatgcaactttcccacttcagacaggaatgaacttcttttgaacatggcacaaaaggatcaccgtaataaaagttaatatagtataaaaccaaccaaacaaaaacaaaatgaggctagacctaagccactcgcagttccaaaaaaataaaagcccaaagccgaaaggcgttttcatttgagcgtgcacaacagatttcgcaattttcgcaacgtttctttgtgaatgtgtctccttccctttcagcaacttttcggtctgggttcctaaatgttaatgtaatgtgacctaatctaaaggattaggccaggaagggtcggtgggatcttcctgctgcgtggagaaggtctcaagcgcaggctcagttacttctccaccacttcctccacgcaggggagtttgcgttcctccgaggaaatactgtccacgatggaagaaaggcatcgaaggctactcgaggctgacgaatcaatacttgctcctccttccttagccgttatcacgagccccctggaatgatcggaaacacttggccactgggagctgcaggtgcgcaggaaatccg

SEQ ID NO: 436969 - DNA, 937 bp, Homo Sapiens
  misc_feature (93)..(102): n is a, c, g, or t
  misc_feature (104)..(176): n is a, c, g, or t
  misc_feature (545)..(574): n is a, c, g, or t
  misc_feature (578)..(578): n is a, c, g, or t
  misc_feature (652)..(674): n is a, c, g, or t
  misc_feature (745)..(745): n is a, c, g, or t
  misc_feature (769)..(769): n is a, c, g, or t
  misc_feature (774)..(774): n is a, c, g, or t
  misc_feature (815)..(815): n is a, c, g, or t
  misc_feature (847)..(847): n is a, c, g, or t
  misc_feature (859)..(859): n is a, c, g, or t
ctcctctctctattggtggcgcctcctccttttcgcacaattcgtggtggcgctcctgtgttggccctcccccggggaatattctttttctgnnnnnnnnnncnnnnnnnnnnnnnnnnnnnnnnnnnnnnnnnnnnnnnnnnnnnnnnnnnnnnnnnnnnnnnnnnnnnnnnnnnagaaacaactagtgtattgatttggggaggagagaaggggtgcagatgggaaatggggaggcaagggctctttagcgtttgccaaaaccactgccacacccctccaccccctcttgccttcctcctccacggtgggtgccagcaggctctcccctttccagtgacctccctctccctcctcccagcaccccacttggcttcaacctccagtgactgcacagagcccacccagggtctaaagctagggaaggcagctcaaactcacctttcttctcccttcttccacctcccacctcattcccatctcttgtctaaataaaatacagaaaagcaagcgcagctggtacctgggagaatggactcaccccnnnnnnnnnnnnnnnnnnnnnnnnnnnnnncggngcaggcagaggaacctcagccaggtgtagtggaatcacagcaggccaagcccaggggcccggctcaagctgtcnnnnnnnnnnnnnnnnnnnnnnnggaggctggcctggcagtgagcctgccgtccagaggaggctggcggagaagcctctatgcctgcctctcangcaccatgtcacagggtccccggngtggnggcagcagccagggcagaaaagcagaagctagcctctatanaagcacccttttccccttgcttctagaggaangccctcttggtntaagggcagatgtgagttcctggaagcagggaaaagggaaggaggagaaaataggattgagatagatgagatagatgc

SEQ ID NO: 436970 - DNA, 1334 bp, Homo Sapiens
aaaaatcctcgttgatgtaatacccctgcccttcctgaacttccaaaccctgaatccacctgaggcttctggaaataaaaggccccatcggtacatcctgaaaactgaggaaggttttccagagggccaatgcgagagcccaaatcccaaaaatttgcaagcagagagatagaggtttaaccaccgctggctgttatatgaagtagagaagccattacctcctgtgtacgttgtctccagaccagccacagagggccctgaagtccgtgaaatatcttcatcagcagtgagttcctgctccatcagtaaaaatacttgtacaagttctgtaatcatggtaggccagagtgaggtaagatgttggggagacattcttaaaagtaacactctgaaaaacaggaacacttgagaatggagagttggcacctgtggcaaacggagactctcaaccaatctctcttgtatatctggaagatatttctggtactggtcaatttcactgctaaaaatagcaaatgctaatcttttaagaagcatagctctctgttctagctccacatcacggtttgcaaagagattaagtgaactgctttgagccactgctacacgagtcatcaaatctctagatgttgtttttatcatgtgtcatcagattgtccataattgctctccaatgattaacacaagaggcatccatctgaaagaaactgggatccataaagaggtcaaaagcttcttttttccaagctctccgtgtgtactgatacccactaagactgctgagcagctggacacaagctcgataactaggggcattatgtgcactgtgatttctgaggtagggcacaacataatgcataatatttacaagtaaaggaataacccgctccttttcatcactatagaaaaccatatccaaaagatgagccaaaacctcagagagtaatgtcaatgcatggacactatatacagaaggagttatgtttgcggtttccattgcaggtgataacatatcttcaacatcagattccaaattggttccatctaccattattttgggagaaggcttaacttcaagatttcgtcgcagccatgttgtctgttccagagaagaaccagcaattgcaccaattgcatccactattttgtgagttacatcctgaaggtctctttggtcttttttattttccaaactagggtttttcataataaactcattcagaaccccaagtataagaaactgcctggagctggaagactcagttgtatagagtctttcagaagtatcaacagtgacgcccagctatccactaaattgggcactggaattcttg

SEQ ID NO: 436971 - DNA, 1245 bp, Homo Sapiens
  misc_feature (13)..(13): n is a, c, g, or t
  misc_feature (356)..(365): n is a, c, g, or t
acgggatagtccntatttagaagaattggtctgttttccgtttatttaagggctttggaattgttactatatgactaatgcccatcaggaactccagaggtatgaatagggggttgtccatccctcttcccatactgaggtggagatgctcatgcaatacttttaaggatgcatggtccagccttcagttattcttcactgctcttggtgaaggtatgtgggagaaaaactaattataatacgtttcccagcctctgatggagaaggaacaccattctgataccagaacatggttaataaggaaaagagaaaaatccccaaccaatcttaattgaaccaagtctgaaaccaatggnnnnnnnnnntgggtagtgtatattttgcaggtttaagacaactcaggacaataaaaacaatggactttacatgtgtatatatatagctctcttaggcaccataatcagtatgagccaacaatatttaaacttgattcaggccacattcagacatttgctcttatatacaaatatttaaattaaatacaatctgaaatgtgttctgttacatacaaaaaaggaaaaactatacaacgcagagcagtgtgtgtgttttaaataattacatttacatgtaagctaaatggaaccagcaatggtgctcaagtttttatcatcccttccagaaaatctttttctaccatctcttctattttttgcctggctttgctggaacatggtttgtggttctccagtttcatgtccttattagggaaggcatttgagtagaggataggactccctgagtgtcctccacatcggcttgtgactttgctgttgaagacttgactgagcacattgaagaacggcaggagctgctccatactgcgcacggtgcagatggtgagcagcaagtgccctggctcccaacccaatgttctccctgagttgtcttcctctggatttttctttgctcttttccgaagaagttttgctagtcgtaccacgtaaggtttaaattctcgttgatgtataccctgccttctgacttccaaacctgaatcatctgaggcttctggaataaaggcccatcggtacatctgaaactgaggaaggttttcagagggcaatgcgagagccaaatccaaaaattggcaagcagagagatagaggtttaaccaccgctggctgttatatgaagtagagaagccattacctcctgtgtacgttgtctccagaccagccacag

SEQ ID NO: 436972 - DNA, 404 bp, Homo Sapiens
  misc_feature (157)..(157): n is a, c, g, or t
ttttccagagggcaaatgccgaagagcccaaatcccaaaaatttgccaagccagagagaataggggtttaaccccaccgctggctgttaatatgaaagtagaagaagcccattaccctccctgtgtacgttgtctcccagacccagcccacagaggngccctgaagtcccgtgaaatatccttcatcagcagtgagttcctgctccatcagtaaaaatacttgtacaagttctgtaatcatggtaggccagagtgaggtaagatgttggggagacattcttaaaagtaacactctgaaaaacaggaacacttgagaatggagagttggcacctgtggcaaacggagactctcaaccaatctctcttgtatatctggaagatatttctggtactggtcaatttca

SEQ ID NO: 436973 - DNA, 591 bp, Homo Sapiens
  misc_feature (574)..(574): n is a, c, g, or t
gtaaaaatggtatacatgaaccaatacaaaatgcgaatgggaacatatggatatggagtttcttacactgtaacattgtccatgtacaccttaaaaacagaactggcctaaagggaaaaataagacgtcggtgtgactaaagaacaagcttatttggcatcaattatacatccttcattattttatattcctttaaaaaacacaaaaaacaagtttgttctttcttcactctaaaaaaagtgatcaacctgtacaaagtaatactcaacaatacatttcaaacagtgcactgtatacttaagaaaaaatacataaaccaatatacaactaaaatccataatttcctgtttttgctttgttttattattattttttccaatgtgtggggcctacactttgcaatctacctgagacggaaaacaccaatcgcaacacatgaacctgagacatgtcaacattgtaagccataaagttacatcaggaacactgcactactgtacacttttcaaaacagaaagatgggaggtcccaaaaatgagatgccaattctgtgagcaatggtgtgatttttttnttgttgttgtttttgtt

SEQ ID NO: 436974 - DNA, 1121 bp, Homo Sapiens
  misc_feature (983)..(1040): n is a, c, g, or t
cgttcatacgagtattgatgaagatgatactaaatgctaaatgaaatatatctgctccaaaaggcatttattctgacttggagatgcaacaaaaacaccaaaatggaatgaagtgatactcttcatcaaacagaagtgactgttatctcaaccattttgttaaatcctatacagtataccaaaaaaatcatgacgaaaagacacttgcttattaattggcttggaaagtagaatatagggagaaacggttatctgtttattttgtttgtcatgtattcattcattctacaaatatattcgggtgccaataggtacttggtataaggtttttggccccagagacatgggaaaaaaatgcatgccttcccagagaatgcctaatactttccttttggcttgttttcttgttaggggcatggcttagtccctaaataacattgtgtggtttaattcctactccgtatctcttctaccactctggccactacgataagcaggtagctgggttttgtagtgagcttgctccttaagttacaggaactctccttataatagacacttcattttcctagtccatccctcatgaaaaatgactgaccactgctgggcagcaggaggaatgatgaccaactaattcccaaaccccagtctcattggtaccagccttggggaaccacctacacttgagccacaattggttttgaagtgcatttacaaggtttgtctattttcagttctttactttttacatgctgacacatacatacactgcctaaatagatctctttcagaaacaatcctcagataacgcatagcaaaatggagatggagacatgatttctcatgcaacagcttctctaattataccttagaaatgttctcctttttatcatcaaatctgctcaagaagggctttttatagtagaataatatcagtggatgaaaacagcttaacattttaccatgcttaagttttaagaatnnnnnnnnnnnnnnnnnnnnnnnnnnnnnnnnnnnnnnnnnnnnnnnnnnnnnnnnnntcataaatgtaggcctggctgggctttgacctttccgttgttaaatcacccacagagcgtgggagagtactaaaagtaaaa

SEQ ID NO: 436975 - DNA, 1531 bp, Homo Sapiens
  misc_feature (1486)..(1486): n is a, c, g, or t
  misc_feature (1495)..(1495): n is a, c, g, or t
tcaaaacagtatattttattttacaatagcaaccaactccccagtttgtttcaattgtgacatctagatggcttaagattactttctggtggtcacccatgctgaacaatatttttcaatcttccaaacagcaaagactcaaaagagattctgcatttcacatcagttcacaagttcaagagtcttccatttatcttagcttttggaataaattatctttgaggtagaaggacaatgacgaagccacttaattccttgtgtctgcataaaagcagatttattcatcacaacttcatttatgtgaataaagcagatgatgataaaatgttctcttattcttgtttaatcagtagtggtagtgatgccagaaactgtgaaaggaaggcttttagttactttcttctttccattttccaataatccattccccatccccagctgaagaaaggggtgttactgagtccagctgataccacacattgaaaggtaaacattaatatttcaaatctgatgtctaactaaaaatgtacagaatgaaaactagaaaatttcaaccccagattatcttcaagcttgctccctccgccaatcatactttgggcatttatctatttccttctccacttatggatgtaattggcttgctatagaaactacagttcagatgctttgaatgtatgagctgcaatgaacaatagagtcctcttcttttgcagcatattttggcttcagctttaagataatcttatgacatgcaggttcacactgattcacttaataaattccattcttacctaacacaaggtttagttgataagcccttggacaaaaataattctttctcaaaaatgttaagcaaactagtgaggacaagggattttgtcctcatttctacaatgatcagctattggaactgcatgaaactgaacaatttaaacctggagctggtaatgttcttaagaccaattcagaacaaaggcaggttgcccttaaaacaggtttgaccttttccttcactcttcctcctgtcccaccctctgtgagtgatttaaaaacggaaaaggtcaaagcccagccaggcctacatttagagaaattttaaaaaaatttttcctttcaattttggccaattatttccaatttttattttattcttaaaacttaagcatggtaaaatgttaagctgttttcatccactgatattattctactataaaaagcccttcttgagcagatttgatgataaaaaggagaacatttctaaggtataattagagaagctgttgcatgaggaaatcatgtctccatctccattttgctatgcgttatctgagggattgtttctggaaggaggatctatttagggcagtgtatggtatgtgtcaggcatgttaaaaggtaaaggaactggaaaataggacaaaccttgttaaatggcacttccaaaaccattgtgggccccagtttagggtgggttccccagggncgggtaccntgaggtcgggggttcggggattaggtgggggcatca

SEQ ID NO: 436976 - DNA, 811 bp, Homo Sapiens
  misc_feature (107)..(117): n is a, c, g, or t
  misc_feature (724)..(724): n is a, c, g, or t
  misc_feature (795)..(795): n is a, c, g, or t
  misc_feature (802)..(802): n is a, c, g, or t
actagtcacgagtcttttcttttcccccgtctcattcagtcttactcagggaaagccagttaaataagaagggaagtgtaaaactactaatttacagcttgaagggnnnnnnnnnnnaagattgcttttctattttatctattaagcttgaaccagtttccatctggaaagattctaaaatataatagaaaataaattgaataatggtaattttaagcagtatatctatgaaatgtgttgcttgggattgatttcaatgtttctccccagcgtaaattttaaagttacatgcaatgattgatatagtttattatcagcaaaattatttctaatattattggcttacacaaactctagcaaaaattattttttcctcaatggaaaaagaaaagagaggaacagagttagaaagagaaaatgacttgaatcccaagtatcttcataccaaacatatcagggttccctgcatagtttgcagttgattgaggatttcacacgacttggcataaatttgattacatctctagactgtaacttttctgattgattatgcttcttttttatccatgtaatgtgttgccttttttaaaagaacaaatactacaataacgtgtgaagtggtcaatccctaagacatcaaagaaaggccacataaccctacccttctagtgctttgtgtgattgggtatcaaaggggtttcttcttctttttttgtttgtttgnttttctgttgcaaggccaatttatccattattggaaatgctaagcaagtggaatttactgttttgttaatnaaatatntcttaatac

SEQ ID NO: 436977 - DNA, 1196 bp, Homo Sapiens
  misc_feature (341)..(364): n is a, c, g, or t
  misc_feature (901)..(901): n is a, c, g, or t
  misc_feature (964)..(965): n is a, c, g, or t
  misc_feature (1019)..(1031): n is a, c, g, or t
  misc_feature (1041)..(1041): n is a, c, g, or t
  misc_feature (1049)..(1049): n is a, c, g, or t
  misc_feature (1051)..(1051): n is a, c, g, or t
  misc_feature (1070)..(1070): n is a, c, g, or t
  misc_feature (1074)..(1074): n is a, c, g, or t
  misc_feature (1076)..(1076): n is a, c, g, or t
  misc_feature (1084)..(1084): n is a, c, g, or t
  misc_feature (1090)..(1091): n is a, c, g, or t
  misc_feature (1096)..(1096): n is a, c, g, or t
  misc_feature (1098)..(1099): n is a, c, g, or t
  misc_feature (1106)..(1106): n is a, c, g, or t
  misc_feature (1110)..(1110): n is a, c, g, or t
  misc_feature (1113)..(1114): n is a, c, g, or t
  misc_feature (1121)..(1121): n is a, c, g, or t
  misc_feature (1125)..(1126): n is a, c, g, or t
  misc_feature (1141)..(1141): n is a, c, g, or t
  misc_feature (1146)..(1146): n is a, c, g, or t
  misc_feature (1149)..(1149): n is a, c, g, or t
  misc_feature (1153)..(1153): n is a, c, g, or t
  misc_feature (1166)..(1166): n is a, c, g, or t
  misc_feature (1170)..(1170): n is a, c, g, or t
  misc_feature (1177)..(1177): n is a, c, g, or t
  misc_feature (1194)..(1194): n is a, c, g, or t
taatacagtctgatcagatcaattcacatcacaaggtcaacctgggcttgctcactatgtgacacaactgaggtacacaatgtccctacctgccggctgtgccaccttcctggttcccaacagcattgaaaccccctacttccctgaccagactggcattttttaaaattttgcataaaactatttcttccatagacttcaaacaatcaactagccaagttaattatggtacatctaaacaaagtttaatactaaccctaatgtgtgactgcggtttacaaagagctctgtatcacctgggatagctttcagtagcaattcactacaactggtcctaaaannnnnnnnnnnnnnnnnnnnnnnntagagaattaaaacccaatagcatgttgaatggttaaaatcacgtaagaactgaaatttggggtgggggtgtcctcaacagctgagcttgtcctagcagtgaaaatgctcgcctccaagcagggctcagaaaggtctggagccctccaggcagagggctgagctcagggggctcttggaggacactcaccccatggtccatgggatgcttctggcttccttaaaaacagttgggcatccgcattgtataagtaggtggagaccctagtgtggttcttttgaaggatatgggaagggaggatgacgaactagagaagtgggaggggaccaaaatcactgaggtcccagaatatcatagatttgggtataggattggggtcactaagaattgagcaccaggaattccagcttcttcccattaaagaaactgggactggtttttgccttggaggcctatgtagtgttttctgcccctgtcccataccaagtctcattgatatttctgcagaatatcagatgaaaatctatttctaaagancattggggagaatgggtggtggagaaggagttggagtggggttggggggcagttaaaaatgannaaaatctctcagctacagaaccaaacatcacttcctccgcattcacagcatttnnnnnnnnnnnnnatggtgtttncgtggggnanacagctgctcatttccgtnaggncnatgggtgnggtcanntcagntnnataaaangagnaannccgattnaaanntgaacccaaggatcnagganaantttntcttagggaaaangtgncaagggnggcccggtccccggggncc

SEQ ID NO: 436978 - DNA, 869 bp, Homo Sapiens
gggaggccggattccatttcgggaaggggggaaaaagggtgggcccagggccccagttctaggaacccccaggcctattgggaaagtaattgccaggggaagggaaggccagaataagctgggggcttatttcccaggaagggcaccaaccttccaaaatccccttaggcaaggaccagatgccccagggggtcccatctgtaaagggggggaaaaggcaagagagcccagaaagaaacttggatgctatagggggttccagaaaggtgctccttgctaccccccatttgggggctctgacatgggaaagactccgagtcacccagggaggagctgggcatgctgggcaggaaccaccctgctagcctctcccaaaagcaggggtctcaggccaaatgcccctcctgttcccttccactgtcaaccctctccagggaggcccaggctagccaacaggccactgggtaaaggccctgctgccctctggggtggtccagccctgcctcagatatcccggcggggctgggcagaagagagtgttgctggagtgtgctgggcccaggttttcaagggctgggaatgatttttttagagaaagggaaaaggcggtgtcaggaaccgaatgggacgacctccacaaagcaggctgggcaaagtcccatgatggcaggtcgctaggaagaggttccaggggcggcaggccgctgctgctcccaacccacacctgacacttgtgaggccgctcagaagtgtgcacctgcttgatatgtccgttcaagtgatcaggcctggaaaagagagaaccaagagggactttagaaacttggccagaccccaccacacaggcacatatgcatacgtgtgtacac

SEQ ID NO: 436979 - DNA, 1829 bp, Homo Sapiens
  misc_feature (1775)..(1775): n is a, c, g, or t
ttagagtaatgtactaacatttttaatacagtctgatcagatcaattcacatcacaaggtcaacctgggcttgctcacatgtgacacaactgaggtacacaatgtccctacctgccggctgtcccaccttcctggttcccaacagcattgaaaccccctacttccctgaccagactggcattttttaaaattttgcataaaactatttcttccatagacttcaaacaatcaactagccaagttaattatggtacatctaaacaaagtttaatactaaccctaatgtgtgactgcggtttacaaagagctctgtatcacctgggatagctttcagtagcaattcactacaactggtcctgaagaaataatgacaataataataataattagagaattaaaaccccaacagcatgttgaatggttaaaatcacgtaagaactgaaatttggggtgggggtgtcctcaacagctgagcttgtcctagcagtgaaaatgctcgcctccaagcagggctcagaaagttctggagccctccagccagagggctgagctcagggggctcttggaggacactcaccccatggtccatgggatgcttctggcttccttaaaaacagttgggcatccgcattgtataagtaggtggagaccctagtgtggttcttttgaaggatatgggaagggaggatgacgaactagagaagtgggaggggaccaaaatcactgaggtcccagaatatcatagatttgggtataggattggggtcactaagaattgagcaccaggaattccagcttcttcccattaaagaaactgggactggttttgccttggaggcctatgtagtgttttctgcccctgtcccataccaagtctcattgatatttctgcagaatatcagatgaaaatctatttctaaagaccattgggagaatgggtggtggagaaggagttggagtggggttggggggcagttaaaaatgaataaaaatctctcagctacagaacccaaacatcacttccctccgcattcacagcatttcccagcagtccccagatggttgtttccgtggggacacagcagctgcctcatttcccttcaggccccatgggctgctggtcaacctcaggatctactaaagatgacgcaaatgccgactgaacaatctgaaacccaaaggactcgaggagagacatgttctgctgaggagagaaaggtgagccaagggcagggcccaggtcccccagggggcccccgagagcccggacatgcaccttctggatgtgtttgttcaagtaggacttagagcggaagaagctcccacattcagggcatgggtacttcttctccccatcagactccattttgtttttggggactgccatgtcgcaggagaaagagccattggcactctgcttctctggcgtcttcaggtcgctggcatctgagaggtcaccataggagtcagagctctcaatcggatcctgatgtgagcatttctggccttctttgttgccataggtcctggcgcagtggaacgctgctcccccattcaggatgggctcctggtgcctggagacctcggttacagatactgcagaagttgctgggcccctcgctgtgcttcttcaggtggtctgccatgtatgctgcccgcaagtacttcccacacacctggcagggcaccttgtcttcatgacaggccaggtgggagcgcagacggtctcgggtggcaaaagaagcattgcaggtctgacacttgtgaggccgctnagaagtgtgcacctgcttgatatgtccgttcaagtgatcaggcctggagaagcc

SEQ ID NO: 436980 - DNA, 542 bp, Homo Sapiens
tttttttgtacttcattgcacgtttaatgcttcatgcagtattcagagcagagataaggggggggatggctcacaggtccacagggacgtcacaggcacaggcgggacacggcgacgtggccggggctgggtggggagggggaccccacgcatcgtaaccgccagcaggggaggggctgcaacgagcagcctcggaccaaggacagcctccccgggacgcacgggacaggagcaacatcaggtgaactgcaatgacctcgcttgtctttcgggggaacccaggaatcccctgggaagcttctctgcactggcctcaccctttcgggcctggctggctcacgtcatcactgcgggatccaagacacatttaagggacaagtcggttgagcgggtcggggcgtgtggggcccgcggctggcttgacttctgctttcccccaacatcaacttgccctgggtggactttctaagaaaggtgaggacggcctgctggagtcccgccagcccctcccaaaggaacttcgagcccggccccccctactg

SEQ ID NO: 436981 - DNA, 658 bp, Homo Sapiens
  misc_feature (627)..(627): n is a, c, g, or t
  misc_feature (639)..(639): n is a, c, g, or t
aaatgcatcagcaagtttatttacaaatgcaattgaacagaaaggctcaccagtttctgaagaagacttctagtatacaaaccatggttatttttcattaatgaaaataagcagctttctattgggaattacttagcaacatttctggtaaagaaaatagagctcccttcatcaagcaaataaatggtacattaactgcatttttaaaaatcagaataataggtagaaggaaggatacagaaagcacatttggggatagattttaatgaaattttccatatggttctgcattaatttagaatacattacaataaacagagcaaatgcaattatgtatttatattaactatttcaaataatgtttaagaacctttttttaaaaaacaataaaataccctcttcaaaacaccactaactagaaagtcaaactagatcattatctgcctcaaaaatattcgtaggttcttattttttcccttgtgctctcaagatgctgaattcaacaggtaaatactgcacttttccccacacacaattaccttataaataaacaacaaaaatactgggttctaccaggactacaatggcttgctatggtaatctaagggggggcaaaaaggttattcnttttggtttaanaaaaagggcaaaaagggca

SEQ ID NO: 436982 - DNA, 572 bp, Homo Sapiens
atgaatagaagccattttaaagaagagaaatattctacaacagatgaagaaagttttaatttcttttcacattaaacattgtttaccacaatcagctaacagaaattactgtaacattggtcacgatgacttcataaaactaaagataaatgttatgaggaaacttcatttaacgtgaatggtaatgttagatactgtatttttccatggtaaaatacaacttatcttgaagagaaagcaaatagttcagatcagggagacatgctgaggttttaataaagaaaagcttggccttgtccagaacacttaacaaagttcaggacaatttaggtaaaagagatgagtgagacaccagcgttaggcagggacataggctcatcattcaggctttatgtacattactggatctatgcagctctcacctttagataagtgagctatatttttggcagagggatcttcaaaagtagccttggatatgaggaatcgtattttaaccaccaggcagtccaaggaattatttttaaagggacagctgagtatttcacgtatatactattaaggcatctaaa

SEQ ID NO: 436983 - DNA, 477 bp, Homo Sapiens
  misc_feature (302)..(318): n is a, c, g, or t
ttgacatttggatagtgccgtttattgttccagcaccccttcctccaccacgcccaggcctgggacaaacgggcacccgcctcctgcggcgctgcctctgctacccggaatccaggaggggaaggaacgactcgagctctaaggatgggacccggaaggcagaaaaaaataatggattggggcgggcggggagtcaaaaggtgggctgattaaaagaaaattctaaaagagaaaagggcccctggttctcttccctctctgggatcctctaaagggcctggtttctccattcctcgcagcannnnnnnnnnnnnnnnnggacaactgaggaagggcagggaaaatggccttccgcttggggcctggtcgccactcggcctctgcagttctctccattgtctctccggctcgcaggccgataacttaggaagggcgggccaggctgagggggcagagtctcgaggcggagaagtgaac

SEQ ID NO: 436984 - DNA, 1107 bp, Homo Sapiens
  misc_feature (783)..(802): n is a, c, g, or t
tttttttattcattaataattttattttgaattacaatctattatcacttcaaaaagagccacttcagaaaacatccaacggatgttgacttaccagtaaaaatgtaagtcatcaatgtatgatttatactacagaatacataataaattatatttacatgcaatgactagactatcacacacaaggtaaaaaaatacagtattttatgtacattttaaaagatttacatgttcatatacaatttataaagttaaaaattctctgtacaaaatcttacatgtacagagtttatataagccccattcttatggctgtatcaccacacagatttgcttaaaactataatactacaaacactcgggttcttcatattcaatcttggcacccatatagcaatacactattctgaaatgtaaattacaaaggaaataaaatgtaatcatgcagacattttttaatataagaaaatgcgataaaatatactacaccagatcaacatttatcaattccatagatactgagttttcaacttactgcactgttttcatataagtacatgcaaaactagcagattatggatttttaaagtaacattaaaataataccatagtttgacaatacttgggcaataggaatgaaaactaagagccctagcctaattatttctgccttaacagaaatctcaattaagacattacatatataaaaatcacagaaatgtcaatattataattcccaaatttataagatctgcatcacatcaaatagacactgatcatttnnnnnnnnnnnnnnnnnnnntgtgtttgacatttaagagcatactcactcttctgagaaggggggagggtgaaatctatgataaaccattaaggattatccactgtccctgctaaggaagcacttgcatacttccaatctgcttaaagacatctgaaggttttataaaatgtttaagataagctacactagttatttttaaaaatcttgaaaagtaacaaattgaaggtatcagcaccttccctcctccccaaagtagctaaagatctacgagaaaaataaagtgccaatgtctaaagtactgttaaggtttaagaggcactacc

SEQ ID NO: 436985 - DNA, 513 bp, Homo Sapiens
  misc_feature (5)..(5): n is a, c, g, or t
agcangggctggggggccgggagttagggctggggcttgttttacgctctgccccccacaccccctcctcttccgtcctgattaagcccaagggttggtggacttaactttcagcccatctctaagggttcacagactggatctttctaaactttattgggtacctgcttccccttttccctggtagttttcatctacaaaaagtcaaaacctgatcgaaatagaaataagatcatcaaattggaccattctcttagcgttcgagtgtgccggccagactggcattcagtacacgctgagatccaaccacatcacactggcctcaggtcaccacctcgccactcagggcacaagccctgcccttgtggtcacaaaggcttccctaatgtcgtcgatgcccaggtgaaaccacagaagcactgagggatttctaaatgtgagctttggctggtcaatgcccaagcacaggatgctgtccccatccttaggttcttacttgcaaactgtctccag

SEQ ID NO: 436986 - DNA, 573 bp, Homo Sapiens
gtcaagagaacaaaggtcgggacttttatcctggtggggggatggggagtccagattccttctctgatgaggcaaaaaaagaatcaagactcctgttcaagtaaagggcagagggtgagagctagtactcttattctagaaaggaagtagatacttttctttgataaaggaatgaacggtagactcctagtttgcagaaaaggtgggaaagatgtgacttgtactttggtaaggagatagggaaggaattaaggctattactctgaagaaagttggggggccagggctcctatttttttgctgaggagatggaagatcagggcttgtattcaataagaatgggaggggccaggggatgcctggcaaaagccttgcactgtgaggtgcaggtagaggcttttattctggtgagaggacatggactctctctctcccctcaggtaactgtgccctgtaccagcggggaggctggtggtaccatgcctgtgcccactccaacctcaacggtgtgtggcaccacggcggccactaccgaagccgctaccaggatggtgtctactgggctgagtttcg

SEQ ID NO: 436987 - DNA, 995 bp, Homo Sapiens
  misc_feature (895)..(895): n is a, c, g, or t
  misc_feature (901)..(901): n is a, c, g, or t
  misc_feature (917)..(917): n is a, c, g, or t
  misc_feature (922)..(922): n is a, c, g, or t
  misc_feature (928)..(928): n is a, c, g, or t
  misc_feature (937)..(937): n is a, c, g, or t
  misc_feature (940)..(940): n is a, c, g, or t
  misc_feature (942)..(942): n is a, c, g, or t
  misc_feature (945)..(946): n is a, c, g, or t
  misc_feature (948)..(948): n is a, c, g, or t
  misc_feature (968)..(968): n is a, c, g, or t
  misc_feature (976)..(977): n is a, c, g, or t
  misc_feature (979)..(979): n is a, c, g, or t
ggtccgaattcccgggatgcacggtcagggcgtgacgtcgggaggagggcagacacgccgctttttggatgcctcctatgcctggcgggagtcttgtctgagctggcaccaccacacggcccacgacatcttcgcagggaagcctgtggaccctctgccaggctccacaagaggtcaggacagtgcagtgtgttcacaaggccagtttctgatcgtccgccccgaggctgaggaccagtaggcagctcccaagatgggtgaaaggaaaggggtcaacaagtactatcctccagacttcaaccctgagaagcatggctctctcaaccgataccacaacagccacccgcttcgggagcgggctcggaagctgtcacagggcatcctcatcatccgattcgaaatgccatataacatctggtgcgatggctgcaagaaccacatcggcatgggtgttcgttacaatgcagaaaagaagaaggtgggcaattactacacaaccccgatctacaggttccggatgaaatgccacctctgtgtcaactacatcgagatgcagacggaccccgccaactgcgactacgtgatcgtgagtggcgcccagcgcaaggaggagcgctgggacatggcggacaatgagcaggtgctgaccacaggtgagcgccacccacttacctgcctgggggccctggccctgagtctgcgctggggcccccaaagcccagccgagctctgatcgttgcagagcatgagaagaagcagaagctggagacggacgccatgttccggctggagcatggcgaggccgaccgcagcacactcaagaaggcgctgcccacaactgagccacatccaggaggcccagagcgcctgggaaggacgacttcgcctcaacagntgctgnggagaaggttccaggnaaganaaaagncatccaggnggngnggnnanaaacaagccttgcgggcaangggagctnncntcccactggtgccaga

SEQ ID NO: 436988 - DNA, 1795 bp, Homo Sapiens
  misc_feature (637)..(637): n is a, c, g, or t
ttttgaagagacaggtctttaatgtacggagtctcacaaggcacaaacaccctcaccaggaccaaataaataactccacggttgcaggaaggcgcggtctggggaggatgcggcatctgagctctcccagggctggtgggcgagccgggggtctgcagtctgtgaggggcctcctgggtgtgtccgggcctctagagcgggtccagtctccaggatggggatcgctcactcactctccgagtcggagtagtccgccacgagggaggagccgagactgcaggggtgccgcgtgtcgggggtgtcagctgcctcctgggaggagcctgctggcgacaggggcttgtcctgacggctcccttcctgccccctcgggctgctgcacttgggggtctcagttgtttccggaggacagtctccgggggacatgggccggtcctgggcagcctcctctggtacccgcggttccccagacttgggggtgtcggccgcatgctgggggctctccgggacgtcccgagacctccgccgcacgatgcccaggtccccgacggtgatgggggaggtggcaagcgcggttctgcggctctgtgccagcttcttcaggacgccgctgaccttgcttctggaggcggaatcngggggcagaggggaaccaggagcggctgatgatctcggtccggcttgagtttctgcttgtcctcgtaggagtccagggtgtggaacttcagcagagccgccagcttgcggtcatcttccgtctcgggcaccagcgggatggtcaggctcgccttggcctgcaaggcctggtctctctcctcctcctcctggatggcttttttcttttcccggaaccttctccgcagcatgctgttgagggcgaagtcgtccttccaggcgctctgggcctcctggatgtggctcagtgtgggcagcgccttcttgagtgtgctgcggtcggcctcgccatgctccagccggaacatggcgtccgtctccagcttctgcttcttctcatgctctgtggtcagcacctgctcattgtccgccatgtcccagcgctcctccttgcgctgggcgccactcacgatcacgtagtcgcagttggcggggtccgtctgcatctcgatgtagttgacacagaggtggcatttcatccggaacctgtagatcggggttgtgtagtaattgcccaccttcttcttttctgcattgtaacgaacacccatgccgatgtggttcttgcagccatcgcaccagatgttatatggcatttcgaatcggatgatgaggatgccctgtgacagcttccgagcccgctcccgaagcgggtggctgttgtggtatcggttgagagagccatgcttctcagggttgaagtctggaggatagtacttgttgacccctttcctttcacccatcttgggagctgcctactggtcctcagcctcggggcggacgatcagaaactggccttgtgaacacactgcactgtcctgacctcttgtggagcctggcagagggtccacaggcttccctgcgaagatgtcgtgggccgtgtggtggtgccagctcagacaagactcccgccaggcataggaggcatccaaaaagcggcgtgtctgccctcctcccgacgtcacgccctgaccgtgcccggaagtgcgcgctgagagcgcggtgaacctgggcgccctctccgcgcccccaggacgccggcgtgaggcggggcgaggcagcagctccacgctgattggctgaaggacgatacgccaagcgttctgcgacgccgaagtgg

SEQ ID NO: 436989 - DNA, 999 bp, Homo Sapiens
gtttttttaaaaaatcacatagaactttattaaataaaccagtagaaaggctcctatttacatccaggttgtcagtttaagctcaagtaatatgcaaggcacaattcttcctttctccagctttagaaaaatcaaccacatggcccagccctgaaggactgaagggagcttgtgcgggatcccgtcatcctggactctccacacagcgtccacgcatggatggccatgggcatgagtctctggatctccctgagggtggcccagcctcggcctggagcacaggggcctgtgatctgagaatctcagatccagaatcaggagctgggaagagaggacttttccaagggtctcctcccccaggccctggggagtcccttctggatgggcaggccctgggctggtggccgccctccatcattggcccaggccgggctctagggccggctgggaagctgtctggggccctgcgcctgataagctgccatgaaagtggccgcctctcacactggcaggcggtggctcagatctgctgaggttctggagtggcacaggaacaggaggagcaaatgacactgggtctttgtgctgaggcaggacacagcggctttccgaaacacacacacagaaaatatgactcctgctgccatctcaaggacattttcctaaggacagtcctggtgtcctgatggagtgaaagggatcacacgtgggatgtcccagcagggcctaagccaagtccatcagatgtctcaacggcttatgaaacaaaaacagaggactgaagtctgttcacagtggcccatggttgggcagcagccctgggtgagctcctgtgttctccagcctctcgctcacccagggcttggctatcctggcctccaggtgctggttcctgaggcttcccttgcggcagtggcgcagatacagggacactcatgtcccattgctcctcagaagtcctagcagcagccagactaggggcaaagtaagttttcacag

SEQ ID NO: 436990 - DNA, 1928 bp, Homo Sapiens
  misc_feature (179)..(179): n is a, c, g, or t
  misc_feature (181)..(189): n is a, c, g, or t
  misc_feature (247)..(247): n is a, c, g, or t
  misc_feature (1059)..(1367): n is a, c, g, or t
  misc_feature (1741)..(1741): n is a, c, g, or t
  misc_feature (1756)..(1756): n is a, c, g, or t
  misc_feature (1771)..(1771): n is a, c, g, or t
  misc_feature (1816)..(1817): n is a, c, g, or t
  misc_feature (1844)..(1844): n is a, c, g, or t
  misc_feature (1863)..(1863): n is a, c, g, or t
  misc_feature (1877)..(1878): n is a, c, g, or t
  misc_feature (1882)..(1882): n is a, c, g, or t
  misc_feature (1885)..(1885): n is a, c, g, or t
  misc_feature (1890)..(1890): n is a, c, g, or t
  misc_feature (1893)..(1893): n is a, c, g, or t
  misc_feature (1900)..(1900): n is a, c, g, or t
  misc_feature (1903)..(1903): n is a, c, g, or t
  misc_feature (1909)..(1909): n is a, c, g, or t
  misc_feature (1918)..(1918): n is a, c, g, or t
gtataacctcagggggggttgagggctactgccagggagatgggattagaattttcccgggggtatctatgggagcgtctggtgtataagtattttgtaagatacaccaaatggggggggcccccacaatctgacaagcagcgagatattttgtaccataccgctcgctgctagggagntnnnnnnnnngctgtgggcgcgcgagaataaaattcagataatgtgtctccacgaagaggagcatccnctgcggattagcctcgaattgtgatatatcatagatatcttcttttccgtggagggcagcactcccgtgtgagtgatataacgagtagtaagtttttctggccaatggcgccctgttgtgtgtgggcggggacataaaatcttcggatacagtttgcgcctcggagagtcgcagagtagatagtgtgttcgtgggaggggattattgtccaatactatatgttcccgcacccaccaaaaaattaagggggccttctctccagaaggagcccctcccccaggggccgtgttttttaggctcactggcggggttttattagaaggcgggccggggcgctagcgttattcaagcccggcccctatagggtcctccatctttacaaattaacaaagggataggtatagttggggcccccccatcgaacaccaggaggggccgccgccgcattacgataatattcccgaagtgatggctcgataccgcttcaggtcagccttgtcccagattcaatcctttgacagcagcggtgccctacatcgcagtgcgtttggagagttccaacaaattttatttatggactcttaaatttcatataattttcacttgtcacatataaatttcacctgtcattgtcacagaatattattttgatttttttaatcattaaaaaaagtaaaaaccactctcacagcccttacattaaaaaggaggtgggccagatttggctgcaggtgggagtttgcagaccccagttctagaggggtaaactaatggtttaatgaccacagctgctgctcacacatcaagacagnnnnnnnnnnnnnnnnnnnnnnnnnnnnnnnnnnnnnnnnnnnnnnnnnnnnnnnnnnnnnnnnnnnnnnnnnnnnnnnnnnnnnnnnnnnnnnnnnnnnnnnnnnnnnnnnnnnnnnnnnnnnnnnnnnnnnnnnnnnnnnnnnnnnnnnnnnnnnnnnnnnnnnnnnnnnnnnnnnnnnnnnnnnnnnnnnnnnnnnnnnnnnnnnnnnnnnnnnnnnnnnnnnnnnnnnnnnnnnnnnnnnnnnnnnnnnnnnnnnnnnnnnnnnnnnnnnnnnnnnnnnnnnnnnnnnnnnnnnnnnnnnnnnnngacaggcagggtcagaagtgtgagtcctggattccaaggtggcaggtgtaatcagggagctaagaattcattatttttctcattcttggtccagttacctacagaaatggctcctgtaattacaagaccaggaggtagggccaggccctggggagaggagaaggggctggcagtgcaggagcgagagtcccagggaatggcccactccctgttagggtgggagttgagacaggtgcaggcgcaggatctcctctgcccgcttcaggtactcagctgccttcttcttcacaccttcctggcgggcaggcaacgggtcactggggactccctgaagcaagacgtgcacgccgtctcgatagccctggagtgcagcncgtaagcccctgccnttctcatcccgcggncctggggtgatgagctctgtggccttggcttaggtaggcaggggnnggccctccttccccatcctcttcctcntcttgcctcctggctccanggttcctggttcanncttncanattcnctncatcgtnccnacccancaaatgggnggggtggggg

SEQ ID NO: 436991 - DNA, 581 bp, Homo Sapiens
ggcctgagtggcgaattcggcacgagggtgaagggctgaggatggacgcactgtcacacctctgcatttccagccccagcatcttgctggagccgttccatcccggagcttggaggggcagcctcaggtgtgtgcctgggcaccgctcacagcctcttgcacccagccgttggcagcatctactcagcaaggtcactaagctctgccagcgtggcagagcatgtcttggaacctgtcttgagtggggacaacgtccccccactgctgccctagagctggggagacgctgggaaaggttcaacctccacacactaaaatcattttggctcctggggcaagcttggggaatgaatgtggaagatgcctatattctgagagacaggacagtttcccaggaagatgggcagagacttgagtgcgcgattacctccagcacagagacgtgccaggcggtgttggcgctcggggcgagatgctgcccttctttgcacgaagcctggcctcttgcttggcgtgataaccctgtcatcttcccaaagctcatttatgagccaccagaggctcctaccccaaagattttc

SEQ ID NO: 436992 - DNA, 581 bp, Homo Sapiens
  misc_feature (17)..(17): n is a, c, g, or t
  misc_feature (478)..(478): n is a, c, g, or t
  misc_feature (512)..(512): n is a, c, g, or t
tggcagagggaaggcangtgggtacagggctgctggctgacttcctgggcaggacggaggccgcgtgcctcagtgcccctcacctggctagcccaccagccacgtccaaggccgacaaggagccactggaaatggcccggccccctggcccaccccgtggccctgctgcagccgctgttggctatggctgcccactccttagtgacttgaccctgtcccccgtgccgagggactcgctgctgcccctgcaggacaccgcctaaggtacccaggctttatgcccaggccatcctggcctgggtgggggcccaagagcggcttcctggggccatggcggaacctcaccccgaggacacattcaccgtcacatccctgtagtgccaactgaagtgccgactggaccgcgaggttttgttcctggctttcagaaaaccaacgccaagatccctcccagcgtccacatcgtcctctggcaggngctcctgcccctctgcctcccaccctgcccctanacccctgaagaccatctcctccacccctccaccatctcctccacgagaagccgagtgagcctttctgca

SEQ ID NO: 436993 - DNA, 679 bp, Homo Sapiens
  misc_feature (19)..(19): n is a, c, g, or t
  misc_feature (141)..(190): n is a, c, g, or t
atttatgttaatgtatgtnctccaaaacctttcgtgtatacattcacattgagtgtggctcattttctttccccgaacgccatgactgttcagaagcacaatactatctcctgaaagagataagagacattccctagattnnnnnnnnnnnnnnnnnnnnnnnnnnnnnnnnnnnnnnnnnnnnnnnnnntattttatggtttccaagcttgatatcctttaaaattattttcattgatggaactggagttgttggaaaacatagatttaaaatgatttttgatagctgacattgtgatgttgatgtatcacatcagtaataggaccagctttgaatttctgacattggtgtggggatacagtctgtaaatgtttattgagaacatcttgcacacaatttgaattatgtagaatgtcaatcaagtttttgtatatttaaaagttggacatcaattttttcccctgatttcatcaagttatctctgccaagtgctcttgataatttcttcagatttttggaaaaaaacactatataaatgcaatccatgctttttttaaagaacaacattgccagagtatgcttgttctaacaatatagatatataaaccttaaaaataataaaatatctcacccaagacttaaaggaagaattctctgaagggataaagattactaaaa

SEQ ID NO: 436994 - DNA, 1805 bp, Homo Sapiens
  misc_feature (481)..(492): n is a, c, g, or t
  misc_feature (1744)..(1744): n is a, c, g, or t
  misc_feature (1791)..(1791): n is a, c, g, or t
tgcactcttaatacttatctttattatgaaagtgtttccaaagtaaaatgatcctcataataatgattgcttccagagatcaagaatgaataattatattttcatataaaaatcagcaaaacacaataacaatacataaaataattctaattggctaacagtatttcattccatttctgacagagatgctcaagcactgaattgtcttaagaaaacaagtaaggttttgtcacctatcctatttctcactgcaagttgaaaaaaatcaaatccaaacaccaccaccccttctatgacaacaaacggctgtggaggtaaatgactatgtgggcaaagagttgatgaaaatcatgagcttaggggctttatgaaactttgggaaatcaaactcagaggttgttttccattcttaaagtaatgaagctctaagttaaagtttcagaatcatcacataactgttcctattccataactcatttcnnnnnnnnnnnngcaggtaatcttattttcctaagggtagtttcatgatgacagtgtcaaaaaattactgtggataaagaaaaaattgtctcaatgaaatagaatttttcactgaacacagaaaccatctcaatagttgctgctccctggtttccaggccacgcaacagacatcaaaccaggaagccaaactttcatggacctgtgttaagaaaaacacacatacatgggcatactactttttccagaaaaacggaattaggcagagaaggaagtgtgggtgtacaactgatccacaagctattgggaaatcaatagctaaaaaatgtcaacaccctggcttccttttatcaggaactccaggaggctgaaggaatgtgagtgcatgagataagcaagccagatcttaacggtcccctcacatccctttctgggcaatctccagaatgcctagttttgtggagacaccatgtactatctggctgcagagactttcttaggtcccgtgttagaccccatggggtctcagcatgtggtcatgtggtaatgcattcctttcaaaggctttgggttgaactcaagttggaaatacctggaaaagaccaagcttctcctttgggtgtctgcggatcctattaaaaatattcgtgatgttttaagttctccaatacaattttctccatgaaaacaagcatcagatacactacctctaagtatttattggaggggttccaacagcttcgtggacaggctttctcagcagctacttgagtgccccctaggggtggggaggggccagtgcacatggaggcaagccacagagcccttttgtggcctattattatgaagaactaaaatgtggccagtgaaccagtcagtgctcatcactacggggtactttgacaatggcacaatttcattttaccaaaagaaaccttcactggctctggggactgcaatatcttcattttaaaatattttgctgcgttttcttcaagggcggcttgtgacaactgaactgctgattattccttccatggacagcatggtagtggcaagtgcagtaactgggctcattgcattttctctttccatacaagttactgcaactgccatgtgatcacttttccagcaggctgacttcgatttgatttttttcttatttaaatgttagaaacatctcagggctattattatttatctacaaagcagaaatcagccaaagacaaaggaacaaagtaagctaatcagaacctgaagacctnaaataccacatgaaatgtaaacatttaactttttatttccaaagggnttcttgaagccaaa

SEQ ID NO: 436995 - DNA, 440 bp, Homo Sapiens
  misc_feature (26)..(26): n is a, c, g, or t
  misc_feature (79)..(79): n is a, c, g, or t
caaaaaagaaaccctccactggcccngggggaactgccaaaaccctccatttaaaaatatttggctgccgttttccctncaagggcggcttgtgaacaactgaaactgctgattaatcccttcccatggacagcatggtaagtggcaagtgccagtaactgggcctcattgccattttcctctttcccatacaagttactgcaactgcccatgtgatcacttttcccagcaggctgacttcgatttgatttttttcttatttaaatgttagaaacatctcagggctattattatttatctacaaagcagaaatcagccaaagacaaaggaaaaaagtaagctaatcagaacctgaagacctgaaataccacatgaaatgtaaacatttaactttttatttccaaaggatttcttgaagcctctctggagataatgacatc

SEQ ID NO: 436996 - DNA, 1946 bp, Homo Sapiens
  misc_feature (74)..(74): n is a, c, g, or t
  misc_feature (194)..(194): n is a, c, g, or t
  misc_feature (219)..(219): n is a, c, g, or t
  misc_feature (225)..(225): n is a, c, g, or t
  misc_feature (227)..(227): n is a, c, g, or t
  misc_feature (234)..(234): n is a, c, g, or t
  misc_feature (283)..(283): n is a, c, g, or t
  misc_feature (305)..(305): n is a, c, g, or t
  misc_feature (376)..(377): n is a, c, g, or t
  misc_feature (427)..(427): n is a, c, g, or t
  misc_feature (456)..(456): n is a, c, g, or t
  misc_feature (477)..(477): n is a, c, g, or t
  misc_feature (504)..(505): n is a, c, g, or t
  misc_feature (522)..(522): n is a, c, g, or t
  misc_feature (535)..(535): n is a, c, g, or t
  misc_feature (556)..(556): n is a, c, g, or t
  misc_feature (645)..(645): n is a, c, g, or t
  misc_feature (670)..(670): n is a, c, g, or t
  misc_feature (709)..(709): n is a, c, g, or t
  misc_feature (731)..(731): n is a, c, g, or t
  misc_feature (779)..(779): n is a, c, g, or t
  misc_feature (1248)..(1257): n is a, c, g, or t
attcatgtgtgtatccacgcacccccggccggcgggggcgtggccgactttcaaggagtgtgggggtggagaanccaaaacgagcggggtgggcggggatgaatggaagtccgctaaacatcaggcgtgggggggagcttctattacttagtgggctacaccccggcggttggatatccgattcagcaccccantttccccctgcttcgcagccgactncgggcnangccatanacgccgacggcaattaaatcgccgccgccggcgtgatgcttgtggcatnatgtaccaataattgattgtantagttagattcggcgcgcgggcggaaaaaaccaacaaacagagaaagcgtgggcggcgcgcgcgggaaacnnaacgtcagtgtcattccaccacgccgcgtcggcggtcggtacaatactcnaatagtggggcatccgcccggtgggtaancttcgcacccgcggtcgtatncaaaaaattcagacggggcagcccgcnncgggcgaaggggcggtnataggaatgttgntgacatggaggtacgatggtnggagatgtttgttatgaacttcgtaatataaaccgggcggcgcgggatgagggaaatatccgccaaggggttgagttaaacgggagccnttcgtaacatgaagcatcggcgggncgttaacgatggggaaaaaaaatggggtggcttaatatnaagacggggcgggggacgttgntgcgaatcaccgtcaagcgggaccgaagaagccggaagccggaggaantaaatagagtgtttttgtcaaagcgggtgacggacgaagaaagcgagtacgtcggcggtaacggcgaacgcggggccagcgcaccaaaaacattcggggcgcgctttatgagaaaagaccgcgggggtcggggaataatccacgtgcaaacgtggtcataatagcggagtgaggcgccggacgtcaggcggtcagtggtaagcgtcgcccagattatacgcgccgcggtgactattacagtggtagaccgttaaatgaagggagaggcggctgggagagatagaagagtaacgaagatagcggggataaaggacggacgggcggggtgatgcgcgattacaaagggcggggtttattgcgacgggcgcggggaacgtgcctgccgcggagatatcgacccgcgggccaagtagggcgggaacagaaaattgtcgaacagcagggacgcagaccctggggtctacaacannnnnnnnnnagggcacgaaaagggggtacaggggaaggcgcggcccatgcgcggccaggggcgtcgttccattggcggggccgtattcgggcgggggtgagagtggattctaagacagagcggcgagggcggtgggtcagggcgcgggcggctgggtaatggacgggtggggttcaagtacgataaccggcggcggacatctcccagccgacggcgaaaaaaacggcgccaccggccggcgggagagggggcaggcgcatctagcgaatggtcgggcgatcaggagcggtggaatacaaagggtgtgtgacgagacaggacgtggccgggggacgatttaatcccaggggagcggggcaggcgtacagcggggcgccgccgagtcgcaggaaaagggccaggtgggtagaagacacccagcgctacgacgagcggggcccccatggggcgctgtaggaccggaggcgccgccgcctcacatgtgggccccggagacgcgcagaaccggcgccagctgtcccctgccctgagcggcctggctgcccggctccggcagctgcccctcgcccgctgtccccggacccggcccagctcccagccctcgcccggctccggcccagccccggcttcggggagcgagcgcacgcccagccggccatcccgggaattccggaccggtaccagcgatggtaatgcgc

SEQ ID NO: 436997 - DNA, 1963 bp, Homo Sapiens
  misc_feature (1156)..(1182): n is a, c, g, or t
ttttttttaaaaccgctttattcaggttggctggtagtcacagactggatcatgtatacagggcaacccacccctaggcaaagccctcggcctctcccacctcccccacgtcatcactgagctgcggcagccagaggtgccagccaattccgaggagaattgggtccaatagaaatatttacaaataaccagggggcaggtgtgcccgtgatcgggaatcgtgagggaactgagtaccagggggcccttggctcccaacagccccaggccctggggcggacttggcacaggacccaagagggagctggggcattggggggccggcagagggggactcctgggagagccttgaaggccctcaaaggggtcctgctggtgcaaaactctgcctggggccatgggtccgagggaaaggcccctcccttctgactcgccgtgtgacagggcagagaatcctggatcccctgcatccctggagggtcgcacagggagctgaacaggaaggactcgccaggaggtggtggggcatctcgctgttcccctaggcctccatgagtgaccctgcagagccactgccccagaagggccctcctgggttccctgggtcttcaccaggggagaggccctagttctgctcagaagattcaagtccatattcagggaggggtcactgtccacacccccaggtccaagtgagggatggtaggaggagggaggcgaggctggggggccccggctcaggacaggatgggggacaagcaagcaaagcaaaacactggactccacagaagctggtgacaggaagggggtggccccgggccccagcatggtccctgccccagtgttcagggcggttggccccttggtgcccagggccaccttctccgagccaggtcaccgcaggggtctgaaagggcaggggtgggtggggcttacatgctgagcaaggggtggtggaaagagggccgacatggtggccacaggcggcctcggggatggggcgcggctggacgcaggcagtcggtccccggtggtccggcggctcctcatgcactctgtacagcgtgggggcggatgggcgggggcaggggcatcagtctagaggctgcaggcctcctggtccaccgagcgcttcctcagctccttgcctggcttnnnnnnnnnnnnnnnnnnnnnnnnnnngggccttcggggcagatgcaggacggagttctcccctggctgcacccgcaggtaggccttgaccttgtggtgccgggccttgccgtcgctgaagtcgatgacgcggcactcgtaggtgccttcgtccgtgggcttcacccgggacaggcgcagcttgtgggagatgttgctgcccaccaccttgaccacacttattttggttgcctccttccctgcgtcttcctgctgagatgcttttagctggttcgaggcccacgcctgcttgtcggtccagtcccggtggctccgtacataccaccactggatctccagcgagtaggagggggagccgctgccgcggaaggagcaggccatctccacgtcctcgcccgtccgtgctgtcatgtcatggggtgtctctgtgaacagggcgtggccggagacgtggttgtcccagggcgcgtggccggcgggccgcgtggcgccgccgagttgcaggaaaagtgccaggtagtggagggcgcccagcgctacggcgagcggggcccccatcgtgcgctctcgggccgggggcgccgccgcctcacatctgggccccggagaccgcagaaccggcgccagctgtcccctgccctgagcggcctggctgcccggctccggcagctgcccctcgcccgctgtccccggacccggcccagctcccagccctcgcccggctccggcccagccccggcttcggggagcgagcgcacgcccagccggccgcctccgactgcgggactcttcccttccgcggaaggcc

SEQ ID NO: 436998 - DNA, 648 bp, Homo Sapiens
cgacagcattctgtgccgctgagccgcgctgtccaggtgtgcggccgcctgagcccgagccaggagcactagagagggagggggaagagcagaagttagagaaaaaaagccaccggaggaaaggaaaaaacatcggccaacctagaaacgttttcattcgtcattccaagagagagagaggaaagaaaaatacaactttcattctttctttgcacgttcataaacattctacatacgtattctcttttgtctcttcatttataactgctgtgaattgtacatttctgtgttttttggaggtgcagttaaacttttaagcttaagtgtgacaggactgataaatagaagatcaagagtagatccgactttagaagcctactttgtgaccaaggagctcaatttttgttttgaagctttactaatctaccagagcattgtagatattttttttttacatctattgtttaaaatagatgattataacggggcagagaactttcttttctctgcaagaatgttacatattgtatagataaatgagtgacatttcataccatgtatatatagagatgttctataagtgtgagaaagtatatgctttaatagatactgtaattataagatatttttaattaaatatttttttgt

SEQ ID NO: 436999 - DNA, 1148 bp, Homo Sapiens
  misc_feature (737)..(745): n is a, c, g, or t
tttgatttccaactcacacacatctggcatattttacatctttgcaataaaacatggttacaatagcttaaggaatttatatatccaaaatatttcaccatgatctcaagatgaaatgaacttgtcttccagatgttaagtatcctcccaattctaagctacaaactcaagatattgcttacagcctggtgatgaataacttaatcattacgctgattccccataatttcagaatttcataaatacaaacaacagtgaagaaggaattcagtgctaaaacttactagtacaaggtggataacaaataagtaatcacatcaataaataatgatatgtttctggtgcaaagtgccaatacaaagaacccattatcttgttttatctttttaaataaatgactgcgagtgagtgtaaattctgagaaaattacattcctgtaacatgcctcatagccctaccgacacaatatgtacatctatgacgatacagtcaccaaatatacaaagaagaaacatgaagaaagtgtatatacccctgggtgtataacttgatcagtacaatgtatggaaaatcatttgatagccatcattttatatcataaaagatgaaatgccttaggctaagaatgtggctttcagtgagaatttcacgagaacctaaaagaataacttcagttattgttgtaataaagtttgacttgttattaaagaaactaagctattcaagaaccaaagagnnnnnnnnngttagcatcagattatcctcccctaatgtatacacaccaagccagtgggataactctggaagagatgtccaggtgctgggaagttattactacagaactaacgcccatgactcctatttatacaagaaaaaccaggacctcatccctaagccccctttctgctgtgtcttcaaattatgcagggtagggctgaattttctttgtataaagtacccaaaatggcaaataatggcttagtatccaaatgctttatgagcaaatttcactcagaagggatgactttagattaaaaagtgcaaactatattttggtgaaaatgtcaaaaattactgatggagcccaaattcaaccctttcatacaagctgtgtccttgcacagatctttctgtttcaatagtgtgaa

SEQ ID NO: 437000 - DNA, 1578 bp, Homo Sapiens
  misc_feature (45)..(45): n is a, c, g, or t
  misc_feature (61)..(61): n is a, c, g, or t
  misc_feature (137)..(137): n is a, c, g, or t
  misc_feature (582)..(596): n is a, c, g, or t
ccctccccccctaatgtataacacaccccaagcccaagtgggganaaactctgggaaagangatgtcccccggtgctggggaaagttattacctaacaggaactaacgccccctggactcccctatttaataacaangaaaacccccaggacctcatccccctaagcccccctttcctgcctgtgtccttcaaattatgccagggtagggctgaattttcctttgtataaagtaccccaaaatggcaaataatggcttagtatcccaaatgctttatgagcaaatttcactcagaagggatgactttagattaaaaagtgcaaactatattttggtgaaaatgtcaaaaattactgatggagcccaaattcaaccctttcatacaagctgtgtccttggacagatctttctgtttcatagtgtgaatgcacctgttccatcaagccaacaggagtaaggaacatgcaagttgtaactccacaataaaattaagaaacattttgttctttatacaaggttttacttttacaaaagtatcccttttaaataagatgcatctgatgtacaaagtatcaaacgtgnnnnnnnnnnnnnnnctcagcttgaaaagaggctggaaatgggatgcaggttaggttcaaagcttaaactttgtaacaactggacacaaggttcctcagaattgtcaaaagtctcttgtgacacatcctacaaccttttctcaataaacaacaatatatgaaataattaccaaaacatctcctaattcatataatttacatgatataagcttgcttgatagcagctggtgttcagtcgtgaaaaaacacacaaagtaaaatggttgctgactacaatgtacagctattgctgggtgtgatggaatgtacaaacggaggtcgatgtagacgagttttttccaccagagatattgcctttccatgcagcacttgtgctctcagctttaacttggcttttggttcttcctttatcttcagtatctgttctgatgctcataatgccaccgattaaaatctatattaaaagctacaatgctaccagaagccatgccagtgatcagagtcctctggtcatgggacaagtccattgctctaatgccagcatcacatccagggtaaatgtacagttgcttgaagtcacaggcctgccagacctctactaccccattgtcccctccggtgaccaggttctggccgtcactgctcaggagaatggcccgtgttgaatcattgatctccatttgagccaaaagtttcccattaatgctgaaattactgaatcgccctcgttcatagtatatgatacagtggccttcgctggagacagatatcaagcgtgggaataagcagttttctggtccttcaagggctctcagcaaatctccagtgatggtgtggacaaggcaagggccctctttagcaccactgataacaagcccaagttctgcacagacagaaacacagacaacttcatggtcatggccggaggacggctctggtgccgaagtcactgcgtaggtgttcctatgatatgtccgcccactccagacagagcagc

SEQ ID NO: 437001 - DNA, 1260 bp, Homo Sapiens
actcagctgtttaatcagaatgcctccaaatttacaaagcaaatgttttaatgtccaaggctaatacaccactgcaagggaagaacaggtaggaaaggaaaggggcactaagagaggaacacaccgtaagagggcttggctactgcatagcacatcctcaagactatctcagtgaccacttttaaacatcattaaaacctgttttggaaaggtacacaatttgatctatccccacagacaaccagtcccctaagcctagggtgtcaacaagaaaattctatataaatgacttctagccttcagctaatttacaagctagggcacccaaacatattaatgaagctgattttcatgtcagatggtttccagagaattaacacagttctctcagcatgtaagagggcagcaaaaccatgaaaccaatacagcacttaattttctgcttattaatgcaaacacatgaaacaaatacctaatttcagttcaaactcatttcccttttattaaagtccaagttaccattacatggcttggtactcaataaaggaaaacttgttcaaataaggtaatatgttatcatcagtatttccaggtaactgttcacactcaagtagcaatgtcaataaatccttggggaagcccatccatgcggtttacactttgtcaaggcccagttcctccggagtggagattcccagttcatttaaagttggtctaagttcctggatgacataggggtagatttccttatgaggtcctgctttgtccttaacaacctctaggatacgaactgtactagcaaaatcatttaaccgtctgcatgcccgcaaagcagcatcaatgattttgggctctggaaccatatcataggtaacaagtgtgtttatccctttacgcaattcccaggcatctatatctggcttgttgaagtatgttacccagcgagcatcaaactcctcatctgtctcctgtgacccatgggaatagcagcgaactgactggatagccacggcggggccgggggtccgggcggagtgcaggaggcctcgagggtcggcccgggtggttgcggccacagcgcagcggcggagagcggcgcccagcatgacggcgatggcggcgcgcgggctgaggacagagagaagccggtgtaagctcgcgggttgctccggagcgggcgggggccggacaggctcacagcgggcggagcacgtaggcccgcccactgcgactctggcgcgtgggcgggaggggccaccg

SEQ ID NO: 437002 - DNA, 714 bp, Homo Sapiens
  misc_feature (35)..(35): n is a, c, g, or t
  misc_feature (39)..(39): n is a, c, g, or t
actctgggtggtaaaggaattaaaggcagagtctnaaanagatatttgcacccccgtgtctgtattagcactactctcaatagtcaagaggaagcaagccaagtgttcactgatggaggaacagagtgtggtacgcacatgtaacggaacattccattatatgtataatccaggaaggaaatcctgtcacttgacacgacatggatgaaccttgaggacattatgctaagtgaaataagccagtcacaaaaagacaagtcactgtatgattccacttatatgagatactgagaatagtcaaaaccagagagacagaaagcagaatggtggctgcggggccttgtacgcgtacaaggccccgctcctccggagtggagattcccagttcatttaaagttggtctaagttcctggatgacataggggtagatttccttatgaggtcctgctttgtccttaacaacctctaggatacgaactgtactagcaaaatcatttaaccgtctgcatgcccgcaaagcagcatcaatgattttgggctctggaaccatatcataggtaacaagtgtgtttatccctttacgcaattcccaggcatctatatctggcttgttgaagtatgttacccagcgagcatcaaactcctcatctgtctcctgtgacccatgggaatagcagcgaactgactggatagccacggcggggccttgtagcg

SEQ ID NO: 437003 - DNA, 585 bp, Homo Sapiens
  misc_feature (547)..(547): n is a, c, g, or t
ttcagttcaaactcatttccctttattaaagtccaagttactattacatggtttgatactcaaaggaaaatttgttcaaataaaacatttccaggcaactgtttcaatcaagtagcaatagcagttaagtccttaggaagcccatcgaagggagtttacactttgtcaaggcccagctcctctggagtggagattcccaattcatttaaagttggtctaagttcctggatgacatagggatagatttccttatgaggtcctgctttgtccttaacaaacctccaagatgcgaacagcactagcaaaatcatttaaccgtctacatgcttcgcaatgcagcatcaatgattttgggctcaggaaccagatcatagccaacaagtgtattcatccctttacgcaattcccaggcatcaatgtctggcttgttgaaatatgtcacccagcgagcatcaaactcctcatctgtctcgtgtgacccatgagaatagcagcgaatggaacagacagcggcggcgggctgggagccgaggcggggtgcaggagncttcggggaggcggctgcggtacagcgacggaggcagc

SEQ ID NO: 437004 - DNA, 714 bp, Homo Sapiens
acatgactgtttagaaaaatttatttgaacatatgaaaggaaatttagacacccccaataaaactgagaagttcctttccgaggtgaggggaattcctgacagcctccctgagcagtgctgcacataagcttgtggtcactacgcagcctgggctcagctcacggggctgcagaaggagcccactttttctggcggggacacatcgtcttcacgaggaaagaggccagacacacgggcttgcacccgtggctcctgccgtcacactcctcgccacacaggctgtgtctgaaatgcgcagagaacagaggctcccaggatcggcatcttttaaaaatgcacgcagcaggctctcggcagaggctggactcttccctccaccatccaatctgcatgtcaaagaatgcgaccgggtgggaagcacctggactccgtgacaccaagacggttctgccggcggggaaggggctgcccgaccccttccccgaggttctcttctgggagtccggccaccccttccatctcgaaaggcttcgtccagcgagagcgcagaaggcacacacgggccagcctagcggatgggcctgaagggaaaggtcacgccggagatgaaggtgtgccggggtgcgtgggcagggcggggtgggtggcggggtgggccgggacagccccgtagcccagcgggggcgtgtggatgtggtggtagaacccccgct

SEQ ID NO: 437005 - DNA, 768 bp, Homo Sapiens
  misc_feature (702)..(710): n is a, c, g, or t
tgaaagcatctggaacaacaggtggttacggaccatttctatcatcttgttcttgaacaaacaagatatgctggcagaaaaagtcttggcagggaaatcaaaaattgaagactatttcccagaatatgcaaattatactgttcctgaagacgcaacaccagatgcaggagaagatcccaaagttacaagagccaagttctttatccgggacctgtttttgaggatcagcacggccaccggtgacggcaaacattactgctacccgcacttcacctgcgccgtggacacagagaacatccgcaggtgttcaacgactgccgcgacatcatccagcggatgcacctcaagcagtatgagctcttgtgaggatgctgccgccaccctgcgacggagcggcgccccggactgcctgactgccagccccatgccatggtaggaggcagagtctctagttccatctcgctgccgtctgtcccgttctgtgtcgaccaccaagcctctggctacctctgtcccctcaggtttggttgtgtagcttctgttgtcattgaatacggcctcccgcagcatcccacccccaaaccaccgactctcattgccgacactgcagcagaatctctccgggtgggagccccattattcattctccctttattgattcatcgaggagaacttggtagatggggagaaaacacagttggnnnnnnnnnccacgttatcaaccgtgactgcaagagcgttcgtgcagtgccctgagccacggccgtc

SEQ ID NO: 437006 - DNA, 302 bp, Homo Sapiens
  misc_feature (9)..(9): n is a, c, g, or t
  misc_feature (13)..(13): n is a, c, g, or t
  misc_feature (15)..(15): n is a, c, g, or t
  misc_feature (17)..(17): n is a, c, g, or t
  misc_feature (26)..(26): n is a, c, g, or t
  misc_feature (38)..(38): n is a, c, g, or t
  misc_feature (43)..(43): n is a, c, g, or t
atccccccntttnangncccattttnacaaaaaccccntggcntttttgttgtatccaaggaatttccttcttaacatcgggttagaactaattcatcttgtgataagtcagtgcttgccttctgttttgtgtgttcagaatcggatcccaaatctacggaaacttttggtgttgtgcttaaataatgattctccttgtccatggcgctgctcagggaaattaatagtttctggtaatagtccagaatttgactggctaggtgtcctccaaatcgcttccactttaggtagacaagggtgcc

SEQ ID NO: 437007 - DNA, 1099 bp, Homo Sapiens
tttggatgttgttgggaacgctatatttggggcatagagtaaaaaagattgtttccattgtaatgaaaataatcattgacagtgagtgaagcttcagattaagaagacggaattgcctgtacgggtgatggaattgctaggtgcctgcctgaaacgtggagcgaggacagaggcggagctggggagggagggcggtgggaaaggcggatgtgcagcgctagttcttgttaaggatgcttttcaggcttctctccacggcttcgtccagctcttcctccagctcctctttcttggacatggccaacttggactggtaatcccgcaccacctggtcgatgtacggggcactctgagtgccatgcagcatcagggtccactccttcagcacccccttctgcggggcgctgccgacaaatcccagctccagggtccaggtgcctcgggcgtcttccccccacgtgtgagtggtcatgaaaggccacttgtcaaagcccaccttggagtcgtcatcccttggacgccggctcagcaaaatggacttggtgcccataggggaagtcatgttgatgttcaggtctcctcttctggttgcgttgaccgtgatgacagcctggacatgctccaggtagcggacaaaattttccttcccctcacaggcgtcggttgtgagtgtcagcaccaacttgccagtggatggtattttctcagggtcctgcacggagcctcccacacagtggaatctctcaggcacggttttccagtctttagccattttcaccatggcacctgcatcaaggaccccgtagccaaagaggtgattaaattccaggccgaccccattgcgccgccactgatggacctcgtcgtgaagctggttccgtttggaggtgagcacagtcagatgctgcatgtcccgccaggtcagacccaggttagcctccagagccagtgcaaacacaccagctgcctcgggggcagctgcagatgtcccagaatgcctcagagtgcagttgccgtacaaatctgtggttgccacaccggcctcggggttccttttcctcccatcccgggaattccggaccggtaccagcctcttttt

SEQ ID NO: 437008 - DNA, 498 bp, Homo Sapiens
  misc_feature (485)..(485): n is a, c, g, or t
  misc_feature (496)..(496): n is a, c, g, or t
tttcaaataggacataaaggtccctagatttttaatcaaaatattttacaatttttgctctgctagcatgagatcaacaagaaaacccaacaggaatacataaaaaacttaacaagttgactttaataagtaaaaattacaacattcttctcccagcaatgaacaatttcattttttaaaagtaaacgaggcctaaaacaagagggcacaggaacaagtagtcagatggatttaggtgagcactgtacacaagctttgaggaagtgcaaaggactgacctctaggccagaacaagatggaaaactaccaggcccatcaggcctataacccagacaccagcatggacaaaactcagttatactgaattcagagacaaaattcagtgacactcttctaccacttatttagggttctacagcatttcactgagcagacttagtttttttgtttttgttttacaaaccttttaaacaggggggtttaanactcgcaactngg

SEQ ID NO: 437009 - DNA, 627 bp, Homo Sapiens
  misc_feature (32)..(32): n is a, c, g, or t
ttgagcatctcaccatccctgttgtcccatgnagtggggaggctcctcactagaacaggttggagaaagagggcatcctatctccccagatgtcttcctacccctccctagaatcttctgaatgtagtaccttctggccaggtatgagaacaccctggctgctcagttctttggccacactcatgtggatgaatttgaggtcttctatgatgaagagactctgagccggccgctggctgtagccttcctggcacccagtgcaactacctacatcggccttaatcctggtgagtgaggcagaagggagcctcccttatcctggagttggtgggataggggaaggaggttggagccagagcctgcaaagcatgggcaggatgtgtggcccctccctggagttacccttgctccttgcccctccagtcagccccacatccttgcaggttaccgtgtgtaccaaatagatggaaactactccaggagctctcacgtggtcctggaccatggagacctacatccctggaatctgacccaggcaagcataccgggagccataccgcactggcagcttctctacagggctcgagaaacctatgggctgcccaacacactgcctaccgcctggca

SEQ ID NO: 437010 - DNA, 1794 bp, Homo Sapiens
ttttttctggagtccaagtctcttatctttattttaacagactggcagcatcaggtcgcagcagcagtacagggttcctggctgggcagcacaggcctggggcgacagctcctgtcttgtctgcccagggcagtgtcaacttaggcctctactccatggctgtgaaaggacagcagcctcaaggcagtctagctcctgggcacaggcagccaaaccccctcccatatccagctaaaccagctccaggaaaggagaaggtcctgtttccccggcatccttggggcccagggactggttctttcaccggatgatcttgcctggttgaaccacagcagcatttgggctttttcaccctttcctacatcaagaactttcccaaatgtgggccctggggccctagcaaaacagtggccttggccacaggctctgggcctctgggaggctcccatctggcatcaggtggcggcacagagcagggctgtcagcacgggcagagagctgggcacaaagagtagccagacggcagggcgtgccacagggctccgagggtgggtggcccttatggtagagaaaccagaaggtctggaaaagttgcatgtcgccccgcatgcgatataccaggttgtgccaggcggtaggcagtgtgttgggcagcccataggtttctcgagccctgtagagaagctgccagtgcggtatggctcccggtatgtttgcctgggtcagattcaggatgtaggtctcatggtccaggaccacgtgagagctcccggagtagtttccatctatttggtacacacggtaacctgcaaggatgtggggctgactggaggggcaaggagcaagggtaactccagggaggggccacacatcctgcccatgctttgcaggctctggctccaacctccttcccctatcccaccaactccaggataagggaggctcccttctgcctcactcaccaggattaaggccgatgtaggtagttgcactgggtgccaggaaggctacagccagcggccggctcagagtctcttcatcatagaagacctcaaattcatccacatgagtgtggccaaagaactgagcagccagggtgttctcatacctggctacaattcggtaataattccagctccagctcttcagacagtgccctgggggaatgtggccaattatatgcactttgtctcctcgatcctcagcagcctgaagctcccccaccagccactggagctgtctgcgggatccgtggagttgatcaagagccagaagttctcacgggaacaaaaattcatattgagagagatgaggcggagaccggggtatggggaaagagcatagaaccccccaattctgagggtgcgcagggcttcggcaggcagccagggctcccaagccttggccatcgcttcatagagccagcgggaggagtggttgccctcaatgaaggggggagggaagctattgacaggtgtgctttcatggttacccacagcagggtacactggcactggccccaggaacttcctcacaagtgctgtgacggtggtcagggcccgcagttggtcctgacgagtctggtgccagacatcatgtgcggggatgtctcctgtccagtacaccatatcaaaagggccggctgcccagcccactcaacaggctctccagggtcctcaggggcaggtcacacttgctgtattcgccccagttactcggcacctggccgggatgcgggcggcaggccagaaccccggcggcagcacagtgggtctgcacagtcagggtccgcct

SEQ ID NO: 437011 - DNA, 1423 bp, Homo Sapiens
tttttcaagtcagaaacccaggtttgaggtttccaaggcccttttattaggggaagttcccctttatagcacaagacttcacaaatgtgttgacaacaatcagattcatttcttaaaattatggagaaaaaagggaaaaacaaaacagatgcactttttatatatattgaacataaattaaaagaatttataaaacagtcacctttttacagaataaatgcagactgaattataaatgcacctccaggttgaagttgttttgagttgcttttcattttccaataataaataaatagaatttgttcttgagttttagatccacctgagccacggcaggactctaagtcatgaatgggctttcttcccttggtcgctcctgtgcgcagcatgtgagtgtgctgaggttacagatttcattggcccaccagcgtgtatgctatcctttcggggtggcattcgctcattaattcggtccagacctcgcgcttcttcaaaactccggatcttgtgctgaagcgagaaccctctgatggctgtctcgatagtctgcttgcctcctgagaggacgcccagagggagtgtgcctgtgggagtcaggcccttgagagtcagcacactctcactttcttgccgaagaattgaaaagacccgtgccatcttcccaatggctctgatcttattcctgatgatctccttacgaactgtagtgcttccttctgcttcatcatcagaaatcagttcgtcatcagagcatatgttgagcacatttaccagcatctctgtgactttttcccccacaaaaggcaaagaccatgtgaaaacatccataaagtttggaagccagtaggggtgtggagaacagttaaactgcctgatattcatgacattgttttcatatttcaacacagcagctttattgttatagacatctaggtaattgggggcagagaaaattgtaataagtggtggaaagcctgtggcttggctcttcctgtacattcgatacccagcatcttgggcttcatgggctctgataattgatagtaaattattgttctgcaaaaattcacaaactgcagggtaactgtagaaataagagcaccctcggacagtgttgtgggtatagtgctccaaggtcttctcattgccataatcctctgagggatcagaccaaagcaggtcacacacaggtccaaaggcgggaggttccgtaaacctgtctaatttcctaatgtcatctaaagaagtaatttcaggtgacattcctccatgtacacagagaaactgctggtttaagagggcagcaagaggaagacagtcaaatgtctccatacaggcatcatacacctgttccgaatatttgattcgacctctatactgaaatagcctctgtccacatcatcataatcctctagaacagctg

SEQ ID NO: 437012 - DNA, 1174 bp, Homo Sapiens
tgtagaaataagagcaccctcggacagtgttgtgggtatagtgctcccaaggtcttcttcattgcccataaatcctctgagggatcagacccaaagcaggttcacacacaggtcccaaaggcgggaggttccgtaaacctgtctaatttcctaatgtcatctaaagaagtaatttcaggtgacattcctccatgtacacagagaaactgctggtttaagagggcagcaagaggaagacagtcaaatgtctccatacaggcatcatacacctgttccgaatatttgattcgacattcctgtttgaaggtgaaatagtctgtaagatgcctgcattcatgatttcctcgaagcagaaacaatgttttgggatggttaatctttaagctccatagatacagcacacactctatactgaaatagcctctgtccacatagtcacccagaaagaggtagcgtgtgttactaggtgatcctccaacttcaaataacttcattaggtcaaagaattgtccatgaatatcaccacatactgtgattggagcatctacttctatcatagtcttctcttgcctcaggatggcagccccatcattgattatctttaaggctacttcctcttccagtcgtccttcctttaccaaatggttttttaaaacatcaactttaggtttcccattctcaaatacttccttgaaagtaagccgttgggttggaggaaaggggacagctttgatgacgcggtcggtggtggagaggtggaagcgcctcccggacatggtcccctcggcctcctccaggctccaggagcccgccggacgtgcgcctacgccgcggccgccgccttctcctcgggcagccttagctgcccggagccgtcagccagccgtgcccggccccggctcctcagcggtgtccgagcaccagaagggcgcggccaccgcagcgccggcctccgacgccactgacaggacgagggcccaccggccgctctcttgggaggcgccagcggctaaggcggggaacaccgcttcggcaccgaccgcgaccgctgctaagggtggcgaccgggacggccgcggctgctcgcggcccgggccctcgtgcacgcaagcgcgcccccgagcgccgctctcacaacttcccagcggccccgctgtcctagcggacccccgct

SEQ ID NO: 437013 - DNA, 633 bp, Homo Sapiens
  misc_feature (1)..(1): n is a, c, g, or t
nacagtcccacacaaatcaatttttaataatttcaacttgccaccagctccaaatccagctgtcttggggatttatcaccagggaaaacactaaatgccccaggctgagctatccatccagtgatcagatgacccagcctgtgatctcttaagaacctacatctacacatggcagcctgttagtggcttctctggaactagtgcatagctgctcaatgttagagccagaactctggttcccagggagggcgagtatcccaaagagatttgaggttaaatggatggcagtccaggtggtcccagacatgctctcactgctgaattcctgcacttactcctagaatataccagtgctgttcgctcccgccatcctgagggctttagaaagtgctttaaaaagggaggatctcgaagcagcagctatttcagaggcagctgttgggaaagcctatagtggttccatggaggctatccaagggaggaaccacaagccaactccccataagtcaggagatttgcctgtggccccacccagaatctgagcggtcagagtggaggccttatgcatgatgctcacctggcctgtttcagatggagggcaccctacccccagaaagttctctccctcccagt

SEQ ID NO: 437014 - DNA, 401 bp, Homo Sapiens
  misc_feature (17)..(17): n is a, c, g, or t
acagtcagaatttttcnctattcactgaaactgttataaaatttcactgaaagataactcttaaaaattctgatctgacacctgtataaacatttctgatttccacgattgtaagaaaacactaagtatacatttactacgtgattctttttcacatttttggtgcagtatttatttcaaagcttcaccctatccaaattaccatgtcagtttcttttccttcttcagaattaatttcctgcagtttaataaaaagcaaatcagcttctaatggaacaagtaacagtagaaacagtggtattcatggatgtgtttaatgaaggagccaattattaagggccagtgaaaccataaaatcttattgtttcaacatatataaataggctgtttttacatttgaa

SEQ ID NO: 437015 - DNA, 1108 bp, Homo Sapiens
  misc_feature (49)..(49): n is a, c, g, or t
aatttttatagcatttgtattttaaggatttagggcaaatacatttttntttctacttgataaaaagaaaattagtacttaaaaggttcaaaaatatattgattgagttatttttcttacataaataaattatattgatttttaggatttaacagctgaaaaaaccctttctgcttccactggaggcaaaactgaacaaaatgttagttaaatagagagagcagcatttctaagaaatctgtggtcagcattatagaccatctatgctacaaggatgtcattaaataggatttgttcaattactggattcttcttctatgatcagttatagaatttctggtttatatctctgattcataaaactgggactccactttttgaagatacatctgattgatttttttcagtcatgatttaacagacttctttgagatgctcattttaacatttacataatttataatcccaaatgtataaaagacaatgaaaaaagcatcataaataaataatgcaaaatgaaatagttatgtcagacttttggaccttctgataaattagcaaaactgtaacagaaaaagtaaaaaatacagtaaattgtgacaacaaaaagtgaaactggtactagtaacacttgcaacatttccaagggtcctgcgcagccctgcgcccccagagtactgaaccatgagcttacttcaagtctcagagtgtgaactacctgtgaagagtgagaccatcagaagggacgttaacatgaaggtgaaaggacatggggaagtgctgcttaggcaggttctttctcagttcctaaacatggagaagctgaggaagaagagaaaataatgttgacttgcaatgtagtttcgattaactgataatttggaatttgggtccaactgtaagatataaacagaatggagaaattaatggagaagtaacttttcatagctgtattataaagggtggcacacatttgacagcctcagacactcttgatcaaaggacctactagcaagtgtcaaagtgttgggcaactgtcttcttgcaggctccagaaagaaccttattcttggtgaaggaaagcctgaagtgaaaatccattcggtcc

SEQ ID NO: 437016 - DNA, 1231 bp, Homo Sapiens
  misc_feature (46)..(82): n is a, c, g, or t
  misc_feature (1227)..(1227): n is a, c, g, or t
tggatagatcatataggggacctggattttaccgcggtggcggcgnnnnnnnnnnnnnnnnnnnnnnnnnnnnnnnnnnnnnatcaggccaaatcggccgagctcgaattcgtcgagagcggacatggcggtggcgcggtagcgcgcgatgcagcacaggctagaggctgcgcaagcgcggggcccgcccctgggaccctccgggccgggcggtttggccccttagcgcccgggcgtcggggcggtaaaaggccggcagaagggaggcacttgaggacccaagtttcttcaccatggggatgtggtccattggtgcaggagccctgggggctgctgccttggcattgctgcttgccaacacagacgtgtttctgtccaagccccagaaagcggccctggagtacctggaggatatagacctgaaaacactggagaaggaaccaaggactttcaaagcaaaggagctatgggaaaaaaatggagctgtgattatggccgtgcggaggccaggctgtttcctctgtcgagaggaagctgcggatctgtcctccctgaaaagcatgttggaccagctgggcgtccccctctatgcagtggtaaaggagcacatcaggactgaagtgaaggatttccagccttatttcaaaggagaaatcttcctggatgaaaagaaaaagttctatggtccacaaaggcggaagatgatgtttatgggatttatccgtctgggagtgtggtacaacttcttccgagcctggaacggaggcttctctggaaacctggaaggagaaggcttcatccttgggggagttttcgtggtgggatcaggaaagcagggcattcttcttgagcaccgagaaaaagaatttggagacaaagtaaacctactttctgttctggaagctgctaagatgatcaaaccacagactttggcctcagagaaaaaatgattgtgtgaaactgcccagctcagggataaccagggacattcacctgtgttcatgggatgtattgtttccactcgtgtccctaaggagtgagaaacccatttatactctactctcagtatggattattaatgtattttaatattctgtttaggcccactaaggcaaaatagccccaaaacaagactgacaaaaatctgaaaaactaatgaggattattaagctaaaacctgggaaataggaggcttaaaattgactgccaggctgggtgcagtggctnacac

SEQ ID NO: 437017 - DNA, 1666 bp, Homo Sapiens
  misc_feature (253)..(278): n is a, c, g, or t
  misc_feature (511)..(511): n is a, c, g, or t
  misc_feature (878)..(878): n is a, c, g, or t
  misc_feature (880)..(895): n is a, c, g, or t
  misc_feature (900)..(900): n is a, c, g, or t
  misc_feature (903)..(904): n is a, c, g, or t
  misc_feature (908)..(908): n is a, c, g, or t
  misc_feature (913)..(1034): n is a, c, g, or t
  misc_feature (1039)..(1053): n is a, c, g, or t
  misc_feature (1108)..(1108): n is a, c, g, or t
  misc_feature (1114)..(1115): n is a, c, g, or t
  misc_feature (1131)..(1131): n is a, c, g, or t
  misc_feature (1139)..(1139): n is a, c, g, or t
  misc_feature (1141)..(1141): n is a, c, g, or t
  misc_feature (1152)..(1152): n is a, c, g, or t
  misc_feature (1162)..(1163): n is a, c, g, or t
  misc_feature (1167)..(1167): n is a, c, g, or t
  misc_feature (1174)..(1174): n is a, c, g, or t
  misc_feature (1176)..(1176): n is a, c, g, or t
  misc_feature (1181)..(1182): n is a, c, g, or t
  misc_feature (1189)..(1189): n is a, c, g, or t
  misc_feature (1201)..(1201): n is a, c, g, or t
  misc_feature (1229)..(1229): n is a, c, g, or t
  misc_feature (1239)..(1239): n is a, c, g, or t
  misc_feature (1243)..(1243): n is a, c, g, or t
  misc_feature (1253)..(1253): n is a, c, g, or t
  misc_feature (1261)..(1261): n is a, c, g, or t
  misc_feature (1277)..(1278): n is a, c, g, or t
  misc_feature (1283)..(1283): n is a, c, g, or t
  misc_feature (1286)..(1286): n is a, c, g, or t
  misc_feature (1293)..(1293): n is a, c, g, or t
  misc_feature (1296)..(1296): n is a, c, g, or t
  misc_feature (1302)..(1302): n is a, c, g, or t
  misc_feature (1308)..(1308): n is a, c, g, or t
  misc_feature (1317)..(1317): n is a, c, g, or t
  misc_feature (1320)..(1320): n is a, c, g, or t
  misc_feature (1324)..(1324): n is a, c, g, or t
  misc_feature (1339)..(1339): n is a, c, g, or t
  misc_feature (1341)..(1341): n is a, c, g, or t
  misc_feature (1353)..(1353): n is a, c, g, or t
  misc_feature (1365)..(1365): n is a, c, g, or t
  misc_feature (1376)..(1377): n is a, c, g, or t
  misc_feature (1382)..(1382): n is a, c, g, or t
  misc_feature (1393)..(1393): n is a, c, g, or t
  misc_feature (1399)..(1399): n is a, c, g, or t
  misc_feature (1407)..(1407): n is a, c, g, or t
  misc_feature (1415)..(1416): n is a, c, g, or t
  misc_feature (1420)..(1420): n is a, c, g, or t
  misc_feature (1428)..(1428): n is a, c, g, or t
  misc_feature (1445)..(1445): n is a, c, g, or t
  misc_feature (1469)..(1469): n is a, c, g, or t
  misc_feature (1475)..(1475): n is a, c, g, or t
  misc_feature (1481)..(1481): n is a, c, g, or t
  misc_feature (1489)..(1489): n is a, c, g, or t
  misc_feature (1508)..(1508): n is a, c, g, or t
  misc_feature (1510)..(1510): n is a, c, g, or t
  misc_feature (1514)..(1514): n is a, c, g, or t
  misc_feature (1516)..(1516): n is a, c, g, or t
  misc_feature (1526)..(1526): n is a, c, g, or t
  misc_feature (1533)..(1533): n is a, c, g, or t
  misc_feature (1538)..(1538): n is a, c, g, or t
  misc_feature (1541)..(1541): n is a, c, g, or t
  misc_feature (1561)..(1561): n is a, c, g, or t
  misc_feature (1563)..(1563): n is a, c, g, or t
  misc_feature (1565)..(1565): n is a, c, g, or t
  misc_feature (1573)..(1573): n is a, c, g, or t
  misc_feature (1580)..(1580): n is a, c, g, or t
  misc_feature (1595)..(1596): n is a, c, g, or t
  misc_feature (1604)..(1604): n is a, c, g, or t
  misc_feature (1608)..(1608): n is a, c, g, or t
  misc_feature (1614)..(1614): n is a, c, g, or t
  misc_feature (1618)..(1618): n is a, c, g, or t
  misc_feature (1627)..(1627): n is a, c, g, or t
  misc_feature (1631)..(1632): n is a, c, g, or t
  misc_feature (1651)..(1651): n is a, c, g, or t
  misc_feature (1657)..(1657): n is a, c, g, or t
ccgtgcgtcgcggcggggtttaccgactccgcgcgccgggtttatgggtatgaggaggggcgtgtgtccgaaggtgtagcgggcgcgaggaccggcctccgcgacggtgaatctcccgcccgccccgcacatcgcgcggaaagggggtgtttgcccaggagacggggggggcggccagcgtgtgaataactcgcgaggccgtgcgctactgcggactcccctcgtatgtgttaagaacccccaggagaagggnnnnnnnnnnnnnnnnnnnnnnnnnngggaatttctgttccagggaacccgtttcgggtttcccccccgcggggcggtttttttatatcgggcggagagatcccaaaggcccgtaggtcccatgggcccacggattctcccctagggaaaccaggcctatggcccacgggtccaccttaaccttcgtggggccccgcgccgcccaaaacgaatggttttagaaagctttcttgaagggccgagggcggccaaccaaacntttgtggtggatgtcggggcgcggggcggaggatgcataattttattaaagccagagatggacattttttctagagaaacagatctctgaggttagaatggaagataatgaaacaagagatttcactttataatttacctttgtcaaactatcccagagcatgtcaattctattatgaaagtattactttgacatcatataaccaattattaatagaaaacacacatgccaaaaaaccttaaattttgtaatcttcaagtcaatcatcaacttttcttgaatttttgaagacccgaaaagaaaaataatttcaaacaacagcactcaaacatcatatgcatttgtaatgaggcacagcaatcaattncnnnnnnnnnnnnnnnnagttnggnnctcngtccnnnnnnnnnnnnnnnnnnnnnnnnnnnnnnnnnnnnnnnnnnnnnnnnnnnnnnnnnnnnnnnnnnnnnnnnnnnnnnnnnnnnnnnnnnnnnnnnnnnnnnnnnnnnnnnnnnnnnnnnnnggtgnnnnnnnnnnnnnnngtagtggggggtgtttcgccatgttgtctctgcgtctggatctcgaaactcccgncgctcnnagtgatcttgactcanccttggancncccaaaagtgntgtggtattnnaggntgtgaancnacttnnacccagncctggccaagtnaaatttgtaagtcctcctattttcccanagtttttagnttanataaatcctnaattaganttttcagattttttgnnagtcntgnttttggnggntatttntgcctntagtagggnctnaaanagaaatatttaaaanangattaaataatnccatacttgagngttgagtattnnatggngtttctcactnctttgnggtcacgngtggaaannatcncatcccangaaaacaggtgaatgtncctggttatccctgagctgggcantttcanacaatnattttttntctgaggccaaagtctgtngntttntnatcttagcancttccanaacanaangtaggtttactttgtctccnantntttttctnggtgctnaagaagaatgccctnntttcctgntccnccacgnaaanccccaaggntganncttctctttcaggtttcanagagcnccgttcagg

SEQ ID NO: 437018 - DNA, 1105 bp, Homo Sapiens
  misc_feature (10)..(10): n is a, c, g, or t
cctggcagtnaattttaagcctcctatttcccaggtttagcttataatcctcattagtttttcagattttgtcagtcttgtttggggctattttgccttagtgggcctaaacagaatattaaaatacattaataatccatactgagagtagagtataaatgggtttctcactccttagggacacgagtggaaacaatacatcccatgaacacaggtgaatgtccctggttatccctgagctgggcagtttcacacaatcattttttctctgaggccaaagtctgtggtttgatcatcttagcagcttccagaacagaaagtaggtttactttgtctccaaattctttttctcggtgctcaagaagaatgccctgctttcctgatcccaccacgaaaactcccccaaggatgaagccttctccttccaggtttccagagaagcctccgttccaggctcggaagaagttgtaccacactcccagacggataaatcccataaacatcatcttccgcctttgtggaccatagaactttttcttttcatccaggaagatttctcctttgaaataaggctggaaatccttcacttcagtcctgatgtgctcctttaccactgcatagagggggacgcccagctggtccaacatgcttttcagggaggacagatccgcagcttcctctcgacagaggaaacagcctggcctccgcacggccataatcacagctccatttttttcccatagctcctttgctttgaaagtccttggttccttctccagtgttttcaggtctatatcctccaggtactccagggccgctttctggggcttggacagaaacacgtctgtgttggcaagcagcaatgccaaggcagcagcccccagggctcctgcaccaatggaccacatccccatggtgaagaaacttgggtcctggaggaaagacatttctcaagtgcctcccttctgccggccttttaccgccccgacgcccgggcgctaaggggccaaaccgcccggcccggagggtcccaggggcgggccccgcgcttgcgcagcctctagcctgtgctgcatcgcgcgctaccgcgccaccgccatccgct

SEQ ID NO: 437019 - DNA, 1460 bp, Homo Sapiens
  misc_feature (1012)..(1279): n is a, c, g, or t
  misc_feature (1291)..(1293): n is a, c, g, or t
  misc_feature (1295)..(1297): n is a, c, g, or t
  misc_feature (1299)..(1306): n is a, c, g, or t
gcctgggtggcgaattcggcacgagggagaagcagaggtgtggacgctgtgtatgaaatgtctttcctccaggacccaagtttcttcaccatggggatgtggtccattggtgcaggagccctgggggctgctgccttggcattgctgcttgccaacacagacgtgtttctgtccaagccccagaaagcggccctggagtacctggaggatatagacctgaaaacactggagaaggaaccaaggactttcaaagcaaaggagctatgggaaaaaaatggagctgtgattatggccgtgcggaggccaggctgtttcctctgtcgagaggaagctgcggatctgtcctccctgaaaagcatgttggaccagctgggcgtccccctctatgcagtggtaaaggagcacatcaggactgaagtgaaggatttccagccttatttcaaaggagaaatcttcctggatgaaaagaaaaagttctatggtccacaaaggcggaagatgatgtttatgggatttatccgtctgggagtgtggtacaacttcttccgagcctggaacggaggcttctctggaaacctggaaggagaaggcttcatccttgggggagttttcgtggtgggatcaggaaagcagggcattcttcttgagcaccgagaaaaagaatttggagacaaagtaaacctactttctgttctggaagctgctaagatgatcaaaccacagactttggcctcagagaaaaaatgattgtgtgaaactgcccagctcagggataaccagggaccttcaccctgtgttcatgggatgtattggtttccactcgtggtccctagggaagtgagaaaacccatttatactctactctcagtatggattattaatgtattttaatattctgtttaggcccactaaggcaaaatagccccaaaacaagactgacaaaaatctgaaaaactaatgaggattattaagctaaaacctgggaaataggaggcttaaaattgactgccannnnnnnnnnnnnnnnnnnnnnnnnnnnnnnnnnnnnnnnnnnnnnnnnnnnnnnnnnnnnnnnnnnnnnnnnnnnnnnnnnnnnnnnnnnnnnnnnnnnnnnnnnnnnnnnnnnnnnnnnnnnnnnnnnnnnnnnnnnnnnnnnnnnnnnnnnnnnnnnnnnnnnnnnnnnnnnnnnnnnnnnnnnnnnnnnnnnnnnnnnnnnnnnnnnnnnnnnnnnnnnnnnnnnnnnnnnnnnnnnnnnnnnnnnnnnnnnnnnnnnnnnnnnactcttaactannnannnannnnnnnnaattgattgctgggcctcattacaaatgcatatgatgtttgagtgctgttgtttgaaattatttttcttttcgggtcctcaaaaattcaagaaaagttgatgattgacttgaaaaataccaaaatttaaggttttttgggcagcgggggtttcc

SEQ ID NO: 437020 - DNA, 830 bp, Homo Sapiens
ggggggtggggcgtcggggcggtaaaaggccggcagaagggaggcacttgagaaatgtctttcctccaggacccaagtttcttcaccatggggatgtggtccattggtgcaggagccctgggggctgctgccttggcattgctgcttgccaacacagacgtgtttctgtccaagccccagaaagcggccctggagtacctggaggatatagacctgaaaacactggagaaggaaccaaggactttcaaagcaaaggagctatgggaaaaaaatggagctgtgattatggccgtgcggaggccaggctgtttcctctgtcgagaggaagctgcggatctgtcctccctgaaaagcatgttggaccagctgggcgtccccctctatgcagtggtaaaggagcacatcaggactgaagtgaaggatttccagccttatttcaaaggagaaatcttcctggatgaaaagaaaaagttctatggtccacaaaggcggaagatgatgtttatgggatttatccgtctgggagtgtggtacaacttcttccgagcctggaacggaggcttctctggaaacctggaaggagaaggcttcatcctttgggggagtttttcgtggtgggatcaaggaaagcaggggcatttcttcttgagccaccgaagaaaaagaattttggagacaaaggtaaaccctacttttctggttctggaaagctgcctaagaatgatccaaacccccggacctttgggccttcagaggaaaaaaatggattgtgttgaaaactgccccagcctcaagggaaaaacccaggggacatttccccctgttggtta

SEQ ID NO: 437021 - DNA, 637 bp, Homo Sapiens
cggtgctcaggaagaaatgccctgctttccctgatccccccacgataactcccccaaggatgaagccttctccttccaggtttccagagaagcctccgttccaggctcggaagaagttgtaccacactcccagacggataaatcccataaacatcatcttccgcctttgtggaccatagaactttttcttttcatccaggaagatttctcctttgaaataaggctggaaatccttcacttcagtcctgatgtgctcctttaccactgcatagagggggacgcccagctggtccaacatgcttttcagggaggacagatccgcagcttcctctcgacagaggaaacagcctggcctccgcacggccataatcacagctccatttttttcccatagctcctttgctttgaaagtccttggttccttctccagtgttttcaggtctatatcctccaggtactccagggccgctttctggggcttggacagaaacacgtctgtgttggcaagcagcaatgccaaggcagcagcccccagggctcctgcaccaatggaccacatccccatggtgaagaaacttgggtccatacacagcgtccacacctctgcttccctcgtgccgaattcgccacccaggcc

SEQ ID NO: 437022 - DNA, 2499 bp, Homo Sapiens
  misc_feature (744)..(744): n is a, c, g, or t
ttttttgaaatctagaaataagtcatatttctgagttgataaaatgcttttctgaacatacattttaggtatctggcacaattaaccaaatgtctgcccatttttgtgtagctttcatacagtacagatttcattgatgtcgctcccacatctgagtattaaaaacatttgacattgttcttctcagtcctcacaacacccctgtgaggtaggtggtattgaccccattccacagatggggaggtctaggcacggaaaggtttagtggctcctcacaggccgcgtggtggggcagcagagtggtgctctggccccgcgccgacgccgccttcacattcacacttcttcagtgccaccgcaacactgcatggcaggatctcacgctgaggccaagttcctgtctagtccagaatgaagccagcgtctcacctcttaaagcttcgatgtgtgactcaaagccaacttactctcccaaacttgcaaaacaaacatactgactgaatcttagttgggactatttgcagtatttaagattatttttgagagtcaatctgcttggatttgtagttgtatatgctcaaatccctttggaaaacagtttgaaatgacatgagggacaatgtaattttgagaacagaacacagaaaacaagagttctgagactggcattgaaattgagaatataagctatggtaaaatgagaatcaaatcccaaataaacggagagcagcacttctcaatgtntaaggccacgcacagggcaggcattcagtaagcacttcttggatcaaaagaaactgatgctcctttgagccgcctatcactgacaacaggagctgagacccccgggaaagccagccagggccatgatccccttggcctggggccacggtcacacaaagccactcagccaaatcgtgtagagttatctaggcttacttgctgcaggataaaagttgaactagaacaccaagcattgagctaggaatacccctttgaatgtgtactgctacttataaaaaataggtatgtagctatgattaaatagatgaagggccaaagcatcctatgaggaagtatttttaaaattgtatagatgttcatgcagtgggggacagaaataaagaggttaaagcggtctgtgtttttcggttaaatgaaaggttgtaaatgcatttttaccgctgataagaaggggtacctgctacccctttctgctgtggagtgttgctgaggacagagtccatctctcccagcgagtcctggttatcctttacttacactctggcctcgggggcagtggcgtgtggcctcggtcctccccaggtaactctggagggcgctgtggaatattgctgtgatttgccccttactcgtctttcacccatgttccgccttgattcggcataaggacagactgctccagtggggccttgggtcctcaggccttctgaccgcttggtcttgagtgacattccagaagagtgactaatgacataaaacgattaagaaaatccatgtggcagcggccaaccggaaaacagttttgtctcaggctgcacagggtcggaggccccaaggtcaccggggccactgcccgtcacaggtccaccttgaccccctttatgaaaggcaggcccgtgggcaccctcttcttatactccaggtactcctctccaaaaaggtgaattagtgagatttcttcttcttctgttcgatcgcggaagaatcgccacactgtcagggcatagctgacgccgcagatggggttacacagcatcacctgagttccaatactccagtaaaaccacccgacgtaagaaggatgccgaaaccaaagcgtacactccactggtcaccagagtatgtgtatctgatttttcattctgtaccacgtggttgaaattggagccagctgtaaacatggccgccgttcctcagacattctccgaagaccaccatcagcagccctgtgacactgagccaggtaatctgcttcagttctggccaaaagatattttcaagtgtgaactctaaccaagaagaaagagcagctactgtatactccaggctgtgattcaggagaaaggaatccaaggacagacttttgggattattgactgctgtcaccaagtattcagaatagtggaacaatgacagggagcacatgtaccagccaaagtgactccaagaagactggctaaaacttagcagcgtgccgcagccgaacacaaaccccaggaaacaagctcggatggcatatctggtagcgaggcggccgatagagcagcagcagcagcgcgttgagcccggccacgtagagcgccagcccggtgcggccctgcaggccggcgcgcagtgagcagcggcagcgcgagcaccgaggcgcccagcaggaaggtggcgaggctgagacgcgcctcagagcccggcggagcccgcgaccgcgcagcccgccatggcgccgggcggcggactagcgggcggcgatcccgctaa

SEQ ID NO: 437023 - DNA, 509 bp, Homo Sapiens
cattgtctataaatgaatttttaaataattaaagttataaatttatggatgggatcacttattaatattgcatcatctgaaattttaaaaatatgtatgccagtcttgttgctataatctgcttagaaaaaaggacaaaacaaaaagactacatttttcaagatttgatttttaagaagtacttaattcttggagaggagaagagagtcatataaataaaatatatcatgagagtgatattactgtggtatatagagtatttctttgcattagacccagtgttagtttgcatatattctcatgtcctcattgtaacaatttttagcgagtattatttttcaggtgagaaaattttacttcagagattaactggtgggaggtaacataataacagggaaggagccagggattatctgtaatttcaaatcccacttccatacccattgatgctatactttaaggatatggtggttcaccggtggtaccctactgccaggttgttatggatc

SEQ ID NO: 437024 - DNA, 312 bp, Homo Sapiens
ctgacaacaatgaaatagtttattttcttcaaatattttaaggtacgaacgtcagaaataaaaatgcagcatttaaccctggaacctcaaatatcactgattatactcaaaggagcagaggcattgttttccatctgattcctcagttcctcacacacacaaccatccccctcaccccatgatctgaaaagcgaaatgaggaattcaccctaaaattagtgtggagaaaacaagcaaattaggttatttactaagtgactacataaaaaactgagtatgagaccaagaaaaatagattctgtagttttagtt

SEQ ID NO: 437025 - DNA, 101 bp, Homo Sapiens
  misc_feature (3)..(3): n is a, c, g, or t
ggnagttgttgttacccacgccattttacgtctccttcactgaagggctagagttttaacttttaattttttatatttaaatgtagacttttgacactttt

SEQ ID NO: 437026 - DNA, 1852 bp, Homo Sapiens
  misc_feature (46)..(56): n is a, c, g, or t
  misc_feature (235)..(256): n is a, c, g, or t
  misc_feature (260)..(309): n is a, c, g, or t
  misc_feature (492)..(510): n is a, c, g, or t
  misc_feature (521)..(530): n is a, c, g, or t
  misc_feature (632)..(640): n is a, c, g, or t
cccctagagggcttaaaattctgtggggggagtgtcccaaattgtnnnnnnnnnnngaagtagggttccttccccaaaattcccaaagtagacgttttccccctcccgggtgtttaaaaagggggcccgggcccaatttttaatagggccccctttaggggccccttttttcaaaaaaaatgggttccggtaaaacttgggccccccggggggaattttaaaagggccccccccnnnnnnnnnnnnnnnnnnnnnngggnnnnnnnnnnnnnnnnnnnnnnnnnnnnnnnnnnnnnnnnnnnnnnnnnngactttaagaaaaaattaattaagatgtatttaacctttaagtatagaatgattgtataaattagatttcaactgaaaggacaattagcgattcagagaaagctcctagaaatagactgaaaacaaagccatacatagagtaagaaatagaacctatggaacttccatttttctaactatagnnnnnnnnnnnnnnnnnnncccagttgttnnnnnnnnnncaactcacagtttcaatattttctgaaccaaaaatcagaacacatggtttgtgtcaaagggtttttctgtgctacgtctgggagtgctgacctaagtgacannnnnnnnnaatgccaaatacagtaatctccaagcttttaatggcttatgccaagatgacagaatatgtgaaatctgattgtcccagagttacactctgcactccaaagctacaacagtgccacagctgagaggtttccctatacttcctactactgtgacaatttagcgatccttcaaatggaaaattcctaattacacgagacaatggtcctacagtaggcccgtgcggaataagttccctcgttggaaaaatgctagcatgaatagtttgataaatgcaatccatcagcaaaggagagcaagcaggcagagactgtgccaagcagaaactcattcgcatcaagttttccaataagtttccttcccccagtcccttttcttcaatcctgcttttaagccaggccccagggtaagtctggtagaacactgagcaggaaagcttggaagggttctacaccacttcaaaaatacctttgcttaaaaacacttatatagccagtgattagcaattaaaatgtgaaaataatcaactactcagtagttaaattctgctaattatcaaaagtcatagtctactgggatcagcagcattacaaaaggaagtcatatcgcatttcttaagctttttctgaatggtttaacaggtctctttcagtgttaattgcacttaaaacatctgctttttttcatttaatctctgaaatctgttcattttttccctccatttataaaaaggggtcaatttatcatttgctctatagctatttgaattcgaaaaagattccacaaaatttgagttgcacacaggcgctttctgaagcagattaaacttgtccttgtgacacttcagagcttggactgcagtgacttcaggtgcttgtaagattcgtggacctctgctttgttcagtggggagttcttagcccactcaaacaagttttcatacacattcccatcatagcggccaagcacagagccaagtgtcacatcctgaaaatcaaatgcatcaaccaaagcaacagcatctgagcgaatcagagtgagtaactcctttacacgctggtttacttgtgtaatctgaggctctgtcatgatgctcccctgaaggaaatcccccgcgttctgactgattccatacagagaatacagcagacataaactccttaagacagcttgaatggctttatcttgaattttgaggagtttttctgaaaagagc

SEQ ID NO: 437027 - DNA, 1315 bp, Homo Sapiens
  misc_feature (589)..(611): n is a, c, g, or t
ccggggcttacctcatgctggccgtgattgtgtcttcttgtgaggtacctgggagggctgattgtttgcccagggatctgccttccctggagaggttgaagcatagactggcgactctttccttgttgggccatggccgtagtggacagttcttcccctgtggtagatcgatgagccatatgacctctggtagatccctccgtagtctcaggaccataaattgtgaagaatatagaagaatctcaaactttccagtattcacacacagttggccattgtgagtatctttgacaaagattaaactattctgagatccccatttggcatgactagtgcctatatgaatcagggttcagatggtaacccatggcagtgggctttatttgctttgagacacaaatgaaatgactttgccaactattacatcttaaaatcaatcactttcagatatcatttggataccattaaataactcaaggatcaacactaaataaattaataatactactacaacacaaccaccaccaggcaacaagttcctaggttagatacttaggtttttccactttagggtaattgagatttagannnnnnnnnnnnnnnnnnnnnnntattaaataaagttgcaaaaatgtatatagatctttaaatttgttttaaagaggggtggcttttttaatggctaaggaaaaaagcttggtgaccacatgaaaaggaggagcaaaacaaaattggatacaatgtactacaaaggtagaaatttcaaactccttttccataggtcccctatgtagagacaacagcaaaaccattattaggaagccatgtccctgacaagaagggtcgggggtagtggccttatccagtgtggcagtaggacttgatgaaggtctctggtgatacaagtacctagataaatttaaaggagacattttctaggtcatttttcttccaaaatactcattaataaataccttttaagataatcccaagacagataaaaatattgggagaaaaccaaaagagaaaggaaagagatcctctaacaaagaagctactctaaagttacaactaaaactgttcaatcaggtcacataaattaacttagacaatggcaaggctaatttctaccataaatttgtctccttctaaccctttctaatcaatatacattatcttaaaaatatttaaatggcctcacatgtcactaaaatgagttaacgaatgcacttaactatcaccgtggtaatgataaagagaggagttacatcattagcatgctgaatacaaatgttatccaaaataaattctatca

SEQ ID NO: 437028 - DNA, 541 bp, Homo Sapiens
  misc_feature (56)..(89): n is a, c, g, or t
  misc_feature (527)..(527): n is a, c, g, or t
gccacccctctttaaaacaaatttaaagatctatatacatttttgcaactttattnnnnnnnnnnnnnnnnnnnnnnnnnnnnnnnnnnctcaattaccctaaagtggaaaaacctaagtatctaacctaggaacttgttgcctggtggtggttgttgttgttgttgttttttaatttatttagtgttgatccttgagttatttaatggtatccaaatgatatctgaaagtgattgattttaagatgtaatagttggcaaagtcatttcatttgtgtctcaaacaaataaagcccactgccatgggttaccatctgaaccctgattcattaggcactagtcatgccaaatggggatctcagaatagtttaatcttttcaaagatactcacaatggccaactgtgtgtgaatactgggaaagtttgaggattcttctatattcttcaaatttatgggtcctgaggactagggaggggatctccagaggttcatatgggctcatcgatctaccaccagggaaggactgntcactttaggcatg

SEQ ID NO: 437029 - DNA, 550 bp, Homo Sapiens
  misc_feature (480)..(504): n is a, c, g, or t
cttttttccccattttttcaaggatggaaaggtcagagaaaaataaaataaaacatctttcaatagtctttcctggtaaaagcagcgtctctctgggctggggagtaaagggtgtggggcaaggggagtggggagaggctgaaaccttcccccaaaccccagttttagatcctttggtttccttctcccagaagatggcagaagggcatggtgggaacagcagggagaaaatatggtgatgacaaaccccagatgatcaaggggctgatgctcctggggcccagaggtaccaccagagccttctatgagacagtgctgggcaatgggggggcccgcaggtcctttgtggggctgcatagttggcttgagggggagcaggaggttaggggtggggaccagggttgcagcctactagcctcgggcagggctgcagagtgatttttggtaatccagatgaactatccataatttaaaacttgnnnnnnnnnnnnnnnnnnnnnnnnnaaaatctcccccctttccctccccccttagaagaagcttagatgtc

SEQ ID NO: 437030 - DNA, 351 bp, Homo Sapiens
  misc_feature (248)..(248): n is a, c, g, or t
caaggatggaaaggtcagagaaaaataaaataaaacatctttcaatagtctttcctggtaaaagcagcgtctctctgggctggggagtaaagggtgtggggcaaggggagtggggagaggctgaaaccttcccccaaaccccagttttagatcctttggtttccttctcccagaagatggcagaagggcatggtgggaacagcagactccagccattccattatcattcacagcccaacccaagcagntcagtggctgaagaaagagattcaggtatactcctatgtccacatataccttcctgccacagggcttcaccaactggcaaggattccccccagcccccaactc

SEQ ID NO: 437031 - DNA, 1706 bp, Homo Sapiens
  misc_feature (772)..(796): n is a, c, g, or t
agccgggtgcgggggtgtgtgtctttttgttgtttgttgttgctctcgtgttgtatcgctcttctcgttcttgtcattctcttggttcggctctccttgtttgtcgttccctccatttgtctcctgctttttcatttctctctctttttttgcgctgtcgctttttctttctcgtatggtcccttttccattgcttgtacgtgctgttgcccatcttggttatcttctgtgcgtccctcctttttcttgttttgggtcttatatggtcgctctttgtcgtttgttgcttctttgtcccccattttttcaatggatttaaagtgtctatgtactatctgaatgactccgtcaatagtcattcctggtaaagcagcgtctcttctggctgtgtaactaaatgggcttttgtggtcaggggggattggggagagctgaaccttcccgcgaccccaagttttagatcctgtggtttccttctcccagaagatggcagaagggcatggtgggtacagccaggggagtatatatggtgatgacaaccccagatgatcaaggggctgatgctcctgggcccagaggtaccaccagagccttctatgagacagtgctgggcaatggggggggccccagggccttcttgtgggctgcatagttggcttgagggggagcaggaggttagggtgtggggaccagggttgcagcctactagcctcgggcagggctgcagagtgattttggtaatccagatgaactatcaataatttaaacttgnnnnnnnnnnnnnnnnnnnnnnnnnaaatctcccccctttccctccccccttagaagaagctaggatgtcaagagtcatggagagaggagggggaaggggatgtagaggctcctgcccaggggtacctctgatagcccaaatggtgtatacattgctactcagcacaaaggcctgtcctagtaactccaggcctgtcccttcattgtcccctctcctgggactgggcacccccatggactcttacccaccctacccctttcccccctcaaagccccagggctaaggagcttttcactttcccaaagtctgtgtgttcgagtgctggcttgtccatttggcatcttcccggacaggctggccggtgggtggtgtagggggttggctgatcatggcagcaggcctgctggaagactgggaggggcaccgcttcctgccctcaccgccgccacctcctgctaccactgagtgtcgcttgtggttgccctcctcacccatggggggatctactcggaagtcttcaagacgtcggaatttgccgaggtattcttgcagtttggggtcaatgtccaaatttttggctttggaatatttcaagaaggcccagaacttctccagcccatacagttggccagcttcatagtccttcaccgtttcctcctgaaaatccttgaatatgtccagccggaacttcttttccaggccataactgtagtatcgaaaaaggcactccaaaccatatctgtagccttctttggcgtcctccagagccagctgcttgaactcctcatacatctttttgttgaagtgatctcggaggaagaaggaccagaagcggaagagtgtgttcatctcctgagactggccaatgcccaagcgtttccgctcattaaggcagcgcctacgatacatggaaagaattccggaccggtccagc

SEQ ID NO: 437032 - DNA, 1000 bp, Homo Sapiens
  misc_feature (777)..(826): n is a, c, g, or t
ggaccggtccgaattttccaaaactgcttgggttgggctgtgtacgataatggaatggctggagtctgctgttgtcagaaggcagggagggtgatgaaggactgacccacatggactgggatgtgtgtcggttatgggcatgactgcacgttcactctcagtgggatctgggcaacatggagttcattgtcctgttgcttacttactgcaatgtctttggccctccttttcaactggttcctctggttgggcccaaaggttgggagtaggagacagtatcccaggctgacaagggcttgccctttaccttgggcaccttgttaatttttagcctgtgcccttccccacctttgccctcccagtggttggtatgtgggaagcccatctcagttcctgtgacttcatgtctcaaaccaaggatgagcgtctggtctctgctatgatggtggtatccgaggcctttccctgcccagtctggtgcctgccccacattgtaccggacactggattcctggacccccttctcctttcctttctttccttcaggtcacgcagccctgtactgtatccagcaccacagaaacctcaggtgtttttcctctgctggtttggggcacaaggaagccttagggtatggggaaaggctgttattacctagagtttactcccaggccagggggctgccatcttcttcacagacatccctgaaaggaagcccctttggggcagggaggtgaggacttcatctcaacatcggctggtggttggtaggggagnnnnnnnnnnnnnnnnnnnnnnnnnnnnnnnnnnnnnnnnnnnnnnnnnngggaacatgttaagagttaatgttgcaaagagtaatttacatcttccacttctgaagacacttgactttaggaacccatgtatctgtgacaagcatgcccaaaaatggcagggggcccttagggctaaacactttcaacctaacattgtttccatgggggaatcccagaacctg

SEQ ID NO: 437033 - DNA, 1790 bp, Homo Sapiens
  misc_feature (789)..(803): n is a, c, g, or t
  misc_feature (1258)..(1306): n is a, c, g, or t
caaaacccgctcggtgtggcctcccggggcggtttattttatttgggggggatgcccaagcccctatttcatggaccaggttctccttgggagagcaactatggcccaggttcgctttacttacgggggcccccgctccaaacgaaggggtgtagaaactttttcgagggccgagggcggccggcatggggggaggagcgatggggttttggccggtaggccttttcaagtgtttatttttatacatttttttgtattaaaaagaaaagcataattaccacaaattacaaaggactaaagcaggactagaataatgaatgaatcacttcagcctggaaagcagatactctcaataatattaatgttataatacaagctcattcaagtattttacatttttttgtccttttaaatatgatatcctagcacatagtaaagataatgtactacgagcgtaaggtggaaccttctccgcaaagccagatgacaagttttcctctccagtgagaaatgggctccaagttcttatcttctctgccatcagcatggctgaagggggagagggtgggtgttagggaaaatccagggacccttccacacaggaggtactctggggttccattcaggagggtgccagataattcagatcactctacccaggctttttggcaaaaaacaaccctcaccctccgtaactagtcatcttccttgtccctcctcctcacttcccttccagggccttctaagcagcttactttcttttgtaaaatcaatcaccaggaaaggggnnnnnnnnnnnnnnngagctacaatggaacaaaacaaaaacatttaacaactttgacacaggggctcagcacctctatctgagccccaggggtccaggctggggcacggctggatggcccttctctactggtagtgcctttgctcccaagtgcaggaagagggctaaagagaaacctgccccttaacagggctgaggcacacagacctgctgatgtctgatgcccagaggttatgttggcatggaccaaccttggaagggataggatgaacagagggatctgggcaggctgttgctttatctcaggtcttggatccccatgggacgatggtaggtgtgaagtggttagccctgatggcccctgccacttctggcatgcttgtcacagatacatcggtcctaaattcaagtgtcttcagaaagtgaagatgtaaactactctttgcaacattaactcctaacatgttaccnnnnnnnnnnnnnnnnnnnnnnnnnnnnnnnnnnnnnnnnnnnnnnnnngctcccctaccaaccaccagccgatgttgagatgaagtcctcacctccctgccccaaaggggcttcctttcagggatgtctgtgaagaagatggcagccccctggcctgggagtaaactctaggtaataacagcctttccccataccctaaggcttccttgtgccccaaaccagcagaggaaaaacactgaggtttctgtggtgctggatacagtacagggctgcgtgacctgaaggaaagaaaggaaaggagaagggggtccaggaatccagtgtccggtacaatgtggggcaggcaccagactgggcagggaaaggcctcggataccaccatcatagcagagaccagacgctcatccttggtttgagacatgaagtcacaggaactgagatgggcttcccacataccaaccactgggagggcaaaggtggggaagggcacaggctaaaaattaaccctcgtgccgaattcgccacccaggcc

SEQ ID NO: 437034 - DNA, 1849 bp, Homo Sapiens
  misc_feature (69)..(78): n is a, c, g, or t
  misc_feature (1677)..(1692): n is a, c, g, or t
  misc_feature (1716)..(1724): n is a, c, g, or t
  misc_feature (1765)..(1801): n is a, c, g, or t
ggggggaaggggaaaaggggaaaaagggttttccccttttcccaaaccccccccgggccggattttttnnnnnnnnnntttccttaaccttccccgggccccaaaaagggggtttccctttccagggaaatttttttgaaaaaaagatggccagcccccctggccctggggagtaaaactttagggtaataaccagccttttcccccttaccttaaggttttccttgtgcccccaaaccaggcggaggaaaaaacactgaggtttttggtggtgctggatacagtacaggggctgcgtgacctgaaggaaagaaaggaaagggagaagggggtccagggaatccagtgtccggtacaatgtggggcaggcaccagactgggcagggaaaggcctcggataccaccatcatagcagagaccagacgctcatccttggtttgagacatgaagtcacaggaactgagatgggcttcccacataccaaccactgggagggcaaaggtggggaagggcacaggctaaaaattaacaaggtgcccaaggtaaagggcaagcccttgtcagcctgggatactgtctcctactcccaacctttgggcccaacagaggaaccagttgaaaaggagggccaaagacattgcagtaagtaagcaacaggacaatgaactccatgttgcccagatcccactgagagtgaacgtgcagtcatgcccataaccgacacacatcccagtccatgtgggtcagtccttcatcaccctccctgccttctgacaacagcagactccagccattccattatcattcacagcccagcccaagcagtcagtggctgaagaaagagaatcaggtatactctatgtccacatataccttcctgccacagggcttcaccaactggcaggattccccccagcccccaactcctcctcatcccttgttcccaggcgggtcaattggagggtgagagaaatagatggcttccagaagggtatgcaagatggggagactccaccagaccttagggagagaatggcatctttctccaccttttaagagagacagagcctccctgaggtctcaaagatttttcagggcaacacaagaaacgtttccaagcctcagctgcaggtgttcaccgttccactctggggtttgaggagatggtaagctgaggacaagtgtgttccagatgcaggccaactctgttctcccacagtttgaacccaacttggccttggggttccaagggtaggatgaagggtgtcatggcaggacggggcctggcgtgaggcaacagcaagcagagcgaggacacaacagtggcagcagtgtacagacacaggacgtcagcttcaaacgatgcaacagcagggatatcttgggcacggctctgattcgagccactcccaactctcttgcctccaggatggaggcaccgtacatgcaacagtccagagaaagattctagcccagtccaagcccaggcacatccagagaaggtgggagctcttcgggttgactccaccgaggaaaacaggcatttgggtatttcagattcccgctccaccaataaggccaacttttaaaaaaatattatttcccaaaaccaaaccaaaattccaaggggaggggaaagacattactttctgtggattaggtgggggttttctgaannnnnnnnnnnnnnnnggtcttttatggtcgattttgtcnnnnnnnnnccgctctcgacgaattcgagctcggccgatttggcctgatnnnnnnnnnnnnnnnnnnnnnnnnnnnnnnnnnnnnncgccgccaccgcgtgagcccgagtcgcccatagtgagtcgaacattcg

SEQ ID NO: 437035 - DNA, 450 bp, Homo Sapiens
agacgccattcttgcatacaggccccgtactgcttccatcagctccagcccctcagaagggacgcctacagttggcagctatggctgtacccctcagtcattgcccaagttccagcatccttcccatgaactgctcaaggaaaatggcttcacacaacacgtctaccataagtatcgtaggcgctgccttaatgagcggaaacgcttgggcattggccagtctcaggagatgaacacactcttccgcttctggtccttcttcctccgagatcacttcaacaaaaagatgtatgaggagttcaagcagctggctctggaggacgcccaagaaggctacagatatggtttggagtgcctttttcgatactacagttatggcctggaaaagaagttccggctggacatattcaaggattttcaggagaaacgcggtaccgagctcgattctat

SEQ ID NO: 437036 - DNA, 494 bp, Homo Sapiens
  misc_feature (438)..(438): n is a, c, g, or t
  misc_feature (445)..(445): n is a, c, g, or t
  misc_feature (463)..(463): n is a, c, g, or t
  misc_feature (475)..(475): n is a, c, g, or t
ttttttttacctttagcagagaaaacagcatcattttagaggcatagagaacaagtagcagttgcttcaccaggaatgaggcagcacacataggtaaatgtcatccctttccattcttaagagtccattatgttcgtaagagcaaaagagtagtgcagaaggccaaaattctaagtactaaagtttcaaaaccacagagatataaaattatacataatccttggtctttgtatgtcactgcatgatctacttcatcacaaggattgtttcagcctcatagtatcagccctgctgccaaagctaccttaccttgagctcatctgtcctgcaacacttgaattcctttcacaaacacacacctccccaggaaagctaactctggaaactggtttgttaacacggaggaggcggaaaggcctttcactttgggtttccttnccttccngttcattaacccttcctngtttgggtgttncccttagggttgaggggtg

SEQ ID NO: 437037 - DNA, 536 bp, Homo Sapiens
ttttttagcaatacaaaagataaatatttattcagaacaaaacttttaacaatcaattttacattctaagccacaaggaaatagcaaaacatatagcaaaggaaaagcaaacactaaaagaaaagcagtgtactgtcttttctactggataacacttagttggcccatgacctctcgcttggcctatctcccaagtacattttagagttaacagctcactcataattttgggttaaaatccatctttctcctgagaatcaggagttgcacatgagctccagctagctgcttctctagggttcgtagctattgaggctaaggtgcaaatgtaaacctttggtaggtttctttacacaggggcacccccatttctcactggtggcaatgaatggggaaggggtagggcctccaaaggacctggcacactgtaatccagaagtggtgccccagggagcaacgaatgcaccctggagtgtggtccttggtccgttccgtatctcccaagtattcagaagcccctccttaaaaaccttctc

SEQ ID NO: 437038 - DNA, 1590 bp, Homo Sapiens
  misc_feature (155)..(155): n is a, c, g, or t
  misc_feature (191)..(191): n is a, c, g, or t
  misc_feature (196)..(196): n is a, c, g, or t
  misc_feature (242)..(242): n is a, c, g, or t
  misc_feature (293)..(311): n is a, c, g, or t
  misc_feature (336)..(336): n is a, c, g, or t
  misc_feature (492)..(492): n is a, c, g, or t
  misc_feature (571)..(572): n is a, c, g, or t
agaaaaaaaagtggtatcgttgtgcggcgggacaacctccgctaagttgggcactacgcgatcttattatagtgggtggggcgaaccgcgtgttttttgtcgtattttcctccgagatggtcggccgctcgccggctcacagaccgggttctggngcgcaggtgagttcccgcccgccgcgctggtgggcnacaanaaccgttgggcagggggggtgtctccaccctcacctcgccgtgggnggcccgtacgcgcgacgcgtgatatgcgtggaatcgccccccctactccannnnnnnnnnnnnnnnnnnccacacacgccgggatgggggtatntatataaatgagagggaatatattgggcccgcacacgccccgtgaggtatcccggggggcgcgctgtatcccgcattgtggtagttatcaaagagtatgcgtggtatgggcgcgacgcccggcgcaataatacgcgtccagaaaggtacatagtgntcgacgagcgagattatatgagtggggctgggttgagagagcatgaccccgctctccgcggttggttgagtatgatagnncgtttttctcctgtgtggttgcagggtggcacccgccctcgtccacaggagtgtgctctctctttctggtggagagattatgttgtttcacgagaggaacccacggccttccgctggtttcatccccaccgccgtgggcggctttattattatgttgcaggggtggaacggattgccacacgcgcgctcctttttttctggggcggccacgtgtttgccccaccggggaaacgcggtctgtggatcccgacgttttccgcttgcgtgggtcggggtgcccccccagggccccaaagaaaggggcgttttcagaaggttttttgagggcgccgagggcggcgccggcaggaattgttcgtttttcttatttgcggcgccccgccgggtgtttttcttcctgcgtgtttggctggcttgtggctcgggtggaagagtataatattttttattcactgataaactaaaagccaatttcttggtatttctcatgtatacttcatttattttattaataagcaaagccctgtaaggggagcctttgcctagtcctccgactctgattcatcttcatcttgactaatctggaagtaacgaagttcgtaggtctccttgtcagatgcaaccactcgaagccaatcacgaagattgttcttcttaaggtatttcttggtaaggtatttcaaataccttttagagaactgtttctcagaaacaactgtgattttattcttgaagcgttcaatgtgaacaacattcccgagatttccagttttgccattgactttaaccttctcccgtagaaattgctcaaaatttccagaatcaaaaattccatcttctactggatgagtaaggtccaaattaaacctccaggttgacctcttgggcttcctgtctttctgcggcgccatcttgcgagtcggccgcgagagcagagagttaaacctccaggttgacctcttgggcttcctgtctttctgcggcgccatcttgcgagtcggccgcgagagcagagagc

SEQ ID NO: 437039 - DNA, 507 bp, Homo Sapiens
  misc_feature (457)..(457): n is a, c, g, or t
  misc_feature (489)..(489): n is a, c, g, or t
ttttttttaagcgttaaaagaacacattttatcttttaaatgtgtgtacacagtacagttgacttttttgtatacaattctatgagtttaaacacacatatagattagcgtaaccactaattataagattgtagggaactggggaaaaaatgcatgcattaaggaatgatacggcatatttgggggacagagaacaggcttgatgaggacagagtctatttaaaagagacagtgggcaccgcaattggaggggaaggcggggcagggttttagagaacccctgagtgctgggctacaggattcagtaaagttattgatgagattggctgcattgtggattctgaaatatttatttaatacctcgaggagggtgtgagtagattgtgctgatgatccgcataactctgactatactaaggaccactgagttgcacccagagcttgccttactgagcgnttaccattagggaggtttcgcgtattccctanttaatctaaggtgactga

SEQ ID NO: 437040 - DNA, 2215 bp, Homo Sapiens
ttttttttgtgtttctaaaaattcaaattcttgttttgggttttatttatgaggaatgtatattgttaagtcactgttatcaagggacacataaaagcagaatcataaaactggactgcagccatcatcacagtacccgagtctatgcttgggggtcttcctcactctgctcttggagtcacaaccaagactccaaaaaaccaacgaagtcccttcaatgtgagtaaaggaaacagcttcaagcactgacaatttttacaagtgattattcaaggaatgcacagtagccacagttcagacaaatcaactacaaaaatcattaaaaagaagagtagggagggtcactgcttattaaaaacaaaagactggacaaagaaagtgaagataacagtgggcagaagctctgcctcctctgtcctgtgtgactcagaggggcatgggggcatgggggcgcagggatgtgcgatctgacacggctcgtttccagcagatgcgtggaattcagggatgcctcgctctcttcctacaacagaaactgaatactacaggcttgctagataagatcttgggggtgagtgggggttctgatcttgtgagagcctgtgttcccagttaaagaagaggcagctggccagagctctgctggagaacctaatgcccaagatggaccagagaggccaaacaacctgaggactcagcaggtgacaaccctgtagcctgaagaggagaggggctgcgctgccttctgatgctgagaaccacagacctctctgccctggatgtgggtgccaagactgatttactgtgcccccagcagacccagagccagggagcaggcctcttccactccaggagacaggcgccacttccctaccagttccttgggatgctttggtgttctgcaaaggcatccttagtctatttttagaacttgcattttcttactttggtcaatttttggtcaaaagtacagagagcacagaataaaagcaaagatgtgaatgtctctaccagacagaggatgacctagtcagcagtttggagggaaatcatctgagggtgctggctcagcacgttcccagatgaaggtctgtcatctaaaggagagaggcaggctcagctcctgaaggtcgcagagcctcagtagtcctcctgagtgtgtctagctgactgttatcgagggacacgtaaaagcagcatcacaaaactggactgcagccttcaccacggcaccaagtctatgcttgggctcttccctgctctgctcttggagtcatgaccaacactctaaaagccaacaaagtcccttcaacatgagtaaaggaaacagtttcaagcactgacagtttttacgagtgactattcaaagaatgcacaggagccagagagccagactccacagagaggccaaaggctctgaacacacgagtcaatgttcatggaggtatagacaaaggattctacctcacagagtttgaagacaacctgccctttcacccacaactactgctttctatgtcaaccctataaagatcaggtctgcgccctgcccacgagcctacttctgaagccatctggaaaaatgaaagcacttggataaatggaaaagtatgcctgaattttaaatctgctcaattacaggttatctgtagcagttaagaatcaacatctatggcattctttaaaacactcctaatttacatgtgacttagtcaacttcccttggtgtcactgtcatgagagatattacaccaggtggaacagtgacgttaagccaacaggattttttgcccttattcttgctaagtcatgattatctgagcagagatgattttataccctctaggatttgtcccgttggctagggtgtacgcccagcattggcggggaaaatattcctaggaatgctttaagagaagaggcagctggaagcttggcaatattccaaggcatgcccgtgctccctgggaagtggtctgtgtcatcctgccgggtgaaacctctgctattgcttgagcagctcccttaacccagtctggctggttctagacttcccagctgccggagaaagtgatacacttcccagggaagcagctttccttgccttgcccgccctgcagctggctaaagtgcaggatgggaggatggctgagcattatctgcagctccgacgcgtgggtcgacgatatcccgaaattccgaccgtaccagcctg

SEQ ID NO: 437041 - DNA, 1397 bp, Homo Sapiens
  misc_feature (1035)..(1058): n is a, c, g, or t
ttaaatctgctcaattacaggttatctgtagcagttaagaatcaacatctatggcattctttaaaacactcctaatttacatgtgacttagtcaacttcccttggtgtcactgtcatgagagatattacaccaggtggaacagtgacgttaagccaacaggattttttgcccttattcttgctaagtcatgattatctgagcagagatgattttataccctctaggatttgtcccgttggctagggtgtacgcccagcattggcggggaaaatattcctaggaatgctttaagagaagaggcagctggaagcttggcaatattccaaggcatgcccgtgctccctgggaagtggtctgtgtcatcctgccgggtgaaacctctgctattgcttgagcagctcccttaacccagtctggctggttctagacttcccagctgccggagaaagtgatacacttccagggaagcagctttccttgccttgcccgccctgcagctggctaaagtgcaggatgggaggatggctgagcattatctgcaggctccaatcacacttccgtggcactgggaactgcagttttcaactcctacccttacaaatgtttcaccaaatcctttatgttcacctctttgccctctgagggggaaaaggagacattcagatcacaaggaaagaatctcagaagggaaagaggggaagtagaggggtctgcgtaatccacaaatgaaattatcagtccctgacatgatccagagttgactgatacctttatcaagaccgctagaggtcagtgtagccaacacaagggaaaggaaatggaaaccaatccaaaccaaacttttaagaggaaatggaccgcaggtgctcagtgactatgtatgctttgggtagaaagagaaagattacttcttaggtttctgcctcttcacttgggggaaaaaaggggggcctggccagaccttgcctagcattccccaagaaaagcaggataaatgggaaccccaagttttcagtatcaccaattatggcttnnnnnnnnnnnnnnnnnnnnnnnntcccctgaccatgtgatgaggaatggtacgacctatctctctcacaccctagtatgacacaccctaatccatctgtcactgggagcatactatactggggcagagataaaagttcttttcctcctggggtttgctaatccagttcccatagcccatatccttcaggccttttttgaagtagttctgtgccgtctcgtagtcacgggcagctttcttggcctcaccataggagagtctcagtagatccctgcggtaacggaaggagcagagcttcttaaatagaagaaaaatgttcttttgggagacccgggacaatccattccgtggcccatccacagt

SEQ ID NO: 437042 - DNA, 518 bp, Homo Sapiens
  misc_feature (41)..(41): n is a, c, g, or t
gaaatttaaaaacctgccccaaataacgggttaacctgtanccagttaaagaatccaaacacctatggcaatcctttaaaaaacactccctaatttaacatgtgacttagtcaaacttccccttggtgtccactgtccatgaagaagatattaacacccaggtggaacagtgacgttaagcccaacaggattttttgcccttattcttgcctaagtcatgattatctgagcagagatgattttataccctctaggatttgtcccgttggctagggtgtacgcccagcattggcggggaaaatattcctaggaatgctttaagagaagaggcagctggaagcttggcaatattccaaggcatgcccgtgctccctgggaagtggtctgtgtcatctgccgggtgaaacctctgctattgcttgagcagctcccttaacccagtctggctggttctagacttcccagctgccggagaaagtgatacacttccagggaagcagctttccttgccttgcccg

SEQ ID NO: 437043 - DNA, 495 bp, Homo Sapiens
  misc_feature (40)..(40): n is a, c, g, or t
ctaatccagcagtttggaagggaaattcctcctgaagggntgctggcctcaagccacgttcccccagaatgaaaggtcctgtccatcctaaaaggaagaagaaggccaggctcaagctccctgaaggtccgcagagcctcaagtaagtccctccctgagtgtgtctagctgactgttatcgagggacacgtaaaagcagcatcacaaaactggactgcagccttcaccacggcaccaagtctatgcttgggctcttccctgctctgctcttggagtcatgaccaacactctaaaagccaacaaagtcccttcaacatgagtaaaggaaacagtttcaagcactgacagtttttacgagtgactattcaaagaatgcacaggagccagagagccagactccacagagagccaaaggctctgaacacacgagtcaatgttcatggaggtatagacaaaggattctacctcacagagtttgaagacaacctgcccttt

SEQ ID NO: 437044 - DNA, 461 bp, Homo Sapiens
gaaggcaacagactctttatttaatgtggtttaaaatacatcaaaatcaagtccctggctgttgtgaatacccaaaggagacaaaaaagctgccagtgcagcttcaaacaagtctgagtggccgggctgggccataaggaaagcagttacagggacagaaggcagctcccttcccccaggaagggcaagaggagcaggtgcctggctgtccctggggtgaccacctctgtgctgtgcaaggcggaaaggctggggcagcagctggagaatcagctcagcaggccttggccctcccccgtggacaccaggcagctccactggcctccgggtcagccctcagggccaccgtgatggggtggaggagggttaaataaccatctttacagaaataacagtctcctacagaaagtgcctgagctcagcccatggtccgataacctcatggaaaacaaacaacaaat

SEQ ID NO: 437045 - DNA, 1168 bp, Homo Sapiens
ttttttttatcactgaaatgtctatttattaataagtggtgcagtatttatttaagatagaacataaaaaatcaggtaagaattatttgcataatatatatggaaatcaacctattaaagttgttcaaatattggacagagccagaatataaattacacatacagtttaaaaattacaggaaatcatattataaagagcactaaaggccacttgtggaatagttgtgttcccctgtaagccagaatgtgaagaaagcctactcgtagcacagagacaaacccagggagcaaggcaccagaattctatgccataaaaaggggttaaaaaatacaatccaaaatcaaatataatggattcatgtcactgggaacctccatttgttcttcaaagactggtgttttccatcactgctacattagaaaaagaaggaaaaagattagccatatcctatctgaagcaaggcagagatcatttttctctttaaaacaaggaaggactgacaaatctgatgaagtccacctatctttctaagttgatttttcaggatggcacagagccgacttcacctctccaacagcaaatctctgatccttggcaaaatggctgccccaaatcttgcaacttggccaccacctggactcttaaccctcaggggaactatgggggtgggaactgccccctccttggaaaagtattcagaggggtatagaagggcccaattaccagatcaggttggcttccatgggaaaccttgatcttttaatactgagaaagagagacacaactgttctgagcttttggcctcccacagaatgtttttatagactcacctgtttctgcagaatttcagagctcagaaataaaggtacagtctagagtctaaagaccagagtcagcagagacgtggagatatttgaacttgtttggttaaaatcaatgacaggagctccttgggggcagagaacaaggggcacttgtggatgatctgcagccacaccaagccccgagagctaatggattccaattgtgaaccaggtgaataatttatgaggcattattttctgccactgacagctggattgtgaagccactcaaaggacctgctgaacagacaagaggaacagctgacccaggcatcactctactctccagggaactcatgggtct

SEQ ID NO: 437046 - DNA, 1757 bp, Homo Sapiens
  misc_feature (53)..(53): n is a, c, g, or t
  misc_feature (90)..(90): n is a, c, g, or t
  misc_feature (1436)..(1436): n is a, c, g, or t
  misc_feature (1439)..(1439): n is a, c, g, or t
accaggtgaatatttatgaggcatattttctgcccactgacagctggattgtngagccactcaaaggacctgctgaacagacaagaggancagctgacccaggcatcactctactctccagggaactcatgggtctgtgatcattttactgtaaagctgagtgaacgtagaagcccgaagcattgtggaggagctagggcctgatttgagaggaagaagggggagagagaatgagctttccaggtacacgggctttggttgaatatgcagctctacttcttacaatgtgtgacctttgacaaggtcttgtcttcagtttcctcatctataagatggagacaataacatctccctcatggggttgcgatgaggattgcatgaactttagagagagctatcatgtcacaagcaactcataaggagtgcttaggataagtttctctccccttccctgacctcacttttgtgggcagaggaagagaagggaacattaacataaaatatggtctcattttttattactcttaggtatcaaattgcagtccattcgacaagtctaagaggaatcacaaatacattcctgagcactgagctgggcttttgactacctcattgtaagccattctcaagttattcttatatacagccgatttttggcggtgtcaaagaaattcattatttcccttgaagcttattttaagcccataacagtgctatctggaggatgaaggcttaggtagaatgacagtctttaaaattactgggccaactattgttgttctagaacttgaccatccttctttctgaatatctcttaggagctttcacttcagcctgactcaggagaactgaaacatcctaccacagggattcacaaggactgctggggagcccctgccaaattctggccgatttatcccgagaacaatgtaagtggaaactaacaatgaagatgttcatttgagccaacagaggcctgtttacttcctaaaataatctcttagttacataaccataagatgtcctaagttgagtcctgtctgcttctttgtagcttttggtgaaggccctagagtatctgcttatgtcctgacaacaaggggattctctgggacaaggcaagaggacccaagctgtgttcagatgagacccagagatcccagtgcaaagggacacctttggtaaaactggccactttgggtcatatagatcccaaaagaaatcatgcctgacttcctaaaatcaaaaccatagggatttatcaagaagaaaccctgtttaattggcctatagatgaggatgcaacctaaggcatgactgttgctgaatgagcccaagtgatgggccaaaaaggtgaaccagtccaaacatggcaggaccaagaaggaacaaggtaggagagggcagaggggtggagggcagagaggtggaggggnggngtgcctgcatggccatgggattgttcttcattccctttctcaactgcacccagcagcagtggtttttgctaggccttttgaagacagcaggaatctgggagaaggaacatcatcgtctttcacagcatggaaacatcaatcttattccagagaagggaagaagtccccaaaggtatgtccggtttaacagtttctcaagtgggccaggaagttctttttcatgttctgggctcaatcgtgatgctttgatttcacttggtattttacttttagttttgtctctaacatctggagcaaagatcagatcccgggaattcc

SEQ ID NO: 437047 - DNA, 2002 bp, Homo Sapiens
  misc_feature (1905)..(1905): n is a, c, g, or t
  misc_feature (1912)..(1912): n is a, c, g, or t
  misc_feature (1926)..(1926): n is a, c, g, or t
  misc_feature (1932)..(1932): n is a, c, g, or t
  misc_feature (1942)..(1942): n is a, c, g, or t
ccaaatcttgactttatttttaatataaaaaatgcaaatttggaaacccaccctactttccccaacataatgctttacctcttaaaaataaaaataaagtactaattctatatacatcacaggtaccatacaaaaatgtatccaaagtttctattgctaccaaagtgttctaaattaaaacaagttacagaaagcccctcattgtaaacaaaagattacaagttataaaatcaaagtacacacaggccagagtcatttatacaatgcaatgcattctgctcccaagccaagttgaatttttatgtgcctgtataaaaatgcatatcaatatacctttgcaaatgtatttttcattataaagcaaatgaatacactttctacaataaataatccgctgggaggcacacctgcggggtttgaggtgggcgggacgacgggagcggggacacacccaccggcggtcacggggcagcgtagtgtttttggtgatctgcaagtgatgttcacagcataactttattctcccctctttccacaaagtaccattcaaaataatgtcattttctttcttaaaatacacatttgtcattgtgaatttacatcccgtcttattaaataagtggtactctgtgttaagagcatgatttacaaaattattaaacattcaaaagtctttaagaaaaagctacatatcaaagaaagtgacgccagcagcacggcccggggacgtgcgacagacgcactgggctgcccggacgtgcccaccccactcacagcgcccagacggagatgggttcctagaaaacttggaaataaaacctcccccctccccggggaaaaagaattaaagagctataactaaaaatcagaataagttaagttttgaacaatatacaaacatgtacagcttatcaacactatggacaagacccgcgctggcggccgggccgtcagtcaatgtcactgaggtcgctggtcggctccccgtggacgcggctcaggtggttcatggcgcggtcaaaagcgatccgcacggccttccggatgctggaattcctcccttccatcatctttaacttgtctatagtttcgtcaataccaaggggaaccattttggacttaggaagccactgccaacttctcttattatcaaaaaagagaacgaggaacagcttctcatcagacttggtctgcatgtgctccccaatcttcagcacgtccaggggtggggccgggatggtgacgccgttgtggtggccaggcacacggggcatcttggggtcgatgatcagtgccgggtaggaggggtagcccgctgcacttggcccacaccacctttagaggctccagcaccgaggcggcgggatcagtggagatccacatgctgctctggccgacttcggctgcgatcctggccgccttggcgtagttcccattctcgatgcaggagatcagctcactgcggtcctccaagcgtgtgccgtcgcacaagagccggtttgcccccgcccacatttgggcgcattaaagctcgagtcgcagagcgggctgttgctggaggagatgctggactcggaggcacagcgtcgtcggggtgtggccttcctcccccaggccgccgcccggctcctgctcgctcctcgcacccccaaagccgttggtgaagacctgcgtcccaggcgctttcctggggactcctcctccacctcggagtctccgcatgtctccgcgaccttttccttggctgcagaagagtctccaacctcggaaggactacagacaaaaaggttttggtccctagctgaggagaagttggctgggtttcagtgttcttggcagactttggggggcttacacttttcgatttgcagaagagaacagaagtgcgtctgtttacaatcgctntgcggcngccaccgcggtagnccgccncgccggcacnagtgccactactggcgcgggtgggctctggaggcgtccgcttaccagtgcgctctgagtg

SEQ ID NO: 437048 - DNA, 379 bp, Homo Sapiens
  misc_feature (185)..(185): n is a, c, g, or t
  misc_feature (230)..(230): n is a, c, g, or t
  misc_feature (286)..(286): n is a, c, g, or t
cttgactttatttttaatataaaaaatgcaaatttggaaacccaccctactttccccaacataatgctttacctcttaaaaataaaaataaagtactaattctatatacatcacaggtaccatacaaaaatgtatccaaagtttctattgctaccaaagtgttctaaattaaaacaagttacagnaaagcccctcattgtaaacaaaagattacaagttataaaatcaanggtacacacagggccagaggtcatttatacaatggcaatggcattctggctcccanggccaggttggattttttatggtggcctggtattaaaaatggcatattcaattattacctttggcaaatggtatttttccattttaagggcaa

SEQ ID NO: 437049 - DNA, 531 bp, Homo Sapiens
  misc_feature (67)..(67): n is a, c, g, or t
aaaaaataaatttaaatttttgaaaacaaataataacaaaacatgtaacagcttaatcaaacactantggaacaaaaaccccgcgctgggggccgggcccgttcaatcaaatgtccactgaggtcgctggtcggctcccccgtggaacgcggctcaaggtggttccatggcgcggtcaaaagcgaatccgcacggccttccggatgctggaattcctcccttccatcatctttaacttgtctatagtttcgtcaataccaaggggaaccattttggacttaggaagccactgccaacttctcttattatcaaaaaagagaacgaggaacagcttctcatcagacttggtctgcatgtgctccccaatcttcagcacgtccaggggtggggccgggatggtgacgccgttgtggtggccaggcacacggggcatcttggggtcgatgatcagtgccgggtaggaggggtagccgctgcacttggcccacaccaccttcagaggctccagcaccgaggcggcggcatcagtgg

SEQ ID NO: 437050 - DNA, 1059 bp, Homo Sapiens
  misc_feature (123)..(131): n is a, c, g, or t
  misc_feature (180)..(212): n is a, c, g, or t
  misc_feature (291)..(331): n is a, c, g, or t
ttgtagtctctgtcggcttctgcagaattctggaaaatgccagttttcctcccccgcccttgttttccataaaacatatttatatattgtgatgaggagtactttctgaagagtacttcgtannnnnnnnnaattgccttgtttgccttcaacttccttgattttcatagtttacatggnnnnnnnnnnnnnnnnnnnnnnnnnnnnnnnnnggttagggcttttttcgttgcatgtgatggttctgtggacatatgatccccacaaactgtgggagtgattggccaggcnnnnnnnnnnnnnnnnnnnnnnnnnnnnnnnnnnnnnnnnnaagaatagagtggtatttagaaaataaattgcattgcaaagctcttatcggctcatatgagagagcaggttcctgcccttgaaaatgccggtaagctatagcatatgttttttaagacttaagcatttcatgctttaaaataccttcacaagtgaacattacacacagaagttcatttggttttcctttgttttatggtgcatatagcaataaagacccccctccaccctgcaacccccatcccccaccgggcctttgtccctgccttggcttttctccccttctcattctcctctcccctttcctcactgaaggctgtgagttgctttcaatgtgacaacactatgatgtcatttggaaggatttgccaggacagactgattctgagtcctgggtgccgtatgtgtatgcggcagtgttgtcaggcgatcttgtttgaagctctatgttgccataattaccatcaagtacacactgttggcaaaaggctaacacctgactttagaaaatgctgatttgagaacaaaaggaaaggtcttttttcactgcttaaagtggggtcactttgatacctttgcggtcatgtctgtgtctgatgagtgtagaatctctggatgtgcactgtcagtcatgtgtccaccaggcctcgaatatcatatgggaaatgtcatagttaaaaacgtacagccaggcccgtgtgctgttaatagtgtgaaattgtcatgtta

SEQ ID NO: 437051 - DNA, 496 bp, Homo Sapiens
  misc_feature (352)..(365): n is a, c, g, or t
ttttggttcttgaatatgtattttttactgaaaaaatcattcataaattaacatacaaaaatgtacaaacacatgagtaaataatgtaatgacaaaggactatttttgtgaaaagtgttttttaaaacatctttagatttcagtgcaaaaatgtacccctggcacctcttaaaacgtaagagcaagctcaaaaacacgtagtgatggaaataagctagctacgctcaatgccatcgtcaatggtgagtggatacaatcaatccatgtggctcctgctcagctattaatgtctgtggtagaggatctctgacaagaggacctattatgtcaaaatgagtattcttgcaaatannnnnnnnnnnnnnaaaacagcatgaacaaacggggacacctttccctgcacacagcaatcaaagacaagattaaggggccacccatcagtagccttgaagattttcagctaccaatatatgcacaaggtcacatttggttcctg

SEQ ID NO: 437052 - DNA, 808 bp, Homo Sapiens
  misc_feature (16)..(16): n is a, c, g, or t
  misc_feature (44)..(44): n is a, c, g, or t
  misc_feature (95)..(95): n is a, c, g, or t
  misc_feature (121)..(121): n is a, c, g, or t
attggtcctagagagngagaaaaaaaatccccccggttcccccngaaaagattagaattgccaatttgtgcccccctgaaattgaagttccaggnttttaacagctcagagaagtaacagncaggtggttgcaacagcttgtgatgttggtacattgtcgatagaatgtggatgattaacgtgtataacttacaattttttaaatcagggagtattttataaagtgccaacctgataaaatatcctaaattctacagctaccattcattccttttttcagagtaagcagcaggtaatgttgacattaagctcttcagcacaatacaaacacatttcatgtacaggtatagatagccatggtgaaggcacaaagatctacaaggatttttctttagtagttatacaaaagaatattacattttgtggtctgtacagtgtaataaaccagcaatagggacaacaacaaagagaatctaagaaagaagactatgcctaagtatagggaaagtttagagaatcatttttagacaggacacattttgcagtagtgaatgtggtaggttttctgcctaagaggctcaaagtagctctaattcaaatgcctgaggccagcagcgactctgaatgtgactgtaaaagggtttctggtcactctgtcgcttggggtcgactccaagtcttggggctaaggccaatggggaagggaccatctctcgtcagcctgcagcttcataaaggggagaatcagagacggccgtggctcaggggcatgcacgaacgctcttgcagtcacggttgataacgtggg

SEQ ID NO: 437053 - DNA, 568 bp, Homo Sapiens
  misc_feature (464)..(464): n is a, c, g, or t
  misc_feature (497)..(497): n is a, c, g, or t
  misc_feature (518)..(518): n is a, c, g, or t
  misc_feature (527)..(527): n is a, c, g, or t
  misc_feature (538)..(538): n is a, c, g, or t
  misc_feature (547)..(547): n is a, c, g, or t
  misc_feature (555)..(555): n is a, c, g, or t
tgaagttgatgctgccctttcagacctggagattactctggaagggggtaaaacgtcaacaattttgggtgacattacttccattcctgaacttgctgactacattaaagttttcaagccaaaaaagctgactctgaaaggttacaaacaatattggtgcaccttcaaagacacatccatttcttgttataagagcaaagaagaatccagtggcacaccagctcatcagatgaacctcaggggatgtgaagttaccccagatgtaaacatttcaggccaaaaatttaacattaaactcctgattccagttgcagaaggcatgaatgaaatctggcttcgttgtgacaatgaaaaacagtatgcacactgggatgggcagcctgcaggattagcctccaaagggcaaggaccatgggcgggacagtttctttacaactttaggaagtttcaggattgtttctggnccctttctggaaggtgccggcttttaaacccgnttcctcagttaattacccggngcagttcanggttggttttnattcctgangttttggngttttcccggttt

SEQ ID NO: 437054 - DNA, 527 bp, Homo Sapiens
ttttcgtccagagaaaacgtttaattccctcatgaccaagacaaaaaagaactggcttcaacaactagctgggtctgtgctggcctccaagaccttgaatagcccagatatggagaggttaggtaatgtggccatagtgggcgtgggatgagacatcatcagttcacgccaacacccgtggctttcctcagcagcccaggtttctccatttccccctctgggctctgaatttgtcctcctgtcccagactcatagcctcccctaaagggcagaaggtaccagtgaggctgaggctgaaggaacacccagagactccaagatcggaggggagggcccactccctggagcctactgaccccctccagctggactgacagcctgccagggacaaagcaggaccctgaccacaggaccctcgggaatagcccctctactcttggctccccagggaactcccctggaagagggaccctcagcatttctgggagtccaggggcctgctgcccacaatccccaggtagcctcag

SEQ ID NO: 437055 - DNA, 675 bp, Homo Sapiens
  misc_feature (44)..(44): n is a, c, g, or t
  misc_feature (648)..(648): n is a, c, g, or t
aagttctgttaggtttctgtttgtttatttgaaaacattagtcnttccccttttccactaggtatataggtagaaaaataaatgaagtcagcactctttacgtctcactaaaataaactgtgactcaaatactgtgagtggttatttgcaaggctataacttttttaatgacagattttcctaaaagaaaccactataacatctgtccaagtactccagagaaaacaaaaaatacataaagattaaaagtctattactttaacagcacattgccaaacacggacaactaggataaatgccaagaaaccttaaaaaataactttaaaagatgcaacgttcaagccattcaaacgcgtaggttccacaaacaacaggaaaacaagtccaagagcagttctacttgtgcatgatggtaactcagactgtacttcatcaaagttcattcaggtgtttcataggcgtctgagcagagtttgttttttcttccttgcttggagatgtgtacacagattagaggaggaggaaagtcttccagatgctgatgtaagcacagcaggcttggttccccttgataaagtatgaaggcagatttagttggctcaagctttttcagtttccctagtgaaaagttttatgcatgctgaattngaggagttcttgatttggcatgcgagg

SEQ ID NO: 437056 - DNA, 914 bp, Homo Sapiens
ggtgtctgcaggaaagagcttctggctgcccccattgctgatgtcacagtttggtacgacactgccattatcaagaagggcaccttcagtgtttaccggagccaactctgctttttccttctgacaaagtgatgtcacctcagagtctggactggaggcatgtccagcttctgatttctttgtaaaaatctctggtacctcaggctcatccagcgtctgcttttcagatgtttttccctccgggacagggaggtctagctcatttggacaaggtgatgaggcaacggaattgccagttaaaggtgtgtccacaggaacgtcggagtcgctgtttacgctctcggcctgctcaagagctgcccagatccgcctctgctgttcttcaagttcttctagagtcagtgcgtcctcatccacagctccagatgctgttctggtctggggtgagtcactgggagtcagcggcggggtgccctttgggagtggaggggtgaagacgggtggaggagttccccgggggagtggaggagtgtcaggaggtaatggtggttgaaactgaaaactttcgctgctctgagaaccatgtggtacctccatatctgaatcgagctccatgtcggcgggagatcccgctgagttgctttcattcttctgcttctttggactacctgggctagagtgagatgaagacctcttgttgccagacttcacacctggccgcttggaagttagaagtaaggtaattggcaaacacatccttctgctgacatgcctgcattggtatggaaccaaagatcctccattcgtctggaattcctctgggagtagatatattaaaaccaggatagttgaccaattttgagagatcgtaagtgacacttttattctgttgtatttctccaacttctgtttcc

SEQ ID NO: 437057 - DNA, 288 bp, Homo Sapiens
  misc_feature (209)..(209): n is a, c, g, or t
  misc_feature (218)..(218): n is a, c, g, or t
  misc_feature (220)..(220): n is a, c, g, or t
aaaacttaaagaaaaatttattcttagaatttgggaatgtttgttccatatagattgtttaattaaaatgtatttgtttcttgattctgttacagattgtttaattaaaatttgtttcttgattctgttatatacatggagaaaccatgtgaaaagggatgctaggatctgagtaaaagacaagggtttatagtaaaagctaatctttnatataactntngggaccaccttgaaccctactgaaatgttatagttcttcaacaattctaaatttcataaagaatgtca

SEQ ID NO: 437058 - DNA, 1016 bp, Homo Sapiens
  misc_feature (994)..(994): n is a, c, g, or t
acattttaagaactgagttgagggggttgttatgcacttctgtaacttgaggctaagcaaggggttaactcttgtgagagccaatagagtgtgtctgtattcgcagtccatggctcattttctttatagtaggcatatggatcttcccctctgactttgaatatcatttggtgtggcctgtgggttattttcattctttaccaccaaataaagcggcttattagctactcagttacttgctactcaaaggttaggtcttccctgttcctgcttggcagtgttaaagcttacagggttaacttatgatgattctcctggctcattttcatcagaggcatgatgactggaaagggatcacatgggtcgttggtggtgacacctcactgtttcctaggtttggatagagagatgtatacaagacctttcctgttaaattacgtgactacagagacttgccaggacaaaattttcctaagaaatcagaaaaatgattaagtgagataagtacctgggtgacacagatattagcccgttggtaaaagacaacaaatattagcttaaaatctgcatatgtagaatcattttcattagatttagagcttgaagcaccttggctctcagctactttaaactcctccccatataaatcagggcaccaataaataagtttcagctttttaaaccctggtttgatgttaagcattataaagtacgaagtttgttaccacagtagagataatttagtagaaaaatgctttgaggcttcagtatttgtaagattttgcattagccagatgctaggttgttgaaggcatttcagtgttgataatagcctgagcagacttctttacaattgggatctgtttctattatgtgtatatggcccacttaccatttcagagagactggtctttctctttgtcttccttcacattgctgtgtcagttctacacctagtcttttcagcacttagcaaattcaaattttgattttntgtcagcttagttcactttaag

SEQ ID NO: 437059 - DNA, 994 bp, Homo Sapiens
cccccaggcctttttttaaagttcttcccattctaatgggggcagccaccctaccccattatgttttttgcctttctaactccctttgattttttcttcattttctcctataaaaattctggccatccttttcctcctgctcttcaataaccatccctgagggtgtttacttggtagatcaaatggttcttctcattgtctaactgtgcattggaacccatggcttcctgtatttttcttccacttcagacaaagattcccgcaattcacttaatgaagtgtctggatctattaagctgctggtgtccccacttcctcgtctggatgagtttccacttagaggggttgtttgctgaggcagaatttcgagatgaaggtcttgtataattttcagcatactgtttgtcagatttttcatccaactctttttgttgtcgttccagttctctcatgcgtatatcttttgcttctgcccgggcagcccgttttgctgccagccttgcctctgcctctctggcaatgttactcaaagcttcatcttctgcagaaaatcggtctttcacaggtgttcttttccttccagaagcaggagtccccatcttgtgttcttaatagtcttttaactttgaaagtgatttaactgtgttttcagcccttagtgatggtagctctcctttccactgacatttacatctagaccccttcatttatcttcccacatctgtgttagggcgcgcgctgcgactgcgtcgctgtccgggaagggccgaagagctgctcgcccgcccggcgcccgctggggctatgggcgaggggcgcagctggacgactcagtcctgggtccccggccaggcgggcggggatggacgcggcggctcccggcactggcagccggctagtcggtcaggccgatgtgccctctgcgccgcggctgagacagcgggaaccggccccgggaggagccgcagcctgagcggccgactgaggaggcccc

SEQ ID NO: 437060 - DNA, 1928 bp, Homo Sapiens
gttacctttttaaagtctagttttattatcttatgtgcctttagtcactagattttcccccaatatattttctgtgtaagcactttaaagatacaataatcatttctataaaaccacctgggtactaagagcaaaagagaatcataaattctgcaaagtagttgcactccatgattttaaaaaaacctcttggacagggtacctctaaaggtgaaactcaagtctttaaaagttctacattccagattgtttttccttgagaaggagacaaaagaagagggatgtggttgccatgatttgttttaaagtctcctataacaaaatgaacatgtcagtagccaattgtggttggcaaaagggtgtatttaatagaatctgcaggcagatttccaatctgccttccctgccctaccctccccctttgggtttgtttgaggtttcattccacaaataagcagcagataaaatactttacaaggtacagcacagttgtattgaagaaaaaaaggacccaactcttactttaagagtattaggcctggacttcccctgccccatgcaataaagcaagttttatatacactccccatatttttttctaacattttcttatataaatttaaatattttacaaaaaaaggcttttttcctccaaacatataaatctgagtgaaacatagattccccacccgagaacttgtttcttcactaaaatataaatgttgtctgatattaagggtaaatgtcttttgaccactggagatcactgaagtctgaattgcaccgtggagaaggcacttgtgttttctgaggtctccagcaagtatctcagtgagcactcatagaattgctgtctgtcctccagaacccgtgccaaggcctccgagtgcccagttactgaggcagctggggaaaaacgttgagtaaacatgattctacaattacggagataaaaaataaaaacagcatggactggttctaccctagaatcaaactacaacaaaatccaaagtgttcattcatgtagattcaaaatgacttcattctgtcataaattataaaatacaaaggtggctgttttaatgacaaaactcaaaacagtactaaaaggggtttgtgtcaatggacaaaagtcagtccctctaggtagggccccaaggagcatcacccaggttgaagggtggttttcctactgctgggccagaagtgctgtcctattggccttcatcttctccagccgcttggccaggtggctgttggtcatctccatctcctcaatcttgtccagtgctgttcgtaactctcgttgtagcttccgtttttctgctttcaattcatcttcaactttctcagcattctcagcagcagttttatatctcagaacctgtccctcaagccggctaatactttgctccaaggtagttatatcctgttctgcttttgaaagcttaaatttgtattcgctaatttgtctattggcatctctctgcatttcgatgaactgcaagtctgagccattctgcagtcctgccaggtcacccactgtgccatcattcctggagcatttctgtcgttcctcctctaactgaagcttcagttttctaatctgtgacagtagttcttccttctctccagcaagttttcgtagccttacatctaatggcccttctcctgctgactccaagacctgagcagcttcctgagacacaacagtgatggctccagccactggttcatgactgacatcaccattgggagtgccatcggggattataactaagccatgtttctcaataagctcatctctttgccgcaggccttctttaagttcttccatcttatgctgcagcacactacacatacgtttctgcctttctaactcctttgatttttcttcattttctctataaaattctgccatctgttcc

SEQ ID NO: 437061 - DNA, 1080 bp, Homo Sapiens
  misc_feature (942)..(950): n is a, c, g, or t
acccactagtccacgcttggctcagaagcagactagccattctcaaaggacagggagaaaaatcaccacagttgctggccgaacacagcccgtgtactatttatttcctcaagtgcttccatggaggaaaaaataaaagtctaatatgccagagcaatcatcattgcacccataagacacagtaacataattctagtaacctacttctcaatgaacacacatctgagaaaaaaaccgccagtattttattctcatggaaaaacagaacaaacccacaagttggagtcacggagataaaatacagatgaaatggaaaacggtctgttgtcatgaactctcactttcaaataccattttatatggaagttactttactgcggggcaaacagaaggccatgctggagtctcttacttttggaaaatggagaatcaaaaatttgctaatcaacaaacaaaaaaggagggaaactccttggtaaagctctacaaacataattatacatttatattttaccaataaaagatagctagggtagaaaaaacagatggttagaaactggtgccaaaccaaagtgaaagctttggtgccttctctaaactcctatcctgtttctttagaaaacaccagttttctaaagaaagattactctgaattcaccagggttctatcaccccaattcatccctccctttccacccccaagacacgaaagggccatgtagttttttgtccggcaccacttgggaaggggctgggctcaggggctgggaagagctacctgctgccctagcttgaaagggaggaggtggccacaccattctttgtatttttatcacgcacataaaagaacaaaaatcatttggcagttttaagtttaataggtgcaaacctttacttcaggaattaaaccccttatgataaataaaaagaattaaatcagannnnnnnnnaatacagatagggggtctcgcttatgttgcccaggcttgactttgaaccttttgcccctcaagcggaccttccccaactttggccctcccaaaagtgtccaggatctaacaggccctcgagcccccacac

SEQ ID NO: 437062 - DNA, 462 bp, Homo Sapiens
cttttgttttttagtagactgaccatgtcagaccctgtcaccaatgctcagctctgtaaacaatggttatttccatgttctgggggaattgttaataataggggcactagactcagcctagaaagttctagcacatcactatatacagtcctcaaaaataatttatcgtactgtttctaaaaaaaggtactagggttgttcttttgctctgtttccatattctggagctgcacgtgagcacttttgtctaacagtctaaaaacacaagaactgaactgcaattcacaatcacagagatgaggtggtggagtcgaggacttcccgcccattgcacaccgttggcacatacgtgcttgcagaggactgagagtatgtggtcccagttccactgacactgaacctgttgaggtgcagtctgtgtgtgacaacattcttctggggttgaaacaggatgatgtgaac

SEQ ID NO: 437063 - DNA, 1383 bp, Homo Sapiens
ccttcgtgcagcaactacgagcaagagtccaagatcatgtttgtggtgaacgcggtgtatgccatggcccacgctttgcacaaaatgcagcgcaccctctgtcccaacactaccaagctttgtgatgctatgaagatcctggatgggaagaagttgtacaaggattacttgctgaaaatcaacttcacggctccattcaacccaaataaagatgcagatagcatagtcaagtttgacacttttggagatggaatggggcgatacaacgtgttcaatttccaaaatgtaggtggaaagtattcctacttgaaagttggtcactgggcagaaaccttatcgctagatgtcaactctatccactggtcccggaactcagtccccacttcccagtgcagcgacccctgtgcccccaatgaaatgaagaatatgcaaccaggggatgtctgctgctggatttgcatcccctgtggaaccctacggaatacctggctggatgagtttacctgtatggattgtgggtctggacagtggcccactgcagacctaactggatgctatgaccttcctgaggactacatcaggtgggaagacgcctgggccattggcccagtcaccattgcctgtctgggttttatgtgtacatgcatggttgtaactgtttttatcaagcacaacaacacacccttggtcaaagcatcgggccgagaactctgctacatcttattgtttggggttggcctgtcatactgcatgacattcttcttcattgccaagccatcaccagtcatctgtgcattgcgccgactcgggctggggagttccttcgctatctgttactcagccctgctgaccaagacaaactgcattgcccgcatcttcgatggggtcaagaatggcgctcagaggccaaaattcatcagccccagttctcaggttttcatctgcctgggtctgatcctggtgcaaattgtgatggtgtctgtgtggctcatcctggaggccccaggcaccaggaggtatacccttgcagagaagcgggaaacagtcatcctaaaatgcaatgtcaaagattccagcatgttgatctctcttacctacgatgtgatcctggtgatcttatgcactgtgtacgccttcaaaacgcggaagtgcccagaaaatttcaacgaagctaagttcataggttttaccatgtacaccacgtgcatcatctggttggccttcctccctatatgttatgtgacatcaagtgactacagagtgcagacgacaacaatgtgcatctctgtcagcctgagtggctttgtggtcttgggctgtttgtttgcacccaaggttcacatcatcctgtttcaaccccgagcatggatacaacccgacacg

SEQ ID NO: 437064 - DNA, 192 bp, Homo Sapiens
  misc_feature (55)..(55): n is a, c, g, or t
ggaaaaccttgaaggttttattctcagtatctttacattaatacagatgcttttnattttgtgctgagaaaatcaatctgttacacataatgtaactttaatatacaacatagaaactcatcctaaattagttacaacaaggacctacaaaaaacttcataggaaaaaaggttacataatattgccaccgta

SEQ ID NO: 437065 - DNA, 1190 bp, Homo Sapiens
  misc_feature (177)..(188): n is a, c, g, or t
  misc_feature (309)..(332): n is a, c, g, or t
  misc_feature (483)..(485): n is a, c, g, or t
  misc_feature (487)..(566): n is a, c, g, or t
  misc_feature (685)..(701): n is a, c, g, or t
  misc_feature (1110)..(1112): n is a, c, g, or t
  misc_feature (1116)..(1116): n is a, c, g, or t
  misc_feature (1139)..(1148): n is a, c, g, or t
cccacttggggcgaaaaaattattttcggccaaggggggaaccaagggttttaaaatcccccctggcggaatttaaagggttcctttcaaaccccggttggggaaggggtttcccaagtgcggggcggaaattttttaatggaatttccacccctttttttcaaaaaaattggcaannnnnnnnnnnntaattttaaatttgagggttcgcctttgggcttcccctgtggatagaatcccagtaaaaggccctccaggaattccccttttgggatttggtttaagaaaacccttcggttttcccccccnnnnnnnnnnnnnnnnnnnnnnnnaaattccaaggcccttgttcatggccccgggattttccttggggaacacggtattggcccatgttcacctttcccttctgggggccccggccccccaacgaatgggtttagagaaacttttctgaagggccgagggcggcccgacaagggnnntnnnnnnnnnnnnnnnnnnnnnnnnnnnnnnnnnnnnnnnnnnnnnnnnnnnnnnnnnnnnnnnnnnnnnnnnnnnnnnnntaagagtttaaggaaagaatatatttgaaccacataaacaaacaaaaaggtattacataagaaaaaataatgtaacaatttatgtaagtacctaacatatgagcatgctcttacatctnnnnnnnnnnnnnnnnnggtaacattggtactatatatatatatttgacaagtgtgcattaaagaattctctaatataaaacatttaaaatgtggagaatactttttcaagatacagaaaacaattgttatgataggcacacccacaattcttataacaacatgcttgcgaggataaaatccacctgagcactcatttctcagatgtaccaacgctagaaaagtgttaagcactgaatattgccacccacttttgcaatgtttgagtttcaacactgattggtatgaattctgaattacacaattaattactgttatttttcagtctttctgccatgttccatatagaaggcatgtatttaatatgaatacttaacacagcaacattatttgtagcaaagtcacttccctgtttcagtaacctttnnnggcnctcccccgggtccgtattctggnnnnnnnnnngcggcctgcgccgcggtacgcgcggggggggtctgttgtgtg

SEQ ID NO: 437066 - DNA, 661 bp, Homo Sapiens
ttctcgggaaactggtttaataaggacaattccagaggggcctggctgtggccaaagctgtgccaaacggttgggatccagagctaaaggcacttcttgccacgtgagaccatgggcgaggctccccacgctatctccaccaccacagtcatgagagccaagcgagactggcctgtggcctggggctccacagctgcccagctccacctccggcatttactggtctcatcctgagaggcattgggtgcccactcactggctggatgctgggctggttcatgggtggcagagccagggtataccctttggggatgtccctaacccctcaggaccagaggcagcaccaagcagcatgtcacagccagtgctagggtcagctgcaccctttgctgggactctagctctcctcagagggcctcctagggccattccgggcactgtgggtggcaatggggagccccggctccctcattaggccagacaccagtctggccgggtcagggaggcccagccttgggccctgtcacacgtagtccagaatctctgtctccatttcgttttcactgccgtcggatggcttgaagcaccccctccatttgtggctacttcctgctcatactggtgtgtttgccccagactcttgacggggaagtgctccttt

SEQ ID NO: 437067 - DNA, 396 bp, Homo Sapiens
  misc_feature (253)..(253): n is a, c, g, or t
  misc_feature (259)..(259): n is a, c, g, or t
  misc_feature (262)..(262): n is a, c, g, or t
  misc_feature (265)..(265): n is a, c, g, or t
  misc_feature (280)..(280): n is a, c, g, or t
  misc_feature (290)..(290): n is a, c, g, or t
  misc_feature (299)..(299): n is a, c, g, or t
  misc_feature (319)..(319): n is a, c, g, or t
  misc_feature (323)..(323): n is a, c, g, or t
  misc_feature (354)..(354): n is a, c, g, or t
  misc_feature (372)..(372): n is a, c, g, or t
cgggaaactggtttaataaggacaattccagaggggcctggctgtggccaaagctgtgccaaacggttgggatccagagctaaaggcacttcttgccacgtgagaccatgggcgaggctccctcattaggccagacaccagtctgcggtgtcagggaggcccagccttgggccttgtcacacgtagtccagaatctctgtctccatttcgttttcactgccgtcggatggcttgaagtcctcctcctccttgntttttnctnctnctcatcctcctcgtnttccccagantcgtacgtnagctgctcttttccgccatnagcnttgggtaggctgggaaaagagagcaggcctnttgggagcgggatgggtntgccgggatcatgaggggacatgg

SEQ ID NO: 437068 - DNA, 1456 bp, Homo Sapiens
  misc_feature (1078)..(1101): n is a, c, g, or t
ggcttctttgccctaagaaaatccctgaggaagaaaaaagagaagagaagttggagcaatgaatgtagaataagggtctagaaagtcctccctggcagcttcttcaagagacttgcataaaagcagaggtttgggggctcagatgggacaagaagccgcctctggactatctccccagaccagcagcctgacttgacttttgagtcctagggatgctgctggctagagatgaggctttacctcagacaagaagagctggcaccaaaactagccatgctcccaccctctgcttccctcctcctcgtgatcctggttccatagccaacactggggcttttgtttggggtccttttatccccaggaatcaataatttttttgcctaggtgcctgactcctttcagattccctctttatcttccctcacagtttggaaaggatgagggttatcttcctcgattcttccaccctctcactttcctgcctgttccccactccacaggagggagctgacgttggcttgaaaggagtaaagtcaacatctgctgctttcctgtggactctggtgattcatagagccggatggggagagtcaacaggaaaaaaggagggaggaggaaaagccacaagagacattctgtacaattccaaggaacagagaagcctttagacaggcaactgccatcccccctgaaacctgagacctgtagtgcactcgaccgccctcaggtgttggtgaaacagagctgcccccaggctcgctgggcataggcttcctgattcccagccttttctgggagcaaagccaggggctgggtgcctgattttctgaagccaggagcccctcaggtggctggagctggaatagcagggaggactgggtgtacctaggcagtattttctctacttctctcaagtcttatactcactcttgagccctccttggggcctgcttagaaagcagacaggagagagagtactgctacttgatgatgggaaatgctttcactttaccagctttgggaagcagcagccccatgggatctaaaagtgtggagttacaaatgaaaacccataggnnnnnnnnnnnnnnnnnnnnnnnnaaaggagaaataagagcagcaagatcatccaagaatactacatgtgctgccagaataattcctttaaaagtcaaatccaggaagcacttctcttcccacaatggtatcccattctctcttcgtgctccactgatgggccagccacacaccctacataccttggcttctcctctaaaagtgctaataatctggggacatattctctttaaggataaaagcccctaccttctaggagattagacccctacttgttttcacacaatagtcctgaagactaaagaaaggcaattcctatatatttgagaccagaggtcttggctctattttcctttcagatagttaatagggatcttac

SEQ ID NO: 437069 - DNA, 1849 bp, Homo Sapiens
  misc_feature (258)..(281): n is a, c, g, or t
ggacacgttacgaagaaatatcacataggtaagagtaagaaaactgaacagcctgccacattaaaatgatggagaacaaagaaaatctggcccagtttttctagaaatctcctccttaaggtgtgagatgagagccccctagtggaattaagtcctatttctctctacatccttgctgcaatgaagtttacagcaggttcccttatagagagcccactctccttaagcagatggagttacaaatgaaaacccatagcnnnnnnnnnnnnnnnnnnnnnnnnaaaggagaaataagagcagcaagatcatccaagaatactacatgtgctgccagaataattcctttaaaagtcaaatccaggaagcacagatcaacatctcacaaaaactttagcagtgggaggcccctgaggaacttttcttctcttcccacaatggtatcccattctctcttcgtgctccactgatgggccagccacacaccctacataccttggcttctcctctaaaagtgctaataatctggggacatattctctttaaggataaaagcccctaccttctaggagattagacccctacttgttttcacacaatagtcctgaagactaaagaaaggcaattcctatatatttgagaccagaggtcttggctctattttcctttcagatagttaatagggatcttacactgagaccaaagtggcctgggagtgctatcctgatattttaacaaaacgggaggggagaggaccaagatggtacacatacaaattatttttacaaagtgaatggagaagctcattaggtacatctgtttgtttcaagatgtagacatttgccagccaaaggaagcacctatttccacactctccccctaccctccctaagtctctatcccaccaccaagagttctgctaaaaggatgaagcccaatgaaggaatacttgagaagtgatgtgatacaaggacatttatacaggttttggcatgccatcccaaatactaagtgcttttgtttacagctgtaacttgttctgaaactaaccatccccactttcttttccaaagattttggtttttgagcagtaaagaaattgttatccattaactgaaaaaataatcacagccaaacatcccttcccacatgactgtatcacagaatagtttcaaatgaacaaagtgtcttttcagacagttatctaccaactctccgatgtcttttctactcttgtgaggatggcttggttcatcgcttcacttgtcattcctcttctggtcctaaagctcatggtgaggttgtttgttttattttagggttaaaaatcactatacccactataaggagggtgtaccagggtgagaagagtgccatgcaggcacagctctaaaggaaggggctgcttcatcttccacatgtctaatgaagagagcccttttacccctttaacataggcaaatgtatagaaacagacccctgaaacttctgaatctgccatcctatagctttagcttgagagcccatttcccaaaaaagggaaaagaaatcccaatcaccctccataactcacaattagccgaatgaaagagtttttgtgaaatcagagtaatgaaaacaaagtcaaggaagtatgaaagggtattatcagcgagtgataacatatgtgaggacaaaggtcacatatacaggtctctgccactctcgggaatggcatgctacaactatctgaagacagggttcttgccagcacagctatttcctacacgtccggtgaggtgtttgcttcttctggatctcccaatctgcatcggctacgctcatccaaccagggtagctcaaaattctgctt

SEQ ID NO: 437070 - DNA, 412 bp, Homo Sapiens
tttttaaaaagtagatttattaaaaaacagttgaaggtctgagtgttgagaggcaaatggggtctctgggggatcctgtcctgcagcaggcctgactttcagatgactgtgcttataaggcagatcagtgccttcctggttgccttagttctttccatttcagacaccacatttggatcctggggcagctgctcaactctacccaactctaccatggctacctgggattggagaacatgtgagtattagctacttttacagtcaaatagggatcttgtagaagaaacaggtagacagacccaccagtctctcattctgacctagcaagctggtgaagtcactgtcggtcctagttcccttgtttgttgggctgcaggcccattccaacacagcccaactcccccccacccgc

SEQ ID NO: 437071 - DNA, 529 bp, Homo Sapiens
  misc_feature (454)..(455): n is a, c, g, or t
  misc_feature (457)..(458): n is a, c, g, or t
  misc_feature (466)..(466): n is a, c, g, or t
  misc_feature (473)..(473): n is a, c, g, or t
  misc_feature (491)..(491): n is a, c, g, or t
atataaaaagggttggtttattgtagttcaaatacataaactgaacattcaaacatcttaaaattaaactttagcaacaaagtttaacattcaaacaggagtatagtttacaagaaacacccagaaaggtaatttgttgtctaatccagaatattgataaagatcacttaatggtgaataaaatatgtttaaccagtggttctattctggccaacatgttagttatgaccgtggttccatacctgagaagaaattactacataaatcttctcttaggctaaacaacaagactcggtctataattcagaggggataatcaaagcacgtaagtgaacaaataaaactaatctgatctttagagacaaaggtaaaagtattgtccattataataattgtagcctctggaagataagaattcaattttcagtgttttctcttttacccgctttaaaannannaaatcaanacaaggnaaaccccaactcgggttntcttggagtctgtggtatttgcatctggcaagttcaag

SEQ ID NO: 437072 - DNA, 421 bp, Homo Sapiens
  misc_feature (201)..(201): n is a, c, g, or t
  misc_feature (401)..(401): n is a, c, g, or t
cacacatacaccacaccactcaacaagtgttcatgtgtccctgtgtccaggcaagaagctctcttcctgactcacatggtattttaaatggaagtgtcttgtcctaactaacaaggcaggaaaagaaccatcagagctggaaaatggacgaaatgtaacctcagagaaacaactacaggaccactcacccaagtgtaagtnactggggcaggacacctcagctgtgggtatgaaagtactgttctgttcacaaggttttgtttgagttttatgtttttcttttaaacatttctctggttcgatgggttgactgtctacagccactgttaaacatttctgaatatgcagagaaagtcaagtgacatttgtatcttcttcagcattcgcagaccttctatagnttccagcaaagggggaaatg

SEQ ID NO: 437073 - DNA, 2021 bp, Homo Sapiens
  misc_feature (1498)..(1498): n is a, c, g, or t
tttacagggccatgaaaagattgttttattccatgtaaatattctcaacagagaacactatctttaaatgaaggatttaccattaagaaatcaacatgtgcacaaaaagagtaaaaattaccaaaaaattaaagattttttgggacaattcacatgttcaaaatttaagaatgatttaaactgtgcaagtacaaatgtctttcctattataataacccatatacaggttgcactattccacatcaaggaacttgcctcctacggaagcaaatcctgcttttagaaaaacaaacagtagcttgaaaagaacagttagtccttacaagaaagtcttaaactttgccctctgtggctgttagccaaaaaaccataagcacttcaggctttgtacagaagacaaacacagccagatcacatttcctcctcattgctaacctttaaaataaaaatagcactagattttaaaactacttcatgtagtctgtcagtactgaataatgtcacattatataaataaccctgtaacgagattcaatatctaaactttatagtttactagctgcaaaggtaatacactatatgtcagctgtgtaacagtggtgacttgatcttatgaaggcagtaactttcacacaattgtcattcagctttagtataacgggtagtatgattcaaataacactgggaaaaagttattaaagcagtcacacagcttctaaaatattgcttaaaattcaataatacacaaaccatttcacgttctttctcccctcaaaacagtaaagaaccaaattaatgaagattcagtggtacaaataaccccccacctgccccatctccctattacaacaccactaagaaattagttaagatacatgtcattaacagaatcacaaatgcgaggcaggacaccatgagcaacaggagcactaacaacaatcatatttacaagtataaacatacagaaattccattttacaagtaaaagtgcacatagatcattacaaagtttcactaaattttatcaggttccaaacaaaagcatcacgtggaaagagactatcattgtaattatcaaacatgatcgtcataacccaaaataaaaagacaattgggggaggcccataaaacttctcataaaaccactgaggaaattaaaatggacttggacatgtctttagtttgatgcataaatttgaagatgcaccactgtatatggtagagctctaatagccacctaccgaggctacatcggccacggcagcggtgctgcagagttaaagcaggtcgcactgagctgacacataaagccctttgtgggatactgtagtggtagtgttggcaatcaacagatttaggcactcaagtttaaggcagcatttgaatggaagcagctgacttttgacaatagtcctttgtcttgaggtggtgaatatcttctgtgtttattatgccaggatttcagtgctgactagattcttcccagactgaggtgctnaagatgtatcacgtttcaaagagttctttcaactgggctgtaggctacagcagagatgttttctttttcttatcataaatacttcaggttcacagctacttcttcgtaatgccaaaactggaatgtttgcagtggggaagttatagcagtgtgcacaaatactaagatggaaacattagtgctggagatgtttgacaaagtgatttgcactacaaatgtaaaacaaaacaaggctttgacaagaacaagggaatctaaagacatgcctgaaaaatctagctcaatcacgctagacatgcaacaggatgttaagcaagcacggaggtggcgcaggcagacactgacagatggcaaggatctgacagatagtgggtctaaaagccaattaaaacagagctgggagggaagacaatcctgttgggacagctaatgtaagacacattttttgacagctctgcattctttattgattaggcagcaataaaataaatagaaaaatggtacactattgttggctttttcc

SEQ ID NO: 437074 - DNA, 960 bp, Homo Sapiens
gggggattttgattacaaatgtgtccatggaaaaggtcctactgagcagcttgtctcaccagagcctgaagtccatgatattgaaagatctgaagaagatgatcagttcattatccttgcatgtgatggtatctgggatgttatgggaaatgaagagctctgtgattttgtaagatccagacttgaagtcactgatgaccttgagaaagtttgcaatgaagtagtcgacacctgtttgtataagggaagtcgagacaacatgagtgtgattttgatctgttttccaaatgcacccaaagtatcgccagaagcagtgaagaaggaggcagagttggacaagtacctggaatgcagagtagaaggtggatcatttaacaaaaaataagtagctttattaaagaaaaatcttcaacacaatcaaactttaacattttagcttttagatttttatgtgtctttgacagctagtgtctagtgtatgaaagtggaaaaggacatttctgtagtagctgttaagatgtatgcagttgtcctatcacagttatattagaaataacaactagtgtggaaagtaacccacattctgttcaggatacttttgttttacaaggctaaaatgtttgtgtgctttaaaattcttaatgaattcactggcatgagtaattttatgccggggaaaatcctgatttgtggtctatttaatttacaaagagattgtgatggtgaatattttgaatacccatctttctatggaaaagctgtgtatatttaattttaatctctacggccttttttcaataacttgaaaatcacagcctcatcattagcaactttatatacaccgctttaaaaaatttgcttttaactgtttcagagcttctttccctaagccctaaactgtctccccctaacaagatagaccctcataaaagacctactatttcctccccctgggcagaa

SEQ ID NO: 437075 - DNA, 1176 bp, Homo Sapiens
  misc_feature (792)..(808): n is a, c, g, or t
gggaatgcaggtggctctgtaatgattcagcgtgtgaatggctctctggctgtatcgagggcccttggggattttgattacaaatgtgtccatggaaaaggtcctactgagcagcttgtctcaccagagcctgaagtccatgatattgaaagatctgaagaagatgatcagttcattatccttgcatgtgatggtatctgggatgttatgggaaatgaagagctctgtgattttgtaagatccagacttgaagtcactgatgaccttgagaaagtttgcaatgaagtagtcgacacctgtttgtataagggaagtcgagacaacatgagtgtgattttgatctgttttccaaatgcacccaaagtatcgccagaagcagtgaagaaggaggcagagttggacaagtacctggaatgcagagtagaagaaatcataaagaagcagggggaaggcgtccccgacttagtccatgtgatgcgcacattagcgagtgagaacatccccagcctcccaccagggggtgaattggcaagcaagaggaatgttattgaagccgtttacaatagactgaatccttacaaaaatgacgacactgactctacatcaacagatgatatgtggtaaaactgctcatctagccatggagtttaccttcacctccaaaggagagtacagctcaactttgttgaaacttttaacatccatcctcaactttaaggaaggggatatgacatgggtgagaatgattacatcagagaacttcagcagtacaacagctagcccagaactgannnnnnnnnnnnnnnnngtaaatttgagacttatgtaagcgtgatttcaaaccataattcgtgttgtaaatcagactccagcaatttttgttgtatgattttgtttttttgtaaagtgtaattgtccttgtacaaaatgctcatatttaattatgaactgctttaaatcactatcaaagttacaagaaatgttttggcttattgtgtgatgcaacagatatatagccctttccagtccatggtgtgttttgggaacttggggtttgggaacagggaagaagcagcaagccatggtcaggctacacgcctcaaaatgtggcagaatgaattatgggaaaaataaccctcaaaaatttttaccaaagctgtaaccattcccagagga

SEQ ID NO: 437076 - DNA, 693 bp, Homo Sapiens
ttttttttggtcattaacacagtttattattggcacacttatcagtaaagcatacataaaatacagctgttttttaacacacggagccactgtgcctttacatgtgtggaggaacatattaatatgcaaatggaaaaattaattctcttataaagtttcacataaatacactggagttgcccaaaaacgaaaagtccccataaaagaaccaggtgagagctttacaaaatatcatacaagaaatatactataaaaagaaaggatggtcaactcaggtacaattagaaaacacacaaaggttcaggtttattaaactgcccacaaaaccaatggattacatggcttgaaaatatttggatcaacagcaactttacaaatgcataaattcttaagggtccaattgtctttctttacttaaaaatctgccctggtgtctttgatgaaaaaaatgacatttcttgtttcagcacttgggctaaattgagtcgactcaagacaagaaccaattgacatcagctcaaccataaattaccttgctgggccctcttagctgttgcccaatgaacagaaagacataaagaataaaagaaaagtacaggtacatttacacattactttccaaacgctgactttaatggtcgtttaagctttgattcagctgtaaccaagcaaacatctcagaatgcaaagtca

SEQ ID NO: 437077 - DNA, 698 bp, Homo Sapiens
  misc_feature (601)..(601): n is a, c, g, or t
agcagttttgcatcaacatttttattgaaatacaaaaagtgcaaacggtgaaatacatgattggtgccaaggaagtcattaagtgtgaatgtgaacactggattcacacagtacaagcacccgctccctggggtacagaccagtgggggacatgagaaagaccaaatagatccgaaaggctccccagtgaatggggctgtgagcgacacttgatacacaaaggagggcggagagcagagcagccctggccgaggctagagaccaagggactgatgaagaaccagcagcagcccaggccccagggggctggatgcactgctgatggtcttgggagagcccagcgaagttatgcccaggcccagcctggcttgcggatggggctgggctggtcagtgaggatccccacagtacgggctctggaatcatcctgcctggccaaggtcatgggggcagggtcactgcaggtacttccctgtactccccaaggacaaggctgcaggaagagggatccccaggaaggagtgtaattctacgagacagtgggagtgagatcagccatcactggggccgaggttctttgaaagacaacatggctagtcanggcgcagaggctcactgcctggaatcctcacacttattgatgccaatgtgggttgatcatgatgtcatgagatcgataccatctggccgactggtga

SEQ ID NO: 437078 - DNA, 513 bp, Homo Sapiens
  misc_feature (26)..(26): n is a, c, g, or t
  misc_feature (48)..(49): n is a, c, g, or t
  misc_feature (62)..(62): n is a, c, g, or t
  misc_feature (83)..(83): n is a, c, g, or t
  misc_feature (327)..(327): n is a, c, g, or t
  misc_feature (380)..(380): n is a, c, g, or t
  misc_feature (388)..(388): n is a, c, g, or t
  misc_feature (423)..(423): n is a, c, g, or t
  misc_feature (428)..(428): n is a, c, g, or t
agagactgaggaagctaagtgaatgntcatgttcactgctgtaaattnnccttataattggnaaaaaggctacccataatagnattcacattttcaatgaatttatagtttatcatcaaatagagtaaatgaattaagatttcatttttaaaaataaagagacatatttatttgtaataactctctttttttggtaataactatctttaacaatgctattatttatttttacccatggggaatgcataagtacaaacattgttagcttatttaacatttattaaaaatacagactctttatactaatgcagaaggataagcctcttncttcccactctaaaaatctcttcctttgctgtaaagaattctcagtgcatgtnagctaagnctctggagcactcagtagagaggtgtgtgggatgnccagncagaatcactaggttttctctgttttcaactagctgaaaataggacctctagttctaaatattaaagtctaaatattagaaaata

SEQ ID NO: 437079 - DNA, 603 bp, Homo Sapiens
  misc_feature (161)..(200): n is a, c, g, or t
tccatgttaagaatattttatttgttttttgagattacatagtcattattgctgatctaatacaatcacttagacataaagatttccaagaacttctcagaaatggtgatctttagaagtgttattcctttcagtaagatgacagaactagatgattacgnnnnnnnnnnnnnnnnnnnnnnnnnnnnnnnnnnnnnnnngagtttagaacctgtccacatataatttgctggtgttgcctattttccttccgtaattttcctttattgaaaaagcttaatgcaacaatgcattttgattcctttttaaaaaccacggcaaagttaattttgagaaaaccacaggagcagcaatatcagatctgtttagagaaaagcgaagcagcataaaagctttgcaggagtatgtggccatggggagccgtgctcatatgggcaagtaggatagggagggaggagagcagagggaaggtagagtagatacatttttttctttgtttaaatgaaaaaaagaaaactgaatatctccattaagaaggcaaaaaagtgccaggcacggtagcacacacctgtggttccagctactctgaaagtgggtccgagt

SEQ ID NO: 437080 - DNA, 873 bp, Homo Sapiens
aagggaaaacattaattttattagaacttgaacaaatgtttcacaaagaaaacattttaacaaaatggtatggtggcataacaataacaaaaaagagaacagcaaaatgtgtaaaagaaatataaggtggaaaaattgttaagtatctcataatccagtgtggaaataagaagtctaaatttaaaaacaatgaattttaaaaagcataactataaaacaaaagttaatgcttgtgctatcctaaccacagacacattcttcagcaaaactttaaaaggcagagttacattttatggtatttaatatctcttttctgttgttttttccacagaaatagagactgtttattcaatctcacagttgaaaaagaaattttaagcactgagaaataagtattctactatttaaaatgactggtgaggcaaaacaattgattagtctttaatgctctgtttttcaactgtactaaggacttcatccaaccaaaacaaatcttaagcttcagaactctctaatgcttaaggaacgcctctgcctgattgccatataagggaatcaagaacctagtaatcgtggagtactctcagggacaaatgtaggaagagaggacacaacagagttttcacaattttaacaagtaatctgtcaccatttcagactaccaaatgctaatttacttaagacaaattatttaagtatatattcccacctttgcaatttatttctaaatactgatatattcattttttaagcagaccacatcaggttaataatggtataaatcaatttgaaaactataataaactacttcaagaataggtatatttttccattataccttgatcattatgtaaagatgcaattcttactttc

SEQ ID NO: 437081 - DNA, 585 bp, Homo Sapiens
catattttaaaataagctttatttagattttttttaatattttatatttgcatccatgccttcgagaaacctttcccacgggaaaggttattttcgtctaatgttacccataactcattcgctatttgacgtagttctcttaaataaatcatcctttagtaactcttagaattatctcctaatttacaaaaactgaaatgaaaaggaactactaaatcattagcaggagtggttgcaatcttattttcttgtaagtaaagggaaaatgataaaaatcaaccagaaaagaaattcatgggcaagaaaagtattttctaaaatctgtctccgtagagaaagatgccagcttgggtcgctccccgtcacccctaggctcggttaaacagtttggtcaaaggaggacagaaaagtccttatgagggcctctgcctgcttgctgtttgctgacttttggaccaggtcagaaggaaagtgttgtttgttcttgagactttggacacaatgtcctatgccttctgatagagatactctagcatttgaaaatctccttgcttctttttaagagctgaaaatgtccctcgtgcc

SEQ ID NO: 437082 - DNA, 1132 bp, Homo Sapiens
  misc_feature (994)..(1032): n is a, c, g, or t
ggtaggagaaagatgccagcttgggtcggcttccccgtcaaccttagggctgggttaaaacagttggttcaaaggaggaccagaaaaagtctttatgagggcctctgcctgcttgctgtttgctgactttgggaccaggtcagaaggaaagtgttgtttgttcttgagactttggacacaatgtcctatgccttctgatagagatactctagcatttgaaaatctccttgcttctttttaagagctgaaaatgtcaccgttagcagaaagcacgactactgttgtctagaggtgtgggttgagctgttagttgttaaggacgagcagaagcaaaagaataaggaaattgagttttaggccttgggcagaccttgctgaacagctcacacatcctccgtcccctggcattaaaatacacacagttcctttgctggtgaagcctctttggggccaacgccaccccccatataggcagatgttcctgccagctcttgtctcctggggtgggtaggctcaggctgctgtgacaagttgggggacggagtccaagggatcctgggagattctaagtgtggctgatggaaccaaccagaatggggagggtggagggctcaggtgctggactctgtgtccccactgtggccctccttttgaagtgggtgcctcccctaacaacacctgcctggcccacctgcatcctaaacccaggacaagaaagacacagctgcagggaggaacagaagctgctggaggcccctcggagaacagactcaggccagggtcccactggtcgtacccttggatgtgtggcaggctgtcttgccctgaactcaacctctctcaaaagacagacccaaagaaggggaccatgactgtcagcactctgctcactaaagtcgtgttctgtatgtcagataaataaatatatagagaaaggcctggagggagctctgggtgggaagaagttggaggatccttttcatgcatgggcagnnnnnnnnnnnnnnnnnnnnnnnnnnnnnnnnnnnnnnncaacagaaaaagcaagctttgaaatccaatggtccctgggttctggccaccctaaactactttgcacagttgggtagcagcatggtaacagaacagacaa

SEQ ID NO: 437083 - DNA, 294 bp, Homo Sapiens
ccgctctccacccacccctaggctcggttaaacagtttggtcaaaggaggacagaaaagtccttatgagggcctctgcctgcttgctgtttgctgacttttggaccaggtcagaaggaaagtgttgtttgttcttgagactttggacacaatgtcctatgccttctgatagagatactctagcatttgaaaatctccttgcttctttttaagagctgaataatgtcaccgttatcagaaagcacgactactgctgtctagaggtgtgggtgagacgtaagatccgctagatgcc

SEQ ID NO: 437084 - DNA, 124 bp, Homo Sapiens
  misc_feature (54)..(54): n is a, c, g, or t
  misc_feature (87)..(87): n is a, c, g, or t
  misc_feature (93)..(93): n is a, c, g, or t
ggccctttgactttgtgaatgagcacaatgaaatgccgcctactgatgcttctnatgatcagaactcttttttaataaaatacatanacatanactcgttgaacataatgttccagttgaatgc

SEQ ID NO: 437085 - DNA, 927 bp, Homo Sapiens
  misc_feature (25)..(25): n is a, c, g, or t
  misc_feature (119)..(119): n is a, c, g, or t
  misc_feature (179)..(242): n is a, c, g, or t
cacttagaaaaattcccttaaaatnaggggtttaaacatgacagatcaaatgtcagatcggaaaaaatttcagaggaaaatgtaaatcggggaaggctctaattaaaaccagaagcagnaggtacttctgtgatgtgatggaggcaggagaaacccgctgggctggattcagaggggannnnnnnnnnnnnnnnnnnnnnnnnnnnnnnnnnnnnnnnnnnnnnnnnnnnnnnnnnnnnnnnaagatgtgtggggatcaagacgggaaggtgagtatgtgagtatgtgtgccagacaatggtgtttccatgtcaatggaggtttctcagagagaggtgatctggctggagaaagcttaatctggtggcaatggacaggtgactttaagaagtggggaacgagggaaggaggccagtttgaaaatgataacaagggtccagactcagtgatgcagcagtgaccatgagaacagagcagctgcaggtagaagatggagacagaactggggagatctggtggaggtaagccgggtggaaagatgatgtcaggtttatacctagagacacatgatccattcacaaagccagggaaacctaaagagaaaacacttagaatttgaggagaagaggctagggctggcctccaggtggaggggtccagcaggcaggtacaagccggatgagagttcagggcagagggcagagccggaaacagaccaaaagctgccatggagtggcgagggtggaagcagcggcacaggccgagggccatctcgccggggaagggtgggtacagcacaaccctgtggccacgttttcctcacacaggaaattcccacagaacacccaggagggtgacgatgcctcccatgaacaatgccgtgtgtctctgttgtccttttcccgggaatccggaccggtccagcct

SEQ ID NO: 437086 - DNA, 1569 bp, Homo Sapiens
  misc_feature (478)..(535): n is a, c, g, or t
  misc_feature (967)..(967): n is a, c, g, or t
ggatacatgcctcatccttacccagcacttaaatatttattttaaaaatcccacatcattttgcctttaaaaatgtttattcagcgcctgcaatgtagaaggcactgtgtttggcaccatgaggaatacagaaaccaacaaggcatgattcttgccttaggaagctcacagtctagcgtgggaaattagaaattgcacatgcacacaggtaactgtcacaccaggcaggaagcactaaatgctgtgagattgataccaacattataagaacccagaggaagaaaacactatttggggatgaggataagagattagagaagttcccttagaagtagggggtttaaacatgacagatcaaatgtagataggaaaaaattcagaggaaaatgtaatcggggaaggctctaattaaaaccagaagcaggaggtacttctgtgatgtgatggaggcaggagaagccccgctgggctgattcannnnnnnnnnnnnnnnnnnnnnnnnnnnnnnnnnnnnnnnnnnnnnnnnnnnnnnnnnaggggaggctggaaagatgtgtggggatcaagacgggaaggtgagtatgtgagtatgtgtgccagacaatggtgtttccatgtcaatggaggtttctcagagagaggtgatctggctggagaaagcttaatctggtggcaatggacaggtgactttaagaagtggggaacgagggaaggaggccagtttgaaaatgataacaagggtccagactcagtgatgcagcagtgaccatgagaacagagcagctgcaggtagaagatggagacagaactggggagatctggtggaggtaagccgggtggaaagatgatgtcaggtttatacctagagacacatgatccattcacaaagccagggaaacctaaagagaaaacacttagaatttgaggagaagaggctagggctgggcctgagacatgggctggcctnccaggtggaggggtccagcaggcaggtacaagccggatgagagttcagggcagagggcagagccggaaacagaccaaaagctgcccatggagtggcgagggtggaagcagcggcaacagccgagggccatctcgcccggggaagggtgggtacagcacaaccctgtggccacgttttcctcacacaggaaattcccacagaacacccaggagggtgacgatgcctcccatgaacaatgccgtgtgtctctgtttgtcctttgtccccgatttcacacctaagaaacaatgtcttcagctgtgtgatgacaagtaggaacgctgcctccattgtggaggatcatcttgaaaagacttactccaatgagagtttttaaaagttttcactactatttattttgaagagttttctgtaatggaactatttcttctgaagatttcagaaaagcttttgatgtctgttacctcaccatgtctaagaggtggaaggaactgagagtcatcttcccgctcctttcacaagtgaggaagccaaggcccagacgggccaagggtcttgcccagcatcacccagcagggatggctcagctgtacctcagccgt

SEQ ID NO: 437087 - DNA, 391 bp, Homo Sapiens
  misc_feature (44)..(44): n is a, c, g, or t
  misc_feature (101)..(101): n is a, c, g, or t
  misc_feature (106)..(106): n is a, c, g, or t
  misc_feature (299)..(299): n is a, c, g, or t
  misc_feature (308)..(308): n is a, c, g, or t
  misc_feature (339)..(339): n is a, c, g, or t
aattccggggaaaggctctcattaaaacccagaaagcaagcagntacttctgtgatgtgatggaggcagaaagcaaaccccgctgggctggattccagagnggagnggagacaagaggatggggaggtggaggagggagcagggagtggagtgggaggggaggctggaaagatgtgtggggatcaagacgggaaggtgagtatgtgagtatgtgtgccagacaatggtgtttccatgtcaatggaggtttctcagagagaggtgatctggctggagaaagcataatctggtggcaatgnacaggtgantttaagaagtggggaacgagggaaggaggcnagtttgaaaatgataacaagggtccagactcagtgatgcagcagtgaccatg

SEQ ID NO: 437088 - DNA, 1330 bp, Homo Sapiens
  misc_feature (5)..(6): n is a, c, g, or t
  misc_feature (23)..(23): n is a, c, g, or t
  misc_feature (26)..(26): n is a, c, g, or t
  misc_feature (28)..(28): n is a, c, g, or t
  misc_feature (30)..(30): n is a, c, g, or t
  misc_feature (41)..(41): n is a, c, g, or t
  misc_feature (46)..(46): n is a, c, g, or t
  misc_feature (54)..(55): n is a, c, g, or t
  misc_feature (57)..(57): n is a, c, g, or t
  misc_feature (62)..(62): n is a, c, g, or t
  misc_feature (84)..(85): n is a, c, g, or t
  misc_feature (87)..(87): n is a, c, g, or t
  misc_feature (102)..(102): n is a, c, g, or t
  misc_feature (104)..(104): n is a, c, g, or t
  misc_feature (108)..(108): n is a, c, g, or t
  misc_feature (114)..(114): n is a, c, g, or t
  misc_feature (135)..(135): n is a, c, g, or t
  misc_feature (150)..(150): n is a, c, g, or t
  misc_feature (166)..(166): n is a, c, g, or t
  misc_feature (190)..(190): n is a, c, g, or t
  misc_feature (196)..(198): n is a, c, g, or t
  misc_feature (207)..(207): n is a, c, g, or t
  misc_feature (223)..(223): n is a, c, g, or t
tttannaaactgattagcaattnccncncntattatatgangaaangtacaaanntnctttnccccctcacccataaaatacanncncacatttcctttaangntagnattttncttcagtattcatctaaagangtttaaataaaaggngataagaataattgcntttccctccacgtacatctatttngggaannnaaatttaangcaaaacctgaaaganaataaaaacggaagccattatttagtggtgactatatactagacaagaggcacaaattcccagatgaattttaattttgtttcctctcagacaagccattcagaaataaaagggaaatgaggttcatttaagtacacaatttgtaaatgtggaaacagtagtaattgtcatgattattttatattctctcttaacagtggctctaaaaacagcccaatgattcacacaactagcaaagcaaaccaaactctataaatgtatgagaaattaagttgctagcactgaaacactgggtttggatatggacaaggatgttgtctctgacttgtatctttttgggtaccttggtttttgatattttgatgttcaagcagaaagcgcgtgactttgttttatgcaataaggtgatgtaagtgtagaaaatgtgtaggggatgaaggaaattccaagttacatgtgtatacataaatggctttataaaatacatatatatagccattaagatagttacatagggacaatgcaatttaaaacatttatactcctgcttacagattgccaagtctaatcatcccttaagtctttttcaataatgacataatttatttgcttaaaggtaaaaacctcctgattgtattaaggacattaatatactacactgtattaaggatactataccaacatcaatctaggaggtaaaataaacgtttggcaaatattgaagtcagatggaatagattcaactctataaagttttgttttagattttataataaaattttgcttctgcctacgatcatgtttacttcagcatgagtgctacactaactagaatttaataagtgttatttttattgaggttttcaaatttggaaggattttgatccaaaatatatacctatgcccttaaaaaacaaagtgaagaattatgagggttggtctttgagggccaattggggacttggcaatgcattggtgttgcccaaggttggcacggtagtgcctgataactgggtagggaattgttgcagatatttggtggcccactccttgggggaaggaaccttaattcgtcaaagttgtttgtagaaaaagcgtggggtaaat

SEQ ID NO: 437089 - DNA, 1647 bp, Homo Sapiens
  misc_feature (1558)..(1558): n is a, c, g, or t
ggggacttccggttgtcagaatttacccctgacgcggcggcggccgacgggaagctgtgtgtgcttaggtcgtggtggccccggtggtggtgggctccgggcgggctcgcgtcatcctgcccccgctgcgatgcatccgcggcgcccggacggatttgatggcttgggctaccggggtggtgcccgggacgagcagggctttggcggcgccttccctgcaaggtccttcagcaccgggtcggacctgggccactgggtgacgactcccccagatatccccggcagccgcaacctgcactggggcgagaagagcccgccctacggcgtgcccaccacctccaccccgtacgaaggccccacggaggaacccttttccagtggcggcggcggcagtgtgcaggggcagagcagtgaacagctgaatagatttgctggatttggtattggacttgcaagtctctttacagaaaatgtattggcacatccttgcattgttctacgccgccaatgtcaggttaattaccatgctcagcattaccatctcactccatttacagtcatcaatattatgtacagtttcaacaaaactcagggacctagagccctgtggaaaggaatgggaagtacatttattgtccaggagtcacacttggagcagaaggcataattagtgaatttacacctttgccaagggaggttttacataaatggagtcctaaacaaataggagaacaccttctactgaaatccctaacttacgtggtggcaatgcctttttattcagcaagtctgattgaaacagtgcagagtgagataattcgagataatactggcattttggagtgtgttaaagaaggaattggaagagtgataggcatgggagtgcctcatagcaaacgacttcttccgcttctttccttgatcttccctacggtgcttcatggagttcttcattacatcatcagctcagttattcagaagtttgtcctactaattctaaagagaaagacttacaatagccacctagctgagagcactagccctgtgcagagtatgttggatgcttattttccagaactgattgctaactttgctgccagtctttgttctgacgttatactttacccattggaaacagttttgcaccgccttcacattcaaggaacacgcacaataattgacaatacagaccttggctatgaagtgcttccaattaatacacaatatgagggaatgagagactgtatcaataccataaggcaggaggaaggagtgtttggtttttataaagggtttggtgctgttataatacagtacacactgcatgcagctgttttacagattaccaaaattatttactctacacttcttcaaaataacatttgagatttaggttccttcactgagtagtctggaagatataatctggataatttgctatgaagttatgagggatacaagtgaaatactgcggaaagaaatggattggaaagtaaaattggtactaaagcccatactgattatcttgactttgttttttaggcatagggatatattnttgatcaaaatccttccaaatttgaaactcaataaaataacccttattaaatttggttgggtagccccatgctgaagtaaacagaacgg

SEQ ID NO: 437090 - DNA, 761 bp, Homo Sapiens
gggagtatgaggtagaagtggtgttgtacttgtgattgggaaggggtggcggaggatgagccaggggataccgaggggtggagggaggccagggactctggcagcggctgcataggctgggcggcttgttctgggggactgagggtgaggctatggacctcagctggcaagctacttgcaagcccgttctgggcagaagctcctaaagggaaaggaggcaaggcagcagccttcagttggaatgaaggcgagatggtgtggaaggtgctcagaaggtctccggtctgcaagctctctttcatcagctcctgtgagtgggtcttcttggtatgccgggtgaggtgaaccttgcgcccaaatctctgggcacagaactggcacaggaagtccttgcatcctgtgtggaccaccaggtggcgtcgcacatccttccgggtgtagaagcatctttcacagtggtcgcactggtgcttcttttccttggttccgctagggggcttctcttccgcatgggctttgaggtggtccagtagcacctcggtgctccctagctccagggcacagaccccacaggtgaggtccccactgctggccgcatggagggccaggtgcctcttatagcccagcatggtgttgtacttcttcccacactcctcacacccaaaggccattttgttggggtcgtgggtctggaggtggtttttcaggtggtctttccggttgaacgtcttctcacagtgagcacactggtgagatttctg

SEQ ID NO: 437091 - DNA, 583 bp, Homo Sapiens
  misc_feature (68)..(84): n is a, c, g, or t
  misc_feature (110)..(136): n is a, c, g, or t
ccccccccacacggtggggagtttctattggcccgggggatttgggaacccaagagccgtggttgggnnnnnnnnnnnnnnnnngggccaaacccccaaacttttccccnnnnnnnnnnnnnnnnnnnnnnnnnnngattgaacagctctttttcatttttgttttgttcattttatacatgacacaaattgtttatcttgctctcattgggagtttctgttgattccctctttcaatgatcatcaaaagtcatcacccctgacttaaatggttttatgaaattcaagaagttgtgaacaaggctttaacaaaatatttccacttttaatgcctatgctctgattttatataaattttgtatgtaggacatgatgttgaagtaaaaccaataaatagccactcagtattcatctctagcgtcaactgaatcctgacctcaatcttcaaaagaatcagaatagtttcacacttcataagttacatatactccaggaataaataaaagcagtttgcttggaggtattatcttgggctcatttgtgctgctataacaaaacacacttgagactgggttatttataa

SEQ ID NO: 437092 - DNA, 1372 bp, Homo Sapiens
  misc_feature (1266)..(1302): n is a, c, g, or t
tgtgtatttcattggggatgtgttcagtttccagtgctccttcaattcttgacctttgttgaatcctgaattcgtgtcttcttcaagttgctgggtgagttttgcattttcgtctaaagctttcaaaagctgctgatcagggatggagctctgcagcagaaggtggctttgtctctttagcttgttttgctcaatgaacatctcttgtgcaaatgactctgctttctttcgaaggtccttctccagctccaggtttacttgcatctcctcatactcttctacagctaacatggacactctattgcatttttctaagacttttctctgttcaagaacttctgaatttaaaacagtcttttcttgtttaactttatttacttcttcaattacttctacgagtttgctcttgagattttccagctcaatggctaaaatcttcttttcctcctgaacagatacaatttgatctcgaagttctttaatttgcttctgacactgtactgagacacaagtctcggcggcaccgtctgtgtctgtagtcgaatcttcatcatcaatgtttatctcttcagttattacatctggtcccagcttggccatgtacaacatgctgattcttttcaacgttttattttctttatttagctttgttgccaaagcttcagcactttctcgacaagtcttctctatttcaagatggttctgcatgaaattaacttcctctatgaccatgtgagaaattttctgaaattcttccagttttttaacggcttcatctcgttcttgcctaattttgtcacacttctcctttgttttctggttctctgctctaaggtcttcatattcgcctattgcttgctccttcagactggtaatgagctgcagctgcttctcttcgtccgagctgttcattttggcgggtggggccgggaataaaagggaaagagggagcggcgcggggcacacaggaggagggggaagaaaaagcaagatgccggtggcttgcggctccactacccggaagttggatccgctcccgctcctcctcctcctggcgcggagcgcgcgagtgagatcatccccacgcacctactcggcggctgcggccgcttcacctgcaggcggggcggggcgggcccagcagtcccgtgcaggtggtggaggaacgagggctggtcggcagccgctatgccagcctgtggctgccggcgcggcaggacccgctccgctctcgacgaattcgagctcggccgatttggcctgatnnnnnnnnnnnnnnnnnnnnnnnnnnnnnnnnnnnnncgccgccaccgccggttgaacagcctcccgaggtttcgccccctataagtgagttcgtatacatttcccc

SEQ ID NO: 437093 - DNA, 439 bp, Homo Sapiens
  misc_feature (358)..(359): n is a, c, g, or t
  misc_feature (365)..(365): n is a, c, g, or t
  misc_feature (369)..(369): n is a, c, g, or t
  misc_feature (379)..(380): n is a, c, g, or t
  misc_feature (384)..(386): n is a, c, g, or t
aatcttaaaacttactcagctggttgcaaataaagggagttttcatatcaccaatttgtagcaaaattgaattttttcataaactagaatgttagacacattttggtcttaatccatgtacacttttttatttctgtatttttccacttcactgtaaaaatagtatgtgtacataatgttttattggcatagtctatggagaagtgcagaaacttcagaacatgtgtatgtattatttggactatggattcaggttttttgcatgtttatatctttcgttatggataaagtatttacaaaacagtgacatttgattcaattgttgagctgtagttagaatactcaatttttaattttnntaattntctnatttctcatnntctnnntggtttggggagggagaaagttcttagcacaaatgttttacatattttgtacc

SEQ ID NO: 437094 - DNA, 1189 bp, Homo Sapiens
  misc_feature (15)..(15): n is a, c, g, or t
tactttccacagggnaggcccagcgctgtttctggttttagcttggatgcagggtgtcagacatggcaggtactacggtctacctggcgggtatcaaagagttggtcgacgttctcacaaaaacctaatagggaccaaccatggaaggccagtagtaaaggagtttgaagttccctttcagaaaccaattaacaaccccaaagagacagtgggtaacataaaagagcagccataaaaatatacagttttaatagaaatattaaaataatcattacacttcctctcattgcagaaaccatgaaagaatatgccttttgtaatcaaagtaattttttatcatgcaaaaaagtattttgttatgacattcgtaagtggagactgtatttcaaaacaagtttatacagacttcaaaaggtctaaagtcaaagtgaaatatatttaaatatgattagttacatctaatgcagctggcatactcatattcacagtttataaagtaaaaaaactaaactcttcatgtcggctctgaaatagatgcattttcattcatacattcgctagttaggtctgttcttctaagacaggaggaaagatgagatatatgagctattttttaaagaacaaactcaacatatcagcagcaaatttcagttaaactgaattggaaaccaatgttctgtgtaaccaaagtgcaaagtcagttctccagctcagaaagaaaaattaagagtataaactgaaggcttaagagaacttcagagagcacactgtgtgattaatacataaatattaaaaattatccaatttttgatttaagaacaacacagtttggatctagtcattaaaacatatgcagaggtgtcaaaggcaagtaacactaccacctaaggttattcggaggaactgtgaagatgtagcacggacctctaaggtgtctaaaatcccttctgatggaaaggttatggaacactatctgccaaaaacactgaaagcaccacttttatatttagatccaatgctgagtgatatagtcactgttgggataggtttttatttgggaaaatggagaggattctcaaaacagattcatggcttgcatgcagtgacaccctatcaagagcctggaaagacaccatgaaatcacctcaagtggtgggcccacctactcatagtcagtgttacactagcc

SEQ ID NO: 437095 - DNA, 834 bp, Homo Sapiens
  misc_feature (807)..(807): n is a, c, g, or t
ggaagcttttaaatattgcttcgatggtctgaatttttatttccagggaaaaagagagttttgtcccacagtcagcaggccactagtttattaacttccagtcaccttgatttttgctaaaatgaagactctgcagtctacacttctcctgttactgcttgtgcctctgataaagccagcaccaccaacccagcaggactcacgcattatctatgattatggaacagataattttgaagaatccatatttagccaagattatgaggataaatacctggatggaaaaaatattaaggaaaaagaaactgtgataatacccaatgagaaaagtcttcaattacaaaaagatgaggcaataacaccattacctcccaagaaagaaaatgatgaaatgcccacgtgtctgctgtgtgtttgtttaagtggctctgtatactgtgaagaagttgacattgatgctgtaccacccttaccaaaggaatcagcctatctttacgcacgattcaacaaaattaaaaagctgactgccaaagattttgcagacatacctaacttaagaagactcgattttacaggaaatttgatagaagatatagaagatggtactttttcaaaactttctctgttagaagaactttcacttggctgaaaatcaactactaaaacttccagttcttcctcccaagctcacttttatttaaatgcaaaatacaacaaaatcaagagtagggggatcaaagccaatgcattccaaaaaaactggataacctcaccctccctcctacttggggccataatgccctgggnaatccggtgccccttaaattttcccag

SEQ ID NO: 437096 - DNA, 461 bp, Homo Sapiens
tttttgcaaactgaagttttatttagaatgaaaaaatagacaacaaattacagattttaaagagctaaaaaattccacagatgtcacggagtccaggggaataacagcctggttggaggggcgctctccgcctcttctgtatttttggctctctctgagggtagtggttttaccagcatgctttatcaaaaactaaactatcagggagagtctacaaaaactcctgctagagtaaggtcagattccagaccctgtcgcacctctgaagaccttggtccagttccttccagggtggcttcacgccttgccatccctgcctccctgcggctgcccctgtgcccaggccccgccaacgccgtcaaggccccctcggccacgccgcgtccccgcccagcatctcggatgccattccttcccggtggcacctgcccaggctttgccgaaatcgaaggcaacaagag

SEQ ID NO: 437097 - DNA, 429 bp, Homo Sapiens
aaacatccatattcagtttatttttaaacagaggggcacgtacccacagagaagcaggactgagaaccatcatgggggcttgcttgaagtgatctgccccagccttctgacttcagagtgtctcatgatccaatggccatggggacggagctgccccttgataggatgcacttaagcatggtcaattcccccttcccccaaaggaaatggagaaaaggagccaagaagtcaatgaatccctgggaatattgtcccagaatccttccagggatggtatacgactgggccaccagtccacaaatgtgactggtaagggatctagtaacagaggatgggagttggggcagaatattatcctgggattgatatggcacccaggcacttaggaattacaccttttcatttaggtttgaaggagaacagacaaag

SEQ ID NO: 437098 - DNA, 2495 bp, Homo Sapiens
ttatctcatgacagaggtgggccattacccaccattattgttaaataactgtaactaaccaaaacacatacaggcttctttaatggagttaataaaactatggcacattgggaatcaggggcagaggtactgttcccagacggaaaactgggataaagggagccatgctgacagggccttattccagtctaggttgttagaaaggagccctagcccagaaatgacagcaaatagccataatcattatgtggggctgaaccagaggaagccaggctgagccaagaagctggaagtatcttgaacggctctccaaatccaaagattatccatactctttatccctccagcgatgtgtaaaaccagaaagtatgaaacactggaggtggacatctggtttttatttctaggatatcttgatacatctcattacatttcacaatctgcatgggaaggaaaaggatggtagagaacatggacatcctgtctcccactgcaagggcgtggaacatggtaaggatacccagctgtgacaggacgtggcaaggcaacaagatgccttgtgcctggcgtaggattacagccaacagcccttttggcctgaattcacctcctcaaggggaggtctccatggaatgaccatgattcccaacatggccagaaaacccatctatcccactcatggggcagatgatcagaggagctgcacttttccctcccgagtaactcagactgaagtagggccggacaggcccacaaaaggtagcatgagagaaagtgaaggtgtgacacctctctgtcacgttgtagaaggagacctcaccagcatcatagtccaagaaaatccccacccgctggagcggggtccgcaggggtagggcagtcattggggaggtaagagcccaatattctttcccataccacaaagacactgcccagaatccattctggggggctgaggttactccaccttttctgcacactgagtcttcacagacacctatggtccacttggctttatctcccacctctacctcccaataatgtctcccggcgatgaagcatggagagcccaagacacagggaaacagattgaacctctcggggttgtcaggcaggtcctgttggaggtaactgtaccgcacttgccgcagattatcagagaggatcaggctggggtaggccgtgtctgggtccagagtcacgtccactgagtataactgagcctctcttaattcttggattttctccatatctgactgcattttttctgtgaactgctttagactctccgtcaagaatagacatttttgggcaaaaatgtggattttctcttgcaaatctggaggtgtgatccaaggtttcagggaatcctgattctttcagccctgctcaatgtgtccccaatgtcctgcaggagctccctggtgggctgctgctgcttctcttctagctgagcgatcaggctgctgaggtgggagatgttgcaagagaactgggtgatggcaccattgatgctattgtagatggccaagtctagctcctcaaggcgggccaggaggcgatactcatgctcctttaaggagtgatacagctgctcaaactcccaaacaatcttctccctctccatctgggttaggctcaagagttcagctcgtgcctgttccccctgggcccgacgtctcttctttaaatctttcactctttttaaatggtcgagctggttctggatttgctccttgaagccctccaccgcctcctcgagcggcagcacgctgtggccgcggtgctcgcgggagcggtcgcacaccacgcagatgggcatctggtcctcctcgcagtacagcttcaggggctcgcggtgcttctcgcacacgcccatctcgccgccgggccccgacggccgctcggtgcgcagctgctttaccagttgggtcacgttggccaggtgccggttgggccgcatgtgcctctgcgggaaggtctcccggcactgcgggcacgacacgttagtctctgccgtgccccagcagcgggcgaggcacgcgcaacagatgttatggccgcagtcgagcatcatgggctctgcgaagtactgcaggcacacggggcaggtggtctcctgctgcaggcactcggccacactcccggaggccatggcgccggcctgcgggggcgcacgggcatgggccccggcgccgagctctgcactgagcccaactctccggcgctctctccggttcgctgttcctgagaggcaccgggcggacggagggcggcgcctcccgggcccgtatcccagacgcgcccgcgcaccgaaggcttggagtggccgggccgatgcctgcgcctgtgccccctaagcgagagcgggaatacggccggctcaccgaggctcgcggccacgctagtggggcaggaaagggtagccgagggtcagagtcccagggccaggcgggcaaagcgcgcaagacaacgtgccgcgtccgagcggatgc

SEQ ID NO: 437099 - DNA, 801 bp, Homo Sapiens
gttgtggtaaaccatccatattcagtttatttttaaacagaggggcacgtacccacagagaagcaggactgagaaccatcatgggggcttgcttgaagtgatctgccccagccttctgacttcagagtgtctcatgatccaatggccatggggacggagctgccccttgataggatgcacttaagcatggtcaattcccccttcccccaaaggaaatggagaaaaggagccaagaagtcaatgaatccctggaatattgtcccagaatccttccagggatggtatacgactggccaccagtccacaaatgtgactggtaagggatctagtaacagaggatggagttgggcagaatattatcctggatgatatgcacccagcactagaatacacctttcattagaatgaagagaacagacaaagccctcagaaaagatacaaaggcagagacattgattagaacattatctcataacagaggtggggccattacccaccattattgtaaaataactgtaactaaccaaaacacatacaggcttctttaatggagttaataaaactatggcacattgggaatcaggggcagaggtactgttcccagacggaaaactgggataaagggagccatgctgacagggccttattccagtctaggttgttagaaaggagccctagcccagaaatgacagcaaatagccataatcattatgtggggctgaaccagaggaagccaggctgagccaagaagctggaagtatcttgaacggctctccaaatcgcaaagattatccatactct

SEQ ID NO: 437100 - DNA, 260 bp, Homo Sapiens
caaggttttcattgcttttattcaatgaggtttggaacatgagaggccaaaaatgaggagcacattttggggaatcctctataaagaatataagttaagaaagttgtccaagatgaaaataataggaaattaccccaactcatgccagttgggtcttaagaaatgtccttgttggcaggcttgaagaaaagatgtcacagattagcgtcttcccagagtgtgaatagggcacgttctcctacatgcaaacacacatgcgc

SEQ ID NO: 437101 - DNA, 1316 bp, Homo Sapiens
agtataaatactatatttattaaatatctttacagtttatttaaatgtatttacagaactattcctgcataagttataattcagacatccaaattcaggtaattgcctcttgggtaataagacaaataatgatagtctcaacagaaaaaaagcagctcattagtatacacacagattctaatttgcttcattatttagccatctttgccacaaactacctgctaacagttaaaattctgacatggacacgttttagttgagaagttcaattttgcaaagaatttaattttaaataaatagaatccaaatatgtcctgcttcatgttttgtttcataagcagattttggttttttgatactgtaaaatttttaaaatgcaaaaatgtgatacagtttccagagaaactgaatgctgtagcttctaccaaagatagctggtattaaggtgacctaaagaaccatgaactcatccaaagtacaaacgtttacaattcgagccaatcttgtttacattctctcaaacactcaaagctgactcaataaattcccacgattcctgcctaacttgttacttggtatggtgggctaatggtactgaaggtggtttccatctccgggctactgtcctatccagaacacacgcagctgatagaggagaggacgctctcccatcatgcaaagcttgaaacccagtttctaatctagacacagcccaacccccagacatgcatacctggaatggattcttttgtgatttagtacccaacaaccatgtcaagcaagtacagtaactcaggacaaataacttgttccccctgcatcccatttcttttagtttttagagcctatggactctactgcatctccatttggtaaatgccggctcatttttttcttttgatgaataatgtatgtttctagtagatgtatcattacgtacaatctgtgctagacttgtaccatccctttagcatactaggattttgaattcactttaccaacattactcattttcaatacttcaactactttgaaaagtaacagccacggtggcactgaacacctccatccccatcatggaaagaacatcgagaaatgaaggccaatcttcaaatattggatctcttcaattgctgccggcagatatgagctagtgaatgatagtagtggttctcaacaaagatctcaacgagtctcaagaagacaggcaaaagacttacatcactggccattgagatcagtggcaaagaaatgtggtcctgccagcaggatcagcacacatggcaggggaaatttgggatgatgaaaggaaaggc

SEQ ID NO: 437102 - DNA, 1044 bp, Homo Sapiens
  misc_feature (878)..(906): n is a, c, g, or t
  misc_feature (949)..(958): n is a, c, g, or t
acctactttcacagggacacaaacatctttttaaaagcatgaaatatttccatccatagaactaaaatggatttttctcccgatttgtaacaaaaaagcttttgggatcaaaactgtataacccagagcaatgttttagagcagaatcataagcccctgaaaaataggagtttataacaaagacataaagccacaccaatcatcataacaaagactatgcctgtggagtacacatgtaacatttcttttgatgaataatgtatgtttctagtagatgtatcattacgtacaatttgtgttagacttgtaccatccctttagcatactaggattttgaattcactttaccaacattactcattttcaatacttcaactactttgaaaagtaacagccacggtggcactgaacacctccatccccatcatggaaagaacatcgagaaatgaaggccaatcttcaaatattggatctcttcaattgctgccggcagatatgagctagtgaatgatagtagtggttctcaacaaagatctcaacgagtctcaagaagacaggcaaaagacttacatcactggccattgacatcagtggcaaagaaatgtggtcctgccagcaggatcagcacacatggcaggggaaatttgggatgatgaaaggaaaggcaggacttgacacctcagctagtctgtatactcagccactattgaaagaaggacggtgatgtcatctggctttccacctacaatgaaaatgagaacctatcagtatattttaaaaggaaaagtcaataaaaaatgtgtacttaaattaagtactaggagacaaatgcttgcattccaggcagttttggtttgtcagtataccctagtagaatnnnnnnnnnnnnnnnnnnnnnnnnnnnnncagttaaacaaaactccaagaaattacatgaaactgaagcttnnnnnnnnnntcttccctgctcctttacaacaggagctctattcaaacagccaccacaccctctgttcaatcccgagaatccggaccggtccagcc

SEQ ID NO: 437103 - DNA, 808 bp, Homo Sapiens
  misc_feature (32)..(32): n is a, c, g, or t
  misc_feature (132)..(132): n is a, c, g, or t
aaaaaaccaaatgcacatttattaagctcaanacatggacactgaggggccagggggacggatcttcggggatgagacaaggaggtgcagggggccatacacggggatgctgggggtgctgggccgggatgnactcccggatcccaggagctggaggcctgaggccctgggtctggggtgcagacgggctctttgggggatcgtcattgccaaggcctggagagggacagcagggtgcagcggctccagccttggggtgggtggggcggctcattccggggagcgctcccggcgcgcggctgggtccccaccgcctccacccggtcctcaggctcccgcgctcgggcagggtcggcagcggagtttcctcgggaaggtgttacacgccgccgccaccaggggctgaagagggaagctcagacttacaggatttgcaggttgggctggagtccgccttcctgcacttcaccttcttgcctgttgggagagagagacagaacaagaagacaggacatagcgggtaggatatggatgaaagccagcagaggaagcggaggctgaggcagcccaggaatgggtcgcacttactgatgacgatgaggatacccagcaggaacaagatggttgccagagtcatgcccacagtctgcaccgtgttgtagtcatagtaaaatgggtcaggttcctcaggagcctttgtgggggtctgggtcggggtcgccatgctgggccggagcagggggctgctggatgctttggcggcgaaggcgcgctgcagcagctggaagcagggacggaccgatgtggg

SEQ ID NO: 437104 - DNA, 336 bp, Homo Sapiens
  misc_feature (263)..(275): n is a, c, g, or t
caaaggaaaaaaccaaatgcacatttattaagctcaaaacatggacactgaggggccagggggacggatcttcggggatgaaacaaggaggtgcaggggggccatacacggggatgctgggggtgctgggccgggatggactcccggatcccagaagctggaggcctgaggccctgggtctgggggtgcaaacgggctctttgggggaatcgtcattgccaaggcctggaaagggacaacagggtgcagcggctccacccttnnnnnnnnnnnnncggctcattccggggagccctcccggcccccggttgggtccccaccgcctccacccggtcc

SEQ ID NO: 437105 - DNA, 2933 bp, Homo Sapiens
  misc_feature (39)..(39): n is a, c, g, or t
  misc_feature (127)..(127): n is a, c, g, or t
  misc_feature (387)..(387): n is a, c, g, or t
  misc_feature (439)..(439): n is a, c, g, or t
  misc_feature (442)..(442): n is a, c, g, or t
  misc_feature (534)..(534): n is a, c, g, or t
  misc_feature (582)..(582): n is a, c, g, or t
  misc_feature (620)..(620): n is a, c, g, or t
  misc_feature (1498)..(1543): n is a, c, g, or t
  misc_feature (2279)..(2340): n is a, c, g, or t
tctacgatggttactcagggccgggggctctgaggagantaactcgtatccggtattccgggcgaagtaatggagccgcaataccgggcaaacaagggcgggtgggtggggggaggaaggcttaaanagcaaccagagcaataagatgaggtgagaggcaggggcgcgattatacatatagtgcgtagggggcggcggggcaaaacacttatggtgcagacgaattaacttgcgggagaagtgcgaggacgcgaaaacaatagtggatgggggcagggtgagcagggcgggctgagataaacgggaaggcgtagaaaatagaggacgacgcgcgtgcgcgtgcgagcggatcatacaatatatgctgatagtcctcctgagatcgtngcgacgtgtaatagtatcagcgggcaggcgcgtgcgatctagaggaatctantangagacggagggtgcgtgcgatgtcagagtgacgcgccggatgaagtgaggctcgaggcagatactaggggcgcaggctactcatattatatnatgagtagtatacacgctcgcgtcacgtgctgtcgtaggagcgaacanccaagaggatacagagagggcggagcatggggtggctnatatattaacgtaaacagagagagtaagtcagcgcttatcgtgatgtacgaacgctcgtgccacacactgtagcgtgcgagggggcagcattatagacgtgcgggtaggaccacagacgtggtattgtacgcagcgggtgagcggggcgcggcatacgcagatatagcggttcatgggcgcgtggcttagctgttctttcaatcggtcgaatgtttgagctgtgcgcgggcggaagtgttagaggagagaagccgggcgagtagacggcgcgacccttgcgttccactctcacaatgagatgcgggatccggcgggcggaaaaatagcgggggcgagagagagagtatttagttgagggtggccgattcgtcgcggcgcgcggtttgataggggcgccctctggcggttgttttcgtgtatatgataatggatggccggggaatgtgagatagtcggggccatctggcgcggcaacttgcgggaagagggtcaagtggactaaaaacgaaacggtgaaggtagggtggggaggggtgggaggcgaggcagagaacggggtgggccgaggcgtagaagggcgacatgtgagacaggttgaaaggggagtaatgtgtcggagaataccgacagaagcttccggcggagggaaatcgcggaagacgggcaagagcgataaaaataggcggggtggcgtgcggtgggccacagggatcgggaaaatgggcgtgggtggcgaagagggggagatggggaaaggggaaaccacatacggtagggggtgactttcgaggctctggtctaggcgcctttcgggaaagaaaccttgggggttttagtgcgtgggcccctgtagtggtttctttggggctgcccgtcnnnnnnnnnnnnnnnnnnnnnnnnnnnnnnnnnnnnnnnnnnnnnncagaggaaaaaaccaaatgcacatttattaagctcaagacatggacactgaggggccagggggacggatcttcggggatgagacaaggaggtgcaggggggccatacacggggatgctgggggtgctgggccgggatggactcccggatcccaggagctggaggcctgaggccctgggtctggggtgcagacgggctctttgggggatcgtcattgccaaggcctggagagggacagcagggtgcagcggctccagccttggggtgggtggggcggctcattccggggagcgctcccggcgcgcggctgggtccccaccgcctccacccggtcctcaggctcccgcgctcaggcagggtcggcagcggagtttcctcgggaaggtgttacacgccgccgccaccaggggctgaagagggaagctcagacttacaggatttgcaggttgggctctcagacctggagtccgccttcctgcacttcaccttcttgctgatgacgatgaggatacccagcaggaacaagatggttgccagagtcatgcccacagtctgcaccgtgttgtagtcatagtaaaatgggtcaggttcctcaggagcctttgtgggggtctgggtcggggtcgccatgctgggccggagcagggggctgctggatgctttggcggcgaaggcgcgctgcagcagctggaagcaggacggaccgatgtgggggggaggttttattggaagtcttnnnnnnnnnnnnnnnnnnnnnnnnnnnnnnnnnnnnnnnnnnnnnnnnnnnnnnnnnnnnnncgcaggtggagcgtgggagatgtcaggtgccaggggagtcctggccggattccatcgctccaggtgtttctaccgcctgcgggtggacagacggcggatggagctgcggaaagttccctcctcttcatcgggttccccagtcctctgctgctggttgaacttgcaccggcatcttctgctcagcacgatgaggatgcccaggatgaagaggatcccggcgatgacgaggcctccgatctgcagggactggtagtcgtaagtgaacgggtcgtgttcctttggactttctgccttggccatggtgaggagacccacacagaaaaccaagatgtggccaagagacgccattgtccccaatcgggctgtcccctgctgaaagaaggcccccagaagtgcgcctgggtgcgcacccaggcgcacttctccttcttctgcctccttccacgcggctgcgccatgcagtcgccatcctgtgagatcagcatgtcctgggttccccaacatcgagggtaactttgtatttgtatcgtgaggttccctctgtggcagatggggctgtgggttcagcatgtcctgggttccccagcatcgag

SEQ ID NO: 437106 - DNA, 677 bp, Homo Sapiens
  misc_feature (410)..(410): n is a, c, g, or t
  misc_feature (426)..(426): n is a, c, g, or t
  misc_feature (505)..(505): n is a, c, g, or t
  misc_feature (514)..(515): n is a, c, g, or t
  misc_feature (519)..(519): n is a, c, g, or t
  misc_feature (544)..(544): n is a, c, g, or t
  misc_feature (551)..(551): n is a, c, g, or t
  misc_feature (570)..(570): n is a, c, g, or t
  misc_feature (575)..(575): n is a, c, g, or t
aaatagtaaactgaatatttttgttgtaagcctatcagagtcaatccttcgtttggaattgttttcctgtttttccttactataaatcatttaaaaactgaattcattttcttagatggcataagtctgtctcttgagaaataagtaaaatactcctattttcagtatctgtagcacctgaaataggtctttgtatagccagaaacaagttatgttgaagttagcttttctttgtcaacagttttggacaataaaaatctgaaagtattaacacttgattttctactggggcccttcaaacttggttggaagaaattcaaccagaatatctacattagagtataatcatgtgtggtaggaagatggactagttaatcaagatttgttgtcacttaaattttttgtgattnttttccaagccagttnttttaaattctaaatgtgttttgaggtatgggtacattaattgtaatggtaaactattatacaaactgttttgcgactntataggcanngtanattttgctatttactattgatacanatgacanttcatttatgaccactcanacagncgtagtaaccattttagtgacaaggattaaacatccatctgattgtaattttgagatgtaattatatgtggttaaattttccagcatctgccttatctgctg

SEQ ID NO: 437107 - DNA, 395 bp, Homo Sapiens
  misc_feature (171)..(171): n is a, c, g, or t
  misc_feature (182)..(182): n is a, c, g, or t
  misc_feature (315)..(315): n is a, c, g, or t
  misc_feature (351)..(351): n is a, c, g, or t
aaaaactcaagaataaactgggacagaggatttcttccagagtgctacatggcaaaagagccttcaggaacgtgtgcaggggtgtcatgatactccgaaggtgtcagtagttttggtcagcccacagtgagcagggcagcctcaagggagagccccttacatccttttctngggcgcctctnttctaattaagttcaaacatacaagcctgattctaggattaaggcataagttagttctcgaacaggaaaatataaggcagttcacatacacaatgaattcttgaggaaagaacctatagccccagaccgatantaaataattactgcctgcaaatcctgaggaagggangcatgggggctccaaaataatagtctcctgagaatacttatgag

SEQ ID NO: 437108 - DNA, 1087 bp, Homo Sapiens
gtggtagcgggcggatattaccagcaacgctccttttaatatccggatgtccagagccacagcctgtgtgttgagccccgggtagggctgctggccggaggctgttggcttccagcagcagcacgacgtggctttttgaaaggagagcccggagagtggcggccagcaggggcccagccccatgggccgcgtgcctggtcccagctgcggcgtccctctggccagctacaaagtggaatgcttctcgaagggcacggtcaggaggcgggcggccgcctcgtccaagaaccagcacagtttcccggtgtggggctggaccagggcggcgggcagcgggttttcctcctggtcctccaaaatgcgcttcagaacagctgccttgccttctccagttgccacaaagatgacagttcgtgctgcattcaggacaggtagcgtgagggtcacacgctgtggcggtggcttcggggagtcactgatgggagccacaatcttctcccgctcctgtaggagggggtggtctgggaagagtgagcaggtgtgaccatcggggcccacccccaggatcagcaggtcgaaaaccgggatggagtccccttggaatgcctgtctcagcttcttggcgtagtcctcagccgcctcctccacaggcagctcggggttaatggtgatcacctggctttctgggatcggcagtctggagagaagatgcgtccggtagaggccgtacgtgctctcggcgtgatcgaagggcacgaggcgctcgtcgcagaagcccagcgtccagcgcgctaagctagctggcccggcaggggcgacggcggcgggtagctcgcgggctagcatcgagacgaggctcccgcccgacaggccgagcgcgaaacgggcgcgggcccctgccaggcagcatgctgcgcgctgggccaccagctgcgctagcgccgcacccagctcctgggaactcgagaacaccgagatgaggcccggggccggcgcggccatggcgagggcggcggcggggaggaggaagcgctcctcggccgaattaaccacccggcctcgtacctagccctatggtttcgtccac

SEQ ID NO: 437109 - DNA, 958 bp, Homo Sapiens
  misc_feature (88)..(88): n is a, c, g, or t
  misc_feature (177)..(177): n is a, c, g, or t
  misc_feature (224)..(224): n is a, c, g, or t
  misc_feature (685)..(693): n is a, c, g, or t
  misc_feature (866)..(876): n is a, c, g, or t
aaaaatgatcttaacattttattgctgtctatacttatcatatatgtagtgcaaataatggcttctgatggttataaagcattcctgnattatagactacggctatacacttgacatacctgctttatataacatacagtaatatttagacctaatacagaaattcagctactaggnaaattctaatatactgtatataaaaaagctctcttcttagtttcccngggaagactagcacagtcttaactaatgattagtgaaataatacaaccacaaatagtaataggagcttgagaaaaatatttctttaaaaatgaatcacacacaaacacctaccattatacatacattataatcaggcacaatttttcaattgtgttcagttatatgctaagaatgtgcattacaaagtttagcaaaattagtgaaaagggaagcaagttcaccttagtgttacactttttcttcaattaactagtaaacagttcaagttctgcacaagcaatacaacaccttttttatttttgcacagttattgaaatcagtcaaatattaaataatttaattcggaagtattatttatgcacacaaactacacctgtaacagcatgaccttttacctgaaaaataaaggatgaaatattacatttatttatttacatattgcccataatactgataggcnnnnnnnnnaatgctttgttttctaaaacttgtattgtttttaaacaaaaatagatttgaaaagaatgaaccacaacagtgctaccaaaaagtcacatcttgttaccagacatcactgtccttacaacaattcaactaataagatttaagatttaacttcatcctaatgtatcagaacattnnnnnnnnnnngtctcaatgtacctatttaaataaatcgtgcttccataataatattctttaaaaatgaaaaacagtaaagagcacacatttt

SEQ ID NO: 437110 - DNA, 1042 bp, Homo Sapiens
  misc_feature (113)..(113): n is a, c, g, or t
  misc_feature (117)..(126): n is a, c, g, or t
  misc_feature (202)..(203): n is a, c, g, or t
  misc_feature (564)..(564): n is a, c, g, or t
  misc_feature (915)..(915): n is a, c, g, or t
  misc_feature (963)..(976): n is a, c, g, or t
  misc_feature (998)..(998): n is a, c, g, or t
  misc_feature (1010)..(1010): n is a, c, g, or t
agggttcagttccagctgattttatttccttctcaaaaaaagttatttacagaaggtatatatcaacaatctgacaggcagtgaacttgacatgattagctggcatgattttncctnnnnnnnnnncccccaaacattgtttttgtggccttgaattttaagacaaatattctacacggcatattgcacaggatggatggcnnaaaaaaagttttaaaccgaacccttaacggaactgccttaaaaaggcagacgtcctagtgcctgtcatgttatattaaacatacatacacacaatctttttgcttattataatacagacttaaatgtacaaagatgttttccacttttttcaatttttaaacacaacagctataaacctgaacacatatgctatcatcatgccataagactaaaccaattatatttagcgacaagtagaaaggattaaatagtcaaatacaagaatgaaaaacgcagtacatagtgtcgcgaactcaaatcggcatttagatagatccagtggtttaaacggcacgtttttgcttataaaaaaagtgcaanaaagatgtggtttacaagttaaagctacagaatccctttttgctgtaattgcaccagttttaaagcctctggacagagcagtatttcgtttaaaactttgtttttcttaaaagcttacagtgtttggctaattctcctcccctttttacaagacgggggccggagggtggacactggtggcaggttaagggatactgtcactttaagaagcctgcagattgaagtgtaaacatggagaaattaggggctgattttttaaactgtgtgagatattaaccagccgccctgttataaaatcaggaaatccaaacagcgatttacaccgattaacaccccctttatatatttttnacaaaaatacactgagaaaataatcaaacgttttcatctctcttgtcnnnnnnnnnnnnnnaaaagtgtcaaaagtctacatntaaatataaaanattaaaagttaaactctagcccttcagtgagg

SEQ ID NO: 437111 - DNA, 498 bp, Homo Sapiens
tttttataattaaaggagtgaatgttttattctttagtgtttaattgaatacataacaagtcacataatcaatgattcattacttcacacacaggaaggaaaacagtagctagtatttctgttatacaactggttgtgaacaggaagaacaaaaatctttatagcattagatggttgaagaaattctcaaagtttgggcatgtctgaaaagactttgactgcatcttttttcaatataaagggatttttttcttacatttctgtgtcattagaaaaatctgataatcttataagattttttctgctcttcttacatttagagaaaatggtttaatgatatgtactatttaaaaaatcagaatcccagataactctgtgtgaatcttacattgtctagcagataaggttttcagatgcctggaaaaatttaaacaacatataatttacatcttcaaaattaacatccagatggatgttttaatcctttgtcactaaatg

SEQ ID NO: 437112 - DNA, 1124 bp, Homo Sapiens
aaaaagagggcggtttgagtgtaacaatactgattcaaaactgaaatggaggacagtttctcgctagaatactttagggtttttcagagtccttttccataaaaggaatataattgaaacacatctcagttaggtgagatgagattgctaaaatacatacagaactaaaaaaacagccaatacaaagtcagtttaatctcttcaactcctattgatttccgttggttgccagtctttttttccctaaagccctattgcataactgccaagggaatttgctttcttcccgctagggagggtcagcaaagaactcatgtcccccgatagccatgttggtggtgctcatggccagcgctgggaatgggagggacgcccgaggcagtgttgaggcggggaggagctatgggaaaggttctggatgatacttgggctccagggcccccgacatcaggctggagtggtccccatcgtctatgatggcatcgaagtccatctgtaccccttccgggtcatggctgtcgaggctgtccactgtgcttgtcccctgattagcacctggggaaagtaactcagagtttttggcgctggtcccctgtagcaggcagctggcgtctgaaatagagaatgaaccagctttcgtgtcttgctgactgaagcccacggtttggtcatagaactgaccagagtaattctgcagattagagcacagcggatggggctgccctttcatctccatcttgataccattcaccctgcaggtctgacttgtgtcactgagctgtcctgactgcagagcaaggctgtccctcggcatagcctggcgcctgctgcccccaaagctggcacatggctggtagcccctgacaactgccaagcttgacggctggctgcccatgccgtgagcccctggcaggcagctctctggcccttggtagatgttgatgtgtgaggtagcactaatctgcccaagcatctgctgaccggggcggcctgcccccgggtgctgcatgctgtcgccgaggagctggtgagccaggtacccctgtcccactgggtcctggttctgcatgccattcaccatgctgccagctgactcattcctcgtgccgaattcgccacccagc

SEQ ID NO: 437113 - DNA, 609 bp, Homo Sapiens
  misc_feature (37)..(37): n is a, c, g, or t
  misc_feature (59)..(59): n is a, c, g, or t
  misc_feature (72)..(72): n is a, c, g, or t
  misc_feature (84)..(84): n is a, c, g, or t
caacatgggttccagccggattctggaaacccaggcncttaactgaaccctgaagagancttcccagcactntggccaccaggnggcccagattccccagaaactaccttttgcccaaagaacatgctcagtatttggggcatttcctcccacaaaccctgactgcttctgttacctcagggccttggtacctggatactgccacagaattggggcgggtgggggaggggcctatttttaaataaaataactgttcaaagttgggggttttttaaaaaattaagaaaaaggaaagctattctgtattgcaccttttcacaatttaatacattttcttacattttcctgtgattttcgaaactaaaccattgtgtgtcctgtagtgtcctggttgagctgccgctcagcagcttcctcggggggatttggaacacctgtgtctgtcgccgcactgcctgtgggaggggcccagagggctgctgggactggcgtctgtacacacttgtttggccttttctgtagttgatgctgtaaactctatggctttttaaaaacgatttcatgtttttatttagtattggaaatccaatacacttttttaatccaatc

SEQ ID NO: 437114 - DNA, 856 bp, Homo Sapiens
cctgaacaagttctcttttattgcagacagtcacttgttataatcataccttatgtacatatcagaaacaatttggaagtaaaaagccagatcttaccaaaaataagttatttattgctttaaaaaataaacatttataatagaataccaaattctatttaatctaatgtgttaacaaaagcataatatattccagtaaacaaggacttccaacttatcctataactaaaaagtcaactaaacagttggttttagctagagacaaacatcagtcactgccaccaaattccattatataaatttattttgcttcacatttaaggagaaacccagcagaggggtcgccctgctcttccccactagaaatgtactgaaaagtgacaagcccacagaaggaaaggctgtataaggaagtaggagcttcagtcaaatttctactttcattaccctgagggaggtgaaggagggtgttattttcatcaggtcaacatggatgacagtttgatcataaaaaacagcccacattaagatttcatttgtgaaatatggtgagcatgatcatgccctaatgatttcttagggtttggcagtgtctctggtcacatgcccatacttagggttgaaagaaatgctaatactgtaccctgggtcttcctcagatgccacagtggctcctgccctaggatgactaaaaatacggctctcctttccttagagatactggctcactatcaagaatagaggtagggaggcattgtgaactccagaagagttgagtctatggagtttattccacagtggatacattaggctgtttattttttatggcagcactaagctgatgtaggtagtatag

SEQ ID NO: 437115 - DNA, 406 bp, Homo Sapiens
  misc_feature (9)..(9): n is a, c, g, or t
ttaaatctnaaaatcaatggcagcctgaaaaaataacagctcctgaggccatccaactggctgtctgccccaggtacaaaaagaagataagactctgtcgtcagagtgagctgaggtccaattccacatgctatctctcatttaactctcacagtaaattttatgaattagttagttttatggtctcgttatacaaataagaaaactgaggtgtagggatgtgttcctatgtcacagtctaagagatatttcagacttgaggaaaaagtaagagtttctgtggccacttccatggtcaaaggagaggactgctggaagagcgctgcctgtagccttcctgaagcaaatcatggagagccacactcgacagtggcggttgtgtgtcaaagaacaatggctctctctc

SEQ ID NO: 437116 - DNA, 950 bp, Homo Sapiens
ttttttttgaagcttaagaaaatcatgtttagactctgtttaaaaacatccaggctggctcccattctatagcatgaagggcaagtccatgttcttctcgccagtgcccacgtagacgtagccatagttcttggtgcggggagcatggtagaaggtgaggcccggccagagcaggctgcgcagcaccaccagggcattgcccctctccatctggatgctccaggaccctttgggaatgtcatgctccaaggagtccatgaaatccagggaggggtccaggtcagccttctcaagcaaggtcttattctttagctcaacaggctccctgaaatggaagtaggagctgagcttcttggcctcagacaaggacagtccttcaaaggtccgattgacatgggtgggtccaaaaggggtcttgaagagggcgcctcgggggatgatggccacagccttgtcaatctggtcaatgacagacaccaagcgggtctcttccttgatctggaccactatttcttcttcaaagactttttcaccttcattcaccttctgcagctcagtgtgttcatattcgtatgatgggtcccccatgaagcggcccttcaccacagacgactgcgccaccatctcctctgtggcagggggcaagaggctccactctgtgcagttcaggctatagagcgtcttgcgcggtgcgagctggtcctcactcaggccctgcgcgatgtagtaatcggcgacgaggccaaggatgcggccccagaagagaacccgatcatagcggtagtcgcgcttaaccagcataagagacgtgagcagcgaggcccgacggtccgggctgaggccctgcccactgccggacgccagctccagagacagcaggaggctgtcggcgtccatcaggtcagcggtccgctcaacgcccgtcgagttgcctaggagaagccgcctcc

SEQ ID NO: 437117 - DNA, 1650 bp, Homo Sapiens
  misc_feature (1387)..(1387): n is a, c, g, or t
  misc_feature (1390)..(1390): n is a, c, g, or t
  misc_feature (1405)..(1427): n is a, c, g, or t
  misc_feature (1446)..(1502): n is a, c, g, or t
  misc_feature (1562)..(1562): n is a, c, g, or t
aattttccggatgtcgttttaaaggacactctgtgactccaaccgatgcacatcccacgcccccaccccccacgtttcctgaggctgcttctggcctggaggaaccgcccagtgaagacaggtgctcgcagatatcaccgcctagtgttccctgggcccacttgcggggaagtcttggaggtgaaaatccaggtctggaatgaatgcattccacagatgcatatggagagctactgcatgcccagcaccattcctaggctgggagcaaaacgcaactagaagccatttgtgtcaaggtaacgtctggagaaacaaaaggtcaggaatggccaacgtccctactggccacagtccagccccaatctgcaagacagagccagccgccccgggggaattcccgcctggtgggactccacgtcaccagcccccagctgctcagggtacagcccctcgtgagaaccgagccacagtcatgtttcctacatcagcctcctgctcaggggtttgtacagagaccactgccagccctctaggtggtccctgcaaagagagtcccagcccccaaggctccaaatggacagggcaccatgttgaccccttcgtcggcctccagtttgccgactgtaacatgtttcatccagttcaggacgtttatttatttccaacttgcatacaaaacatactgagaaactaaaaccatcgttaaaagtgaagacacgttgagacaggtatctcgacctgccaagtataaagctaaagctgagttcataaaaagggatgatttggccgacggtcatctgccagattctgatgatgattcagaagtcagtgtggaagaagatcagagggagaggcaggcgctctttgacttatcaagctgctccctgaggcccaaaagcttcaagtgtcagacttgtaaaaagtcatatatagggaagtggggactggcccagcattttaaacttaatccaggccatggccagctggaccctgagatggtgctatctgagaaagccaatgggagcaccctccgggggtgcacagaggaaaggacgctcagcctgaccttcccggggctgtccgtgccagcggctccgcgtgagggaggggcccgctcctgcttggtgagagagtcagcacgcagtggcctgcaggtaatgtttgcatctgggtgtcgttttcggtcattctcacactgttataaagaaatacttgagaccaggtattttataaagaaaagaggtttagttggctcacagttccacaggcttgtactggaagcatggtgctgtcatttgctcagcttttggggatgcttcagaatcagtcacggtgaaggcagagtgggagcaggcatgttacgtggccacagcagggacaaggggcncgngtaggtgctgcacannnnnnnnnnnnnnnnnnnnnnnggagacggagtctcgctcnnnnnnnnnnnnnnnnnnnnnnnnnnnnnnnnnnnnnnnnnnnnnnnnnnnnnnnnntgtttcacgcccattctcctggcttagccttcccgagtagctggaacttacggccgcccngccaccaagcttggaaattttttcctattttaagaaaaaaccgggttttatccgtgttatgcccagatgggcttagaccttctgacct

SEQ ID NO: 437118 - DNA, 642 bp, Homo Sapiens
tttggcatggtggggtatgcagtaggagagcaggggtggtggcagtgtctccatatgtactctcactaaaactggtgtgggcagatactggatgcctacttatttaggggcatctaaattcctgtgctaaattagaaaatagaggcagctcttgaaaggagtgatggcatgaaggagagatgcttggaccaaccaccacacaacccttataaataattgataaccttggttttgatgccacgtcctcttcaacagttgttggttgaaatgacacgtgattccaggtaagcttttccagataaattgccctggaacttcagactttgtcaggtgaatcgatgtggaatttcagaatgggctggaatgtctaagatgggcatgtccgatattcagctcagtgtggggaaactggtggccagggctggttgcaagctgagttgtaggggtgacagttcaccaacagtgtataagcaagcgttcccttctttgcattctcgccaagaggtcaacgtttttctgcaggccactgcgtgctgactctctcaccaagcaggagcgggcccctccctcacgcggagccgctggcacggacagccccgggaaggtcaggctgagcgtcctttcctctgtgcacccccggag

SEQ ID NO: 437119 - DNA, 387 bp, Homo Sapiens
  misc_feature (16)..(16): n is a, c, g, or t
  misc_feature (32)..(32): n is a, c, g, or t
  misc_feature (67)..(67): n is a, c, g, or t
  misc_feature (188)..(188): n is a, c, g, or t
tggttgcaaagctganttgtaagggtgaacanttcaacccaaagcaggagcgggccccctcccctcnacgcggaagcgctggccacggacagccccgggaaggtccaggctgagcgtcctttcctcctgttgacccacggagggtgctcccattggctttctcagatagcaccatctcagggtccagnctgccatggccctggattaagtttaaaatgctgggccagtccccacttccctatatatgactttttacaagtctgacacttgaagcttttgggcctcagggagcagcttgataagtcaaagagcgcctgcctctccctctgatgttcttccacactgagttctgaatcatcatcagaatctggcagatgaccgtcggcc

SEQ ID NO: 437120 - DNA, 1069 bp, Homo Sapiens
  misc_feature (1009)..(1009): n is a, c, g, or t
  misc_feature (1017)..(1017): n is a, c, g, or t
  misc_feature (1029)..(1030): n is a, c, g, or t
  misc_feature (1039)..(1039): n is a, c, g, or t
  misc_feature (1067)..(1067): n is a, c, g, or t
ttttgccaagatccaaagaaaaaattttatttacaatagagaattttatttgaaacatgcatttcttgtttttttaaaaacaaatcagcaaatgcagatcaagtttacactccttaaggcaagagtccctatgcacgctgtacatgttcatattaaatccaaaagctgctcaccctgggaacttgtgtacaaagggcaaggccaaggtcagcaatgtgtcttttattagagaatcagacaatctccctgatacaggaactctgaggtcaacttgctatgaattatactaggaaaatgcaaaccaatagcaagaaattctgatagtctccttagtactgcatacaatcaaatcaattttatttagaaaggaaatacagtagtgcatacgaaaaagtgaaaacagaacctgtccatggaactggaggaacagcagtgtgccgacggtcatattgcactcaacagttaagtccaaaacattcggttcagagttagcttttccccattttggcaatcagttcgtcacaaatcttggtgagttcttctatttctttattcttctgctccagcgtccttttccagggcgtccactcgcagctgctccttccgcaggctggcctggtgggcggcttgctcctgctgggccttgcctcgaacctgagcaatctcagcattggccctgtccagtttctcctccgcgtgcaccttcagggcctggtacctttgctccttcttcttcacccgggacaggtactcctgcgcacatctcttcaacacctcttcattcttgcggaagccttctaggacctccttcatcttctcatatcttctgaagaggtcggccagagacttctccacggagttcaggtcggccagggcttgctccttctccagaaccagctgctgcaccgtctggtgggagactgacttctctctctgttcgtcctcaggcttgcctatcatctgagcgatggtcttctcatactcggccactattttcctcatttccatnacttcccnctgctttcttcnnattatcttncattctgagactctctctcttggttatnat

SEQ ID NO: 437121 - DNA, 563 bp, Homo Sapiens
acttgttgaacaagttcagatttattgaaagtaaacatttacattcgctacaatgttggaactattacaaagctggataaaagaggctttagtagcaatagaaagcaagagcaataaaaagtgaatagagaaaatatttggccttactgatctcttggcagtatttacattatgtacatattgttaaatatttataataattctaaggcaccaaaggctaaatagcaggttgcaatactatcctgtgcacaaaaatcaagaaatttattgtaaagaggctgtatagttaaagaaacataggcatatcttaatgtttacataatggagcggctgcatttttaaaaatctcaaatgatacattaaatattgggcagatcgaagatattatttttagaacattaaattatattgactatgtaaataagcactattttttactgacttgctggtaaatgtgaaatgtaatctattcgtcaacacagcttttttcacactcatggatatgttttgtctaaaaactacttgaaattcttctgacctacaaaaacttatcctaatattcc

SEQ ID NO: 437122 - DNA, 484 bp, Homo Sapiens
caaaatgggtttactaaaatgtagatgacttaactgcctcctccttcgtctgaaaaatgccaatattcaatcatcatgcagcattataacaagccttataagtcctaaagcattaagttgcacttttttgaggaggggtagtgcagtatttctctggccagtatgaatgaagtttatacttaccatatttgatagaaacatagatcaagctatggcacagcgactcatcagatagctagctttgacgtctgggcacaattgaaccaacttccatcgtgaatctttataatgattgactttggtgtatagtgcagtaaacaaatagtgctcctagttaagtatttgtcagcatccttttgtctctaacttgtttctatttttacagccacacaattcttggcatgtattaagaaaaacaaaatccctgttcaagtagtttttccacctatcagcactgagtaaatgccataaatccattgaaatg

SEQ ID NO: 437123 - DNA, 2148 bp, Homo Sapiens
  misc_feature (164)..(239): n is a, c, g, or t
atttgggtgggagagattccacaggccctatgttcactggccacaggattcttccttggagaacacggtattggccactgtttcccttaacctactggggcccgccggcgccaaaagagatggtttagaaaactttttcgagggccgagggcggccgacaaggnnnnnnnnnnnnnnnnnnnnnnnnnnnnnnnnnnnnnnnnnnnnnnnnnnnnnnnnnnnnnnnnnnnnnnnnnnnntaggaaaagggactttattaaagaaaagtcatctgtgagtgactagttaaattagcatgcttgacattaactctgggttgaaacctacctccgtcaaataacaagtggactctccaagcaaatgtctacacggcaattcaagcagcaactcaagagcccagaggagcactggagacgaggccatcactccacttcccagtgcgacaaccacttttttgtaaacacctgtcagatgctaaaaatacggccttacacactaccgtcaccaaagtttataagcaataagatcagagagcaggagccgctgcagcacctctaacagtccagggctgaggcgctgaaggtgagtttccaggtgaggtccactctgcccggtctcgggccgcaccagggggctgctgtggcctgatagccgagtggaacaacgccacctacgtgcgatttagtgtctggaagattctagagatctgcagcatgacaggccccgtttctggatcattcatccactgggtgctgttcagtgggttctccagcatgtcttcaaatgctagcaatgttttcgggttggtcaggcccagctgcaccaccgggttatccaggatggcctgaaagagaggactgtcggggtcgatgcccttgtccagctcctccggagagggcttccggtcccccagcagccactcgcacgcggcattctgctggttgttgttcactctgagggcatctatcacctctttctcgtcgaaccccatctccatcagggaaatgacggcccgagcatcagcccgaaagtcccttttcctccggatcttcttgaagatttccgtcagctcatctctggcctcctcatcggtggcgctggctcccgcggcagcctcggaggcagctgctgtggccccctcggcctctgggggagcttggccaggaagaggcgtgtctatggtcgggtcttctgcgtgttcaattagccactccatggcctgaggcaccgacatgtggttcagctgaagggccttggtggctctgttctccggaaagcccatctccgtgagctgccgcagggcagcctcgtccacacgctcatcctcgtcctcgtccagcattgcattcgccttcttaaacaattccaccgcatctgggttcagcgctaacagcttctgcgccacctcgatgagagacaccagtatcttccggagttctgtctggaagtctctcatgttggtctggaccgcggcccggtccatgttgtaggagggcaggttggcggtggcccgcagtatggcctctttatctggagctttctggtcttgttttttcttttcttctgctgagacatcagccatcttgggaagtggtgatggagcacgcttttttatcaataataggacatcttggtcctggatgttctcttccaggatggtcctggcatcactcagcaccctctctgaggcagcgtggattaatttatgatgggttatacttttgggatcttctaagctcccatgagcacagtgcttgaggcagcgctccttgagcttctccaccgaggtgtcctcggtggcctcctccagccactcggcgccgtcggacgcgcagatgtgcagccgcagcaccttgcccgcgaagatcttctcctcctgcacgaacatcccgccgccgccgcaggggcctgcgcccgccacccgggcccctgaaggtcaccgggaaggcgggcggggagggggcggggccagaccgcccgcgcgctccttcgctgggccgccgccccgccccggctcccgtcggccgggccgccgtcactctccgcggcctcagcggtcgcctcgctcccgccgccgcagcagccgccggtgggaagaatccggaccgtaccagcatttgtagggtgtggtggtgggagggtgtgtgg

SEQ ID NO: 437124 - DNA, 1025 bp, Homo Sapiens
  misc_feature (890)..(977): n is a, c, g, or t
cagccacagcggggagaagccgcaccactgcccggtgtgtggcaaggccttcgggcacggctcgctcctggcacagcacctgcgcacgcacggcggcccgcggccccacaagtgcccggtgtgcgccaagggcttcggccagggctctgcgctgctcaaacacctgcgcacgcacacgggcgagcggccctacccgtgtccgcagtgcggcaaggccttcgggcagagctcggcgctgctgcagcaccagcgcacacacacggccgagcgcccctaccgctgcccccactgcggcaaagccttcgggcagagctccaacttgcaacaccacctgcgcatccacacgggcgagcggccctacgcctgcccgcactgctccaaggccttcggccagagctcagcgctgctccagcacctgcacgtgcattcgggcgagcgtccctatcgctgtcagctctgcgggaaggccttcggccaggcctccagcctcaccaagcacaaacgggtgcatgagggtgcagccgctgctgcagctgccgcggccgctgcagctgcagcagcggccgccggcctgggcctcgggcctggcctatgccctgcattccatgatgaggccggggcaggtctccctcctgggtcctgatgctgtttctgtgctcggctctggcttgggcctcagccctggcaccagctctggccgcaaccctgaccctggctctgggccgggcactctgccggatcccagctccaaacccctccccggctccagatccacccccagccctactcctgtggaatcttctgacccaaaggctgggcacgacgctggtcccgaccttgtggccagccccgaccttggtcctgggcccagcccagaccctgatcctgtnnnnnnnnnnnnnnnnnnnnnnnnnnnnnnnnnnnnnnnnnnnnnnnnnnnnnnnnnnnnnnnnnnnnnnnnnnnnnnnnnnnnnnnngggggaaagttcaaaacggggtacagggcgccaggggcccaccgtctg

SEQ ID NO: 437125 - DNA, 543 bp, Homo Sapiens
ttccggagcagtgggaggattttactgactgcacaacacacaacttccccaggcccccgaggatgccggcgtctccttcagccatcaggccccagcagtgccccttgctcctgtacccactctggactctcgccggtagggagggctgggctgacagtgccacgagtgggagaacaggggtcagggcaggacacagggttgggatcagggctgggcacaggatcagggtctgggctgggcacaggatcaaggtctgggctgggcacaaggtcgggaccagcgtcgtgcccagcctttgggtcagaagattccacaggagtagggctgggggtggatctggagccggggaggggtttggagctgggatccggcagagtgcccggcccagagccagggtcagggttgcggccagagctggtgccagggctgaggcccaagccagagccgagcacagaaacagcatcaggacccaggagggagacctgccccggcctcatcatggatgcagggcttaggccaggcccgaggcccaggccggcggcc

SEQ ID NO: 437126 - DNA, 1043 bp, Homo Sapiens
  misc_feature (421)..(421): n is a, c, g, or t
  misc_feature (431)..(431): n is a, c, g, or t
  misc_feature (439)..(440): n is a, c, g, or t
  misc_feature (443)..(443): n is a, c, g, or t
  misc_feature (454)..(454): n is a, c, g, or t
  misc_feature (456)..(456): n is a, c, g, or t
  misc_feature (468)..(468): n is a, c, g, or t
  misc_feature (474)..(474): n is a, c, g, or t
  misc_feature (476)..(476): n is a, c, g, or t
  misc_feature (478)..(478): n is a, c, g, or t
  misc_feature (480)..(480): n is a, c, g, or t
  misc_feature (484)..(484): n is a, c, g, or t
  misc_feature (488)..(488): n is a, c, g, or t
  misc_feature (508)..(508): n is a, c, g, or t
  misc_feature (512)..(512): n is a, c, g, or t
  misc_feature (523)..(523): n is a, c, g, or t
  misc_feature (526)..(528): n is a, c, g, or t
  misc_feature (531)..(532): n is a, c, g, or t
  misc_feature (557)..(557): n is a, c, g, or t
  misc_feature (561)..(561): n is a, c, g, or t
  misc_feature (565)..(565): n is a, c, g, or t
  misc_feature (576)..(576): n is a, c, g, or t
  misc_feature (578)..(578): n is a, c, g, or t
  misc_feature (580)..(580): n is a, c, g, or t
  misc_feature (584)..(586): n is a, c, g, or t
  misc_feature (604)..(604): n is a, c, g, or t
  misc_feature (607)..(607): n is a, c, g, or t
  misc_feature (609)..(609): n is a, c, g, or t
  misc_feature (633)..(633): n is a, c, g, or t
  misc_feature (678)..(678): n is a, c, g, or t
  misc_feature (738)..(738): n is a, c, g, or t
cttcaatggtctttctgaaccatagcagtggctctgacgattcagctggagatggaagaatgtggctatagatcagtcccttgtttctttagagatgtccgagatccttccagatgaatcaagattcaatatgtaccggctctactttggaagctcttatgaatcagaacttggaaatggaacctcttctgatttgagctcacaatgtctctctgcaccaagctccatgactcaggatttgcctggagttcctgggaaagaccagttgttttcacagcctccagtgttaaggacagcttcacaagagggttgccaagaacttacacaagaacaaagagatcaactgagggcagatatcagtattatcaaaggcagataccggagccaaagtggagaggacgaatccatgaaccaaccaggnccaatcaaanccagactnnctnttagtcagtcncntttaatgactgnacttgntnananaagncccnccattagtgaagatgactgncagnatttcgccgcnccnnntgnncgccctcccacccccccgaggcgcnaaantcgnagtggggcggngngncggnnngggcgggaagtaactttngcntnaaatatacttctttttgatttggntctgttaagttttttgatggcttttccatatgttgtaacaggaanaaaatggtgtctatgaatttcttcttaatttaacaaatttggttaatttataaaatcccngattggtaaatgctataattatgtaatgatcaggattgagattaatactgtagtataaattgggacattataacagattccatattttatttcctaaaatctaaattcagtctttaatgaaataatattagccaaatggtggaactaatttatttcttttgaggaaaagataataaagaatgtaattaaatttaaatttcttggaattcccagttgtatattcatcacctttgtagcatttgacaaattttatgcttagcagcttcttcactgttttgaaataaaatatcctattacctactgat

SEQ ID NO: 437127 - DNA, 926 bp, Homo Sapiens
  misc_feature (19)..(19): n is a, c, g, or t
  misc_feature (206)..(239): n is a, c, g, or t
  misc_feature (676)..(688): n is a, c, g, or t
  misc_feature (832)..(832): n is a, c, g, or t
  misc_feature (843)..(843): n is a, c, g, or t
  misc_feature (914)..(914): n is a, c, g, or t
ggtaatcacggataggggncattcccttttaaaagggataacctggtccggcatttgaatgtgtaggttaaggtctgatttagtaaaattttaaggctaaattaatctgatgactcttgaaagtttaattggtagtatgacatttatgtttttttcccccagactcacagccaatacaaagttttgagactcctaaatgttaatannnnnnnnnnnnnnnnnnnnnnnnnnnnnnnnnncttaccacctaagctgcggatcaaaaagggaattcttccattagaaatttgtagtgttgtgtggccagcacagtatttttcagatttgaatttcagtacctctgtgtagcctcagtactctcaacaccagtcactctttattgtcttaaaatattccatactttttgttgacccaaaattgttgaaaatattttgctcagttttcacaatgaactaattgaaaagtgtagttactgtgttgtaaacatttgtgtagttctgttaatacactgatttgaattttatttatctcaacttcctttagcgtctgcctccaaattttgtctttgctgtatacccactgagatcaattccctagacccctctggctcttagtgtactataatttgggctttataaaatatattgtcttaatttaaatagaatgtgagccctcnnnnnnnnnnnnnaagccaaataactacacaaagtaaattataaaagatttaaatagtttgtctacagtgactagactgaaatataaaaattgattgagggtagtttacttcaggtggttagctacaaatggcctaaatgtccttaaataatgcagntatctgccccnctggacaaaaattttggccaagtaaaatttggtagcaacaggcctaacatgaattaattgccttatggtgncccatttctgcc

SEQ ID NO: 437128 - DNA, 638 bp, Homo Sapiens
tttttttacaagcctccatttttattattaaatttgtcagatattactttttaaattcctacacagtttctaaatggttactctcaacttccgtacttatctcattataaaacattaacaatttgtgaactggcactagtccatgaaccaaactttgagtacctctgctctagatttcaaaaacagatgtggatatatgtgtaaaaatttggtatataaaaaagatgcttttctagatgggtagaagaaaagattgttcaaatgtcctatggtctcacaatccagtggttataactgtaaaactcatccagcctttgggagacactgaaactccatttaaagataagaacttgaaggatgtttaatgtaaacctaaattgattttcccttcaactccttttgggtacataattacttttacctagaagctgttcttgactttactcataacaattataccatgacctccctgtccttttccaagatgaaacaaaaaacccttcaagtgggcctggccaacaagactgaatttattgagcctattggtcaagttagcctttgcttagctttccccaaccccttcactccagccttagctgggatgcttttatataattctcagagcatggaagagagcc

SEQ ID NO: 437129 - DNA, 443 bp, Homo Sapiens
tctcagctggtaccgacgctctctctgtggggctgaggacacgaattaatgcctgaggtgcctggaccacggcttggcctgacagcaatggctgtgaagcttattcctggttaggacccatgctccttatgtctgggaggcagctgcctgtctgttagtgcctggcgcccagccttcagaaggatgaatacttgcaggagaggagggtcacttgtagctgaaggggacgaagggtggacgccagggaatgttttgtggaagacaaggcatctgaccttggacacaagggctgaagaatttggcagggatgggaactgttctatggcaccatgctggcccggtttcctgtaagctcatctacctcgtgatccatttctaagagttctggggaacatgaccatacttttcctgcctagatgaccccaactgtaagtactcttaca

SEQ ID NO: 437130 - DNA, 443 bp, Homo Sapiens
  misc_feature (393)..(393): n is a, c, g, or t
caaggatccctaagagagaggcaggggtgttcagctctcccacctctgctggatgaacttgcagagcctccttggtgacccagccggtgcagagactctgctcaggacaacacccttgcctgggacccccacatctctggccccagcagcagcccttgggggggtccctttatcttcctccactcctacccaggcttcctcagcaggagatgaggcaggacatttccactccctttctggaaggttcagaaggttaatgagagctaagcacgtaagtccatttagggggatgaacttctgggaagagaggaacctgggtcttggctgacgtccaagggcgggctgggtgacggtccctctgatcacggaccctgtccacccactgcccagggncctgcctcgaccctctgacagccaccgagcccagagggatctcatgaatt

SEQ ID NO: 437131 - DNA, 1316 bp, Homo Sapiens
  misc_feature (405)..(464): n is a, c, g, or t
  misc_feature (632)..(697): n is a, c, g, or t
aaattgttgtaaaataaaaaactgtgcagtgagcaaaaatttttcacgcgcccgggatacatatcgggctggtggtaaaccccccaatagtaaccgtgcaaagtttttataatttaatcctcaaggggcttaaataatttactacggatgatgggtgtgtccgacatatagtggtcgcacccaccacgagaggtggggggtcgtgtcccaccaaagtgtccctaccgagacgatgcgtgtcttccccagccaccgcgcaggctgttttgaaatgcggcgtgcccgctgcctgtcggtcattattaatagaaggcgcccctatatagggcgccctttgtttacccaaaaaaacccggggatcggtcgtcaaggcttggcgcccccgggggtttttgcccccccccnnnnnnnnnnnnnnnnnnnnnnnnnnnnnnnnnnnnnnnnnnnnnnnnnnnnnnnnnnnnactggctgcttggagtttattttccgcttggtgccaggtgcacagttccaggtgtcaggaaagctagcgagtgctggggccgggcggtagagagcggggctctcactggtttttggtgtctgctgtgttgatgcgaaggtctgcttgctgcagccgcctagtttacannnnnnnnnnnnnnnnnnnnnnnnnnnnnnnnnnnnnnnnnnnnnnnnnnnnnnnnnnnnnnnnnntctggtggactagcgcctccgcaggcctggggctggtggtaaccgctcaggtcaggacgggggcccagcgctggctgtgctggactgaccgccgggctgcttcctcggggcgtcccgagccaggccacaggcggtcatgctgctggaggcctggggaggttccgagtgctctgcggactccaacaccgtggccatgaacgggagggtggacttcccgaaaaagaagctggcccaccaatgacccgggtcagccttggggagacctgagagaagcgaagtggggtcttgatgctgccagctcctggaggagcggggggagaaaggggcgatcctgcactcacctggggggtggggaatggcttccccggggcactcggtactgctgcaggagctgttgctggaagtggaacccaggcggcgccggtagtagtcgtgggtggccacgagcgagccgctggaggggatggccgccatgctttagcttgctggctggtgggatctgggcggcgacccctcgcgggcctcggcgcacgatcacgggtggcggggacgggggcgctaggccacggagcccatttgcagagaagaccgcgggaagccgcgccacgacagagaggcg

SEQ ID NO: 437132 - DNA, 839 bp, Homo Sapiens
  misc_feature (164)..(164): n is a, c, g, or t
  misc_feature (167)..(168): n is a, c, g, or t
  misc_feature (170)..(170): n is a, c, g, or t
  misc_feature (212)..(275): n is a, c, g, or t
atggaacctcgggccacacaggtcaggcacacaccatcggggctactggctgcttggagtttattttccgcttggtgccaggtgcacagttccaggtgtcaggaaagctagcgagtgctggggccgggcggtagagagcggggctctcactggtttttggtgtntgnngngttgatgcgaaggtctgcttgctgcagccgcctagtttacannnnnnnnnnnnnnnnnnnnnnnnnnnnnnnnnnnnnnnnnnnnnnnnnnnnnnnnnnnnnnnngctctggtggactagcgcctccgcaggcctggggctggtggtaaccgctcaggtcaggacgggggcccagcgctggctgtgctggactgaccgccgggctgcttcctcggggcgtcccgagccaggccacaggcggtcatgctgctggaggcctggggaggttccgagtgctctgcggactccaacaccgtggccatgaacgggagggtggacttcccgaaaaagaagctggcccaccaatgacccgggtcagccttggggagacctggggggtggggaatggcttccccggggcactcggtactgctgcaggagctgttgctggaagtggaacccaggcggcgccggtagtagtcgtgggtggccacgagcgagccgctggaggggatggccgccatgctttagcttgctggctggtgggatctgggcggcgacccctcgcgggcctcggcgcacgatcacgggtggcggggacgggggcgctaggccacggagcccatttgcagagaagaccgcgggaagccgcgccacgacagagcctcgtgccgaattcgccacccaggc

SEQ ID NO: 437133 - DNA, 806 bp, Homo Sapiens
  misc_feature (796)..(796): n is a, c, g, or t
aaccggcacagttagaaacatgggtactgcgcttgattattccgctggtcaggtgcacgttacagtgtcagaagctacgatgctggccggtcgtagagaccggctctcactggttttgtgtctctgtgtggatgcgaaggtctgcttgctgcaccgcctagtttacaggttgggggtgggattgggaggggggcagcgatgcgatgcggaaagggccggggaggggctctggtgactagcgcctccgcaggcctggggctggtggtaaccgctcaggtcaggacgggggcccagcgctggctgtgctggactgaccgccgggctgcttcctcggggcgtcccgagccaggccacaggcggtcatgctgctggaggcctggggaggttccgagtgctctgcggactccaacaccgtggccatgaacgggagggtggacttcccgaaaaagaagctggcccaccaatgacccgggtcagccttggggagacctggggggtggggaatggcttccccggggcactcggtactgctgcaggagctgttgctggaagtggaacccaggcggcgccggtagtagtcgtgggtggccacgagcgagccgctggaggggatggccgccatgctttagcttgctggctggtgggatctgggcggcgacccctcgcgggcctcggcgcacgatcacgggtggcggggacgggggcgctaggccacggagcccatttgcagagaagactgcgggaagccgcgccacgacagagcctcgtgccgaaacgccacgcacgcctcgactangccgatattg

SEQ ID NO: 437134 - DNA, 714 bp, Homo Sapiens
cggttttggtgtctcctgtgtaagcgaaggtctgcctgctgcagccgcctagtttacaggtggggcgtgggagttgggagggggcgaggaatccggactgggaagggcccgggaaggggctctggtggactagcggcctccgcaggcctggggctggtggtaaccgctcaggtcaggacggggggccacagcagctggctgtgctggactgaccgccggggctgcttcctcggggcgtcccgagccaggccacaggcggtcatgctgctggaggcctggggaggttccgagtgctctgcggactccaacaccgtggccatgaacgggagggtggacttcccgaaaaagaagctggcccaccaatgacccgggtcagccttggggagacctggggggtggggaatggcttccccggggcactcggtactgctgcaggagctgttgctggaagtggaacccaggcggcgccggtagtagtcgtgggtggccacgagcgagccgctggaggggatggccgccatgctttagcttgctggctggtgggatctgggcggcgacccctcgcgggccatcggcgcacgatcacgggtggcggggacgggggcgctaggccacggagcccatttgcagagaagaccgcgggaagccgcgccacagacagagacgcgccctcgtgccgaatcagccacccggcctcgacctagcactatatta

SEQ ID NO: 437135 - DNA, 1123 bp, Homo Sapiens
  misc_feature (81)..(81): n is a, c, g, or t
  misc_feature (93)..(93): n is a, c, g, or t
  misc_feature (100)..(100): n is a, c, g, or t
  misc_feature (106)..(106): n is a, c, g, or t
  misc_feature (130)..(130): n is a, c, g, or t
  misc_feature (157)..(157): n is a, c, g, or t
  misc_feature (182)..(193): n is a, c, g, or t
  misc_feature (210)..(210): n is a, c, g, or t
  misc_feature (234)..(234): n is a, c, g, or t
  misc_feature (236)..(236): n is a, c, g, or t
  misc_feature (240)..(240): n is a, c, g, or t
  misc_feature (242)..(283): n is a, c, g, or t
  misc_feature (289)..(467): n is a, c, g, or t
  misc_feature (469)..(470): n is a, c, g, or t
  misc_feature (473)..(475): n is a, c, g, or t
  misc_feature (478)..(479): n is a, c, g, or t
  misc_feature (483)..(544): n is a, c, g, or t
aaaaagagccgcgcccacagaggggcgcgcggggagcaagccccccggcgaacacaacacaagaggggaggcaaaaaaaangaagagagaaanagggggnagaaangggagaaagaaggggagagcgaanaaaagaggggaaaacgaggaagggggnaaacaaaagggagggcaagaaaaannnnnnnnnnnnaggaagaggggaagggngcagggggcaaaagaaaaggaggngnaggnannnnnnnnnnnnnnnnnnnnnnnnnnnnnnnnnnnnnnnnnnaagagnnnnnnnnnnnnnnnnnnnnnnnnnnnnnnnnnnnnnnnnnnnnnnnnnnnnnnnnnnnnnnnnnnnnnnnnnnnnnnnnnnnnnnnnnnnnnnnnnnnnnnnnnnnnnnnnnnnnnnnnnnnnnnnnnnnnnnnnnnnnnnnnnnnnnnnnnnnnnnnnnnnnnnnnnnnnnnnnnnngnnggnnnagnnaaannnnnnnnnnnnnnnnnnnnnnnnnnnnnnnnnnnnnnnnnnnnnnnnnnnnnnnnnnnnnngggctctggttggactaggcctccgcaggcctggggctggtggtaaccgctcaggtcaggacgggggcccagcgctggctgtgctggactgaccgccgggctgcttcctcggggcgtcccgagccaggccacaggcggtcatgctgctggaggcctggggaggttccgagtgctctgcggactccaacaccgtggccatgaacgggagggtggacttcccgaaaaagaagctggcccaccaatgacccgggtcagccttggggagacctggggggtggggaatggcttccccggggcactcggtactgctgcaggagctgttgctggaagtggaacccaggcggcgccggtagtagtcgtgggtggccacgagcgagccgctggaggggatggccgccatgctttagcttgctggctggtgggatctgggcggcgacccctcgcgggcctcggcgcacgatcacgggtggcggggacgggggcgctaggccacggagcccatttgcagagaagaccgcgggaagccgcgccacgacagagaggcgccctcgtgccgaattcgccacccaggcctcgctt

SEQ ID NO: 437136 - DNA, 1099 bp, Homo Sapiens
  misc_feature (254)..(254): n is a, c, g, or t
  misc_feature (257)..(257): n is a, c, g, or t
  misc_feature (272)..(272): n is a, c, g, or t
  misc_feature (299)..(299): n is a, c, g, or t
  misc_feature (303)..(303): n is a, c, g, or t
  misc_feature (314)..(314): n is a, c, g, or t
  misc_feature (401)..(401): n is a, c, g, or t
  misc_feature (507)..(508): n is a, c, g, or t
ataactgtacattttacaaaacacctgaaaggacccagaggcataaatagtattacatgatttatggtagctctggggtgagctgtgggggaggccagttacaaggtctccaagacccgcctccatgtcagtgttggggggtgccttgagcacttcttttatttcatataggaaaatgcacatctttcatttgtctcccaaagatgatttccataaaaatatacttcaaagtatttactgtacatagacttcantgnttttatttcccagcntcaatctaaacatttctaaccttttanatanattgggaattnagtttcatgagaatttttactgacaactaataaacactgtatgtgtacatattcatatacactgtggactggagaaagtcagtatgnatataaatttcactgagatccagaaagtagcaatataggacttttaggggtatgtattagtgtaaataatatatgtgcagtctaggctaatcattttaatgtaaanncaaataagcatactttttggctttaaaaatatcgccctcaaaatggtgggggataaaatgtaagatattctttacgctttaattatttttccatcttattcaagtcagagcacttttttttaaatagcaatacaacaggcaagagaatactcaaaaatatttaaaactgtattgataccaagagtatgttttaaatattttctaataaatacttgagcggtttttgtctggcaggcttccaaatttgccaaaattaagcgttcagtattttcaacacatacgctttttactggtttatactgaactatctgatgagaattcctgtgttcccaaagcaactgatgtttacaggtcttgtgtttctcctcctcctttctaaggatgagggaatccacaacagactttctctagaaaacactaatgatggacaactttttggtgtcatcaatgagttggctactaccttgatgtaaaaatttgtaaggaaaattttcaccatttcgagtgtcaagtgtatttttaactgtctggtttgtacttttatgacttttgtactaccaaagcggagttaaaaataaaaatgttaaacgc

SEQ ID NO: 437137 - DNA, 576 bp, Homo Sapiens
  misc_feature (76)..(76): n is a, c, g, or t
taaggtttagggtttctctccaagtctctagaagggatgggggcagctatgatgtagttcctatataatctctganattcataatttaggggtttctgtcttttaaatgctatccattgagggcccgaatggaacaaaacagagagacaggagttcgcctccttttgtttttctgcctcactgttgagctgggtgatctcatctcatctttttttgcccttggactgggacttagccccattggccccctggttctcaggccttcagcctgagttacaccaccagctttcttgggtctcagtttgcaaatggcagatcgtgggacttcgcaaacaccatcatcttgtaagcccattcctcctaatcttcttttatatacacaccaattggttctgtttctctggaaaacctgattaatagacctgaggaatgaaactgtaacctctcagtgggttcttcttgcctgagcctggcgtccgtgtggctggcgcggaggatgtggacgctgcggagcccgctcacccgctccctgtacgtgaacatgactagcggcccgggtgggccggcggcggccgc

SEQ ID NO: 437138 - DNA, 1830 bp, Homo Sapiens
ttttttttactgactcagtgttcactgcaatttgcaataatctccccttcccccaagtctgaagccttccttcccccctattcaaattgtctgcgtcattctcataatgctactatttgggtactcctgaagccaaaccaataaaaaatgctaggggagctttatatgaattcaaacatgatgccaaagtcatctccaaaaaagtttattagcatgattaaaaacattttcttgaataataacagaaagaatttctaaacatgaaagaatatcagtggctataccttaaaaccagtatttggaattgaatggacagctttattgccagtcttcaaaaaacaatccattgattggttccatgaagtcgtgactattgctttgtctgggaatgagtccctactgcaattaagtataaaaaatatcttccatcataattggagtgtgacctgcattggagagtggctctgagtaaagagttgataaaaatccacaaagagttgggtttttgtcttttaaaaacattcctttacacactacaaagaaataattagtattttggctttttaaattcctacatgatatttagaatggcggtccccaagggtcctcccttcacgtaattgtgaacacagaccctcttccaagggcacatcccggagggtgcggactctgaagacttcgacctccacgtgtttatactggtttgagaacaaagacagcgtcatccagaacgtagtagtcattatacatgtcgccttcacacaggtatggtagtctggtgaaagcttcgataacaaaaccagcttttctgaaaacttcaggcagactattcacttgttcttcccagttctgtcctttgatttccaaaatttctgatggtttctcccacttgccaccgttttccacatagggatgaaaggggaggacaagggcaaggatgaccctgcctctagttggctccaagacacttctgatatcttttaacaaagtcaggggctgatcacagcggtccagcaagttcaggcagctgatgacatcatactggaaccccgtattctgccattcatttataccaaggactctgtatttctttttctgaagctgccatatcatagtttcagaaagctcagtggcatagatttcttcaaaatgagggctcatgatttttgtgacttctccatctccagcacctaaatcaagaagtctgtgggttttccagtctggattaattttaagcagtctctgaaactgatctggtgaaaacacaaacattgagcctcttcctagcaacccattgatagatgttctagacataaacaggctaaaaacagatgacacaaaagaatgatataattggataaatagccagcccgatttctcaatgctgttgtttaagaagatctgtgttccttgatcaaggtaactctgaacaaagacagcctggagtgattcgcataatttctctctgttgcacacataccactggtggttctccttcctgccgcccgcggccgccgccggcccacccgggccgctagtcatgttcacgtacagggagcgggtgagcgggctccgcagcgtccacatcctccgcgccagccacacggacgccaggctcaggcacagccagcccgccagcagtctcatcgggggccgcggccgctcgctcggatcaccgccggcgccggggcgaggaggaggaggcaccgccgcctccggccaccgccgccaccgcccgagctcgagccatcgcggccgccttgcccatccagcccccttcagggcaaaggctgggggtggggaggagcagccggcgcgcagcctcccgct

SEQ ID NO: 437139 - DNA, 631 bp, Homo Sapiens
gacacttctgatatcttttaacaaagtcaggggctgatcacagcggtcaagcaagttcagccagctgatgacatcatactggaaccccgtattctgccattcatttataccaaggactctgtatttctttttctgaagctgccatatcatagtttcagaaagctcagtggcatagatttcttcaaaatgagggctcatgatttttgtgacttctccatctccagcacctaaatcaagaagtctgtgggttttccagtctggattaattttaagcagtctctgaaactgatctggtgaaaacacaaacattgagcctcttcctagcaacctggtggttctccttcctgccgcccgcggccgccgccggcccacccgggccgctagtcatgttcacgtacagggagcgggtgagcgggctccgcagcgtccacatcctccgcgccagccacacggacgccaggctcaggcacagccagcccgccagcagtctcatcgggggccgcggccgctcgctcggatcaccgccggcgccggggcgaggaggaggaggcaccgccgcctccggccaccgccgccaccgcccgagctcgagccatcgcggccgccttgcccatccagcccccttcagggc

SEQ ID NO: 437140 - DNA, 1533 bp, Homo Sapiens
  misc_feature (58)..(164): n is a, c, g, or t
  misc_feature (191)..(294): n is a, c, g, or t
  misc_feature (450)..(459): n is a, c, g, or t
tttaaataaaaaagtaggacattcggccggggcgcggtggcctcacgcctgttaatcnnnnnnnnnnnnnnnnnnnnnnnnnnnnnnnnnnnnnnnnnnnnnnnnnnnnnnnnnnnnnnnnnnnnnnnnnnnnnnnnnnnnnnnnnnnnnnnnnnnnnnnnnnnaattagccgggcatagtggctcatccnnnnnnnnnnnnnnnnnnnnnnnnnnnnnnnnnnnnnnnnnnnnnnnnnnnnnnnnnnnnnnnnnnnnnnnnnnnnnnnnnnnnnnnnnnnnnnnnnnnnnnnnttaaacattactcagacatggtggcacatgtctgtggtcccagctactcaagaggctgatgcaggaagatcacttgagcccaggagttcaaagttgcagtgagccataatcacacactgcacttccagcctggcaacaaagaccctatctcaaagnnnnnnnnnnttaagtatataaaaataagactaatttcacaatccaaaaacaattacagaagggagggagatttaatgttgtccatagaaagacattaaatgtcagactgacaatttagttatggttacaaaccggaaaaccatgccatttggagtaatggaatttgaagttactagaaaacgacaacagatttttgatacagaatgacaaggcttatctataacacgtcaacgttttcgacgactctgaaatttataaatagctggggagttcaccgtttctttcttcaccttcactttctgagttttatccataagatctttgcgtgtttgaattttctgagcaataacgaacaatttcttctctcgttcaatccgctgtgtcaggcagttatactgcttttgcctttctttagctattcgcttaagtccagtctgattggtaactcctttcactttttctttctgcaaggtctctatcctgggcctattaaagactctgtcgactagctccggggctgtttgcaggtgagttgcgacatcaaactgttcaacttcctttttggtgtcaaaaaagaacacatgcttgttctgttgcttcccctggaaatccagcagatggagctctgattttagtctttcgattttcttagcttctgcaaccctcttcatttctatatatttgacgtcctgagttctcatcagctttagttgttctggggttacttcttccttagtctccttaataatatgtactccatcctggagtttaacccgagtcattttgtagtagaattcatctggatttttttcaagagccttcttccgaagagctttgaggtattcttgttttttacggtagtcatctgcacgaagtttgtaatctttctttttctccagcaggcccagatgttttcgaaagccaggctggcttcgctctctgtgttcccgctgccgggacttagccgccttccgaaaagccgccgccatgtctgtacagccttggaaaagatcagtggagaacgccggatccgcactgcctctgccgccaagtccactgattcctaccggaaataggcctccc

SEQ ID NO: 437141 - DNA, 968 bp, Homo Sapiens
  misc_feature (225)..(225): n is a, c, g, or t
tttttttctgcttcttggaggttttgttatttaatcctcatagtaacccaagaagggaggtgttgccatttttgtctctgaggagatgagggcagatgcaccaagtcacacaactagaaagtggccaagccaggatttgaatccacagctgctcctctccatcacagtgttgctttccttcaacagaggtgggggtgaaccaagcagggttttggatactagaangggtggacacccacctgcttcgtgcccagccctgcgcagggccccttcagtgggcaaggtccgggcttcttgcagcccatgttctgcagatgggacctacccgtgcttgtgttggaatctggccgccacatcctgttgctggccacctgtaccccaggccaggatgcagtgggctattagccaggctggaagtgttcagaggagtgacgaaccaggggctctagaaggcccatgggaggacctggagcctgatgccaagtcttgaatggcagatgcatctccagatggcagagaggacgttgggatgtgtcagcccaggtgaggggaacagcatggtgtggcagggaacatgcctggctgtggaggggggcatgcataaatggaatggggggtagggaaggttgctggggcctggtgggccttgacttgccatggaagccaagcctgaactggattcctattcatcctggccacaggtgggcgtgttgctggggttgccccagaccattcctgcagggagcgagccaggaagacaggcagacggctgttctgcaagagtgctgtcgggtcctctgaggtgaaaccccaaaggaaagcgggatcgggactgggggagggggattcccaagtccctgacacccgcgccgtctcggcctgggcttggtgacctcgtcagtcccgtctgccgggactaggccgcggccaggccgggcacagcggtacccggtccggcgcttgtgcgc

SEQ ID NO: 437142 - DNA, 734 bp, Homo Sapiens
  misc_feature (713)..(713): n is a, c, g, or t
tgaatggggcttccctaatctcctgccgaagcccagtgggtggcctgaactctggtgagcaccacacaccccagagtcccatcttcccaggaaaagctggggtcttacagcagagaggctctgggagcacatctccccttctggtccccaaaggcccccagctgccttgcccctggcccactaacccaggcatgctccttccagcactgggcagaggagtcaggaagatgcccttcctcacccccactgacgccacctctccagggaccttaacgcaggggctgggaatggaatcggaagctagaatgagcaggcagcagcagctcccctaggtatctgcctctgagaggacctgaggacagaggcgaggcccaaggcagaggccggagtagggccccgcttcacctggggcctcaaaggtgtcgtttattcatttggcaaatctccactgagtgaggaaatggatgggtgagaggatgggattagagaatgaacaaatgtcacctgcatattttcccaattccagcctgagcaggaacccggcaggagccaagagtcctttcaaggtgggagaacaccaggtattgctgatggggaaagtgaggtctgggaggctgggttagggcctaggacacgaggggcaagcccggagcttggggatgtggcagttcgtgtgtaaacaagtgacatcttcttggcgctcctcggatccntaatcccgggccgggacagcc

SEQ ID NO: 437143 - DNA, 867 bp, Homo Sapiens
gggcccttttatcttccaggccaccttcgggttagtgtaaccaggtggcttgaccaccaccaaaggaatccatttggggcccccacctttggtagaaaggggggaaaattcgagggcacagggaggttttaaagtgacttgcctccccagttcatgcaggagttcccggcccccagggcccaggttcttgaggggaagtcccggttttcaagaaagaacactcttatcctccttgtcgttcatttcctggcccctcatatggcccagggccaagacccaggagcaaagccagacacagagtgaggaggcaaaatcagagaatccagcacctccagccagaacactgatccagacagcaggatctggagtcggaaagtcaggttcccaaaaggaaatcccagcaaggacacagggattcctgttcttgaattaactgcactttttcatttgctacacctggtctggaagcccgagaagggcacagcagagatcccaagtgggtcacggcaccagtgctcacgaagagttctccagaggaccagcaaaactggagccaagaagaaaaatggaggttcaggctttcaattttcttttaaaacccctgattaaaattgagattttcaaaacaaaaagaatataaaacattgaggactaaaaggaacattttggtctgggcaggaagaagagcactgcggcctcctaggctgcattttgggggaatgttggtggggggctgtggtcaggtgatggggctccctatctcctgccgagcccagtgggtggcctgactctggtgagcaccacacaccccagagtcccatcttccaggaaaagctggggtcttacagcagagaggctctgggagca

SEQ ID NO: 437144 - DNA, 556 bp, Homo Sapiens
ggcactgaggtatttaatctgcaaagacccaagtatcgtgaaccttggttttaaaaagtccaattattgtgctcttataggggttgcacattcaaggcttacactgaattctgtctgcagttctgttttgtgtgaccagcacagtgttttaaaacgttgcattctgaatccatctttttgaaatggggcatgtactcttaaggtggccactagcttaccattcccaatttttcttagtctcaaacattcacatgtttttcaaggccttgggagttgggcaaatcctggaatatataggtgaaggtaggaaatagctcttcttatgccacatcttagtctgattttgaagtcagttgtgtaagtttgggctgacagtggtattttccagtgaagactatcgccaagaatgcatatcattctgcttatttattctagtggataaaaattcaacgtatatttaagtgtatttttgacatctgtgcttgtccaacacagggctgtagggcctgatgaaaagagaatgttgtgatttgagcttttataaaaaaggataagt

SEQ ID NO: 437145 - DNA, 1228 bp, Homo Sapiens
ccggtgtatgaaaacaagagagagggagtgatgatgagtggggagagaaagaaatccctggggtggcatcatcacgagaggtaaaggatcaaagtcctgcccccgagttccctccagcagcggggtggctgaagtccagctcatcaccttctcctacccgggttagggtaccggtgtgaggaaagacccagatagtccccccaggccaaggtgtgaggactcagaggggggtttagagcaccccgaggaggaggtcccggaggaggaggccgagcacaggctctcacagaagccggcgggtgctgggcccacaggaaaagcgtccttgctggagtggggtccccgcagcctgtgcagcctctgaaggccagccccgctggcctgcgattgacagagactcctcgctcttgccagatctcagtgtgccggtgtcgggtctgctgcctaaagactccggtggggcacgggtgccccccagccagggcaggggcttctttcgagggacactggggccccggcccagtgcaaagaacgtcttccagctgctgccccctggctaccactgcttctcccctctctcccctttcctcctttccgcaggtgaggccggggccttgggagttgtgggctccgtgggcgtccccagccggccctgggtgcgtgcctgggcttcctccagcgtcagcaggcgggtggaggggcagctgcccgcaagggacttgggcctggggagcaggcagcggcctgcagggtcgaggccggcggaggtgaaggtgtcgctgaacaggacgtccacatgggtgagcagaaactccaccaccaccgactgcacccgaacttcccggaacgccgccgcgccacccattcccactgactccagctccatggaccgtagcaggttgggtgcccagacaatggccaggttgcgggcatgcatgctggtgttggcactgtgtctcgccatgcgggccaggtgcctcagcaggtactccagggtcttgtaatgtggtgggggcagctgctggatgacatcgtgcacccgcaccagacgttcttcttccccaggcattgacatggcctcactgaacttcccatagagctggtaggtgagcagagggttcggaagctctcggaagtagagcttgcagagggaggacacgttgtggatgtcctgcaggaatgcagggccagacagctccgggatcctctcactgtcaaacttgtgcct

SEQ ID NO: 437146 - DNA, 900 bp, Homo Sapiens
cgggtgtccccaagggtcgcccgtttgtttctggggaaagctggggggctttggggatccggggatatctacggcctccaggggttggccagaaaggggaaaggaggaaggaagaggcagttaagggaccccctgggccctagagctaaggttgacgtagaggggctcaaggcggttgtagggcgccgagcagggtgctggggggctgagtagccaaggtggtcagggggaaagcaggagggggctggcgggtagctgagcaggaagtcgggggacctgtggagtgggggtgattggccaagcatgccgtaggaggcattgagcctgtcggggggcatggagcgaaagggactccaggagcgggtggggccagaatagggggacccctcacttgccccgatctcatagtacaggttctctcccctgtcgagtggtgcaggggggcccagagagctcctccagactggggctggggaactgggctggaaggatggggggcccagggggtacaagcctggcttggggaccccgaggaagggtggcaggcactccctgggggctggggagaagaagccgggggtaggaacctgtgaggggacagaacatggggactgggctgctgcctctggcgcatccctgcccccgccacctgccctgagctgggcactgacctgggcagggcctcggagtcccctccttgaggtccccatgggccgctggctcctcagcaggctcccatcactttgttgccttggtaagtagggtgggggtcccgggacccaggcacccgggtgtgctagggagttgggaggtggcccactccctaggtccccaggggctccccgcccacctccagagacagcgagcggtgaagggggattggaagcaggtgggtgcccc

SEQ ID NO: 437147 - DNA, 926 bp, Homo Sapiens
  misc_feature (404)..(405): n is a, c, g, or t
  misc_feature (583)..(660): n is a, c, g, or t
ggagcaggggaaaatggtgggcccgggggggttccggaagattgcgggtccaatcggtggtgggtgaatttctggtcccccctggggcggtcttggtaaggaaaacctttacctccgcggggctggaaccctaaagacctgtggctgctccccagggccaagtcccttgggggaaattgcccttccacgggctgctaacgctgaagaaagccagggcacgcacccagggcggcatggggacgccccgggagccccaaactcccaagggctccggccttcacttcggaaagaagaaaggggagagagggagaagcagcggaagccagggggcagcagctggaagacgtccttgcactgggccgggccccagattcctcgaaagaagcccctgccctggctggggnncacccgtgccccaccgcagccttcaggcagcagacccgacaccgtcacactgagatctgccaagagcgaggagtctctgtcatcgcaagccagcggggctggcctccagaggctgcacaggctgcggcgaccccactccagcagcgacgctttccctgtgggcccagcacctgctggnnnnnnnnnnnnnnnnnnnnnnnnnnnnnnnnnnnnnnnnnnnnnnnnnnnnnnnnnnnnnnnnnnnnnnnnnnnnnnagcagctggactgggggcactctgtgggtgtccctcgcaccggacatgaggatgaataaataatggtcatgagctgggctgcaggcacacaaaaactgattgttagggaatccagggaaataaaatttgatcccttgaccttgcggtgcagcagcaccacagcagggaatagcgcgcctgccggcagaacagcacccaccgcccctgcctctgccttgctcgcccagggtggcccccggggcgctccgggcggcgggggccgccgc

SEQ ID NO: 437148 - DNA, 1373 bp, Homo Sapiens
  misc_feature (4)..(5): n is a, c, g, or t
  misc_feature (7)..(7): n is a, c, g, or t
  misc_feature (14)..(14): n is a, c, g, or t
  misc_feature (27)..(27): n is a, c, g, or t
  misc_feature (31)..(32): n is a, c, g, or t
  misc_feature (49)..(49): n is a, c, g, or t
  misc_feature (52)..(52): n is a, c, g, or t
  misc_feature (55)..(55): n is a, c, g, or t
  misc_feature (91)..(91): n is a, c, g, or t
  misc_feature (201)..(203): n is a, c, g, or t
  misc_feature (237)..(237): n is a, c, g, or t
  misc_feature (240)..(240): n is a, c, g, or t
  misc_feature (272)..(272): n is a, c, g, or t
  misc_feature (311)..(312): n is a, c, g, or t
  misc_feature (315)..(315): n is a, c, g, or t
  misc_feature (417)..(417): n is a, c, g, or t
  misc_feature (428)..(428): n is a, c, g, or t
  misc_feature (450)..(450): n is a, c, g, or t
  misc_feature (1003)..(1055): n is a, c, g, or t
taanntngtctgtnggtttagtggggnatgnngggaaagaagggtaggngtngtncccccatccccgtgcacaggtcaggacatgctgggngctcctgggcagggcctcggagtcccctccttgaggtccccatgggccgctggctcctcagcaggctcccatcactttgttgccttggtaagtagggtgggggtcccggnnnccaggcacccgggtgtgctagggagttgggaggnggnccactccctgaggtccccaggggctccccgcncacctccagagacagcgagcggtggaagggggattgggnngcnggtggggtgcccccacactcctgctggctctgttgctcggccacctgctgagcccgctcagccagggccagggccatgaggcgtgctgggttcttagggggngggggtggggnacccccagggcgcaggagaganaggggagggggtggcagtggtgactccatatcaggaccgagtgggcctgggctccccggagcttgctgcacatctcctgctggcaggcgtcagtcagcggggcctcggctcctcgcagcagcaggggtatgagatgggggcgcaggctccggccggggctgagagctggtgttggggtggctgaggcaggtgctcccccagcccccagcagttctaggacagcgggtggcactgatacagccaggggctctgagatgtctagggcagcaggcgaggcggggctggtgggccccggggcgagatggcctggggggtcaccctgggtgggaaggcagaggcaggggcggggggtgctgggctggcgggaggtgcgggatcccctggggtggggctgctgcagcggaaggttaagggatcaaagtccagcccccggagtccctccaggcagcggggtgggctgaagtccagctcatcaccatcatctagccaggctgagtgtacggtgtgagggagacccatgagagtgcccccagcccagctgctgaggactcannnnnnnnnnnnnnnnnnnnnnnnnnnnnnnnnnnnnnnnnnnnnnnnnnnnncaggctctcgcaggagccagcaggtgctgggcccacagggaaagcgtcgctgctggagtggggtcgacgtagactgtgcagactctggaggccagccccgctggcctgcgatgacagagactactgggtcttggcagatcttaatgtgacggtgtacgaactgctgactgaaggctgtggaggggaacggttgaccaacaaacagggtaggggcttttattaagggacactgggggtcccgggccaggggaaaggaacgttttgcagctgtctgaccactgactaacactgagtttacgctatctaacctttactact

SEQ ID NO: 437149 - DNA, 577 bp, Homo Sapiens
  misc_feature (472)..(472): n is a, c, g, or t
tttttttcacattttcaccattttattcattaatgttgtcagatggtttagtggggcatgtggggaaagaagggtaggagttgtccccccatccccgtgcacaggtcaggacatgctgggggctcctggagggagaggaggatggggtcagcctagcccctcccaccccagatttgtgcgagggcccccaggatggagggtggtgggggggatgggcagacccttcagtccagggtagggaagctgagattatatggttagggacccacatcagaagcaagttacaaagttagaaacctggggttagttggtcgggtttcacgaaattacaaaacaaggtatttggttgggcccaaatccaatgaggggcaatggaaggaaggacggcccctcccaccttgtgcttaacattattcttcggttctggccctcaaagtggaggaacctctggatggatatataggggtaatgncgcaactccttcctctcctctctcttcatgcctccagtgtgcacacattcatttagcatatctaactcttcacttctcctttagttagctcgctattcctcccta

SEQ ID NO: 437150 - DNA, 955 bp, Homo Sapiens
gtccctatagctgttcaagatcaaatccagctatagtaacttttcgagaaaatcattgaatgtactgattgcccggccatctcgggaccatcaaggagaaatttggcattggggaataacctagaaaggtaagttaaagatttcagggcaaaaggatctttattacataaataaggggctggctccccatgcttaacgataatttctagtaagaaggcttgcatggcagaatccagcacttcatcagtaacaccagcctcatccaggcggatcttctctttacttgaccgtgaccacatctgcttcagggccaggattcggggaatgaccctggtttcctctccacagcgaatgtcaggatgtgcgtccagcatggccctcatgagtgtggttccactccgaggcacacctccaataaatattaaaggcatatctttgtgataggcaaaggttttgttggctttgaggtccaggccagttctcacagtggtccttgtgctctccaatttgactggctggctacgttcctctatccggtgatggcattccatggcatgctggcccaggtaaaacacagtcacagaactaatcaccagacatgccaatagtaagttctgcttcagctttccaaccatcttgatgtggttatcttgttattaaacagatattttgctcaaaatgattttcggaaaatgttcaggccatggacagtctacttcagaaagataaccaacatctgggatgagtgaggagccgccgcgccgcctggacggcatcctggcctcagccgctggtcccaccgccttcggtggggggccactcgggagcccgccctcaccgccaagcgccggcagctgccagcctggaccggccccgcagagcagcgccgttccgacccgcaaccgaagccgcctcagcagcgtctcccgcggtcgccaactcagcgacaaccgcc

SEQ ID NO: 437151 - DNA, 2131 bp, Homo Sapiens
  misc_feature (68)..(68): n is a, c, g, or t
  misc_feature (147)..(147): n is a, c, g, or t
  misc_feature (162)..(162): n is a, c, g, or t
  misc_feature (186)..(199): n is a, c, g, or t
  misc_feature (476)..(476): n is a, c, g, or t
  misc_feature (702)..(758): n is a, c, g, or t
  misc_feature (943)..(974): n is a, c, g, or t
  misc_feature (2045)..(2081): n is a, c, g, or t
gatctatatgctacatctgggagtggttatctctcccccccacccgcgctacgtccttaggaacgggngacgggcgcccaatggcgacgagagggaagtcggtctgttccgcgcgctcgcctgtgcgttgcggcccacggcagaggnctctgtaacattgantctactcgtgcggatcggttccannnnnnnnnnnnnntacatggtgctcggcacggctgcatgcgcgtgctcagtcctattccatctaccagcccctgcacgtaggtgcggcgcacttgttacactcgctctgtggggcgacgagtaactgtttttatgtatgttagagagcatagtacccaacgccccttagtcgctggtcatatccgtactagtgtgcccagctaagcagtagggagagaccccacacccttgaggcggctaaacatccgccacgcactctccgctcgtgaggacactagcatctctcgagngcagcagcgggatcgtctccttcttttgtgcttctctctctgcctgccgagagagcacccggcgatgcggcgagtgtagtgttgctatacgctagcagcggcccggtcgtgctccctccaccgcgcgcggcctgcttcttgtgtcgggcgcgggaaagaatatcagcgtcctcttcgtggtcttagaccacggcgtcttcttttctggcagcgcgagcatgttcgnnnnnnnnnnnnnnnnnnnnnnnnnnnnnnnnnnnnnnnnnnnnnnnnnnnnnnnnnttggttttgctaaattattctaatgtcggagagggagggcgcggcgccacctctctgaatacctgcttttcctcggggttgagttgggcgcggtcgcttcgaatctgcctctgcccctctccttccaggtgcttcgccgtcgttgggtatggtgccgttgtggatctttctgatctttgatgacnnnnnnnnnnnnnnnnnnnnnnnnnnnnnnnncacattgaaagcttttattttgaaaaataaaatacaaaagtcattaggttgtaaatgtataatggtaatttcccaacttctcagaaacaatacaatgaattaaataattaggatatttaatattattcacatcaatacacttaaacaggcacacgtgttctacaaaacattagaacatgtacagacaacctatttcaaaaggagactgcccaagtctgcttacaggatcccatttttaaaccctctccttgaaaacaaacgtcataatgtaagaaaagagaacaagaggagttttaacaggaaacacatgttccttctgggctccttactgcagggctgtgcatgaaatcgggatcaagagctctttgctcaggaggcagatccctcacgaggcccaaagctgtgcggacacctccatcctctcagtgggaggaaactggcaaatgcacaggcggcgcagccaaggtgcagacgctccaccaagcttggcaggggacagccaatcctaggaatttcccttctgctgaaaaggcagcaatctttcctcatgtatggaagaggctcctggttctgctactccacttgctcagtctgttgtttttctttaagaaagtcaggtagttggaattctcccttatagacccttcgagtgttttcaataattttgggatcaggttttccgtagttaggtgggttggcatatgggtcatatccaagcttggcatgcataggagcaatcactgccatgtcttgtaaaacatctggcggtatcttcccaacccattttgatagagctcctacattgactggcttgattacttggtctgtagatctctccactctgggatgagtgaggagccgccgcgccgcctggacggcatcctggcctcagccgctggtcccaccgccttcggtggggggccactcgggagcccgccctcaccgccaagcgccggcagctgccagcctggaccggccccgcagagcagcgccgttccgacccgcaaccgaagccgcctcagcagcgtctccgctctcgacgaattcgagctcggccgatttggcctgatnnnnnnnnnnnnnnnnnnnnnnnnnnnnnnnnnnnnncggccgccaccgcgtagagctccaattcgcccatagtagtctatacatcc

SEQ ID NO: 437152 - DNA, 725 bp, Homo Sapiens
aatacctgaagtatactattaagatagcaagtattgccgagattattcagtcccacaaatggtaacaagttttctcccttctcacagtttataggtgaagactgtgctgcaggaacaacttgatcaatttcagatgctctatattcagaagctttttcttcattttcttgagaatctgtgaaatccaaagctctcttagtttcctttttctgaaaaaactttaaggaaagtctgtttttctttgaagggctacctcttgaaagtccattactttcactaggtatgacaccaggcatttttttcttcaaatcccaaggagtgtcaagagttaatttatagaggaaagttgtaatcaccaattatatctggtcatggcccaaagcgaagtccgcggcggtgacgccggcaagtccagcccgaatgagtgtgggtgcgacaggtgagtccctgccccgagcccgccgggtccccggccccaggaaaatctggtcggctcgccctccccgcgggggagtgaccatccgctcccaagagcgggaaccccgaccgccgctcgctcccgccttgcaccaacaccaactacatcccgggagcggcgcccatctgcgcccgccccgggagagccaggagcgcaacaagcagcggccccgctcgccgaacgcctgaaccgctagggtctttagcactccgccaccgaggggaacttggcgcgtttttcccagtag

SEQ ID NO: 437153 - DNA, 887 bp, Homo Sapiens
  misc_feature (155)..(247): n is a, c, g, or t
  misc_feature (535)..(576): n is a, c, g, or t
ttagtgcagcacttgctaccatcttccaatcctttccccaaccaggtgggatagaagatgccatctgattggaatatgaaaattaaagcatttctctaataacatagtaccattgatgaagtctccatagattttctaacccaaatgtgtgtgannnnnnnnnnnnnnnnnnnnnnnnnnnnnnnnnnnnnnnnnnnnnnnnnnnnnnnnnnnnnnnnnnnnnnnnnnnnnnnnnnnnnnnnnnnnnagatactttctgtcgccattacgttgcaccgttcagagctgcaagacagcagtacagatagggagaaatgcccaggagcatctcatcatgtggtgcatttagctcacttcacaagccgtgcagctgtccagagtctgtctttccatcagtcctcctcttttctcttcacttctgcttggtttttatgaaaacaatggctctgatggattttgcacctgtgctagcgcttgggaaaggtccatgcaggaatgggcacagtcacatgatgaatgagatggcatcatcccnnnnnnnnnnnnnnnnnnnnnnnnnnnnnnnnnnnnnnnnnngaacaggactagaaaacttaattttttttgacatatctaaaaaaggggacaagaacagtagcatttgttctccccatggggacaggaatgaagagggaggagggaagagggacttgatttcttctgttcacaagagaatggttggaggggattcttcagagtttttcaggggatgggacccaaatgtagtgcccagactggtcctcaatgatttgtttgattttgttataaatctcttcccagtgagtcaccctgtacaatggctgtaaagtactctccaaattcctgctccagtttcatggctttgtcat

SEQ ID NO: 437154 - DNA, 2885 bp, Homo Sapiens
  misc_feature (898)..(898): n is a, c, g, or t
  misc_feature (1136)..(1148): n is a, c, g, or t
  misc_feature (1900)..(1998): n is a, c, g, or t
  misc_feature (2281)..(2321): n is a, c, g, or t
ttctcacccagttctcttgctactaaatcaggcacctgctttctctaacacacacctctgttacagcaggcctctcccaccttgtgtacctcttggggaaaatgtcagcattttgccaccacagatgtggactcccatctggttggtgctatttgaacgcagtgtctggggctgggttggaagaccaagcacacaactttcacaaagggcctgtcaccaccccagggagctgtaccgatccccaggacggcccagctcggctagctgatcatcactaaggagagagccctctggcccccaaaagtttgggatgttcttcccactgctttgcccacgccctcccttctcaactactttaagaaggtctctgagccacagttcattgcaactatcgtttattaaaaaatatatgtctccttggaagaaacactggtaaacccactagtatcatgcttactttgaatctttgtttctcttccctgggagggggagggctgagcacggttgagactttgccacttagttaacatcagagaatcaacctccctgctcacccctcctcaccagagtcacagtcggctgtcactttatccctttttgccttcaagccattgtactgcccagggaaagccgctgtcctttccttatcctcatcctgggtcccatgctttatacagttagcctcattctgctggttggacaactgttaacagagttcccggattcggctggtagtgcttaaagcatcctcaacattgcctcgcttgcaccagccctaacccagcgggctaggaaacaagtgcctcaatcctagggccaagcacttctctgttctcccctgcgtcgtccctccagtatggaggcgagggaggcacgttggcttcaaaggagcacagtnggggtgggggggacctgaaccacacctgctgcctgcacttgtggcggtgaagattcccttgatcacagtcactgccatcagactctgggaaaaagcaacaaggtttcacagctcaccagtaagcgaatcttagctctacagctcaaatgtacagcataaagtctactttcctcttgaagaaaccataagctaccagctgttggggaggggctggagcagagcatatgaagcagctgcnnnnnnnnnnnnnccaaatcaaactcatgacgcagctggccaagcaagccaagtgctgtcccgccatcccagcacagaactggaaggcaagtgactccctgtccctgttggtggaacccaggaaggaacctcagcagagccctccgtgtcctcctctcagcccagcccctgctttcccttctgctgacaggacaaccaggcctgtgtcacctactccatcacaaggcctggctccttcaggacctcataagcctttagaaccttggcaaattggattctatgcattcacttaaatagtaaaagtaaaatttgcaataatgaaaaggctgacacagtagcacaacatggttttggtttaacagcagcttaaaaaggaacaaaaaggaaacctctcatgcagacacatcaggtggcataaaacaataggcaattccacgcggagcatcattagccattctctctgtccgcacacaggactctggctgcacctcaggggcagcagctgctttcaggtcaagtctctcaccctctcaccccaggcaaaagcccttcctctccggcctcaggctgacccctcctagctctcaagagaatgaccaaatgcgagtgcccttagtgcagcacttgctaccatcttcaatcccttcccaaccagctgggatagaagatgccatctgattggaatatgaaaattaaagcatttctctaataacatagtaccattgatgaagtctccatagattttctaaccccaatgtgtgtgannnnnnnnnnnnnnnnnnnnnnnnnnnnnnnnnnnnnnnnnnnnnnnnnnnnnnnnnnnnnnnnnnnnnnnnnnnnnnnnnnnnnnnnnnnnnnnnnnnctttctgtcgccattacgttgcaccgttcagagctgcaagacagcagtacagatagggagaaatgcccaggagcatctcatcatgtggtgcatttagctcacttcacaagccgtgcagctgtccagagtctgtctttccatcagtcctcctcttttctcttcacttctgcttggtttttatgaaaacaatggctctgatggattttgcacctgtgctagcgcttgggaaaggtccatgcaggaatgggcacagtcacatgatgaatgagatggcatcatcccnnnnnnnnnnnnnnnnnnnnnnnnnnnnnnnnnnnnnnnnngaacaggactagaaaacttaattttttttgacatgacatatctaaaaaaggggacaagaacagtagcatttgttctccccatggggccaggaatgaagagggaggagggaagagggacttgatttcttctgttcacaagagaatggttggaggggattcccttcagagtttttcaggggatgggacccaaatgtagtgcccccagactggtccctcaatgatttgtttgattttgttataaatctcttccagtgagtcaccctgtacaatggctgtaaagtactctccaaattcctgctccagtttcatggctttgtcatagatcttatttgcttgttcatatgtctgccttcggttcatttccataagggcttcaatggacttgggcttgatgaaaatggcaatggggtaaagttgtgcttgctgcagtctcttgatagcattgccggaaacatctaagatgcagtgcttgcccctctctgcaactgcccgcactgactggatgctggtcccatagagggttatcatttaaaattggcccgcctccgatgaacttgttggtcc

SEQ ID NO: 437155 - DNA, 154 bp, Homo Sapiens
agctcggcacccgcccaatggcagccggcccaatggcgccggcatggcagctgtcctttccttatcctcatcctgggtcccatgctttatacagttagcctcattctgctggttggacaactgttaacagagttcccggattcggctgccattg

SEQ ID NO: 437156 - DNA, 861 bp, Homo Sapiens
  misc_feature (788)..(820): n is a, c, g, or t
tcctttccaactcttacatggtatgattctgtgcttctgcaggaattcttaattgataaactgaatcttccataaatcaagagaactgatgtgtactaaaatagcacagctgaactaaacctttccttgttaggaaaaaaacacatagaccatgttcaaagcttaactttccaaaccttactagacccattccctcttcagccaaccaaagaatagcccatagagttaaaaccaaatagttttaattatataaattacttttaaagtataatgtaaacccattaaaatatattaactctatgccagttttcctacactctaatttacagtattttcattttatctacattcaagataatatgtacagttaaggaaggggctatttaatattcttgcacttctaaacactagtaaaagttaaataaaacacagacgaagaacagaatattaacaattatcatattgtgccaaatttttaatgaaagtatgctgagtactatttgtgggctaaagaaacaaggcaaaggtaaaaaaggaaatcctgctaacaagtgctgatgatcaaatgaatttagttgtgtttttccataacttaaaaaagacaggagggagaggattttagcagaaatctatttaggtaatactgaatcatgacattccagcagcttttatgaaaaactaatgtataaagtagtattttggtactagtgcagtggaaattggttttctttgtctaactatggacagccgctctcgacgaattcgagctcggccgatttggcctgatnnnnnnnnnnnnnnnnnnnnnnnnnnnnnnnnnatgcgccgccccgcgatgaccgcgagttcgccctatagtat

SEQ ID NO: 437157 - DNA, 379 bp, Homo Sapiens
agaaggcctggctgttgatgggcaatgctattcctgagggtccaactgcctatgtgctaacttgggagcaaggtcgttatttaatatggaatccctgcagtggacatttttatggacaatttgatacattctgtcccttgaaaaatgtgggctgtttaataggtcctgacaatatttggtttaatattcaacgatatgaatctccactaaggataaattttgatgtcaccaggcccaagctatggaaatctttcttttcaagaagccttccatatcctggcctttccagtgttcagcctgaagagctaatttaccagcgctcagacaaagcagctgcagctgagctacaagacaggtttgaaaaaattcttaaagaaaa

SEQ ID NO: 437158 - DNA, 790 bp, Homo Sapiens
  misc_feature (116)..(130): n is a, c, g, or t
tgtagtatctggaatttggtgatgccatttgctcgagtaaggcagagctggaataaagaaagagcgtggaaagcacgagcaggaaagggtagcgatagaagggtgctaacgaaggnnnnnnnnnnnnnnntgttgatggtgagggtggagaggaggggcctggtagaccctggccactgggtaaggccctggcctggctgttttggacaaatgatggatcttaatttaaagacctccagggaggcagatacgcaagcacctgggtctgaacctcccaagcagtcacgggtctgtcagatggctcgaaatcctcaccggtgcagatgacagcgagacagggcagctcattgcccctgcagtcccccgctccccactcctcatggctggatctctgaccctccctcctctgctccacgagaaagaatctccacctcttgggcaacagtctcttggtatcacagttctgtggcgggcatgggactcaagggcgttggccttaggcaggctttcaaggcaagggttaggccgtctctgactccctgcagataaatgccaaatgctgaatttgtgcctttccttggattcctgaaaagagaggccataccttaaattctccaagcgctccctgctccgcaaaatatcaggaaccactgttctaagggggaggaaagatgagcctgtgattgcccatgggtaaccatgaggcctgaaaatgtttcccgtcaataacttcagccctcctgattcctggggttcatgagccaccgtcttcgcctattggtacgcctca

SEQ ID NO: 437159 - DNA, 931 bp, Homo Sapiens
  misc_feature (72)..(129): n is a, c, g, or t
  misc_feature (200)..(200): n is a, c, g, or t
  misc_feature (845)..(881): n is a, c, g, or t
acagggccaccccggcaccaggctccacaggtccggctccagcaccagtggcaccaggagacgcacatggtnnnnnnnnnnnnnnnnnnnnnnnnnnnnnnnnnnnnnnnnnnnnnnnnnnnnnnnnnnaaaggcagttccgggaacttgctccgaaagtagcctgcagctccaggcgatgtcgccagccagctgtttgnccaaagccacctgggctgctgggatggtcacacggtcccgctcgaaggccagcagcctctcctgcagtgtcagacacagcggtgctggggagctgagctgtggtgtcacctcaggatcagtttctgcaggcccttctggggcagacgacgagggggccaagggcaacactggctggctaagggcagcaggtggagcccggggctgcaggtcgtgctgtggccttgagcaggctcagttccttccagctgtctgccttggtgtcatcctcatcccgcgggctagtggccctgtcaatgaaccgcttcacggccagggtggcaatgcccagcacagcagccccgcccacgcccagcaccaggcgggcattggccaggaggaagtccaccatgctgcccagcccttcgtcgctacgccgcttcccccgtttctgggagaactctgccatggtctgcctgcgtcgcagcttccgcatgacgaccggaggaggcagcgggaccacggcccctgagctcagaccagcctgggaatggaacgtgaaggaccctggaacccaacgactagggccccgggggcagccgcggacttcgcagcacgcagacaagcccgctctcgacgaattcgagctcggccgatttggcctgatnnnnnnnnnnnnnnnnnnnnnnnnnnnnnnnnnnnnncgccgccaccgcgtcaactccaggtcgccctatagtgatctatacatccc

SEQ ID NO: 437160 - DNA, 643 bp, Homo Sapiens
  misc_feature (57)..(57): n is a, c, g, or t
  misc_feature (76)..(76): n is a, c, g, or t
tttgaaggacatcctcacaactgtatataactgtaggactttaaaatctgtccaagncctgggttttcttgcattnccttatattcccataactctgctaatagaacatgaattagatatgtaaatcagctctcactaaaagcgaaatgcaagatcttagtcatcttagataaaattgtctgttgttggttattaaccagcctacatataaaagaataacttttaaaatgggatggttgcataagagtttttctttaccccttgggtcaaatgaggggaaattccatggcacagaataaaatgtatgctgtttccacagaaaatactctgtttccacaaagtttggcaatagcattcttggacaactaatatctttcctttctcacacttattcaataaagcaattcactgcacaactccctgaagtggtggttatggatttggacataacataacccacattttttccctctctgggactctaaggacatttcttgccttaacactaaagacattccaacgtggctaatcatgtatataagtacacatgctgtttgggatgcttggagatggtgtcaactctttatcctaagagtctatcttctggagctatggatgcatagagagacaagatagagccgag

SEQ ID NO: 437161 - DNA, 665 bp, Homo Sapiens
  misc_feature (328)..(392): n is a, c, g, or t
gaaattagtcttttgtggaaattctgtaggcagtatgattttgaaaagctaaccaatgataattagcattttagttaatactaaatgcataaaattataacccttgaaattaatttggtgctggcagttctggtttagtcatttttaccagtagttagtagtattaagacctgcagtatatgcactttttgagtagctgtcaaataattgtagttgagaaacaacttgtttattctcacaattcagattttctattcagttttgtctcaaatagtaagttattgtgaacaatttaataacggccctcctgttctagtttgcctaatannnnnnnnnnnnnnnnnnnnnnnnnnnnnnnnnnnnnnnnnnnnnnnnnnnnnnnnnnnnnnnnngaataagttatgtgggtttagtaattgacctatttattcattgcttcactaattcatccagattagttttaagtgtgtatatgtatttgctcaccagatcattttcttgggaccttgaactgtgaatgttttgtcctaaccatttaatattttctaggtacttgctgcaagttcttgaactattttaccagctttaactttggggctcttagtttcttttctccagattcttgttattttattttatccaaataaatatttaggtgttctaag

SEQ ID NO: 437162 - DNA, 686 bp, Homo Sapiens
agttctttttggttcgtctcctgttgtatctgtaaacttcgaattcaatcaccgaaatcacagataaccttgaccaaattccatgtacatctgcactgataaacttaattggagggcaactgagaaacggcaaaagtcattgatcttcttctgcaatggaagtttcatctcagtcaatactacacactggtatttatctaaaaaggagagatctgtggtctcattgaaaggaacagaagatgatgtgacatgaacgtatggatttagttctgcaatatgtttaagtacagcttcagccctgtttctcttattaacagcatcatcttcactgagaaagaagttggttcctagatcccatgcttggcatttttctgtatcatgaattgtaactgccttaatccctgcaagaacaagattctttgcaatttccaaaccaagaccacccatcccacttaagaaaacatgggacttggccaatcttctgcattgctgtgtctccaagaacgtacctctgtcgactgtacaatgcatcatcgatttccacagatgctgttgacataatgggcaaatttttatttgtgctgccagtcccccaggaagaacaggacgcctcttccccctgatgggcggccacaggctcggatccttccattgccgcctgagacaccgccgccggctactggaag

SEQ ID NO: 437163 - DNA, 1416 bp, Homo Sapiens
  misc_feature (79)..(88): n is a, c, g, or t
  misc_feature (113)..(127): n is a, c, g, or t
  misc_feature (135)..(141): n is a, c, g, or t
  misc_feature (143)..(265): n is a, c, g, or t
gggggggacccaacccccttgttctggccccggtttttttggggaaaaattaagcccgggttccttctcccttgggggnnnnnnnnnnaaaaaagggtttaaaaagttttttnnnnnnnnnnnnnnncccccccnnnnnnntnnnnnnnnnnnnnnnnnnnnnnnnnnnnnnnnnnnnnnnnnnnnnnnnnnnnnnnnnnnnnnnnnnnnnnnnnnnnnnnnnnnnnnnnnnnnnnnnnnnnnnnnnnnnnnnnnnnnnnnnnnnaaatggttctttattcataaacttgatgcaagtttacaaaatttactgtacattgccaaataaatctgcaattaaaaataaaatccattaaacaaagcatgccaaatgtgcagctatcagtctgcttgccatcaggatattaaagaattcaacaatgtattcaagatttagccttaggcttaaggaactttactgatttaaagaattctgccttgtcacttgttatctgagcaactggcaatcagaactttatacaaatgtaatcaagtgaacaagaataccagaaaatctatttactgctctcttaaccaaaatggaatcaaaagaaattaaacacacacaatgtagaaatgacaagtctctcagatgtggtttacaaagttaaaaactgaatctcaaagctaatgcacaagaaacacttttgaactttgtaacttgtttgtgcagaaaaatgtgcttctggatttcttgttaaaagtgcttaagaactagaatttacttttaaatcaaacgtgggtgtataaaaaaatctattaccaaccaaaaaggactgattcaggtaaggcaataaaatggagagtcccttgatttgagtcaggttctataaaaaaattaacatatgtagagtttctattaatctttcaatgtaaaagccattgttttgacatggcaaaaattactgtaagagtctccaaattaagtatctttttgtacttaactgcacagcttttgctcaaggagtctttgtgccaatcactttataagtttattagtttacaaacgattgcaacatcccgttaataaaatggaaacgtaagatgacttagtattttaaataacttgaagctctgtactgtggctcttgttcataagaaacactgaaccaacaagcagcagattcagcccagccaagactctgatgccccagtggaaatcactactcacaagccttaattgatacagttttacactgctttgcctaagaagtacaatacaactcaattaagagtattatcttcaggaaacaattcatatcttcacatagtcattaaaaagtttaacaatttaatgagtaggtttcctatcacattttggcaatatcataaaatggttttagacatgaaagagctattatgatttagaaggcctta

SEQ ID NO: 437164 - DNA, 468 bp, Homo Sapiens
cttgatcaaggcagaaatatttattttaagataatgtaagaatgtaagacaggttgctttgcaatttataataagaacagtaagttggaacttaagctaaataaattgcttattatgaaatgattctgagaagtaccataaactgtttatcatgtatgctttctgtaaaaagtttaatatgaattttatgtataacttaatttttccaaagaacagtttatagaaggaaacactgacaataacagcatacatgtagtcagtacattattattttcaaaccactagcaaattttaaattgatataagtaacaattcagtgagatatttttatctctcattttatagatgataaaattcaagagtgataatatgatggaaatcactgtaatttactttcttttctattttatcagaacatttatttattcacattttaatattatgttgcagccttacaaatgttttcat

SEQ ID NO: 437165 - DNA, 1936 bp, Homo Sapiens
  misc_feature (15)..(15): n is a, c, g, or t
tttgtgttttgcaanaatccccttcctttcaaggaacttaaagaacttgatggagaaaagaacttgacggccattctctctgaagtcttaaggaggtcaaaagtaatgaaggaaaacagaaggggagtgctcgttagagcccaccatgccccacagttctgaggatgcgggtgcgaggactctgaagcaaagcaaagcagagggatctctcagacgccaagtcacacagctctttacacatcgaaaatctgagttaatgttaagacaatgattagtcaatcctgaaaccatttagtgcaattggggattcctcattttaagtcgctgctttagaattccgctccccctgctgtctgcgttccggtggaagcggcatgctgcctttggacaaacagcctctgcaggggcagacacagttgtctggactcttttggaaatgaacaaagacactaaacctacagaacatcgtttttaaaggagatagttaaaaagtaatgccctaaaagccagaaatatttcaatcggcttgaaaagtgacacacaacaggagcaggaaacaccagtttttagtattttgccatcttaggcacactgctacttggaaagattttttaagtgaactttgccttataaaaatattgataaatatatgtacttaagcgagaatccaaatcgtacccaaacttcatgaaagtgaaagtctattgctatgacatctagaagaaacactgagttatctaaaaggcattgttcagtggtgggcagaaaggaagagaaaacggggggttccgagttagctccattcaagaggaagacacggttgtggcctcagctgcctctctactcgtcatgtaagggggtcttaacatgtcagaacattgtggggtcctgcaacttgctgacagatctcgatggagctgcttatgggactccatggggggaactgtaaggactcaacgtatcactggtggacatgcgcgatctactctagtcagaagcatgacaccaaaccccaaccacccaggcacagtggcagttcagaaaagtattgctctgagagatctgagatttaaggtggcccctggctgctccgcgtgtgatgtcgccagagaggactctcactggacaaggcccagtggtctgaggctctgtacaaagcatgacgccacatgtgatcattctcacacgcacacacagcctaatcatccaaaacccccctttgggctttgtcgtaaaaaaaccctccatttaccaggagggatgctgaggcttacagggatcagatgtcctggacaagtcatccgtttggtaagctgcagatgtggcaaaccacggattctagccacgctctttctactgtgtcatcacaacaccaaagtctgaaaagacacttgtaaaaaagaaaaagcttaaggacatttaataatgtagaagtgttccgatatagataaacatctttccagaatctcaggtaaagaacatcttggctgaactgacaacgaatctttttgagacacaacgtttctgttcccaaaatgattacatcgacaacaggtgcaggagggtagaacaaagaaagaaccgcggagattacattacaaagatatatgtttaaatgagatttgtaaacttaatttgtttgcaactccgggtgcaaagaagagaataattatttttctctatactgtagttaattgaacttaaggtacaactgtgggaaagtattttttaaaagttaggacaggtttttacatttttaggtttgatccagtgttttcccagttttgactaatcataactgggttaacacacatagcaagtttccttaagggcaaatggaaaatgctggcatctgagcggggtggtcagaacgcaccccacagccagaggcgccttcccggtaacacagcacgccttcctgttagtgtgtcgccag

SEQ ID NO: 437166 - DNA, 839 bp, Homo Sapiens
agggctcggtaaaaaagccccaaggcggccaaatggttttaccccatggaaggcttgggttaatgtgaaaaagccaaatgccattgtttaaagtgttgtagttatggtgccctgaatacatttgtttagtgccccagtaaaatgttagttatcaggtgagggggtgggatgcgggggttgagtagattttgcctcgtccactcatagaggcaggatgtgcaaggaggggtggagacatgcagcaagggattgggcatgaaggttttctccaggcccggggagaacactcggcctggagatattcaggagtccctggcccagaggagattacaactctgcagggatatgagccacgagtggagtgtagacataggcctaaggaagcaatcagacacttccagaatagaggacatttgctaagacagctggcctggatgcttcaaaaagtatcatgggaaaatatgtcggggttgttgtagactgaaagtgactagagttgaaaccaaaagaatgtatgaaccttgatgggacctggttgttgtcgttgtttttaaagacaaacattctggagacaattgttgaatactgattaagggctctgtattagaggctataaagaagttactgtttatatttttaggcatgatcatcttaatgtaatcatgtagaacggtgtctttgtgctcaggaaatctatgtggtaatactcaggggtcgaaatgtcattctatgtacacatgcatggggtggagagaatagtaaatctggcaaaatgttaacaactattcaatccaagtggagagtatgtatctgagtattcattgtgctagcctttcaac

SEQ ID NO: 437167 - DNA, 603 bp, Homo Sapiens
ttttgaaggttgagaaatttattcagatttcttcataattccccccaaaagctccaaccacgttgccagtccttgggtgctgcagttggtcggggagaggggctgtgtggaggtcaccttctggtagacggagacccgcttttcagactctgtggcgcagcaggcgggccaggaacatttgggccactattgctcttagccctgccgcgcctgactttctctcctctactttccttccgaccgtagggacaagtgtggggatccgctttgggctccaaggccctgcccgcactggcagcaccaagcgggtgtagaatgactggaaggagcagggaaggaagatgggtgtcaactgtcccggccagtggctgcgtgcatgtgtgtgtgaacagggaaaaggccaccctctcccatgtttctcccgtctcctcggttctcctcggagacccgcagggctgcccgaggtagctccgagttgccctgggtcgctggggcttggtccgcatcctcctccgctaggtcgctcccgcgttccacagcgccccgccgctcggtgtgcacgcactgcggcttaacccagccgacaaggcacgcttgccaaag

SEQ ID NO: 437168 - DNA, 578 bp, Homo Sapiens
cgagtaatactcttagtaactggtctattataaatggaatgagaaaaagtgtaggctgctgtgtttgcatacctggggggtctgccatttaggcacatatgtttctattgaaaacttctatctccagaattacctaaaactagatgggaatagtgaagtcactcactgctttattgcagttactttagcttcgtgtttcactgttcgggaagtgtctaaaacatggaattacagcaaagtgtctgcacttttcaaagacctaagggaaaagatggactgatgaaggtgggtggggtttgttcatttagtttgcaacaatatagaatagtactgagaacgtaattgtctctggttatatagtgatggctcggaaggtagtgtgcctgtgagaatttggcaacataagtttttttgatcaagttactgtgccggttaagtgactaaatctatagtcttatgctttttctttttgtagtctggtagcattttattaaaactttcaaccttttaagatttctgcaacttagcagatgtgtcttaagatcttgaaaagcacaaggtttcttaagcagcacatg

SEQ ID NO: 437169 - DNA, 730 bp, Homo Sapiens
  misc_feature (215)..(237): n is a, c, g, or t
  misc_feature (410)..(421): n is a, c, g, or t
  misc_feature (498)..(545): n is a, c, g, or t
attttgaatataggaaaaccacagcttttggaccctaaaaggtctggattgatcgtactgctttctgaaagaaagacaacaaagttgctgcatagtctacaaacaagtctctgaaaataggtgaatttctagctcttcatggtcctgaacattgatttcagtctttgcaaagaatgaagaagtgaattcgctgtacatttgtcaccagcactggnnnnnnnnnnnnnnnnnnnnnnnccgcttaatttcaaatataaaatgcagttacttttgggggtggaaggctcatcttaaaacatgagcattaaatatatttggaatagcagaaggttaagtaatttcttatgtatagttaaactaaagcagtacttcagtgggacttaacaagtattttttcatcactgaaaggnnnnnnnnnnnnatcactaaattgtatttggcaattgcaagttgcctgcagatagggccgtgatactgtgttttgagccacagaaggtnnnnnnnnnnnnnnnnnnnnnnnnnnnnnnnnnnnnnnnnnnnnnnnncctttttccttctttcttttgcggaaatctgtaatatgaggaagcttattacgtcaattaattagggtgctggatggtagatatgctcagtaactatgttcacaccagtaaatcctgtttcataggcacaggtaacttttctaattacatgttaaattccattatattccattggcctaacatct

SEQ ID NO: 437170 - DNA, 1442 bp, Homo Sapiens
  misc_feature (190)..(212): n is a, c, g, or t
  misc_feature (249)..(249): n is a, c, g, or t
  misc_feature (386)..(397): n is a, c, g, or t
  misc_feature (474)..(522): n is a, c, g, or t
  misc_feature (838)..(883): n is a, c, g, or t
cagaggaggtcgtgggggccgggagtttgcggattttgaatataggaaagacaacaaagttgctgcatagtctacaaacaagtctctgaaaataggtgaatttctagctcttcatggtcctgaacattgatttcagtctttgcaaagaatgaagaagtgaattcgctgtacatttgtcaccagcactggnnnnnnnnnnnnnnnnnnnnnnnccgcttaatttcaaagataaaatgcagttacttttgnggggtggaaggctcatcttaaaacatgagcattaaatatatttggaatagcagaaggttaagtaatttcttatgtatagttaaactaaagcagtacttcagtgggacttaacaagtattttttcatcactgaaaggnnnnnnnnnnnnatcactaaattgtatttggcagttgcaagttgcctgcagatagggccgtgatactgtgttttgagccacagaaggtnnnnnnnnnnnnnnnnnnnnnnnnnnnnnnnnnnnnnnnnnnnnnnnnnctttttcctcctttcttttggggaatcctgtaatatgaggtagcttatttcgtcaattaattagggtgctggatggtagagaattttgtcagtcaactatgtacacacagtaaatactgtttcttaggcaaaggtaacttttttatatagttgtaaaattccattatattccattgccaaagaaacattaaggaactttgtatagctgtataaaaagcaactaattttttaaaggaataaacattttaaagtcaggcaaacatactgtgtccttgcagaagttgatgtgctgagcagcagccttatgggtgggtcnnnnnnnnnnnnnnnnnnnnnnnnnnnnnnnnnnnnnnnnnnnnnnaatgtttggaacataaatgaagatttgatacattatttcattatctaaaaaggattaattattcatgctcattgtaagaacttcattttgtagcaaatggcatatcacaggatctgtccagataatcgatattttcagtatacaaatgtaaataatcacagatgagaatgtacttagctgtattttcaaataagtaatcttccccccttttgtaggactttaaaactaggcatcaatgaacctgtttttcctattatgcctggaatttagtcatgataccttgactcattccatcatatttcaagaggattcagagtgctagaaattattttggtagcctgtaacacacggcaacactggtccttgggcctatgacccacagatgactcagtatagagttcattgctaattataaattactagtgaatctttttgatattttaagctctagtgggaaaaatctggccacttttgtgtttttatgaaggccatgggataaaaaggatccaaagatttaaatattttttatctaaataattttggattggtttttccttaa

SEQ ID NO: 437171 - DNA, 1307 bp, Homo Sapiens
tatagttgtaaaattccattatattccattgccaaagaaacattaagaactttgtatagctgtataaaaagcaactaattttttaaagaataaacattttaaagtcagcaaacatactgtgtccttgcagaagttgatgtgctgagcagcagccttatgggtgggtctttttttcttagttttccagggcttaacatttttgattttgttttttaatgtttggaacataaatgaagatttgatacattatttcattatctaaaaaggattaattattcatgctcattgtaagaacttcattttgtagcaaatggcatatcacaggatctgtccagataatcgatattttcagtatacaaatgtaaataatcacagatgagaatgtacttagctgtattttcaaataagtgatcttccccccttttgtaggactttaaaactaggcatcaatgaacctgtttttcctattatgcctggaatttagtcatgataccttgactcattccatcatatttcaagaggattcagagtgctagaaattattttggtagcctgtaacacacggcaacactggtccttgggcctatgatgacccacagatgactcagtatagagttcattgctaattataaattactagtgaatctttttgatattttaagctctagtgggaaaaatctggccacttttgtgtttttatgaaggccatggaataaaaggatccaaagatttaaatatttttatctaatattttgattgttttcttaactttctccttaaaacattcagtagtgataaagatatagaaactgcactgtaggagaattggaatatttaaggctggttgacattttttattttcattttatatcttttgtatagctctacaaggcagtgttttgtaatttggtttcattatgaagatccagtacttggcagccatagtttagacaatattgttcagtgctgtttgcttgcatgttaacaacaaaaccttttagaggacccacaaatcatgatattgaacacagttccgaggcattcagagcatcagagcaagtaccatggcaatacatgtgtagactgttggagatgtcccgggccaatttcaagaaagaaaactgtaaatactagttctacttgctctgaaattatgagtttatgcgttttcccagccctccgaatcactgactggggcgttttgtgccccagcaataactggcagcatggcatacctgcagtaccccttacaatattaaagcaaagtttttattctaaaacagaataaaactgttcaataaaaaaaa

SEQ ID NO: 437172 - DNA, 418 bp, Homo Sapiens
  misc_feature (69)..(69): n is a, c, g, or t
acaacacacatgctgtgctctcctgcccagtgtctcatataatattagctgttatacaatactgctganactcttatttgctcattatatattcagagcacaataatatattgtgcctttgtaaattatggacaggatttattgtacacatgttgaaataattgtgttaccttgattaggaattatgatattttgtttggaattgaaaaaaaactaaaagtgattacaaggacacccacgatctatgttataagaaggcagttagggatgctgtggtaagtatgtaatagaaaatatgactgtgaagcagggagttactttcctcatttaataaaacatctggtactatggtttgaatatttgtgttcccctaaaacgcagatgttgaaatcctaacctctaagataatggttttaaa

SEQ ID NO: 437173 - DNA, 1247 bp, Homo Sapiens
  misc_feature (452)..(452): n is a, c, g, or t
  misc_feature (1170)..(1170): n is a, c, g, or t
  misc_feature (1208)..(1208): n is a, c, g, or t
taataaatggcttacctctaagtatgtatgactccatgttaaagcagctaaactaaaagcttaccacaacttaaagaaaaactaaaattcaacatcattcagtttctttttgcatcccatttaggaaatgtttgttgctgaggctgacaaaataaattcatcatttaatcatgtcatttataatgcagtctcatgatactgtctctgaggatcaaatattcagttaaagccatactagactaccaaataatatataaaacatttatgaacattttatgcttgctttacaaggctgatctattaaacttgtgacatttttatttaaaaagaataaacaagaatatcaatggtattattttatcctttatatgggttaagacattatttatgagttgtctttagccatctaccaatgttagatgtgtgcataattcttctttttcattgtagcntggggccaagggagtggtcaattaatatttgtactgcaaatgccttaagtggatacctattaaaaggtatacaaaatataaacagtactgcatattttcaaaacttttaaataaacacaaagaatatataggtatacatgttataatttcagagtcaacactagcacataagtttttcatatctgaatacatactagggtacttcctatttcaacacatgcgcctacaaacacatggccatgcacataaccttactttctgccacttgccacacagaatatacaatattgtacattgtttcaacttatattgtattggaaaactaatgaggatggcattaaaaaattctgatctaagaaatcaaaatgcaggaagataattattccttagattaaaaacactgaagactgatggaaagttaagattcaaattgcttgtcggaagagaaacaggtccgcctgtaaacactcagaatgctctgtttgacaagtgggactagaacttctgtaatatagcaatccaggccaaagacttaaaccatcaatgcttcggatcgcagagaaatggtatagttgtgggtagttctccgcaaggcagggggtgcagatggagatctggatgcccatctggaggggagacgacgatttgctggtctagcaggtcgggaaaatccttttccatgtgaggcgttcactgacatggattcctctgttatctntttcggatctattccttgcttcacttcctgtccccccnacacagctgtcttttgctgaaactgttgttccatttgga

SEQ ID NO: 437174 - DNA, 1123 bp, Homo Sapiens
tttgctttaacaggctcatcttcattaatttcttccattaattcttgttcctctttaattgcactcatagagaattgccacttttggatcgacagcattgtcggagttgggtgccttagtttcttcaattcctccattccttttttatgagggggctcctgaataattttgtcaacatctgccctgccaatcagatcatcaggtcggtcccacatagaaagacgagtggtgggattataaaagaagacccgctcatcaccagtccaaacgacacaccatggagtaccaggaataggagcagtagcaactggctttgccttctgggcagccttttcttcttcagtcatctcctcttctttggctcctcctttatctcctttataggctcttctttaggatcctcctcctccgtctccattggcagaggctcttcagagggttctttaattggctctttaatctgctcttctaacttttctttttcctttagttcttggggtttttcccaggttgattctaatgttctattattataataatatgtcttcccatctgctgttttatattcagtccattcagaaactgctgttgctccagctaaggtagcaggtgaagctgcaatagcaacctggggatgtatcatgggtacgataggaggggccattcctggcaatacacctggaagtggaattggcatgccaggaaggggaacacgaaacggaggtaccattactggtggaaaagcaggtattgctgttgttggctgaggtactgaatgaggaacagcaggaggtaacgtctgagggtgcggctggggaacggtttgcacaggtgtggctgtaggagcaggagttgaaacactaactgtaggcgtggcaactgaaacagcagaacttggggtctgatcttgtgttgtgggtgcttggctaaatagacagcagggccaaacaagtatcttcaggggcccaggaatgaattgttggtctagcatagacctagcttgatactgtctgcgcaactgaagtagcagttgttgtggtagaagtggtagaggaaggggtggatgatgatgttgaagtggatactgcaggtgctgggctactggtcgtaggggtggaagccc

SEQ ID NO: 437175 - DNA, 494 bp, Homo Sapiens
gagatttaagaatctttaataaggtacgaaaggttaccaaacagttctggaaactaaagtgtacatacgagttcttctagccataaatattgaagagctgtaacatggataaaccggccctttacatgcggataaatatggaaactaggaattatatacattatgtggttgtatcttttgccaaaagtaacggacagttatagtttatatcttttttaatatcactttacataaacaaatggaacagtttgacacgcagatccaggctcgtactatacgaattcttgacaggacatgaaacaacattttactgcactaaagtacttagactttgggacgaaatgtttgcactttatacaaaaaaagcacattaataccaataatattgggttaggtcgacgtggagactgtaatcgtacaaagtaattcacattttggtacacatttactagaacattcttgccattcagtacaaacagttggctttcggccgc

SEQ ID NO: 437176 - DNA, 549 bp, Homo Sapiens
  misc_feature (414)..(423): n is a, c, g, or t
ttttttttccattgcatacagtttatttcactagattgcaattttatacacagtatgaaggggtttcctgatagcacatatatagtttactttctgtactgctgaagaaccaattgttttttacattgtatcataataccctatcattaaaacattattcagtgaattttttccaactacatataaacggagatttaccacacacattctttaccatggtgcaagaatgcctttataacatatttgaatcacaaaatgtgagtctaaaatacatcactgtaattaaaacactactttaaagttacaatgccccatgttatagtagccagatttgattaatccctgtataaatcacaaagcaatttggtggataatgtcttggctaactggcagcagcttttaaccgtgatattnnnnnnnnnngttctttaattaagaaccagactttcacaatttagaaaacttcttcccttatatgtcaatattctcagtcaaaatgggatatttaaaaatttgtagtctctaaaacaaggaaaataaatccaaccc

SEQ ID NO: 437177 - DNA, 494 bp, Homo Sapiens
  misc_feature (460)..(460): n is a, c, g, or t
aaacactgaggattttagttttgaaatcaaagactattaaaggagctgtacagaggtaaaaaaataaatgtggaacattattaacttattttgtgtctaggaacaatggattttgtatctgatttaaaatgccaacactgttttgtctctgttcattttttctgtgaggatacttaaggttattattcctgtctgtttcctgtactcccctagtcatgagcacttgaagtacaaggtgtctccccctaggtgcaattaggttgtttctttgtttttagtttcaattctatgtgcatagcaggaatgctccacaggaatggcttctgacaataatctgtcctgttgattttgttttccttgcccatgacttgaacaactgtgttttaaagtactgtagtctagtaggtaactttgtgggcaaaaattttcaatataatacattctggaaacaatagttgcngccctgcaaaggtaatctctccttttaaaattgg

SEQ ID NO: 437178 - DNA, 648 bp, Homo Sapiens
  misc_feature (593)..(593): n is a, c, g, or t
  misc_feature (628)..(628): n is a, c, g, or t
caaatttttagatctgtttattttgttccaaactccttgaggatttaaatgtcccatgtcttgagctctgaaattttgttcgttctagatttaactgtggtgcataagaggctgcatcctactctaaatattaatactgtgctgcttttgccaatcaacattctctccaaaagcacacaagctcacatgtgcacaaccacatgtgtggaagaagtaaattgatatcccaccatattatgtgacatctgaatgggcagatttgggacctatgaatgtcttcccttcatctggagagaagtgggcgactgcctgattcttaagagccatctgcatcttaagcaacaaaagaggtcctacagaaccaccctctggtgacttggtgagagtgaggtggggagaaatggaagcaggggcattgttgctccagtattttcagtggtctctcctgggagttacagggctcctagggcccagattctcctgttccactactgttagaactgacaggatagtaactaggccctttctagggccccttcctacccacagagctaagaacccagtgggttttccttggggaggttgataaggcngggactggggccaccggggggggccaggatttggncctgaatggaatcatggggg

SEQ ID NO: 437179 - DNA, 980 bp, Homo Sapiens
  misc_feature (72)..(85): n is a, c, g, or t
  misc_feature (442)..(460): n is a, c, g, or t
ggtgcactttgaacatgtgtgtttttttgttgtggaacctgagattccttatttattaacaggaagtctgannnnnnnnnnnnnnggagtctttgttgctatattttgtggggctgggagagagagattagattattttgacatgggatcccttccataacaggtactttgaaggcaagacatagggttgaagaagcacagccagcctctgaaatcatagctctccagtggcttttaaagaaagctggtcctcagcactaacaaaatcactacaatagcctagtgcttttttggaagcctttttagggaagaatgttaggttcatggtaactagtatgctctttgagatttttacagtgttgaaacttaagaattttgagagggtgaggagggttgttcagaatctaaattacagatagatgattgtttcttgtgaatttgnnnnnnnnnnnnnnnnnnngtccctaccatttccttacatttcccttggggcccatctctggctccttgctttttgtttcttgctttgctttatcagttcattccagctccctgttagtgaaggacactgctgttagtgaaggaacaaagtctatgagtcctaaaattttaagtcaaagaaaactgctctgtttcccctttagtaacacttctgaagaggaaaaacttcaatagccaaagttaataatcctatataataattgctttggctttcacctaaaattctgggcatcacaatttccttgggatagaggttgtgttggggaatagattgcttattgctgttcactggagacaaaaggtagtgtttttgtacaaggtcataccgccagaagccccaaatcctattttggctcatcttcaggtaaagagtaattcctatcctgtgtgcctcagaagctagaatcgaaggcttaccctattcattgtttattgtcagaaatgcatgatggctcttggaaagaatgacgttttgctgg

SEQ ID NO: 437180 - DNA, 455 bp, Homo Sapiens
tgacaatgcaggaagaggctttttattgcttgtgtgtgttttcaaatcaagtaggcacaacccagtcctcataacagccctcgggagtggacgcaccggggcgggagagcgcaggagggagtgtgcttggctatcctgcccagtggaaaggaaagtgacgtgcattgatcttagagtccttggcaacagactgtggaggcaataacaggataaagaaagcagggagaacgaggcatggccagggtccccagtgcgccttcaaggagaccttaaaacagatagatagcaccacaagagagccacaagagagaagtgtaaaaaataagcaccaattttcattgagttatcacctacaaaaaatgtggtttccctgccctggacattctcccatcaggctctgcgggaagaaaagcggaaaaaggaagcaaataaaattaatccaaacctgtgtttta

SEQ ID NO: 437181 - DNA, 1409 bp, Homo Sapiens
  misc_feature (532)..(564): n is a, c, g, or t
atttgttttgccataggtccacataattccccccacattttttatccaccttgtgtggatatatatgccacatccaaggaatttattaggacggacaatgaagtctagtcacagagcattttacaggctcaaatatatttttttacactttgcttgaaagaaaatttcaatattttacagtctttcagtaggcattatatacactgcactttatgaaatctaaaaggtattgaaataaatttttccaacattttggtaacaaaacaaacaacgtttctccaaatacttgtgctatctacatgatgtttgctctgataatcactaatcacaaaaaactgactcaatggaataattagaaaaattgtctaacaccatgcatgggtttcaatcatttttaatatcctatcctagaaacattctacaaatcttaagatttaaaaaattaagtctctgttctgatttttaaaagatacctttttatgacaatatccataacattgacaggtacatgttaaggctagtatcatccccnnnnnnnnnnnnnnnnnnnnnnnnnnnnnnnnnaagaaagatagtaaaagccagactcctttagggctttgaactgtacctacagaaaatcagagtgcagtgaacataatgttcagtcctacagtcaggatgcagttgctccttcccattccacaagatactgcacctttccatcaagtgtcacccgacgtgccaaaactcggtatttttcgccacatgctattctacctgcagcaccaaaataactggtaatggagttctttagatgattgagttgtaactcctgatctgctaagttattcagaatctctgtgttgagttcatcaaactgataatcttctttgccttcatcatcttttacaatttctgagttctgagtctggagtgctcttcttggaagacgacctcttcttctccgcaaatgtggtattgcagcaggccaagatcttcctgtacgcgttctttttctggagtcagataatccataatgcctggaaatgctagacgaggtagtttcttttgcactggaagcacccgtgaaatccacatctgaggtattggatgaatgtgcagttccctcagttctccctatagaacatggtaaatccaaagtaggattctctgaaattgattccttatccaagaagtggctcagcagtttgaagaatcattatgcttgtatatgggccaggtggacgacctacagatatttaactttccgttggagattctgatgccattgcttacttccatgggtcttgtaatacatttaatgcctccagaaccatgctacatatacgtacaggatatagggtgatgtctagacagactctccagggtgcaaatctatcccaggtgatcattaattgtatgtcata

SEQ ID NO: 437182 - DNA, 234 bp, Homo Sapiens
ggaggtgaggacaataacatttatttaaaaatcttgttatataactcaagggattggtttactgatcagcattttactaagaatttagtactaactaaaatatgctttgtacttttatttactttgctttaatttaaaattcaaataccatgctttgtcgttcagttggttacttcttttaatgtattcaaaaatgttgaacacatacagaactgaattaagaagcaacaactg

SEQ ID NO: 437183 - DNA, 488 bp, Homo Sapiens
gtgttaaaatacatttttattaaatgttagaataaatttatacacaattcacaaattctttacaaagaattgccaatctttttccaattttgtagtagtctctacacattcagaaattctgctgttaaacaggatttataaaatatttctttcagaaagcatcacaatgctaattttaggcaaataatgttttaaaactgaagtctttgcatggaggtgagctcaaacacccttattctttattgcagtgatgaaataatgagaaaaataaacattaaactgacttactaagaaaacaatgaataagtaattctgtaaacttctcaaattctcctaaaattttttattactttcagaagcaatactattgcaaggtatcaacaaccacactatgtacccaaataaaatgaatgtcagaaataaaaatactgtcacaaagaagcaccccttattggaagatgtattgaagaagtcttattacactgacc

SEQ ID NO: 437184 - DNA, 1210 bp, Homo Sapiens
  misc_feature (150)..(157): n is a, c, g, or t
  misc_feature (159)..(175): n is a, c, g, or t
gtccaatgggcccccagggattcttccctagggaaaaaccagctttatggacccatggttccactttaccctacctggggcccccgcgcggcccaaaccgaatgggttttagaaaagcttcctcgaggggccgaggcgggcccgacaagnnnnnnnntnnnnnnnnnnnnnnnnntttttggcaaatttttcatttatttagcaaatatttcatttcaacaaacatttacagattgtctaccaagtggttttagagatatgctcaagcctacaatttagccattaagcaatgttagcatattttataattttttcttaattacagattaacagcagagttttgcatcagaacctctgaacagttatactgacttagcatcaatagagctaatcaactgtctgatcaagactaaagttattttactttatttgtatttgatctaataatttttataacggccattaattaaaatattatggctaaacagatatgacatttatacacacccatatatatttcatgttttattatataaatgacgacttctcaaattcttgacatttaaagttgactgaaagaggcatatcaatatattcattcttaatctggcttttatggggaagttctgtgaaatgtctttcattaatttaatggcatcataaactggagcggacattatttgagaagctgcttgaaaactaagatcttgtagttcccagactttcaaaggcatcatttgtttgttactctcaatcaggtatttttggaatgctgtcagattatctctaagatctgaatatatttcttttagtttcccaaagagaaatccttgaacttcatttgtttcagtctcatcctctacagtagtattagtcacagttttaacttgggtatcatccagtgctttgtattctgtactcttaattgctagctccacaccatacccagataagtacattttccgtgagcttggtttcattatagaagaatgtcgaatatctaatacataagtatattcccaaatgtgtgaatttaattttaaaaatttgctcatatcttccccattgatcccaagattgcgaaggccattcatcatttttccttctaatttcagcatatccaaaatactgaaagcgtcataaacatccatatcaacacgaaggccatttataaatagacgagcatcgcctggctgaattttaaatctaa

SEQ ID NO: 437185 - DNA, 128 bp, Homo Sapiens
tcacatattgtttgacattaagcttttgccagaaaatgttgcatgtgttttacctcgacttgctaaaatcgattagcagaaaggcatggctaataatgttggtggtgaaaataaatgaataagtaaac

SEQ ID NO: 437186 - DNA, 1789 bp, Homo Sapiens
atgtatatactgcttttattattggaatatgtttgttagttgaatgaaaacaaacagtagctaaaaaggtttcaaatgatagaaaaacatatctgggtaagttatgacacaactttttgtgtattcagacgacagaaatctgtatttttgcaccaattgcaaatgcaaagttaacaatgaacttggggaactgaaaggtcaaagggagtctcaaacatattcactattttaaaatttaagacaaagaagcttagaaaaaaaaccccaacatatacaccattataacagtctttttttaatgacttccaattttaacttttttctaaagcactaagacccttattgtagattatgtatcatctcctctttggctatgagatgcgtagttttgttaaccagagacattaatgagttcagtttctgagaccagtcatttaataaattatttggatccttgggtctctggaagttgataattcctgctaatctgtctactttagcaaagatggtcttgttaactactagatttgagagaaaggcttcggactcatcaacagatagatccagaagctgtgccatccttttcattgttatccgagtataatacttggccattattctaatattatgttcaacaactctgttcttcaagtctttccaccttttttcaccttcctctgtagaaccaaaaacatccgttgcaggactctcaagggaaccttttcttaattccagttccatagtcctcaacaagtgtggaccaacgcatcaactccattgtggtaaaaagctttaaaagatccttgtatttgggaatttcttctaacttcttgtcaccacttattcggtgaaccaaatctgactgttcattgtcaaaaggagccaggataacatagagtacaacactcttcagagcctgctgccatttttcactttctgcctgtatacagggagtatcatatattgctctgtagtgcttacaaatagacaaataggatccctcatgttgatccagctgaatcattaaattatagtacttcaactttaatttctctgtattttcttcctggaaaaatttggtgttaattttcttgctgatgatttgtgttcgaatgtaatccttcacagctaggcagagcctcatttgctccaaaataaattccactcgctctttcttttccattgacccgtaggtttccacctgtaactcctgtaaaatggaggctgcctctttcacatcaccattttgttcttttatagttgctaatgttttagtcagtcgcgcacgctcaatttcaacataaatcttgccttcggtaaccattcgtagagtatcaattaatcgaagtttgataggaaggtctgtgatttcctcaacataagtacagcactgttgaaccattttggcaacagcttgttttaactgactccgccttttggacaaaagcataatattttcattaagtaaatcccattctttagcctcatagcacatcttcactactgcaactaagatacgggatgtcgataccatatcggaagcagtacgagtctgcttttccagagagagaagggtttcaatgacttcttgaagtcttccttccttggctagcttcgcacactcgggtaggcgctgatccaccgtggcgctgtagtccacctccatcttgacgatgcgcccgtcagcccgctccgagccgccgtccgccatggtccccgcctgagcgtcccttgctgtccccctgcttcggccaccactcgtcacccacaccggaagttgccccctgtc

SEQ ID NO: 437187 - DNA, 622 bp, Homo Sapiens
  misc_feature (106)..(106): n is a, c, g, or t
  misc_feature (149)..(149): n is a, c, g, or t
aatgttcactgagaaatgtttctttaatgataaagacttaaatttaccagatgatcactatgcacagcctaaaacttccgtgactgtccaaaccacctcaaggtancagttgagattacttagatgaattaattctcctttaggattcnccgggatggggcagaaactagaatagaaacgactcttgaagagggaaataatgaagtacaagtgcatgtgaaattgtcaaagtaagtgtgtgagggctcactgcttatcaccccagggttatcaaaacagccttggaaaatgctctttcctcacaatgcctgtgaagtcgtaaatccatccaaatttgctcccccttgagtggttatactcgggaaaggaattattgaaatgtgcaagtattcaaagaaattgaaacatttctcccatttagctgcaaggccaagtgagaggaaaactaattctgatcctagaaactaaggcacgctgaagctttcaaagatccaatcatttgaaacagtcttcacaaccatcagtatcctaggcagttatttggctgctagtccttcagtatggtgcttgtgttctgattccaaaatcaattcatattctacgcagcaccctttgtgttaag

SEQ ID NO: 437188 - DNA, 2839 bp, Homo Sapiens
tgaaaaaagtttatttcactttccagtttctacaaagcagcccccactctcccggagccaaaagctggtccaaaagtgttttaaaatttcaggacttttctgtgcatttctctctccaaatgatcctacccactcccaaagtcatgaatacacagacatgtaaacccactctcccaactacaaagttcatgaacacccactttttcctctctagttttctcagtttaggacactgtggttaaaatacattcactagaaaaaaatagacacattcaaactcctttcccctagttctcatggcccaaatattttccaatgcagaagataatgaagttgaaccttgaaagcagtactccctaacttccaatttctacgacataaaaaaaatgggaagcatgttatataaaccattagtgttggacagttttaaaagtctattttcatatatgaatgggacaaacaaggagtacaaatcacacctttaaactagcaagaggaaagaatcccctcccaaatgttacactgaggaatgtttctttaaatgataaagaccttaaaattaacagatgatcactatgcacagcctaaaacttccgtgactgtcccaaaccacctcaaggtaacagcaccaaagcactgtgggagaagcttctcagggagagcacccttcctacagttttttgagattacttagatgaattaattctcctttaggattccccgggatggggcagaaactagaatagaaacgactcttgaagagggaaataatgaagtacaagtgcatgtgaaattgtcaaagtaagtgtgtgagggctcactgcttatcaccccagggttatcaaaacagccttggaaaatgctctttcctcacaatgcctgtgaagtcgtaaatccatccaaatttgctcccccttgagtggttatactcgggaaaggaattattgaaatgtgcaagtattcaaagaaattgaaacatttctccatttagctgcaaggccaagtgagaggaaaactaattctgatcctagaaactaaggcacgctgaagctttcaaagatccaatcatttgaaacagtcttcacaaccatcagtatcctaggcagttatttggctgctagtccttcagtatggtgcttgtgttctgattccaaaatcaattcatattctacgcagcaccctttgtgttaaggccatgatattttactccttctagacaaagctatgaatgatcataaactctacctcgaaactatgatcacccaaggaaatgctctgtcagcagagtagacccttcccagctccattagctgacagtgtcttatagcatggtcttgaacagatttcttcagagattcaacccagttcaaataaaaaaacctgagctggttagctacaaatataagagagaaaataaagcctctacacaaagaggaatgttaagacaaattttattcaagaaatccaccaacattatgttaatcctatcatgtttcacagcattaagtatccatccaatgaaatcagtctgcaaagaaacccttaaaggctatttttcattgcacaggcagagcagttgtctgaaatatgcactagtccacacttacattactgaaaactatgcaggagatattatcctgttcttgactcagtcaaccatttacccagtggagtaagttttagcagatcttgctcatacacactagtaagaccagaaactttcccgtggagcctttagttcaactccagtttgtcaaatgttaggaatattccagcatctgatacagagctagatttgacaagacactgaagattttaagtaaaggcttggtgaaatgaaggggaaaaaaagggatatttgtttccaggtttaagattgaagccatagtagtcattatactgtattcaatacagtaacaattgcaaacattttaagagcaaggtgggcctcactttttctttcttcagtatataagacatggcgcctgaatacttgaacatacatagtacattcaatgtgtaccacagagagagtcacctctacttcattccagcaactcaatttcaaagtttgataacatatgggtcctttctaaaaagcacttggcactctcactagtttaaaaagctcaagtctttgatgtgaatattcatgagattcgtcttttaaaagagaccaatttctcagactgaggaaaggctattcctaccctatggtgtccgtaagacctcctctgacataggggtatggaagctacaaggcttcactccgacaccataaagtacaatatggaaagatttctttaaccgtgtggtctttatttcagtgccagtgttacagatacaacacaaatgttccagttagaaggaattcaaacggaatgccaaggtccaagccaggctcaagaaataaaaagggaggtttggagtaatagataagatgactccaatactcactcttcctaagggcaaaggtacttttgatacagagtctgatctttgaaactggtgaactcctcttccacccattaccatagttcaaacaggcaagttatgggcttaggagcactttaaaatttgtggtgggaatagggtcattaataactatgaatatatcttttagaaggtgaccattttgcactttaaagggaatcaattttgaaaatcatggagactattcatgactacagctaaagaatggcgagaaaggggagctggaagagccttggaagtttctattacaaatagagcaccatatccttcatgccaaatctcaacaaaagctctttttaactccatctgtccagtgtttacaaataaactcgcaaggtctggacag

SEQ ID NO: 437189 - DNA, 699 bp, Homo Sapiens
  misc_feature (122)..(122): n is a, c, g, or t
  misc_feature (125)..(125): n is a, c, g, or t
  misc_feature (307)..(307): n is a, c, g, or t
ggacatgtgctcatcatctccacatagttctcatcaggaggtgctcagtcttttagcacaccacggtcgcccagtccaagccatcccaggtgagcccctggggcagggtgtagggctcctgncgnatatgtcctggtcaggctccacggggccatggtgttcaccacttcgcccagcttgggcacgggctgcgtatccagacactggtagcttcgctgctacgcctcctccatggtttggcaggtccctgacccactgagaacagctcaatgcccttctgtatctcctggatcctctctgctggcanagagttcatcttcacaggctgatcctgggctgaatctgtctcactgcctttctctatcttctttttatgtttctttttcttctttttggctccagtgtcattggctggactcaaaccaccccggttgtagctgttgtcctcctcattctcgcaatcgctgcagtgctcatggccgttcccgttcccttccatcatctgcggcagcggaggtgccggcggcttcactgctgtctcactctcgtccgccatcttgagttgcgagagcagggctccgcgccccaccacatggggggttcctctcccggccccgcctgctggccggacgtccggtctgcaggcgcgcgctcccgaggtcccgcctcgcccgctgagccggcctgcgcacgcgtggg

SEQ ID NO: 437190 - DNA, 1310 bp, Homo Sapiens
  misc_feature (253)..(254): n is a, c, g, or t
  misc_feature (1098)..(1137): n is a, c, g, or t
catcattctatttatgctttacttaggctaaaattacagagaataggtgttctctgagcctttcaacagatggcagagaagctagtccaggcacagactcagaggaactgagaaagttaaactaaaataaaatcctgcttcagataacagaaatagaaagtccaggaaatctgaagactatgggctggttcgcttttccagtaggagaaagctccctctccacccagagcccttctctcctgctgacagcagnnctctccttgccctctctctgccccctgcccaccacccggggcagcactggcctctggcagtcggtagagcttcatggtgcgctgcatggtcatatttctgctcaggtgggagaacttcacttcaatcagcttccgtgggtttagggaccgatgccaatacctgcaggtgccaacgggctttggtagtaccaccccggcagtgtaaactgcttggaagatgccctccaggtgaacccgcctggtgatctctcggatcagaactggagcaaccctcttggaacgcagcttcttgtggacacacaggaagttgatctctaccatcttcttctctgtgtcatagatatggatgtttgctgggatggcgctaatgaacccaaccaatttccgacttgagaccactcgaaccccacagtgccactgggggagccagccgggtggccggagagcccacaaaagaaactccggggaataatcaaatcggaacatgttgtcatcatcttccacatagttctcattcaggagggtgtacagttcttttagcacaccacgatcgcccaggtccaaagcatcccaggtgaagccctggggcagggtgtagggctcctggcggatattgtccttgtcaggctccacggggccatgggtgttcaccacttcgcccagcttggggacgggctgcgtatcccagaactggtagcttcgcttgctagcctcctccatggttttggcaggtccctgacccactgagaacagctcaatggccttctgtatttcctggatcctctctgctggcaaagagttcatcttcacaggctgatcctgggctgaatctgtctcactgccnnnnnnnnnnnnnnnnnnnnnnnnnnnnnnnnnnnnnnnngctccagtgtcattggctggactcaaaccaccccggttgtagctgttgtcctcctcattctcgcaatcgctgcagtgctcatggccgttcccgttcccttccatcatctgcggcagcggaggtgccggcggcttcactgctgtctcactctcgtccgccatcttgagttgcga

SEQ ID NO: 437191 - DNA, 1001 bp, Homo Sapiens
  misc_feature (195)..(234): n is a, c, g, or t
  misc_feature (578)..(578): n is a, c, g, or t
ggggcgcggagccctgctctcgcaactcaagatggcggacgagagtgagacagcagtgaagccgccggcacctccgggtgccgcagatgatggaagggaacgggaacggccatgagcactgcagcgattgcgagaatgaggaggacaacagctacaaccggggtggtttgagtccagccaatgacactggagccnnnnnnnnnnnnnnnnnnnnnnnnnnnnnnnnnnnnnnnnggcagtgagacagattcagcccaggatcagcctgtgaagatgaactctttgccagcagagaggatccaggaaatacagaaggccattgagctgttctcagtgggtcagggacctgccaaaaccatggaggaggctagcaagcgaagctaccagttctgggatacgcagcccgtccccaagctgggcgaagtggtgaacacccatggccccgtggagcctgacaaggacaatatccgccaggagccctacacccatgccccaggggcttcacctgggatgctttggacctgggccgatcgtggtgtgctaaaagaactgtacaccctcctgaatgagaactatgntggaagatgatgacaacatgttccgattttgattatttccccggagttatcttattgtgggctctccggccacccggctggctcccccagtggcactgaaggggggttcgagtggtctcaagtcggaaaattgggttgggttcattagcgccatcccggcaaacatccatatctatgatcacagaagaagaaagactggtaggcgatcaaccttcctgtgtgtccaaccggaagctgcgttccaagaaggagtgctcccagttctgaatccgacgagatcaaccaagacggggttcacctggaggggcattctcccagggcagtttaacctgcagagtattagcacttccaagtgcctttggaacttaaggttttggacttgggtcctatacaccacgcagttgtatgaattacatctcccac

SEQ ID NO: 437192 - DNA, 780 bp, Homo Sapiens
cttcttcagattctcagagaccatggctgtggccagtcctgccatctcagtgtttctgtctctgtgagtatatcctctatattcttctccaggtcttcttttgtgtaccaggtttgtcagtgtgctgcccttataactgccaaatctgtgaaactagtcaatgctttcccgtttataggatggttcttccaggtcttctgctattgattcacttgctgatacacttgacttagaaactgtactgcttcctaaaactgaccttgtaaactgccctaacgtactaggatttattgtattctgataaaggctataggaagatataaattctgatccaagtgatccttcttgtgatgtcaagagtttacttggttttgctgtaccagtaagtggatctggatggtaaagaggtcggggagtaacatcagttccatttatgtcaaatacctgtgttgtctttatattgggatttggtttttctacagttttcagttcaggtggaataagcacggttttggacacagccattctgctttgatttgcaccagtatatcctttcactgaagttgctttcattgtagcacaaaggctaatagacttctttggttgtgtggcattgttcaacccgaagttctgctgcttgtgactgcctgccggagagactggcatggtggcgaccagctggggagtggtccaccacccctttttttggccgcctctgaagtccctgtacccccaagctcctgcgttagcggctcgggccgaggctccggaatgtttgcc

SEQ ID NO: 437193 - DNA, 457 bp, Homo Sapiens
  misc_feature (214)..(234): n is a, c, g, or t
tacgactacatatgggatgttaccattttggaatacttgacttatcttcatcataaaagaggagaaacagataaaagacaaattgcaatcaaagccatcggccagacagagttgaatgcaagcaatccagaagaagtgttacagctggcagcgcagagaaggaaaaaaaagtttctccaagcaatggcaaaactttacttttaagcagttaaannnnnnnnnnnnnnnnnnnnnaaacaatgggctaaaaataaacagtattaaaaggttaagtttatataatacatatgtacacaattagtggtgttttcttttcagacaaaatactgaaacaaatattagtttaaaaacaaactatacagaagacttcataccgtaacaataaatgtatagtttattcaaagggagaagagattcacatatctgataacaaaataacccagcaatctagttttct

SEQ ID NO: 437194 - DNA, 1012 bp, Homo Sapiens
  misc_feature (136)..(145): n is a, c, g, or t
  misc_feature (284)..(284): n is a, c, g, or t
  misc_feature (329)..(329): n is a, c, g, or t
  misc_feature (359)..(383): n is a, c, g, or t
gggcccccttccctttagggcgggggtttaaaatttcccgcgggtgggtggcccaccccgacttcccttttaaattcccgggggtgtacccctgtggcttattcgagaatattaaataccggcctccccctttttnnnnnnnnnnccggccacaaattctttccccccttttgtctccaaggaaaaagctggggtccggggaaaccaggttaatgacccaaggggcccctttccctttccctcgtttttcggcccccccaacataggaaccctgggaattttgnttttgggggggcgtgctcgcgtcctttcgtgtggggattcctctntgggtttggtaggtgtcaacaacctggttnnnnnnnnnnnnnnnnnnnnnnnnnccacatacatacacacacagtcacattccagtgtgacaaatactccttcaccaggagacagcgctaccactccgggatcttgaagactctctacagagagcctaggcctggcagtcttcacagatgacacccaacagggagcacgtttattaaagtgggaaggggtggggtacaccccagggtgtatactgacagggacctcatgcaggcccagagctctgctgcaccctcttcatcagctcttcatcctgcatagacaactctgtcaactttttgcccatccgctcatggatgtccaggtacttagagacacatcggtccaggcacacagactcgcccttggagagctctgcttccttgtagtgaggaggcacacacttccggtggcaggcactggtcattctgttgtacatatcggccatcatctccacctccagctccgcagccagctgttgggccctgagaggatccatctcagcctagcaccgtggaagggatctccttctggcctcctaatccactgcctgggacggatcacaatgcccacggagaccccaacttctgacaaatactataacgttacccgcctcccgagaggctccagcggaagcacgtgggttacttccccc

SEQ ID NO: 437195 - DNA, 1652 bp, Homo Sapiens
  misc_feature (1012)..(1316): n is a, c, g, or t
tttcaactcagaaggctatttattgaaagaatacaatgatgttacaaggatgcatttcacgtagccctaaaaggctgggtatccataagtgcatggttcatggctgttgggactaagaaagccttctggtcaatgagccacacatatgtcctgggctccctccctgtcaatgaagatgtgatgagtttcagagtggtggctggatctaggccaagcaccaaacacaaaccagtactctcctttgggtcttctggaactaaggttttataaacttccgtaacagtgggggcagcactcagttggttacaattcatgccattcctgaaagtagtccactatggggatccccaaacaaccagtagcataatgagttcctgacaggcatcctagccaatcagtagggagggtctgagtagaattacccattgtcaaactatgtatcagataatagaagcacagccttggcattgtgtgtgagctaatcatggtgcaccataaacaaggtgttttggatggtcagcatctcagaagggcagattctgccattgaatattccattttgcatcacagaggagagactaattgagctacacatactacatttcagcccccatgcacaattttttccctgcaaagaatgaagaatacttgggtgctgctgcatgccatccatgatgagagaaaggcaatgaatcctgctatgtggcatgcaaagaatccagtaggaaaggttcaccatcaatacgaccaatatcttgccccatgattcatatttagggctgggaaaatttatctatctttgggaggcagctcttgtgtaaaaggaatcaatgtccagttgtgcccaaattggtctgcatggtcaatgtcaacacaccaacaaaggttctggaagttcctttaggatagcccatgggagtcattaggggatggagcaggccactgaagcttagctgatgctttactaatagaaaagcattatacaactaaaataaattgatgtgtgtgtgtnnnnnnnnnnnnnnnnnnnnnnnnnnnnnnnnnnnnnnnnnnnnnnnnnnnnnnnnnnnnnnnnnnnnnnnnnnnnnnnnnnnnnnnnnnnnnnnnnnnnnnnnnnnnnnnnnnnnnnnnnnnnnnnnnnnnnnnnnnnnnnnnnnnnnnnnnnnnnnnnnnnnnnnnnnnnnnnnnnnnnnnnnnnnnnnnnnnnnnnnnnnnnnnnnnnnnnnnnnnnnnnnnnnnnnnnnnnnnnnnnnnnnnnnnnnnnnnnnnnnnnnnnnnnnnnnnnnnnnnnnnnnnnnnnnnnnnnnnnnnnnnnnaatcttttctttgcacataaaatgagccagtgcatgttgcttctctgagtacaagacaaaatttatggcaatgggcaattagacttatacttttctgcaagaaaattaacgggaaaattctcctcttagttttctgttgttttcccattgatctgatactgtaggcttaagaaagtgctttttcatgggcatgccataaaaagtacaataaggggacttaatagttctgtgaaactggcatatgttagctgaaagtataattgtaactgggaaaaggggaaaaaagtcactagtagttcaaccatctacagtttctgttaaattgtggtttgtaag

SEQ ID NO: 437196 - DNA, 667 bp, Homo Sapiens
ctcttaatgtggaggaccaattatgcattgtgagttttatcattttcactgcattggatggttcctcccacaaaattttctgcacagttgattctttggttttaggttgaatcttctggtctggacagatggcttggggagttctctttttcatattccttatctcttcttgatccaatggggagatcacagtaagcctgtacaactgatattccacggaggtgagatttctatagttttccagcatcacatctctgtacagacttctttgagcagaatccagcatcatccactcctcctgagtgaactccacagctacatctttgaaagtcattggttcctgtaaccaggttgtcagaaatacagcaatcatcctttcctcttcagcatttctcagatggaaacaggcagagtcctgtttagttaaagcccatggggaggataggtccataactgccattttatgagtacataagcctgcacagtagagtagagagatcaggatgtttctgttcttgtgtctccaatccagtcacaggagggatgcatttcacccgaagttctccccgtcctcagtgcctgcctccaggcgtccgcggtcccgcccgagagcccctatagtgaattgaatagcatgagcatgatgatgatgatgatgtcgacccgg

SEQ ID NO: 437197 - DNA, 474 bp, Homo Sapiens
ttttttttacctattatctttgttttaatgtaaattatttaattacaagtacataaattaaacaacagctgtgttaacaatcagcttgccaaatttctgaaaattaaacagtagacccatgggctggtatgagttgcctcctaacaccacaggttctgcccgccctttcaccttaggcttggaaaagtggttgcatattattctttcttgcttgctcttatgctgtaaacatggcaacatttctgggctggccagctgaaggataaggcagtggaggagaactgagtagtccacctgtctcagccaagacaatcctagactagtaaagcagctgatcctagacatgtgtgagatcccagccaagataagaagagctagaccctgcagctgactgggtacaggtgagcccagccaagaccaatagaaatgttcacccaacccacagattcatgagctaaacaaatgtttaatttt

SEQ ID NO: 437198 - DNA, 796 bp, Homo Sapiens
tggatttaagcgaacagtttgttataatgaaccagaaatacaagattccactgaaactgaacagttgacagaatatggttgaacttaaaccttcaagggaaacaagggcaaaacaaagctaatgagtggaaaagtccaagattagtttgggataaacatgaggatataattgcattttagcatggctatcttctgacctcttccagcagttcgtctgccatcattctcccttctgacacacctaccaaatcaaatggcttctgatcctctatattgcagtataaaccaaccctatagtacccctctggtcatgatacaaacccagaaggaaagtctgtaaatctcatacaaaggtagaaagtgcaattcaacccaacacgctggttatggtatatgtgctgtcaatgtacatggtagcaacttgaatcaaaccagagctgctaccacatgtaagcaacctcttatgctgccctgtagtgatgtcaatgttctcagtttactaaattatcaatgtggaagaacgcatttttgagctccagaccttctaaacattttaaacaggctatcgaagaggatgtaacagaaccctatttcagaaacctaaggatcagggaggaaggaacactgaccggtttttctgggatgtttctgtgggggcaacagggatgaacaaaagaaatgttagcatgtcagagcatatgacaagtgaggggagacagaggtaggaagagggttttctagccacaaggctaatgcatttgtgttcaaagagaagtctggggcaaaggaggggaaa

SEQ ID NO: 437199 - DNA, 760 bp, Homo Sapiens
ttttcaacagaaaatatatatttattataaaataaagttagtttcatgaagagagtagaaaaataacactatgagctactaaaaaagttgtggaactcagtctccgaggattggggtgagaggctttcacatcactctggaaacccaccaacatgaggctctccgtgctcatgtgggacaggtatagcacagctcgtacagggagcatgtggctcaggtcctgcttgaagcccaaggagcctagatggtccacacgagatgctctggccacggtgatcaaggaggagaacttgaggtcaagggctgatggtcctggtttagaagatggtacccactggccttatgctgagttgcttgcccaaatgtctgtgctgaagaaaagccacacagcctttctcaggacaacttgccccaccaattctcactggtgtggctaaagtaccagaagcaatatgtgtggtgtcagcctgatgggctgctggctgaaattctgtacttcaaatcgtgtccatactgatggccggaagaaaggaaaatgtttaaagagcccgtggatgagagccgctggcctcgactgttctataattcccagcctcctggcccccaaggatagggagagtatcttccctgagtgggaaacgatctacctaccctattaccggaaaggccatcccaatagccaccccttcctcccttctagaaaaaagtctttctagaccccttaggcttcagaagaatactgatccctcctgtggaaata

SEQ ID NO: 437200 - DNA, 1058 bp, Homo Sapiens
ttttttttacagaaaatatatatttattataaaataaagttagtttcatgaagagagtagaaaaataacactatgagctactaaaaaagttgtggaactcagtctccgaggattggggtgagaggctttcacatcactctggaaacccaccaacatgaggctctccgtgctcatgtgggacaggtatagcacagctcgtacagggagcatgtggctcaggtcctgcttgaagcccaaggagcctagatggtccacacgagatgctctggccacggtgatcaaggaggagaacttgaggtcagcaggggactggttctgagaaggggcaggatgggaataaccttgcccctccctatactggagtgtagaagagtctcttgggctgatggtcctggtttagaagatggtacccactggccttatgctgagttgcttgcccaaatgtctgtgctgaagaaaagccacacagcctttctcaggacaacttgccccaccaattctcactggtgtggctaaagtaccagaagcaatatgtgtggtgtcagcctgatgggctgctggctgaaattctgtacttcaaatcgtgtccatactggagaaagcagccaaggtgagcacctcaagtaaaagctctgagccacagaagaagagcaagatgccattcatgatggcttccaggcggagtacgtaggtctgcagcagcaggtaataggaggccatcatggcagatgggaaggtcaaggccacgctaatactgagtggcatctttcgctggcagaggtttccctttgtaccaaaaaacaggcgaattacttcaattccaagataaaggaggagcatcaccacatccagtactaggttagctgttggatatggtagcaggacacctttatacagaaatatgaaaagttccagcaggaaataggtagcattataccacccgttcagaaagaacaggatttccagcggggtggaggacaaccgtttacctccggaatctcacctcgcggcgccatcttcagtccccgtggcagcatacgctgccacagcggctcccc

SEQ ID NO: 437201 - DNA, 359 bp, Homo Sapiens
acatgcgttaagttacttaatctggcccgggccgggtattaaacttgtagttttattcaggtttgattttaacaaatgtgtcggggagagagcccgcagggaagggtaaagcccatgggggcagggccctcccagatgcctgaggagggggcaggtcccctcccctctcctcctcttccctccccatctaaaggggtttggggagagacacaggcaggcgagggggctggtccccagtctgttggggtggtgctcagggtaaagggctatgggcaacaggggaccagaccagggatgagtggggagggcacaaggaccatttgccaaaatccaccgctttctgattccagattgaattt

SEQ ID NO: 437202 - DNA, 3214 bp, Homo Sapiens
  misc_feature (48)..(48): n is a, c, g, or t
  misc_feature (64)..(64): n is a, c, g, or t
  misc_feature (184)..(184): n is a, c, g, or t
  misc_feature (210)..(210): n is a, c, g, or t
  misc_feature (224)..(224): n is a, c, g, or t
  misc_feature (379)..(379): n is a, c, g, or t
  misc_feature (420)..(420): n is a, c, g, or t
  misc_feature (443)..(443): n is a, c, g, or t
  misc_feature (516)..(516): n is a, c, g, or t
  misc_feature (665)..(665): n is a, c, g, or t
  misc_feature (872)..(872): n is a, c, g, or t
  misc_feature (878)..(905): n is a, c, g, or t
  misc_feature (907)..(908): n is a, c, g, or t
  misc_feature (3179)..(3179): n is a, c, g, or t
  misc_feature (3194)..(3194): n is a, c, g, or t
ggcattgtgttttctcccacggccctgtttttcttcttctgctcttcnagcgggcaaggggganggcgttctgattcccagctattattattccctctctttgagggcggctgtttattttcgccccagaaagaaggggcgggtgttttttgtggtgcccacacacaccgcgatattttttctntcgtgggggagaggcgctctactccnccccgagaggtggnaccttttttcaccccgcccggggcggccaaatttttttggagaccgggtggtctccataatattgtgtccaccaattttctcgttccccgggccgcgcgcttatttttttctcttccggggcgggagggaacattataggggccactaaggcccncccccggggggtgtgttgataggcctttcccgcccccagtnccaaacgttcttaattgaatttnccccatttctgggaacggggatattcgcctttatcgcggcaggaaacgcccccttaaatgttaagaattcaanccagcccaagggcccaggggaggttttccttggagttggggggacgcttaactttgaggccctccccgcttggcctttgaggaccccctggtttgaataagaaaccccgttccacgttccgcgccgggggatttccaattctgggattngggttgccccaacccggcttcggtttttccccgcggggggttttttcataggtgggtgaaggcattgcccccacggtcattttcttgggtacaggggctcttggtccgcaaaccagattagggttcatggtccccttgccctcatcagaaacggggctcgcaaaagaattggtttgggccaagttgtccaggcccgacagtcgtccnacacannnnnnnnnnnnnnnnnnnnnnnnnnnntnncggagagaaatgcaggagctttattataaatcatttaatattcttgaagttaacaactgataaactcatttaggcaaacattttggatttaatgatctaaagctcacagatgcatgccacatctagctaaaagtacataaaaagcgcacctctggaaataacagccctccctctggctgaagactgagaagcattaaggatgcttctggatttctgcagcggcagggcaggggtctgcacaggcctgacctggtgttgctggagcgcggcatcccctcctgggtgctgctccgaaaggcaggctgggaggtgcttgctggggtgttccatggcagcgctgccaaccaagtctgggtctctaaaagccaccctcagtttataccaactgatcaggaaataggtggtgacagggccttgaagggtacatgccggcttcccttaagttgattagatgggaaaccaaacaccgtctttcaagtgtgaggctgtgccatgctccctcagggaggaggggcgctgggtctgaccaggtctgcctctgccctcaccagctggcagacgtgaactggagaacagcaccagaaaggctggtggttggcagctgctcacgacacagttgctgacctgcagcagatcggctgtgggtgagcaggacagtcaggccctccacaagcactgttctggagtttcgtctgactaggtgaaccctctggcttttcgaggacgcagggtaccctactgccaccagccagtgagcagactaggacatctctagacaggaaactcatctaaaaatcggaggacaacctgatgcacccaagtgacaatggacccaggcagctgtgcacaccaggtgggaggcgtttggaacagttagactcatcagtggataggtttttctagcacaaatggaatgtggtgtctcatgtccctagggagacaaagggcaggtttcttatctggtctttccaagctttcaactctctggctcaagtgtcccagaatgaactagaagtctattcctccaccctggtccgtggtcacttccagaactctgaagtggctcaggaggtgactcctgaaaggcagcccttgcttgatctcctggtggagcctgtctgggctgaggcgatgctgggcttgccgtgccgagatctcatgccagaagtcctccctcggagctacctgtctccagcctcattctttggcatgttgactcctggaattgaggggctatttctaagatgcatgctttttcggcttttctcatgggtgcctcatcagcctgcacaggatcccccatctcacgagagagggaaatttggcattgctgttccctgcctctaaggtcctttatgaggggccgcccaaactcattcccttagttcttactctcccacaggtgttgagattttattggcccatactaaaaagcatgcaatgactgaggttttctcctaaccttaatctcatcttctcaaatgtgtgccttcttgtttttaagaccatagacaaggacgtcaggtgactgctgaaatagaactaaagctaaaatttttctcggatcttggcaaattctgctaatggcacctctagggggcacaatgatcctcaaatgacatccaaccagactccccataaacaaggtttgggctggagctgtttctagttttaaatatggaaatgtaaggcaaaggacagagcacttggttttgccttagatttcccagcagagtaggatttgggcgaaactgctggttctctctgtcagggaaataccaagtgcagcagagccggggccatggggcaggctggtggactccaggctcacttgcgtggctgctggatgtgctgggttcttggggaaggatgcttgtccatggaggcatgcggcttctggtgagccacctgcgcagccgccggggggaaatctttgtcaccccgggcgatgaccccagagatgaacacagtgggtttaggtggactggggctttcccattcctggtcatccttgtctttctcttctttggtgtctcctgtatgtgggtgtttctgcacaattcgcattccaccagctttcacggcgggcgggtgtccagctttagtctctagtttcccttcgggaggcgaagacatggcgcggcggggcttccgcggggccgagcggcggcgcggttctcggccggcggccgtgcgcgagtgagctcaggtgtgagcgccggggagcgagcgggcgggagaacgacgcgcgcgcgtgggcgccgggccgcncgagccggttgagtnccactgccgttaagggggcg

SEQ ID NO: 437203 - DNA, 547 bp, Homo Sapiens
  misc_feature (19)..(19): n is a, c, g, or t
  misc_feature (25)..(25): n is a, c, g, or t
  misc_feature (67)..(67): n is a, c, g, or t
aaaagaactaaaatctaancctccnaccctggtccgtggtcaactccaaaaatctgaaaatggctanaggaggtgaatccctgaaaaggcaagcccttggcttggaatctcccgggtggaagcctgtctgggctgaaggcgaatgctgggcttgccgtgccgaagatctcaatgcccagaagtcctccctcggagctacctgtctcccagcctcattctttggcatgttgactccctggaattgaggggctatttctaagatgcatgctttttcggcttttctcatgggtgcctcatcagcctgcacaggatcccccatctcacgagagagggaaatttggcattgctgttccctgcctctaaggtcctttatgaggggccgcccaaactcattcccttagttcttactctcccacaggtgttgagattttattggcccatactaaaaagcatgcaatgactgaggttttctcctaaccttaatctcatcttctcaaatgtgtgccttcttgtttttaagaccatagacaaggacgtcaggtgactg

SEQ ID NO: 437204 - DNA, 1056 bp, Homo Sapiens
  misc_feature (838)..(961): n is a, c, g, or t
tcagcaaaagaaagaatgcatttcgaaagcaaacagaagaaaaaagtatattctcacagtttttccccaggaagtctggagaaaaagtcctcatgtcaccaatttctctgttgcatgaattttagtgttttgctataagacagcatgagggctatcaggccaaaattcattattgtatttccaatacagtttgtcttgaatgtctgtctcttaaaccagtttttacttgtcagttttctctcagcaaacagtcttactattatgtggaatttaacttttcagagaaaatttccaaagtcctctaccttatttggcttttatctgtgtcttttggaaaaggagctgcatggcctcagtgcctccataaaaagcttaagttgagttcatgggagaacattaagatcgttttttttcccttttagctcggtaatctcatgtaccacaggtaatgaccaagcatctctgctagaggatgtacctctcataactcctgtgtaaaatgaggatcctgttggtgatcctcattccagtttccaaagcgagaggagccttctgagcagaagtatgcaagactgattctgtttggaacagtttcctatttggctgcattctaggaggcctcctgacttattcatagtattgtcgcctggtggcattggtgtggcgtagcttgtcctgctacttgctaaagttctctttctttgagaaaactgaggaaccagaatgcttagagttcataaaataatctctaaaccatgttaggttaaaacaaaatgaccatctcacaaaaacgagtttagttgaatgctcaattccttacaaaatcttcatttaaggnnnnnnnnnnnnnnnnnnnnnnnnnnnnnnnnnnnnnnnnnnnnnnnnnnnnnnnnnnnnnnnnnnnnnnnnnnnnnnnnnnnnnnnnnnnnnnnnnnnnnnnnnnnnnnnnnnnnnnnnnnnnttttattataaaagtagctggggatggtggcacacacctgtagtcccagctactcaggaggttgaggtgggaagattgcttgagcccaggagttt

SEQ ID NO: 437205 - DNA, 957 bp, Homo Sapiens
  misc_feature (589)..(606): n is a, c, g, or t
  misc_feature (770)..(878): n is a, c, g, or t
tttttagtttgcaaaccccattttattcatagtttgtggttttttaaattagttcacaaatctggtacataccggcagttaaaactggttatcactttgataatcagaagcctctggtgtaacatagtcttcatgaaaacatattgtaaaacagggagaatacacagtaataatctctttgaaagcaatggctgtaaacatccatgtttctaagaaaatataactttacatatatatgtattttaagcaagctatacctcttacataaattcagacagtagaaggagtgtgcaatcataatgcttattttatggaaacagtgaaaataattttaattatgacctaaatgcttttaagtaattaaagtcctcttgaattggatgtatagtataaagatattttccctaatttgcaaccatcctggtcaaaaagagctgaaaagttggtcagtaagtagaagtgccattaccaagtaagtttaaaacaaattcttcaaatttaaaaatgtaaaattgtaaagtatcccaatccccccagctaatttagggaactgagcaagaagagaacattcttcagtttttaaatgacnnnnnnnnnnnnnnnnnngggaaatggggtcctgctctgtagcctaggctagagttgcaggggcttgatcagctcacgtgcaacctcaaactccggggctcaagcaatcttcccacctcaacctcctgagttagctgggactacaggtgtgtgccaccatccccagctactttattattaannnnnnnnnnnnnnnnnnnnnnnnnnnnnnnnnnnnnnnnnnnnnnnnnnnnnnnnnnnnnnnnnnnnnnnnnnnnnnnnnnnnnnnnnnnnnnnnnnnnnnnnnnnnntgagccaccacactcagccttaattgacgattttgtagggaattgagctttcaactaaactcgtttttgtgagatggtc

SEQ ID NO: 437206 - DNA, 347 bp, Homo Sapiens
  misc_feature (103)..(218): n is a, c, g, or t
aaactcctgggctcaagcaatcttcccacctcaacctcctgagtagctgggactacaggtgtgtgccaccatccccagctacttttataataaaatttctatnnnnnnnnnnnnnnnnnnnnnnnnnnnnnnnnnnnnnnnnnnnnnnnnnnnnnnnnnnnnnnnnnnnnnnnnnnnnnnnnnnnnnnnnnnnnnnnnnnnnnnnnnnnnnnnnnnnnccttaaatgaagattttgtaaggaattgagcattcaactaaactcgtttttgtgagatggtcattttgttttaacctaacatggtttagagattattttatgaactctaaggcattctggttcctcagt

SEQ ID NO: 437207 - DNA, 1238 bp, Homo Sapiens
  misc_feature (227)..(235): n is a, c, g, or t
tttttcttggtgtagaacatttatttatttttcccacaaatcactgaaagtttaggtcagtgggaaataattttaatcaaataattgtacatattcttcccacatatcctgccttgtattaggaaatgacattgtgatccatttcattacaagtaaaatattacaaaatatttacaggaaaatattaaaaataactcaaacacaaaaggcaagatgaaataaactgnnnnnnnnnctccagaaatctctactccagtgcccacagcacacaagagtcaaaacaaataagcaactaagatcccccgatcacaaatttccaaagaactggaggaggggaagaaacagggtgaaaatggtggtatgaaagggaatggatgttagcagcactgcttcaataactgatctattctggatgaaatacccttttttatgtgcagtaaattctgaacaaggctaaattttaggatattccttgaactgaaattagaaaataccctgacaatggaagcagctctttcatctaagtttaataagagcctctttctccatgggccactgttgtgaacagaagccttttctggcatcaaaagctgtcacagtagcccttccatctctttcatgaaagcctcatagacatcatccttagtttgtactgagacaggaacagaaggaccagatttgggtgctgctttggcaagaggcacagcagaatcatcctctgactttctttggggagcagcagtagcccctttattctcccgacgtactctcagtgcagtgggcacaaatcgagtaatctctgccttgggattagtgatctgtggcttggcactgatggttgctgtggctttcttctcaatggtggctgcacttgtatcatccgccttgggtcgctgaatcaagttgggtggggcacttaaaaccccagggtttggcaagggagctggtgggaacagcccagggggggcaggtccaaggggaggcaccaaaggtgggcgcatcatgccaggacgaggtggaggaatacctggaggtgcagggggaggtagccttggtgggggtccacgaggagggggaccaggaggcagacctggaggtggacctgggggagggccagggggtcggcctggtggtggtcctggaggtaaaagtcggggtaagggccctcggagtcctggcattccaggtggtctcaggaatggaggagctcctggaggtggaccaggaggaaggcctgt

SEQ ID NO: 437208 - DNA, 447 bp, Homo Sapiens
cggcacaaaagctcatgatttaatgaggaacagaaacaaaatctctgattgttggtgtttcaaacttcattggcgtcctctggcaagcacaagttgatccctctgcagcttcaataccctttagcctgatgacagcttcatttaacagatcatttttccttgatggatgtggcaagcgtaacagtgttctgggcctgcttcagtaatggcatgtcgatcatacttccttggaaagtaaaggctccctttcctagttgttggtgttctttgaaggcagcaatcagttcttcagcccacttaattttttcctggggttggagtaaactgttcctgtaccactgcgatttggttagggtggatcacctgtttaccagtgaagcccatggcggctgcttctcttgactgtctgagcagtccgtcttcatctcggaagtcaatgtacacaag

SEQ ID NO: 437209 - DNA, 859 bp, Homo Sapiens
cttggttaggggtgaatcacctggccttaccagtgaaacccatggcggctccttctcgtgactgtctaagcagccccaggctccatcttcgaaaagtcaatgtacaccagatctacggcttggagaccaaaggctttcgctatgacaacaatcttttgccgggcgtagagaatatccagggtttctttactacttgttgcacacagaaaaagagagagagagatgtctttgacacctatgctggctcgaaagtctctctcctccaaaaacgactgcatctagaaagagacctacttgagggccggactttcagggtttcttcacacactgccttaaaattgagcaaacccattgcagtttccacaaaagggattaaattcattggttgttcaagttttcggccttttaagtggaatgaaaatttgtctgcaaaccactggatttcttcaggactttccacctttggtagcatcaggctggaaggaaggacccgggattgcaaaagggtctctaggtcttcttccgccagaccactggaaactgagttgactctcacacatttttcagtagggcccagatcaatgtcttcaagagtttttacaattctcagtcgagcttcattctttttgtttgcagccactccatcctcacagtcgagcactgcacaatctacattcagggatggaatcttctttattttcttttcatcatttccaggtacataaagcactgccctccgggggatgtacttgtgatgggatgaggaactatatccaagtctggggatatcagctgctagagacgctttcagcctcagcagcgccgccgccgcagctccgcgcgccgccctccgcagcag

SEQ ID NO: 437210 - DNA, 571 bp, Homo Sapiens
gtgaataagtgtgagcctgtatatggataggggtagataaataacaaattatccacaaaggaaagacagacttacagctgttcatccataataataagtaaataatagaatgaagattaaattttgaaaacaaaattaagctataattctatatagagaattcaattcacagtcaaattatccttccttggtatgggccaaagaaaatcattttcaaaaatgcagggaatcagagggcatatcactagcaattctgagggaaaaaaattactcaagatgattaagacacaccatcaatgaattcgggcaaagatctctgaaaaaaaagtacagatgctaaaaaccaaatgtcaaatgctatggtcaagtctaaataactgttcttgtagttgcaaactttaaaacaagttttcaaggaaaagatgcatcatagatagaaacagaaagtaggaaggtggttactggaaggagaggggatgagaagatggaggtcaaagagtcagaagtttccattatgtaagataactaagcctgcagatatgatgtacagtatgccacccggcctcaataa

SEQ ID NO: 437211 - DNA, 460 bp, Homo Sapiens
tctttaaaagttcagctttaatgacaaagatctattacatcagtctttttcttcaaataagatagatgtgaataaacaacttcaaacaggaggtactatggcctcttcaatacactgtagccagtgcactgggcccttggggatgcccagtgatatacacgttgaagcagtaatgtaagtctgtgagccactgttcctgaacacttccactcttcaatgtcgtgatattcttgatgatctgctgcaccaagatcgcattggtcaacatatgagtcctgaggggtgcatgctgaagcagcagtcgaagcagctggcccacaacaggcagctcctcaggcccaactctgttcacccgcaggcttctgcagcatcaacctgagggactcgagggcaagagagccagggatggagacacagaccccccacagcttgtccctctttcttagatgttctgcttccc

SEQ ID NO: 437212 - DNA, 459 bp, Homo Sapiens
gtccccgctaggccaaacatattttcatatatcagtgcaaagaaaggaaggttcgtaaacttctttaaaagttcagctttaatgacaaagatctattacatcagtctttttcttcaaataagatagatgtggattaaccaatttcaaacaggaggtactatggcctcttcaatacactgtagccagtgcactgggcccttggggatgcccagtgatatacacgttgaagcagtaatgtaagtctgtgagccactgttcctgagcacttccactcttcaatgtctggagagaaaaacaagagtaatctgagaactgcacccaaatcactatgctacctgacagtatttttcacacccaaacacaatttcccagagctttggcaactgtatccccatctgtgaattaccataggaagtcttccagggaacaggggactattaattgggcgtacggggaggg

SEQ ID NO: 437213 - DNA, 470 bp, Homo Sapiens
  misc_feature (280)..(299): n is a, c, g, or t
cttttaggaatactcagggtggaacctactatacaaaaccatcacactttgtaaataaaaagtatcagatacttgacttctttatccaccaacaaaaaaataaattattttcttgttttgtaaaagacctacaatgggaaaaagaattatatctcataattgtacaggaaacaaaacccacatcggtttcttgaattcaatttggcagttagaaatggttgggcaagatgaaaaacttatccagtgaactcaactttaaatattatattaatggctctgnnnnnnnnnnnnnnnnnnnnaatagcctgattacaaatccacacatttgtacagcacggttggagaaatttaaaattacacacagcacatatattatctatagagacccccatgcacctatggggacccctacagaaagtcactaagggctcgctatgggatttggtccataacttaacttttgaaagctc

SEQ ID NO: 437214 - DNA, 703 bp, Homo Sapiens
cttttctccagtgtggattattttatggcggataaggcttgaacttctcgtgaagcatttaccacattcatcacatctgtgagactttgttcccgtgggaacttcttcaggggtggtgaagttggagctcagactgaagcttcttcccaatcctttcttcaggttatttgtttgggtttagtcatacatatactgagaggtctctggcaattaactttgtctagagcatctctggttcactttttagtgggaagtccttgtaaatgaaatgaggtagagacaaaagtcttatacctctccatagatactagggcaggctaaaagctttaaaaagcaaccggatgctcttctctggttgaggtgaggggaaggcgctcgggtaccaaccccagcacaccccaacagcctttcctcggcccctcctcaggcctcctaattactctttctcagcctggagtgtggggccgttaccgtcctcttcccccttctccttccatactgcacttaaccttgctggaagacttaatgatggagatttagggcaactgtggctgcttggacccttccctggaccaaaggaacttaaaacaccaaacctgacactggaatgaaatccaagtttttaaataccacctttcaatcactacacagatctcactctatcttaaaatactcagcctcactccagaagtgcgcctgggtg

SEQ ID NO: 437215 - DNA, 772 bp, Homo Sapiens
  misc_feature (200)..(227): n is a, c, g, or t
  misc_feature (351)..(372): n is a, c, g, or t
gcggccgccgcgcgatcgccgggccctcccggttccccgggccaagcacacgccgaacgggaagacgcgcgcggcggccgaactggcccctcaactcctcgcaggggcggaggtgggtaaagagagaaaagtccccaaaagatttggggaaggagttctccgcctctcgcagaggagttatagttcccaggctggagagnnnnnnnnnnnnnnnnnnnnnnnnnnnnaccgcgctgcagtttgctgtctctcggctgagtctggagaccgtgctaaagtagagaggagtttctcgaatgctggttgctgaagcttccaatgcaagtttctcgcggcctcccaggcaagtcnnnnnnnnnnnnnnnnnnnnnnccctgaagcagttgattccagttcacgagcgctctcggtagctcaggaaagcgacatagtctctagcacttagtccctctcctacaatgcaaagcaaaaaagactgtggctccaggactctctgtgggcggaatcggcactaaggagttggtgcaattattttgttgcaaggtaggaagccaaaaagcctgcatgcaacagactggcatgaataaatgtatgtttccccctcccttctgcaagaagggagctggtaatggcaggagttcctccagtgcagactcttaaagagcgtgcaagaactagagacccgacagcgaaacaggcctcttcccctcacacacagtttctcttgctgcagcttagagcagaccccaacaccgccctccgcaccacgccc

SEQ ID NO: 437216 - DNA, 261 bp, Homo Sapiens
gggcgagcagcccgcgctcctcctcctcgtacaggcccagggggtcgctggggtcggctcccgcgcccacgccgcccacgggcgacgacgacgtgcccaggccgccgaacaggtagacgcgcttcaccttcttctccgccaggtgcttgcccggggccgcgagcgctgcggaggccgtgctaaagtagagaggagtttctcgaatgctggttgctgaagctttcaatggcaggtttctggcgggctcccaggcaagtcttt

SEQ ID NO: 437217 - DNA, 1478 bp, Homo Sapiens
  misc_feature (1379)..(1393): n is a, c, g, or t
attgtgataatcttatgtcttcttgaccctttggactctttaatatgtatgacatgcaattgtggggttagattaattcaactcctgaggtcctgaaggaacttcacccagtcaagaggaagacagccaaggctgcagctgctgaaggaaccccatatctgggcagacatctttgtgagatctatatggctgaaatgagaaaaacgagaaattgggaaaggcagaattttggactttaattattttggactttgaattaggaaatttaattttggggcagtcctttttcccttgggagtttaatagttgatgggggtgggggtgaggtcatatagttcaaactaaggcatttttattatgttgttgatattgtattatttggagtattttaatgctatctttgggagtcattgtataattgttgtcagctatgtcaggaaatatggctggacataattgtaaattagggctgcaattgtgatcaaattttcagtctagggtgtaatgtagccttagagttaatttaattactgttctattttgacttatttcagagcctcttgggggcaaaaacaactgctcaccaatcttacattgatgggagcagaacttttctaagatactgttggtctccctggaaggggacagccacagccctgtttgttgaccagagtcttgagcattaaccattgtggcttaagagaatgaaaatgtacaagggtatgatgggatctatcctcttcctctctccatgctcctgactcaagaaaaggaaaagacttgcatctctcaaaaatgttggaagaaagttctacccatcttctcttacactcattcaatcttatgcttgggaggaggaataacttgatgagattgagaaaatggttataatggataggcagcttaggccactcttggatcttgagttcgttccacacagcaagatgtgggaaagactgcagtccttcactatggctgggtaaacatctgctttctagacccaactatctctccttggggtgggggaatcccaaaagtcgttagacttatgatagaagttcatttcagcctcaggtccaagccatgttctccaatccagctctatcagctataaagctggtatctattttgattcttttttacagttttaatatataaattgttttttagaaaaataacacatgcctatggtaaaagtcaaacagtataaaagggtatactattaaaaagtaagtctctcttcctccttctcacccctggcctcagttccctggtcccattttcaaaaagtaacaactgttaccagttactgatgtatcattccagagatattccatgtatttacaagcatattgtgtgtgggtatgtgtgtatcaggnnnnnnnnnnnnnnnacacaaatggtggcatactatacatgctgttctgaattttgcttttttcactgaacaatatattaaagctgatatcttaatcccc

SEQ ID NO: 437218 - DNA, 398 bp, Homo Sapiens
gaagttctcaggagaccgcgtattcttagattcagccgccgaagccatacagagtgcgcccctgacgttttagggcatatactacatccatggctgtgacagttttgcgcttggcgtgctccgtataggtgacggcgtctcgaataacgttctctaagaaaaccttaagcacacctcgagtctcctcatagataagaccggaaatgcgcttgacgccaccgcgccgagccaaacggcgaatagccggttttgtaatgccctggatgttatcccggagcaccttacgatggcgcttagcaccacccttccccaagccttttccgcctttgccgcgaccagacatgattcctatcgcagtgcccggccgtaatggacactctgcgttgataccactgccc

SEQ ID NO: 437219 - DNA, 810 bp, Homo Sapiens
ctataaaactcctccataatttcacaatttaacaaaagtttaaaatccaggaaagaaacaatcctgtaactcgttacaaacacgattctccttattccttttatccaggagttggtctcgggccgatgagtgtcctagttcctagtgagacacgttctttgtaaaaacccttatgggcaagaaaggtattcgataccatttgctttccggcgtcggtttacatttttgttcaggagagagcaaaacacagagatttgcactgggggcaggcggcttaacaggaaacacgtggcaatcacaaagtgccaggcccctttcctatggaagtgtccccagagccctcgtgggcccagccgccgggcagctggggtggggtgggagagcagctggggatgctgccttgggagcccatgctgcccagcacgtccatcaggtggtcacggagccagccctgggcccagagcagctctggaggacaacgtgaggccttccggccagaggaggtaactgagaactgggttggtgcttccggaggccttggaaacggcaggaagggccagacgccaccaccgagagcaggcgggggagcccgaccctcctctggctgagtggaaggctgctcgagtcgctgtgtggattttgggggactcctgcgaaggagaaaggccagcaccctgggctgaggttcctgtccgtgaccccggcggcctcttgtgcgtagagctcccagcagcacgggcccccggtcagcccccctcaggccagttccttcagtccaatgtcttagtttccagagaagaaaggaagcgc

SEQ ID NO: 437220 - DNA, 348 bp, Homo Sapiens
cttatagtgaaatattcacgagaatccttagaaaggtgccaaatgatactgcagaaaatggaatccaatttacacgtagatggtctaggcttactttatgacaataataaagcaagtattttctctaggaaagagagcttaaatctctgaagggcagtggatagctttataacgtataatcctggctttattacccttttatggttttgcatgttctcttttctttgacaaaagatcattcagaagtgaacttacttcaatgatccctgcacagcctttatgcctacaaaagtaattcatagtatttatcctggtgacaggtcagcggagatgatcaaatttttttat

SEQ ID NO: 437221 - DNA, 822 bp, Homo Sapiens
tctgtatctgtaaacatgaatcaccgtgtgtgtacttacagggctaggatttcagtgttgtcagagtattaccacacagcaacagcaacatacagaagatatgttcactcagataagactgccctaaacaaccattttgtcactcagttatttaactgtgtttagctcatttaaatcaaaatgtgtactttaatctaaaatgttttaataatctgtatttcttataattttaacactatgagctgcctatataaggaaatcaagtaaccaggaatgcacctattaaattatgggaggcattgtaggattttaccacatcaattcataggcagtaactttaagaggggcattgtgcaatagttaggttgttttcttgttcagctattttaagggctgctttaacttgtttgtttgtctttgtatataactacttctaatctaatcactagagttattatattctgttatgtttgaccagaattatatgacaagaactggtgacagtttagtgcctctgcccattgtccatgatttacactaattgtgagcagtcttcttatgtgtcagctcattatttttgaaacatttgcctttaggctgttctttgaggtatcaatgaagtgattgaatttcaataccttaattcagtgcacataatactaatgtaacagcagatgaaaattgataaaacccaaaagagagtcatctaaatttgtagttcctatttctgtggggtttgcctgggccatggttgggagaggggaatggtgtttgatggtaaacacagggtgtttgggggatcaggagcctggatctctcccg

SEQ ID NO: 437222 - DNA, 1562 bp, Homo Sapiens
  misc_feature (1542)..(1542): n is a, c, g, or t
cattgagatactagaaggctttaatcgaaccatcaaattgagaagtagaaaaataaagagaagcacagttccagaagtgctgggagtcttccctacagggaaattagtaagcctccaacctcagcccctacatgtacataccccatggcccgttacattaatatgcaactgaaaatccagaacagagaacttgggaaaaacaataataactttagtataagcctctcagctgacaatgacccaaggactgttcagcggcccaggcacctgaggagcaatgacagtctacgaggacatcttctgcagcaacagccatcaggagaccagcagcagcacagcactcagggctcggtgtccacctccctgcagatcactttctccctcactggaatcaaccgcagcacttggagtctactcatggagtagaaacttctttatggggtctggcagaggcagcgaaggaatcagatgaagccggtgtttgccaagagctcttctcacagccacacggcacagacacagcaaggttctgggaacacttctggcctctttaaagacctgcaaggcctcagggtccacttttcttcttcctctcgactctgggcccagcgattcccacttcactagattcaggttggctccaaattctaccagcaggctcacgaaggctgcctcacagccgtggcgcagaacagcatccatgacgcacccaggggagcccctgtagaatccctgtgtgttgacaggaccattgcagttgaagtcagggttcgcgccagccaggaggagcagccggaagcactggaggttgtggtaggctgcgctgatgtacaaggggcagaccaccaaggaggtgagccgccgggagaatcgaggctggacatcaggagtcaggtggtggttgacgtcaacatcagccccgtacctgatgagggccttcaggatgtctgcccggcccacgcgagaggcgtggtagacaggggtgctgcgatggtgccggcttccgttggggtccgcgccagcttcgagaaggatctgggtactctctaggtgcccgttcaccacagccacatacagggccgtctgtccttttacgtccaccagatccacctcggcccccttccggatgaggaagtccacacagctcccatggcctgcagtggccgcgattcgcaacggtgtgcaggggagccagccacagcaccagacagacttctcgttgatgcggctccggtagctctcctcttgcaataggctcctgagggtctggaggtccccgacgtaagctgcatcatggagcctcgtgtcctcacagtgctccagcggatgatcacaaaattgctccctcagccactccttcagattacgacctgcggagcccggccctgcccgcccgtctgggctgccgccctccgccatggatgcttccgcctccgcggccgcacctgacccgcgcacgcccctcgggcaggaagcagaacgacccgcgaccacttccggcgcctcgtgccgaattcgccacccaggcctcgctacctatantacgctggagtactgccgtc

SEQ ID NO: 437223 - DNA, 595 bp, Homo Sapiens
tttttctcataaatcttttaataacagtaaatgaagaaacattataacagtaagccccatggtgagggttccttttcattcaaggatcttcaacaacagaaacacctgagactaaaattcagaatgctaagtacacaaattaatgaccatttatttccaaaggcgactgcagataccatttcggtacaatcaaaaggttttacaagacagagaaaacacattacaaaatgccccaagaggtgagcaaactggtgggggcacagagcacgcaagaaccagcctgacaaaaatcctaagcctgctgctgtttagggagagtacaaagactggttctaagggaagccactgtgtgggggttcaggggagacagtgacgggtctgcccagtgcatagcaatcccagctgggaactgaggaaggacaggggtaggggaagaggggcagaggcatttgctaagctcctgacagaaaccattacagatcagcctatcacattctcttcactacaataacaccaatataaatgaaagattctttaaaatagaacacaaaatggacaccaaaagaaagcaagagttttcaaaacaacagctttg

SEQ ID NO: 437224 - DNA, 900 bp, Homo Sapiens
ttgtataaaatttaaattttatgatcatgtctggacctttttacacttaacacaatggaaatgttcatattcatttttttccccaaaggaaaaatttctgaatcatcactatgttgcacagtagaatagaaatatgaattcaggtacttagtcaagtttctaaagaatgcaaataacagacatgatttaacttccaaaatctgaagtcatcaacatgattttgtagtactctatctcaggttttacctaaaaattcgttattattcagataaagatagctccctaatcacatgtttttaaaaagcctctgccccacgacaacttcctgagatctgtgaagaaactgcagtcttgtgatcagactccatataggactggcagttttgtaatcgtagggaaaaaacggtgactgattttacgtgtcaatcagttgtagtctgctgatctgattagaagccttgacaaatgcctggtggcgattgcaaataactgccaagcatatagggatgatacagtagcccactgttttgggatcagctcttgtacaagagtataggaacaaaaacatctgtaagtaaggtaccagaaaaataactgtccacacccaaaaaggcaaggagagtaattgagctttcaaggagtgtgtccatgtggttccttcaaggggctcctcagggtgctgttgaatgtgttccaaggccagcctgttgtaagtctcactgatttcaaaaacatagtaaaatgctgctgcactggctaacagatacaatcccactccaatccatcccatccgctgacggaagttcatcattctccatgctctgtgccttcctgtcccgtggtggccagcccgcccgccgtcccggatgccgccgcagtcggagcttccggctcgggccc

SEQ ID NO: 437225 - DNA, 756 bp, Homo Sapiens
  misc_feature (176)..(185): n is a, c, g, or t
ttttttttaactttgtatcaaatgtattttcagcaagacttgaagatttgacacaggcacagggaaaaggaacaaacttaaaaagagtataaataaggtcagttcaaactcacttctatttgaaatgtgttttaaaaacaattttagtcttatattttaaaaatatgattgagaannnnnnnnnnctttaattcaagtcttctcaatcatcttaaaatacttgtgagctgaactgatacattaaggcaaatttttattttaaatactcatttcattgatgaactctgtttcatttaaactgctaatccagggagaaagttttcgtaaaaaacattttattgctacaaagggaaacatggtcacaaagagcctttaagcgtatcttaacgcaaattactattcaatgtctaatgcagtaaaaaaatacacagagcacaaaatacttgcccagtttatatcttccagggtaagtattcaaaaaattgatgcacacttgaatattcactcccaagagcagcatttaagataaaatgattagaatagatatactaacaatacacatttgttatccttaacaccaataaagtaataaaaattaagcttaaaaattatacaaacaatttatcggatctaagtctggtagctataaaaactaaactaaaatagttttgccttcattttattaaacaaatgttaaacatttagaaattatataaaacaaattttaatatgtggaatgcatgcaacatgggtgcc

SEQ ID NO: 437226 - DNA, 859 bp, Homo Sapiens
aacgatacattcagtcatccagtgatacaaagaggtggccaattgtgtctgaagtagtcacttgtaaaggatcacaacccaggcagtgttgcttttctgcaaacagaaggaaacagaaggctccatggtccttgaagattatccaagttttccactagttgtcaagatttctgtcccaacctcttagtcaccatctactagcaagaagagccagcaagtgaaacactgttcatttattgattcaaagttgtcttttttctttttaaaaaacaatccccaatacatgcagttcagggttaagtatcacatttgtagcacattgttgagtctcaaaacaaaaatatgcatcacctgtataatcccatcacatctttttccagcctctacaatacctagttgggggtgttttcatttatacatccacatagctcagaagcatgttattaacggttgatctggcccgatgcttctccgccacctcccctgccctggtctccacctcggggttatttttttctaaaggcaggatgttactcagtcttaatttattaagatcactgacaaactttggcttcttgtgtgctcatgtggtccctgcttttgctttcggaagggtttatattgaaacgactgtgactctgatcggttattatcccctcattttttgtaggaaataagtttgcttgtttctgtgggtgctcacacagtaacacaggttcctaaagtaaccatttaatctgaactggtattaaaggaaactgttaaccaggctctcttagatctatttcagttcatataaaaaaactcttccaattgttgcttgtgtctcaaagtagttctgcttccatccttatcaaca

SEQ ID NO: 437227 - DNA, 907 bp, Homo Sapiens
  misc_feature (178)..(178): n is a, c, g, or t
  misc_feature (520)..(554): n is a, c, g, or t
ggccccttctaaaaattaaattggtaggaaattgccaaaagccaaaggaaaattgtatcttcccaatttttgaaccctttgaatcagattccctgctttgcccacaagactttactccctctgcaggtgtaaccccaccagcaccagcggcttccctttctctcatattctttggccntgaaggcaccttctggattgcttaacggtgtgctctttggctgcctagacagtcaggacactaaaggccatctggacttatcactcctctcctctttcttttctatggggtaataccactttcctgcttcctttctgctgctgaatctccagacttggtgctgtcatcaggggggacagagtcgatttcggcttcgagctcctggttggtaaagctgcatcgctggacgatctttgtttcttattcgatctctcttgaccacttcttctttcttttcagttttttctgagctgcctattgattctgtactttcagccttctttcctttatcccgaagtgtgnnnnnnnnnnnnnnnnnnnnnnnnnnnnnnnnnnnaaaagtcttctctttctcatagcgctccttctgcctacggcgctcttcttcttgccgcttcagcctctctctttctcgaagtatgcgctcctgatctcgttcatattcccgttccctctccctatagtctctgccgctctcatcttcaggtctctttggtttttcatctttaagttcgctatcagaacgcttgggcaatgtacaactttgcccactggctctttcatcactgagattctctttgtccaatttcttggctttttctcttttgtccaattcttcttcatctcctttttctggcttcttgagcagcttaatctttggttcatcctttaatttgtccctttctggaa

SEQ ID NO: 437228 - DNA, 1306 bp, Homo Sapiens
  misc_feature (439)..(584): n is a, c, g, or t
  misc_feature (587)..(597): n is a, c, g, or t
  misc_feature (1034)..(1141): n is a, c, g, or t
  misc_feature (1165)..(1182): n is a, c, g, or t
ggcctgggtggcgaattcggcacgaggagaaaatactgtttcctgccacttaagaggaaggactcacatatcctaccttccatcagccttgaaggagacaagtgccctctctctcacacccggtggccttcccttcccctttcccagagcctccaagaaggcccctggcctggcctgatgcccaccatcagcagcaataggcaccaaaacctttctccttcctatccctccccacctcccgaaagggctggggacagcaggtgtgtccttgttagttccatccagctcagctttggctggggagctaatttcactggagccaggctaagcattagggtaagtatttgtcctgtcttgggcagtttcctcactgaaaaatgagggcagagttctaagccctcctctaattctaaaattctaattaaaacgtcgcgagacnnnnnnnnnnnnnnnnnnnnnnnnnnnnnnnnnnnnnnnnnnnnnnnnnnnnnnnnnnnnnnnnnnnnnnnnnnnnnnnnnnnnnnnnnnnnnnnnnnnnnnnnnnnnnnnnnnnnnnnnnnnnnnnnnnnnnnnnnnnnnnnnnnagnnnnnnnnnnntcaccagactaatatttaccttgagaatccttcttcatcttcttgtaatgaccttcggtgacaacatatctgttttagaagaaaacgcaattaagattatctatgacaacaaccaccgtctccaaatctgtattgattcattttattcattataagtctcatctacctgatgaggtaacttttttgaagacaggaattgcatactgtgtaacactgctttgattcttccatagttcagtcatccttgctatcttgcggggggattggttctaggataccgcccccacaccataccagaatctgtggatgctccatcccttacatataatggtgtagtatttgcttataaccaacacgcattccccccttatactttatttacttagcgacaggaattgccctctgttggttacgcctggagtgcagtgtcatcctcnnnnnnnnnnnnnnnnnnnnnnnnnnnnnnnnnnnnnnnnnnnnnnnnnnnnnnnnnnnnnnnnnnnnnnnnnnnnnnnnnnnnnnnnnnnnnnnnnnnnnnnnnnnngtgcatactaccacacctggctannnnnnnnnnnnnnnnnnaataaagacaaggtctcactatgctgcccaggttggcctcccaatgtgttgggattacaagtgtgagccaccatgcctggccccatgtaatttaagtcatcactaataaaatgtatacatattg

SEQ ID NO: 437229 - DNA, 389 bp, Homo Sapiens
ccacaaacaaagatggtttaatagatttcagcatgtttccacttgacaatgttatacgaaaatagaatctttattaaaatagcaaggcataacaatcactgctactcaggaaacactgtgtttattctttttaatcatcaaaatcaatgactttgggcaagacctgtgaaatctcagagcctgtttctccatctggagaacaggcaggtagggcattgccagcctccctgtgagtgggggccactggtgggaggagatggccctggtcgcccatgggatgagaaacttactcctgcttctgtccctggggggaagggtcaggggagtatgccagtgtggcctttaaggcaatttcttaacacttgctttatctccattttgttaaccag

SEQ ID NO: 437230 - DNA, 1020 bp, Homo Sapiens
  misc_feature (17)..(17): n is a, c, g, or t
  misc_feature (22)..(22): n is a, c, g, or t
  misc_feature (58)..(58): n is a, c, g, or t
  misc_feature (85)..(85): n is a, c, g, or t
  misc_feature (93)..(93): n is a, c, g, or t
  misc_feature (100)..(100): n is a, c, g, or t
aactacagtccaagggnggttntctggcttccattccaagtatcacttcatacaaatnatcagatttgtattaaatacccttagnaaaaaggngttccantaacagttctgagaaaaatgtgaaaacttttactgttacattaagaacaggtggtagaagcaacctattccgcacttctcaaaagatacagaggggcacatatgccacactggaataaagaatacagaatcaaacatgtacaaaggtaccacagcaggttatggttcatacaggactttaaatgacccatgttgacaatacaatttgcaaaaaatatgagaaaagcaatacatatttctgaaacaaaaacatacctgttgtaaaaaacaacacgcgtagtatcagaatagaacagttaacagagcagcagttactgaagacagacggcaacaggcagctgcgccagccatgggtctgccatgcggctacacccatgaggccctattgtgaacaacgcaacgttctccatcagcggggaagcacacagactgcttggccaccaagctttccgcctggctctgttcatcctgagatttagcaggtagagcagcccagaaggggaatgcagctccccgcttccctatggacatcgaattgtcttcataccgactagtgtgattacgtagttcttgtcttggagacccgctaagtctccatctcatctcttgtcgagaccatcctaggccatgcgcgaaaaggaatgagaacattaaacgaaaagaccgagtggcagcattccatgattttggcgctttgagcaatacagcaggccttggtccctactaacatgcgatcttctcttacgttagcgggtggtgtgtgtctatgcatgttctctgggttcgctgtagcgggaacagtggcccggagcagtcggggcggccccttccgttcctcacgagggtctttccggtgtggacccccccgggtggcgatcttcaccggatggtcatgcagtcctttcagttcatgtttcgcca

SEQ ID NO: 437231 - DNA, 354 bp, Homo Sapiens
ctaagggaactgtacattctttctttcttggctattcagaccttaccaagaacgttaaaggaaacaagtagaaatcagcagtggagtgtctgtggtaagaaaacatgaactttatgcttcactgttagttgtttgtggaagttattttgtataacaccaaagctgttgtacatttcctactgcctgatttttttcatgtgtctgtgtttgtaatattgtatagtatcttgtgctaggtgaggaaattatttttaattttgataatttaatattcctagtgtgatcagcattgggagttgggtttcagtggggcatgtctatacttagagaaaaaaagtcccaatgaagattttc

SEQ ID NO: 437232 - DNA, 1377 bp, Homo Sapiens
  misc_feature (65)..(65): n is a, c, g, or t
  misc_feature (334)..(334): n is a, c, g, or t
cataatacatttcctttacaaaatagttcacaatatttattaacaaagcgtggcattgaaaacanctttatgcaccgtgaagcaaccaccaataagcaaccagaaaggggtggtaaaaacagtacgttcacttttcatttccttccttggtttggattacacatattcttccatccttgcatttttggagctacattattagtccatccaataccaaagtgagccagatacttgatcccatttctggaaaggaaatgtccatcttggtgtaggagttcttgagggcagctggatttactgcaaattaagtaaacctttaaaaacggcattgtcnacaggctatgtgttctctgacatgccaggctggacaggtgagaagagcctccaaaagacaaaacttcttcctggtttaaagaaacagcacactaggccagataaacacaaaaggaaacaaatcacaggcgctaatagggagtcgggagctgttcttttctctgacctatacacatggctctctctcaccagacattcaaatttttaggccgcacatccacaaagagagacatatatttcactgtgtgttcaactacatatgcacaagactatagtacacacaaaatagaaataaattatataagtcttaaagtaaatgctagaagttgtcttgagtacagcctgttctatatgaataggtgccaggtgctggcacttccaactaagctaccaaccctgaagtaagcaagaaaagaatataaatatttaagaaaataaatcaaagtgtatttcaaataaggctcttccaaacaaaaatctgtgttataaattaacagcaggttattgttatggcagagtcagagacctccagactctttaaaatagtagacgactcatttgtcaagagttagggtaagaaagcagatcaccagctgctcctgtgttcacaagtgctcccctagttttctttcagaaaactttgaaacaactaagcaggcggagctctggtttctgataggtgagtgccaggcttaatctgcaaactgaacaatgtttcctgggaagttgcaattaatttttcaaacccagggcttaagtgagggagactgagccaagatggtagtaggaggagttccttagaaaactgagtggcagtgcagcggctgttgcagctctgacagaattcacaaggaagctgctacagcaaacccatcaggttcccattaaggcttcaaagaaagatgcacaaaaggtagtccagacggattaacctggattaacctagcactaagcatctgaggatccctagataaacaaacaaacaaattatactgccaacaggaggatatttttttctcccgtggtctctctttaactgatgcc

SEQ ID NO: 437233 - DNA, 393 bp, Homo Sapiens
ttgaagttaaaggacactttatttactgacagattgaaaactgtaactccaggtagtgcaaaatgcaccacaacccaattacaaagaacaggtgttaacacacaatgtttaaacaatgctacactcatttttggcaaagtgctgtattgttcagtctgtgtacaaaactgaccatctatgaaccaatcagtataaaaaatttctataaaaacaaaatttagacagtggctcaagaaaacaagctgccatttatgcatagattgatgtacagtaacctaaccaaatgtcccttttgaattttcaagttactgaaaaaaaatgtgtcgagaaacacattaagaaggcacatgtacagtctacaatattcttcagtctccctaactcatgccctgc

SEQ ID NO: 437234 - DNA, 443 bp, Homo Sapiens
tttaaactgaaccctttaatgtggaatgcaggtaaatattaatatgtatgatagagtgtgggattcagcctttaaaatgcaaagctccctaaggtcttcaaatgtgccatccccaaaagttctacacatccctggggaaagaaagggtccccaaattgatgtgagattacacttctaccatgtggggaatgggggaggaaaacagaaattcaggtcagatataaaaaaaattaagttatgttcctcactcatgttcctttgtaaacggagctcctgagtcactgcagctgtcaccgtgcagtgccatcttcagacccttcatccctcagggctggggggactcaccctaccctctcacccttcacatttcagccgttgggttcaccagcctcctatcccttcactcatctaaaggggaaatctgcctccccttcttcctttgg

SEQ ID NO: 437235 - DNA, 1448 bp, Homo Sapiens
  misc_feature (1258)..(1320): n is a, c, g, or t
tgccattttcaaaaaagatatagtagcttcagttgtacaccaccagttgaaggggttttcatccaaatgagaaactctaccccttgtctctagtggaacaggcaccagattcccacaagcagcagctcccatgtcctgtagcacgtggcatccgaccctggagtgaagagtaagctggcacagagccccgacgctgggattcagactagatggcgtttcgtggcgtgccattgtgtgtcagcgctttcagactggaggcactagtctggtgaccacagctcctgtgagaagtcacacccacctcaaaaacctcatgaatagcttttcggaaacagtggaagttgtagtctattaaaccttttctttcaaagctttcttcccttagaatgcagaccagtgccaaaaatttagtcacctcctttaaataaaggacagttgtattattcagcttgataattgccatagattctttgtcataagcacttccacttccatcttcctttaacccatatatacaagacacatcaattacaacatcgatcatgtcacagcaaagttcataagattgcatatccacaggggaactgtctgttgcaatgtagattttgctgacaacatcaaagagaaaagctttttcaatacctgaatttgatataaagatatttaataggttttccaaggtcggcagttgtggaatgagtttctgcaccaccttactaaaggcttcaaatattgaatggtcatagatactagtcagataaaagctaagatggagtttttctagcccagcatctgcaaggtcatcattggccctttgatgaatgtccctctgtgtttctattttgtgatcatcagacagaccatcaactttgtgaataaaaacctcaaattcatgtctgggttaactttgtaggctttagaaacagtaatgtgaagtcttgttaaagcctccatgtagtcatcctgtgcgtcaatgacgtatatcaatgctcctgttcccctgaagatcatctcatagtcaaaggttgggtcaaaaaagtccatttgcccaggaaaatcccatatctggaaattcacaaaggagctattggaaatgtcatccttataaatcttgttggtactttccaaaaagagggtctcgttgggtgacatcttatgaaacaccaccttctggatggaggacttgccgctgcgccggagtcccatgagcagaatcctcggcttggagctgtcagcgccccccggaccacagccaccnnnnnnnnnnnnnnnnnnnnnnnnnnnnnnnnnnnnnnnnnnnnnnnnnnnnnnnnnnnnnnngtagccgaagtcctttggaaacgaatcggccgcgccgtaactgccggcgaggggcgtctcctccgccccgtactgcagggacatggtgctggagccgccgccgcccgcgccctgacaggtcagccgct

SEQ ID NO: 437236 - DNA, 498 bp, Homo Sapiens
agacctggacacaacagacacacatcacaaggcgaacacaaatggacacacatacctggccacgaacccacacctcctcagacactcagacaccactccaggctcatagccccgtcttgatgcagagaagccacccacgtggggtgtgccaggcacccccagctacaaatgcagccacgcacagacgtaacacacaggtgccaggccgtgtgctcctggaggctggctggctgtctctctcacacagatacacgtgcgctccctgggatccgggaggccctgggcttcctgtgtgtagccctggcatagacttgctcgtcagggtgttcgactctgggatgctgggccgggcagacatttatgctctgagcagcaaggaccattgggatggaggtgggcacaaagactgctgcttccagggtgtgcggccctggccgtgtgtctgacatcccataaatgtgtgtgtggtgtgactacgggcaccacaaactccgcaaa

SEQ ID NO: 437237 - DNA, 1179 bp, Homo Sapiens
  misc_feature (169)..(169): n is a, c, g, or t
  misc_feature (316)..(360): n is a, c, g, or t
  misc_feature (426)..(435): n is a, c, g, or t
  misc_feature (590)..(721): n is a, c, g, or t
cgcgccccaaaggcggcgcgccaaaagaaggtgtggtccctaatattatccccgccttgggggggagtattttaccagggtgttctccctccacacctccgcccgcttttgtgtcgtggagagaggggttcttacacccatattttgtggcgcgcgaaaaagaacgcgngtttataataggacagatattctctcccatcacccatggtttttctgttctctgaatatattagattttgctcatgcgtgcggggggtgggggcggtgggaaattattcggaattattccggagagcgttcccgctttgggagcttnnnnnnnnnnnnnnnnnnnnnnnnnnnnnnnnnnnnnnnnnnnnnaagaagctcacttttttgggatttttgtttacaaaaacccttctggggtttcccccccgggggggnnnnnnnnnnggggggaggtatccaaaccctctttctctggcgccagggttttttttgggaaaaaaactatgtgccccagtttccttttctctttagggggccgcgcgcgcaaaaacaaaaggttttggaaaaacttttgagggggcggaggggggcggacaagnnnnnnnnnnnnnnnnnnnnnnnnnnnnnnnnnnnnnnnnnnnnnnnnnnnnnnnnnnnnnnnnnnnnnnnnnnnnnnnnnnnnnnnnnnnnnnnnnnnnnnnnnnnnnnnnnnnnnnnnnnnnnnnnnnnngaaattttcaaaattatgtttattaatgttttagtatacacattatattctcttagaattgggggaaaaggaaaaccccactcaagtgaggtaacaaacttgccatcttttacaaaatttcattggaactgacaatgttatggtgagtccttaattcctgagaatttgaattattaagttttctgtgaacttaaaacaaacgctcacattaatttttaaattacagtatgtctgaaaaaataaaattaatgttaatgttatcaagaaaaatcatcatccaaatgtacatattaacctattagatgtgaatatactgaagccctgttgctctgcagtttgacaccatttaaattcgtttccaggatcttatttcaaatatatgaacttataatttatccagatagcagtgacattattttgacctaaaggaaaaataattgtctgtcattttcttctca

SEQ ID NO: 437238 - DNA, 934 bp, Homo Sapiens
gtactgtaactataatacctcttaatttacctttttaaaagctgtgggtcagtcttgcactcccatcaacataccagtagaggtttgctgcaatttgccccgttaattatgcttgaagtttaagaaagctgagcagaggtgtctcatatttcccagcacatgattctgaacttgatgcttcatggaatgctgcatttatatgtaagtgacatttgaatactgtccttcctgctttatctgcatcatccacccacagagaaatgcctctgtgcgagtgcaccgacagaaaactgtcagctctgctttctaaggaaccctgagtgaggggggtattaagcttctccagtgttttttgttgtctccaatcttaaacttaaattgagatctaaattattaaacgagtttttgagcaaattaggtgacttgttttaaaaatatttaattccgatttggaaccttagatgtctatttgattttgtaaaaaaccttaatgtaagatatgaccagttaaaacaaagcaattcttgaattatataactgtaaaagtgtgcagttaacaaggctggatgtgaattttattctgagggtgatttgtgatcaagtttaatcacaaatctcttaatatttataaactacctgatgccaggagcttagggctttgcattgtgtctaatacattgatcccagtgttacgggattctcttgattcctggcaccaaaatcagattgttttcacagttatgattcccagtgggagaaacaatgcctcaatatatctgtaaccttaagaagagtataggaaggtgagatactaaaatgttcaaacttagacatgatccaggtcatacattctcagggtccaaatgccttctacccatccaatgttgatcacacagcaaacttcagccggatcaactgtccgctggcgaacaac

SEQ ID NO: 437239 - DNA, 775 bp, Homo Sapiens
  misc_feature (538)..(546): n is a, c, g, or t
gaatttcactttagtttttattttattgtaaaccattgagatggtttgatagggtttcccagaatcaggtccatattttaactaaatgaaaattatgatttatagccttctcaaatacctgccatacttgatatctcaaccagagctaattttacctctttacaaattaaataagcaagtaactggatccacaatttataatacctgtcaattttttctgtattaaacctctatcatagtttaagcctattagggtacttaatccttacaaataaacaggtttaaaatcacctcaataggcaactgcccttctggttttcttctttgactaaacaatctgaatgcttaagattttccactttgggtgctagcagtacacagtgttacactctgtattccagacttcttaaattatagaaaaaggaatgtacactttttgtattctttctgagcagggccgggaggcaacatcatctaccatgttagggacttgtatgcatggactactttactgcatatatttcaagttgcccccgcnnnnnnnnncaaccacgcattaactcaagatcaatgtatgttccattagaataagatttattaactaggaattgccagaaaatcttcctggtaacaaggaagtccccgtattgtgagtcttaagatttttctgaagagaaaaccatacatatatagccttttttcagatgctcaaagaggtctaaaatcctctccacctccaaaataataagaaacatctcagctgggcacagtgtca

SEQ ID NO: 437240 - DNA, 770 bp, Homo Sapiens
agaatgcacttactggctcattcagcggctgccaaagcctttgtctgtgatcagtgcggtgcacagttttcgaaggaggatgccctggagacacacaggcagacccatactggcactgacatggccgtcttctgtctgctgtgtgggaagcgcttccaggcgcagagcgcactgcagcagcacatggaggtccacgcgggcgtgcgcagctacatctgcagtgagtgcaaccgcaccttccccagccacacggctctcaaacgccacctgcgctcacatacaggcgaccacccctacgagtgtgagttctgtggcagctgcttccgggatgagagcacactcaagagccacaaacgcatccacacgggtgagaaaccctacgagtgcaatggctgtggcaagaagttcagcctcaagcatcagctggagacgcactatagggtgcacacaggtgagaagccctttgagtgtaagctctgccaccagcgctcccgggactactcggccatgatcaagcacctgagaacgcacaacggcgcctcgccctaccagtgcaccatctgcacagagtactgccccagcctctcctccatgcagaagcacatgaagggccacaagcccgaggagatcccgcccgactggaggatagagaagacgtacctctacctgtgctatgtgtgaagggaggcccgcggcggtggagccgagcggggagccaggaaagaagagttggagtgagatgaaggaaggactatgacaaataaaaaagg

SEQ ID NO: 437241 - DNA, 491 bp, Homo Sapiens
catagccatgtgtgactggtggctgccgtcttgggtggtgccttcattgtcccagaaagttctgttggagcaagcccagctggaggaacccagcttccctggcacgcctgagggtgacatggtgccctcactgccttctgtctgtcctcactttctcctgccctgtccctccgccctcaggtgagaagccctttgagtgtaagctctgccaccagcgctcccgggactactcggccatgatcaagcacctgagaacgcacaacggcgcctcgccctaccagtgcaccatctgcacagagtactgccccagcctctcctccatgcagaagcacatgaagggccacaagcccgaggagatcccgcccgactggaggatagagaagacgtacctctacctgtgctatgtgtgaagggaggcccgcggcggtggagccgagcggggagccaggaaagaagagttggagtgagatgaaggaaggactatgacaaat

SEQ ID NO: 437242 - DNA, 632 bp, Homo Sapiens
  misc_feature (74)..(114): n is a, c, g, or t
  misc_feature (273)..(273): n is a, c, g, or t
  misc_feature (391)..(399): n is a, c, g, or t
ggggccccctgggggggcctccttctcttgtggtttcccccagagaggtttttcaaggagaggtttcccggagnnnnnnnnnnnnnnnnnnnnnnnnnnnnnnnnnnnnnnnnncccctaaagaatttccccccccgaaggaaattttgcttttttttaagaattttgggaatgcaaattttgcaggtgaaaattagctttcctccatgaggcctgattgctgagcatctgcttttgtgattctccacttctgggagtagaagtgttttctcngattctttgtcttgctctttagccaactgctcccaggtcactgaaggtaacaggtgtagttggagagttgaagtcatgctgagttgaagaaaagtctgtcagggaataagttagcttnnnnnnnnntgtggaagcagtccaaataaatgccctttgatagagaactggctgtattctgtgacgcaactgttgaaatttctcttttactttagtattcagttcagtaagagcacttaagggtcctgaacaatcacggatatcctgaataagcgccttcacctccaggtcaaatttgacaatctcttggttacagatccggacgtggacgtcttggggagccgccatgttggggacgccgg

SEQ ID NO: 437243 - DNA, 1165 bp, Homo Sapiens
tatcttacattatcaaatacatttttttctattaaataaaatcaagtttattcaaggaatgaccaggagttttcatcacctttcttcctacctcttctctcttccctccaccagatctggcatttaagggcacgatgggagcgggagacaggaggggcatccggtcctggaggctggactttaagtgctccacgcagcagcggcctcccatagtgcacaatggtggaaggaggcggttcgtatgtccccagggcggcatcccaatgccagaccttcctcccatggctctgttcaccctttacaagccagctacttgcagaaaagtggggcactgtgttccatccaacctgcaggcaactggtgcaaacggaggggtgtgtggctcagcttagcagcctagagctcaggaaccaggacagatcctgaaacaggagctgaaagggccagaactggcacctttgggatctcacaaaaatggaaagagccgctttttcacaatatagaggaccgtagcaagaaacagggctagcgcaaggaagatgagaagcttgtccgtcagctcccggcgattgtattttgtgataagcttccggcccagctggatggtgcccgacatggacttaaattcttcatttgcatccaggatcgttcgtgaagaagtgactagagactgcatggcctcctcgctctgctggacctgctgggccatcatcctgctgatccccatgaggctctcagtgatggtactggatgtctgggccaggctctctttggtggttttcctttgccttaagagatctcctccctgaagaagttctgctttctctagattgtcgattgcaattttgcaggtgagattagctttcctccatgaggcctgattgctgagcatctgctttttgtgattctccacttcctggagtagaagttgtttctctgattctttgtcttgctctttagccaactgctccaggtcctgtattctgtgacgcaactgttgaaatttctcttttactttagtattcagttcagtaagagcacttaagggtcctgaacaatcacggatatcctgaataagcgccttcacctccaggtcaaatttgacaatctcttggttacagatccggacgtggacgtcttggggagccgccatgttggggacccc

SEQ ID NO: 437244 - DNA, 814 bp, Homo Sapiens
  misc_feature (118)..(126): n is a, c, g, or t
  misc_feature (280)..(283): n is a, c, g, or t
  misc_feature (286)..(287): n is a, c, g, or t
  misc_feature (289)..(292): n is a, c, g, or t
  misc_feature (294)..(294): n is a, c, g, or t
  misc_feature (297)..(297): n is a, c, g, or t
  misc_feature (299)..(299): n is a, c, g, or t
  misc_feature (301)..(301): n is a, c, g, or t
  misc_feature (303)..(303): n is a, c, g, or t
  misc_feature (308)..(308): n is a, c, g, or t
ggtggggactccccggggggaataagattccccagtaaaggggcccccaggaaactccctattggggaattggttcaaaggacgctttcgtttgtccccccgggcgggtttttttatnnnnnnnnnaatcccaaagccttaagtccatggcccaagggttttccctagggaacccaggtttaggccacaggttccatttaaccttatggggcccgggggcccaaaaggaatggtttaaaaaaagcttttggaagggcccaaggccggccaaaaaagtttnnnntgnntnnnngntgntntntnttccntggaattgtaaaggagtttactgttttaatacattgttcttctggctgaggctggtcaaagctacactgatcttcaaataaaggctcgtcaatgctacactgttcttcaagcaacggctggtgaacttgttctgacaaaggatggtcgacttttcttgcttgcttcctatgtctttcctcttcagctaaatagagatgtttcagattatctgggtatcgatctgtgaattgagattccagtgacgtttgagccttcttttccttccgtagcaatttcttgtaactttgctgtattttcagttttcttcgaaaagcaaagccttgtccctcgcgaacgctccccacgaaggcttgcgggtggttaggccgccatgtcttctgtctcacattcttattcctgtacccgacagtggaaaccccttcaccacgcgcctcaataccaccaggccgccacttcgcggaccgcctcaccggcgccattgcagccgactaactgcgtcatcccc

SEQ ID NO: 437245 - DNA, 440 bp, Homo Sapiens
ctttggaattgtaaaggagtttactgttttaatacattgttcttctggctgaggctggtcaaagctacactgatcttcaaataaaggctcgtcaatgctacactgttcttcaagcaacggctggtgaacttgttctgacaaaggatggtcgacttttcttgcttgcttcctatgtctttcctcttcagctaaatagagatgtttcagattatctgggtatcgatctgtgaattgagattccagtgacgtttgagccttcttttccttccgtagcaatttcttgtaactttgctgtattttcagttttcttcgaaaagcaaagccttgtccgtggatttctacacagaatccgtgtgggaggagctggtcgacttgccaccggagacagtgctggctgcgctgaggaagtcagcgtcggagacggaggccctgccctcccc

SEQ ID NO: 437246 - DNA, 463 bp, Homo Sapiens
gttatttggggggttggggggttttttaacggggaggagtgaagagagtgaggtttggggatccttctcggagagagaaaggcgggcgtcgtcccttgtgccccgcgcaggccgacgcgcttagccgattccgcacgttgggcaagtgggggcacagcgtccccgggcactccggtcccggcaggtcagcctctcccgggcagcgctcacacccagtcctccgagcctggggttccacggccgaaatgcctaatgcaaagattgcaaattgcttttcaggcacatttaacagcgactgtagctgttccttatccagggcagggaactgtgctgataatcactctgcaaagcacgcagtggtttgcagagcggtctcactccggctacgcagaatttcagctccttgcctccacctccacctccactccaggacacgccatcccgggaattccggaccggtcca

SEQ ID NO: 437247 - DNA, 938 bp, Homo Sapiens
  misc_feature (926)..(926): n is a, c, g, or t
aaagaaggtagataaatttattgccacttgaaaactaaatataactcagatgagtcagacaaaaaaaatcattgacattaaaattattattatttgaccaggctttgtcttttgaagatttctctcacaggcacttctgcaacaaatttgtataatttaatatcaatattttgtgattatctcttaaaggccaagcacatagggcatttatgatggctaatcataaatacacaataatatatattacatagtactatattaacttgcaacaggttgcatattttttctttgagcttatacacttttggaaaaagtctaccttttataaatatcaagttggatattcttgtctgttgcatttgctaaataagagtcaatagattaagaatctgtcttcttttatatatgtcggattgtatccatttggaatacagaatcccctgcataacaactagcatgttttcgctcgaagtacttgttaactatgagctctagaatattttttattttcctaatatatagcatttattctttaaaagattgatcccttcacccatttctgcaaggctcttttgtagctcaaaaaattaccataaagggaaagaaagtcctccagctccctactacattactttagaattgaggtcagaaaactttttctgtaaaggatctgctgcatctattcaactctgcagttgtagtgcaaaaccagcttagacatagcaaatgaatgggtgtggccatgtttgactcatggttgtagtttgcctacctttgctttagtgcatctaaattaacctgttcatataaaatatccagcagataaacataatttggtgctaaaagagagttacagaatctttttcttttcggacgcgtgggtcgacgatatcccgggattccggccggtaccgccgctttttacnacgtgtcatatc

SEQ ID NO: 437248 - DNA, 1488 bp, Homo Sapiens
tcagttaaattccacatattattcgaagagcctttaatacaaaatatgatattaatagtaattactatagagcaatattttaaaagtaactactgttttaatttacctgatacgttaatcactagaaaaagactctgaatttctggcattttgtatgctagacataagtgatatttatacaaatacagttgcaaatacgaggtataatgactttatatttagccacagggtagtatttttacaaagaatgagagttagtttatatgtataatttatttgttttcatataatttagagaaaacagtccttaaggataatgattactttaaaaagaaagcccttaaaatcatggaagaagtcacttgagaagaaatccatccgtcaatggttcgtcatctttctattataaagcttgctgtaccccgtgtaatgggcttgtcctgatacttccaactataacagcttttaaatcaccacatttcgcttgccctcacaggctttccctgtgaatactgagccagttgcactgcttttgaaggctctcatctggttcagttccagaagccctttgtgatactgtaaggcaattcgggctgtcactcctgagccagtgggacttctgtcaacctgttcatctgcaaaaacacaaatgttggtggttggttccttggtataagcatcttttccatctgttaatatagttccatataaaaaggcaaggtcttcactatcaggatgattaattttaaactgagctttcactgcctctgtcactgcactcgctgcatccacaaggtccctggtctttgcagaacaaatgtctagtcctaacttttcagcagtaacaaatgcataaaatgcaccgccatatgcaatgtccaccatcacctttccatgtccaggaacatccaccatgagatctgtggccagcacgaaggccgggacgctgtggaagcgcaccggtccgtggctgcggccgtcctcgcatgccacgaaggcggtcaccagcccgcaggggcagtggatattgacgcgggcctcgcgggtgcccgcagggggcgccggcacaagcccgaagtccaaagcgaagcggcccagcgccagcactgcgtggccgcacatggagctgtagccctcgttgtgcaggaacaggacgcccagatgcgcgtccggcagctcgctcgggactaggaccgccccgtacatgtcccggtgccctcggggctcgaacatgagccgtcgccgcacgtggtcaaggtgctggcgcatgtagcgccgcttggccagcagggtgggcccagacacctccggacaccccgccagcacgatacgcaagggctcgccgcccgtgtgcatgtccaccaccgacagcaccggcgtcctggatcatgcgggggcagccggggcaccgccagcgcgctctccatggtctgcgtcgggggagacgagtacaggtcccgcagctatgcatgcaaggaattccggacc

SEQ ID NO: 437249 - DNA, 726 bp, Homo Sapiens
tatatgtataatttatttgttttcatataatttagagaaaacagtccttaaggataatgattactttaaaaagaaagcccttaaaatcatggaagaagtcacttgagaagaaatccatccctcaatgggtcgtcatcttctattataaagcttgctgtacccgtgtaatgggcttgtccttatacttccactataacagctttaaaatcaccacatttcgcttcctggacttgtctgagtcattctttggtctctcggctccctctctatttggggggacattgcaatcccagattcttctcataacagctcctataatataaagcctcattgaccttttgctttgtctgacagcaatataatataatggcttaacagcatgtggtctgttcagagacccaccttcatgacctggatctgctactcactaactaacctctggtaaattacctaacttctccaattctccgttttatcatctattgaaaaacgataataacagcacagtactgaccttgtaggattcttgtgaggattaaatgagatggcatgtatcaagtgcttagcttggaaactgatgcacagtgaagtatccaataaatgtatgttgttatttttatgttccatttcagattttgaagacagtatgttccaaatttttgcatacaacataaatggtttcacatgtttcagatcactatatgatgtagagatccttaaggaaac

SEQ ID NO: 437250 - DNA, 431 bp, Homo Sapiens
  misc_feature (257)..(313): n is a, c, g, or t
acagtgatgtggccggtaagttatctttatttaagaattcaccaatataaaaggtcagctaggaaaaaacacatgtaccagtaaccaaaagcatttgcttacatcattccacaatttgcaaaacaagataattgtttttcaaaaccagacaacaggttcaaaaatacttcttttcacacccctaattgatgctgttggtaacaatggttgttacaagtccattgtatgcacatttccagcaagttctgcttatcatnnnnnnnnnnnnnnnnnnnnnnnnnnnnnnnnnnnnnnnnnnnnnnnnnnnnnnnnncgttattttattcactgcatttcgaggatcatatatttcaaatgtattctgtgttttgcctgcttgcatctttcacttttctgcttttatccttaaacttatattacttgtgacatcc

SEQ ID NO: 437251 - DNA, 1674 bp, Homo Sapiens
  misc_feature (1116)..(1116): n is a, c, g, or t
gggttgcaatgtttagaacattttattaaagtacaaaattgttggaatttagctaatagaaaaacatagtaaatatttacaaaaacgttgataacattactcaagtcacacacatataacaatgtagacaggtcttaacaaagtttacaaattgaaattatggagatttcccaaaatgaatctaatagctcattgctgagcatggttatcaatataacatttaagatcttggatcaaatgttgtccccgagtcttctgcaatccagtcctcttagaaattggtttctctctttgggagattcagactcagaggcagccagaggggacaggtcaagagctgaaataatcacataactactctaattttcttcattctattgactgtgtcaagttatagacacagccaaagtgtttttcttcggcctctgatgatttgagaagatgaagaacatgagcaatttctcattgcttaaagaaaaacttggcacataagaggctgagtgtagtagagtatctgtactagaaccataaagttctatctgatggtaaattatgtataaaactaagataaaacagataattatgctctatctcatatctactgaaagtagaaaaggaggaagagtgacacttttaaatcaaactgctctagttttagcttagtggatggttaataaacacactgctttacgctgaagtgatcagatagctatttctacagttcagaagaacttaaaaatcaggttttaaagacaaaagaaagcagactcaaaacacagacaaagcagagaagaaaacaatgcccatgagatggtcactatttagacagtattataaaaagctaaagaacacttgggctttacttcactttgatgtcttgtactaaaaacaccttcccccaaactaaattcagaggggaggaagttaagagcttcaggtaactttaaaaccagtcttgggcttggtaagataattacttaaaataatcgcctcacattttaaaacagatcatcttcatctgactcttccaggtactttataggtttctttgcccgtacagattttgcccgaggagccacagctgagtcaaagtccatatggaagtcatcactctcnccccttggatttcttgcttgtgactgctttcgaaacaattttctcaaaattagagtcagaatcatcagaagtggatggcttccttttgcggcgattcttggttttggcaggatcaggcttttgagagacaccagaattcaaagctggatcccttttagttccttttggggcagccctttttttggcaccggtagtggaggtggaagactgactttttgctgctgtcttcttcactgtcacattctttttaggaactgggtttgtaatttcagtttcatctgggaaatgtgtagcaggagggcttgaagacagtggtacactgcccttaacatcatcagcttcaaggtctattatttcaaatggaaaggaaaatagtacatttaagcaacacatgaaaatccattttctgctttgtccctggtatgaattcctatttaaacaccaaatatgtgacttttctggaatatttaaaacatactcttaaaactttgttctaatttctgaattttttatcagcaagaacagtttttattttttgtatctctagcacctagcaaa

SEQ ID NO: 437252 - DNA, 391 bp, Homo Sapiens
atggacagacaattttcttctgaaaagggcaaaatagtaaacagtctaggctatgtgggccaaatggtcttcgttgccattctccaactcagctgccccctttggtccatcctgtgggctgtggggaccaggcccctgctactcaaggccaaggtaggaaacagtctttcctgttttcttcagggttgcaagcagagtgtccatgctgtgctcagattcaatgcagaccttcttgttgggcaggtcaatgtcatacttaactcctccaagcttattgaggacccgagagacagcttcagcacagcctccacaggtcatgtccacagagaacctcgtgcttcggcatgactgaggcagcggcggtgtgcggcggtgtgcggcggtgtcagca

SEQ ID NO: 437253 - DNA, 971 bp, Homo Sapiens
  misc_feature (448)..(449): n is a, c, g, or t
  misc_feature (451)..(451): n is a, c, g, or t
  misc_feature (453)..(453): n is a, c, g, or t
  misc_feature (462)..(462): n is a, c, g, or t
  misc_feature (464)..(464): n is a, c, g, or t
agggttttaatcccaatggccccggttttgtggtggaagtgggggtctctcccaatttttcggggccagaaaattgcctttttaattggatttctacccacaccgggttcctggcgaaaataaagtgggcccaagggcccgggggccgtaaaattgtggtatttcggagctctgccgcttgggagcttccctgtttggttaggattccccagtaaatggccctccaggaacttcccattcggggttgtgtttcagaaacggcttgggtttgcccccccgggcggttttttatttggggggggaattccaagccctttagtccttggcccagggttttccttagggaaaccaggctatggacatgtttcacttcaccttctgggccccgcgcgcccaaacgaacggtcttagaaagctttttcgaaggccgagggcgcgccgacaaggnntntnttttttgtnantttttttttttccaacaaaagcagcttgattttattgcagggaagctaggaaggaataggacaactgagggtctccgcaggaacaccatcacccggcatgactgccaagtcccaggtctgtctggaagccagcgggaggatcagcatcctgccccctttggtccatcctgtgggctgtggggaccaggcccctgctactcaaggccaaggtaggaaacagtctttcctgttttcttcagggttgcaagcagagtgtccatgctgtgctcagattcaatgcagaccttcttgttgggcaggtcaatgtcatacttaactcctccaagcttattgaggacccgagagacagcttcagcacagcctccacaggtcatgtccacagagaactcgtgcttcggcatgactgaggcagcggcggtgtggcggcggtgtggcggcggtgtcagcagcgcctctctggattcggagggcgggttcggctgcgcttccgagagtgcgcgctccgct

SEQ ID NO: 437254 - DNA, 1040 bp, Homo Sapiens
attcttcattcttcttcttcccatttgactggtttggaagttgtgggcagcaatactttgagagccaaagtttgaaagtgtggccttttttttggggtccacagttgttccttgagcttctcaatttcttcaggtgtatattttcccacatggtttctgtcatcatacatgcgaagcactcttctataaactgcaaacaaaggccggttcagaccccatgctatagtcctgtagaaatcttttctttcgtcttttgacatctcaaagatgatttctgtagcatcttttattccgcgtgccttaagatagcgttcaatattgttcatcaaaatatcaatttcttccttggaccacatcccctgcttccatttatgtcctttattagtcagagaatccttatcttctttagttgtaaaccatgcttggctaactgctgaaacttcctcgttacccaagggagatatttcatctagttgctcattctgcaaaatctgtatctgtgtcacagtcccctcagtaacctcatcatctgctacttctgtggtcgcagtcatggtcacttcaaagctctgatcattttctgaaagtggaagtgcaacaactgatatgcaaggagtagaatcatcaatactctgatcatcctcagaggacaaacaaagccttttatgtggaggttcaatactttcttctgagtctatttcatccgcttcattctgagggcagtgaagaatgagattcccttctgtgtcctgagtcaaagtcacagagttcacagtttctactgttactgtgtcagaatcctcttccactgtcgctcatactcaaatctagacaacggatggatcagctacagcccttcccacagaatcaagttgccttcccttagcaaccagcatcactttcatgttacccagattgtttctctcccatgttcctatctccgcaacactttcctgttttgggtccgggcactttggaagaaccaggatggaagctccaaaaaataccaggatggaggaagcagccacgggcgagagtgg

SEQ ID NO: 437255 - DNA, 1060 bp, Homo Sapiens
  misc_feature (142)..(152): n is a, c, g, or t
  misc_feature (414)..(428): n is a, c, g, or t
  misc_feature (937)..(987): n is a, c, g, or t
aggtgtgttggtctttgcctgtagtcccagttacttgagaggatgaggtggcaggatcgcttgagcctgagaggtagaggctgcagtgagctgttctgtgcacagcacttcagcctgggcaacggagtgagatcctatctcnnnnnnnnnnnggccctgagataatttcctaaaacataaggaaaatcagatattgactttttctatgtcatattaaatatctaatacattttaattaaattttaatccattagcagtttgtgtttggtcttgtaacagtacttgtctgtataaaataacagtcctggtatgtttatacaagaatattaggttttgttttacacacctaattttgtttcttatttgggaatagttaaaaagagaaaataaggaagtaattacttgaatgggaannnnnnnnnnnnnnngctaatgtagcatagtctgttgcttttatatattatatgtatttgtattaattttataaactattgattgttcctactttagaaattcatagttgttaattccagcctggcttgcatgcagcagactgtgggaatactttcttcactagtctaggtgctataggcccaggaaatataaacagaattagctttgataagacatttaagaagtaaatctctacagattttatatttaaagatttgatatgaatgacttctggattacctatgccagtagtcactttcattactatggaataatgagaatgtataaagtttattatggcttactagttgataatgttttcgttaatcaaatggaaacctaaaatattaaatgtataacataaaataggtataaaatataccttatgtataatgtatagggagtttattgaaaacagtatgcagataaattatatcaaaattagttctcagtagtcatagatatttttatcatttggggaagnnnnnnnnnnnnnnnnnnnnnnnnnnnnnnnnnnnnnnnnnnnnnnnnnnnaaactattacaaaatcgtgcctgcttgtctctcattcaaagaatagaacttactgaggagaaatgatgttagc

SEQ ID NO: 437256 - DNA, 713 bp, Homo Sapiens
  misc_feature (257)..(273): n is a, c, g, or t
gaaagtgtaaataatactggcactttagaacagattaatcaagagtggggttactctgtgtaaatggagtgctgtacagatttaagagcaatgcgtaataacaagttaagctgatatgaatagcaagataatccaataactgcatttcgtttggttagtcagcattctttgaactgccttacatgttgtcacctttatagaagcaatgcattacttgttttagatcagaaacttgctattccacccacaccaagttnnnnnnnnnnnnnnnnngactttcgcacaattgtttcctaactgataacattgtacattcttaggagattagtaattgtgtgaaatttactcatactgtttctaagtttttcagcatagtcattgcacttcagcagggaatctgagtatactttacagacagagtgaacttaaaagtttaatgtcaagagattatggcttaaataaattagtgtgtcctatagggggaaaaaaaccaagaaaccaccttttaaaaagaatgatatgccatatacccttgattttcattttgcattatattgacgtgtttttttgaaggaaaaaaagtaataaaaatctgatagtctaagactccactatttaaaagcctaattactttaaaaatatgcatactttcagaacttttaccaaaacacacaactgttgaagcagtcacttctctatggaagtatgcatat

SEQ ID NO: 437257 - DNA, 1645 bp, Homo Sapiens
  misc_feature (155)..(169): n is a, c, g, or t
  misc_feature (330)..(331): n is a, c, g, or t
  misc_feature (462)..(478): n is a, c, g, or t
attgggtgggggaaaacgccaccccctgttgttttatatcccgcggggtttttcttgtggagagacacacgcgatgggccactggtgttttttttctttgtgggggggccccggccccccacaacgaaagggtgttaaaaaaaattttttttgtnnnnnnnnnnnnnnnccccccaaatttccacaccttacctttttggttataatccttccggggagggttgttggacgtactgtggtagttattactatggtctaggtgctgggggcaaagctcttttatgccggggaaaatccggcgttgtttttggttgaaagataatttttcgnngtcacaaatctgaatctttattgttctgaaataaatgttataaacataactcaaaacaaaaacttcaatattcagtctaagaagaggtgtggctcaatgcccatcacatgtaacaagaaaaacctcctttnnnnnnnnnnnnnnnnngtactatgagaagtctttcatatgaatgaaaatgcacccgttggatttttttccccctcatcacattagcttgtatacacgtgggaattgaaaggtttgcattttcttcacatagttcttgctatgatgtctgacggactttttgccactcaacaaattcatcaagaagaacaggccaagcaccatcttcatcatagttactaagatcagcatggactgttctgctgaattctaatacattgtaccattgatctttgttcataacacgatactttgattgctccaggtactggtaaaatactgaaaacagtggccatgtcctcccaagcagaagagctaacatagatttagcagtatcaatatcaaggcttctctgatctttatcccttgcaaaatcaaaggcatatctgtagatattcttaaatgacgaaatatcattcaactgtgagcgcaaaaagtcaaatttgttttgtaacttttctgtgcagtcacactgtaatgaagtcattccctttaaccattcttccttggtaaaaaatcccatgctttcagcctccaatttccacgctaaaactaacataataatattttcaggttcaacaccaatgtcttcacaaaatttttccattccttctggccctacaacttcatcaggacctgcatattcataaaaccaagccaggcacttcttgcttgaaaaatgttcctctccacttattagtctagcagggggttgggatctgcaatagctggagattttacactttttgaggcctccgtcttccgctactgctgctgccaccccaggggattttctcttcttcttcaccggcatcttccgccctccccggcagggtgggcaggggagccggggaagggggtccctgtccgctggaagcccctcagcgctggcacccagttcccagagacagcagcaagcggaggagcagagtcgccagcccgcaccggcgcggcccagcccggccgccgcccgctcccaggtatcctcgtcgtctttctctgaccgggacagggctggctcctcgccggtggacactgcggttcgttctcaccgggaggagataacgcggacagcgcggcagctccaccccctcgtgccgaattcgccacccagcctcgctaccataacgccgggatagtactgca

SEQ ID NO: 437258 - DNA, 1075 bp, Homo Sapiens
  misc_feature (987)..(1019): n is a, c, g, or t
  misc_feature (1031)..(1031): n is a, c, g, or t
cttcatcaggtcaagcccccgggcctttcgcgaatttcaaaccggggccaggaaccgtgtgttcaaaacccgacactgggatggctccgggtactggtaaaatactgaaaacaggggccagttgccccccccaagcagaggagctaacatagatttaccagtatcaaatattcaaggctttctcctgatctttactcctggcaaaatcaaaggcatatctgtagatattcttaaatgacgaaatatcattcaactgtgagcgccaaaagtcaatttgttttgtaacttttctgtgcagtcacactgtaatgaagtcattccctttaaccattcttccttggtaaaaaatcccatgctttcagcctccaatttccacgctaaaactaacataataatattttcaggttcaacaccaatgtcttcacaaaatttttccattccttctggccctacaacttcatcaggacctgcatattcataaaaccaagccaggcacttcttgcttgaaaaatgttcctctccacttattagtctagcagggggttgggatctgcaatagctggagattttacactttttgaggcctccgtcttccgctactgctgctgccaccccaggggattttctcttcttcttcaccggcatcttccgccctccccggcagggtgggcaggggagccggggaagggggtccctgtccgctggaagcccctcagcgctggcacccagttcccagagacagcagcaagcggaggagcagagtcgccagcccgcaccggcgcggcccagcccggccgccgcccgctcccaggtatcctcgtcgtctttctctgaccgggacagggctggctcctcgccggtggacactgcggttcgttctcaccgggaggagataacgcggacagcgcggcagctccaccagtcacagcaagcaagaggctcagcctccgctctcgacgaattcgagctcgccgatttggcctgatnnnnnnnnnnnnnnnnnnnnnnnnnnnnnnnnnatgcgccgccanaccccggacggaataaaacaaagcacttcgccccggggaggtgt

SEQ ID NO: 437259 - DNA, 671 bp, Homo Sapiens
gaaaaccactgaaattatttccactccaaggtcatgaagatagtctcttagattatattctgaaatccttataaatgtaaatttcatatttaggcctttaattcacctagatttggtttttttgcatatggtgtgaggtaaggattcactttcatttttttctctccatagggttacacacctgtcctatcattgtttgtaatctaactttctgcgcccatctgcaatgccacctctgtcatatgtccacatatgacatatgtagatctgttgttggattctttcctctgttccattagtctgtctgttcttgtgccaatatcaagctgtcttcattattatcaattatgtattgagatctgataaagtaagtcttttccaccttatttttcttctttgagagtgtcttgactattctggctctttgtattttcatgtaaggtttttctcccatataagttttaaaatcagcttgtcaattccaacaacaatgatgcacttgatagtttgggaatttattatagctatcaatcagttttgggaaaattgacgtctttacaatattgagttttctgattcatgaacatggtttacctctctttccatttgggtcttctttaaggtttaccaataggattttatatttttgtccattgtggtcttgcttatct

SEQ ID NO: 437260 - DNA, 1025 bp, Homo Sapiens
  misc_feature (46)..(55): n is a, c, g, or t
  misc_feature (72)..(80): n is a, c, g, or t
  misc_feature (299)..(419): n is a, c, g, or t
ttcgccccaagggggggaaaaacctttttctcaggggaaaggtttnnnnnnnnnntttaatagtggcttttnnnnnnnnnggggggggagggaaaccccccttccgggttttgtggggaaaaatagccccccattctcttttttcccgaggaaaaagttgtttataaccaaagggaggttattccaaattcccctttgttttagccattataccttccagaaagttaaccaagttacaaagtcaggttgagtcagcccaaaaggccatggcttctgccttatggagtaaggcattcttnnnnnnnnnnnnnnnnnnnnnnnnnnnnnnnnnnnnnnnnnnnnnnnnnnnnnnnnnnnnnnnnnnnnnnnnnnnnnnnnnnnnnnnnnnnnnnnnnnnnnnnnnnnnnnnnnnnnnnnnngtaacacatgtacagaaaatggcagataacctccatcttgggtggagattttagtattacaatgagattgtagtgagaaaaacttggtgaaagctcagcactgaagttcatcttgttgcaaaccagctggatctggtcatgttcttatcaggaaggccagaatcctgcttcagtaatcttggaacacatagctggaaatgacctttgcattgaagcatctgctgctttgtgtgcaggctctgatttcagtgtgtcaggaggactgcagtgggtccagcttgtagctcatggaagtgctggtgatgataatggctggctcaggtgccacaggcctccatggcaaggtttaggagacaatgaactcgatggttgcagtggagaagtcaatgtcagccaggatttcgttaagactcttttaaggatttgcaacgctatcccatcatttcgcgggttactagagtcctgcatgtttggctgtagagcaagggtgacgcgtaacttctggactttggttccatctacatctgccggatgcggatgccagtcgcaacagtaacgcccccttcggccacctgcaccacagcacgccatgcggccacacccaac

SEQ ID NO: 437261 - DNA, 998 bp, Homo Sapiens
aattcttgcgatgtggccgcatggcgtgctgtggtgcaggtggccgaagggggcgttactgttgcgactggcatccgcatccggcagatgtagatggaaccaaagtccagaagttacgcgtcacccttgctctacagccaaacatgcaggactctagtaacccgcgaaatgatgggatagcgttgcaaatccttaaaagagtcttaacgaaatcctggctgacattgacttctccactgcaaccatcgagttcattgtctcctaaaccttgccatggaggcctgtggcacctgagccagccattatcatcaccagcacttccatgagctacaagctggacccactgcagtcctcctgacacactgaaatcagagcctgcacacagagcagcagatgcttcaatgtaaaggtcatttccaggtccttgacaggcgtgcatctgggccagatccatggcaataaccttcaggttgaggctagagggcttcagatgggcagcttcgaatgacaggagcaaggcacaagaggccggaaagggagggtgacattttcagcatctataagatcaactttagaaacatttgggggttgacaaattcccatcaagctctgtggatcttgtacaactgctcaccaccggcttctcatcagcacatgattggtgcagggttctgaggatgattttgagatgttcccctgatgtggtcttgtgaggagatttcatgacagatggcaggaagcttcgtggagagatttctgaagacactcctgagctcccaacaccgggcaactctcttccagaggatagtgggggtggaaggtagacagaagaggcaaagtcaagctatgtgttcccaagattactgaagcaggattctgggccttcctgataagaacctgaccaggatcagctggtttggcacaagatggaacttccgtgctgagctttcaccaaggtttctcactacaaaccattggaatactaaatcttcaccaga

SEQ ID NO: 437262 - DNA, 725 bp, Homo Sapiens
  misc_feature (707)..(707): n is a, c, g, or t
taagcagatctgtttcaattcagaaacccaaacattttcagtaaaatgtgcttacatctttggagtgctggaaaatacttgttaattatgaacatgtctaaaaataaaaatcagcagaagccctgatattccctctttttcatcatttatcatactaccttttaaaatacagcaggaaatgtggccagcagctggtcccgtctcttctgccccaacagctgtatccacaggttgtgaggcgggaacgactgttctgtaacccctacaacggagcctggcaggaaggaaatcacctaaaaaagaaaattttaagagaagacgacgccttccgggcgcacgccgagcagaactccaccgacaccttatccttgtccacatggagacagactcctcccgccgagtcgtcctcttccagcaggtcctgcttctgctttcccaccggcagagcgtagtcgtggtcaccggcgggcgagtctctgaagagcgaggtggtcagccgcagtcccacgccgctcagccggctcagcaagcgagccagtccagtctcgttggctaagactgcccgtaggtagcgactctcctcctgcagtgcctgtacgcgtttgcccagctcccgattctcggcccgcagctcctggttctcggctgccagaccccggactcgactctccagccccatcacgtactccttcttcttcagtcgattnaaggcgggcagcggccgc

SEQ ID NO: 437263 - DNA, 1972 bp, Homo Sapiens
  misc_feature (19)..(19): n is a, c, g, or t
  misc_feature (264)..(275): n is a, c, g, or t
  misc_feature (899)..(932): n is a, c, g, or t
ttttttttaatcataactnttttaattaacaagtagtgaatcggacactttaagatattgtttactacatactgaaataaacagatctgtttaaatttcagaaaccccaaacatttacagtaaaatgtgtttacacataaatatgaccaaatttatttaaagcccctattagatagatcctaagtacatgcaatttaccatgtaaaaacaagaccatgaagttgatgtaaaagatgacaaattcactaagtcaccaagactagnnnnnnnnnnnntgaaatggaaactgagaaaagacagttaataaaacataaggaacctaacaaagcagctttaaaaataggccatactaatccttccattttcaaaagttcttatcaagtaattccaaaaactgccatttataaaatgacattctaaaaatctacacttggaatttcaatgtatctcaattcagaaagctttgactactgtttctccccagcccacaatttcaaataatgcaggaaaagtattgacgtaaggaagaaaatactccaacagaatgttatagtttttagaaaaatgaacttactgctttccagaaccttttaagacccacagtcagcattaacaatcatttttcctattttcatccattattttccaatatcatgttagagatgaataaattctttgagcccataactaaaagatcaacaaacctggttttattatgacaccatatttttgtcattggtactgcacaaaattatatacaaagaaatatatacaaaatgttcaagtattagttaaatttcaattcaaggcttctgtttcaaaaaagctacatttaacatatttcataaagatagcacaaattagtcatttcaaataatctttccaactacttttggttnnnnnnnnnnnnnnnnnnnnnnnnnnnnnnnnnnattcagtaggcactaaaaacccatgcagctgcattgtgaggggcttgctcctgcccttaggtataagcaggttcatcactccaatttgtgagtttggctactacccattcatgctcaagtgcagtagtagatgattttacaaaatatgctgtgatgcactggaaaccaaagaccaattcaggtctcaaatcgtattatctagcaacaaaacatttacagttgtgcaaaaacaaggattccattttcataaccaaataacaaaataaaacattttatgtgtaagataacttacatctttggactgctggaaaatactttttaattatgaacatgttaaaaataaaaaacagcagaagccctgatattacctctttttcctcatttcttatactaccttttaaaataaagcaggaaatgtggccagcagctggtcccgtctcttctgccccaacagctgtatccactttagcacaaagaaaaacaaggatgctaaatacgtatatactttatcaagcagtgatgtttcacaaagaatttcttaatgcctcttacactgaaggacaccataattcaatttatacaactggttaatagattcaagggaataaatcccaccttaggaaaatagtaccaatcgtgtcatttaagtggccagaaccactcaatttaaaaaattattttaaaataggacaaatacttttgaaacacagagaataagattctttgtgaagcctcactttacacgtttctcattcacatttcacaaccttcaatatctaatcatacatatataaatttaacctaaaattttaatacaacaaaaataacagatgttcaacaatttattcaatctcagtgatagggctaatcactgctggtcctcaaaagaaacattagccatttcttattctccaattaaactaaacacgcaggagtctcatatgtatgtcattctccaaccttctcctaatgggtgacacattacaacatgttactccctatatagaccgttcctattatcctcatacctgaaacaccta

SEQ ID NO: 437264 - DNA, 908 bp, Homo Sapiens
  misc_feature (625)..(640): n is a, c, g, or t
  misc_feature (802)..(838): n is a, c, g, or t
gttttgaacttttatttgcattttcttttggctgaatttgtttgtctcttaagtttatgtttcttctggggtatctttttcttccgtgcatcctccttttctgcttttggaacaaggtgtttcttttcactaagcatcatctggatgtggcaggggagtttgtggatgggttcatctgcccatgagttctgtaagtcaggtggtacattatgggtgccttttccctggatgtgctcaataaccagggaatctacatctatacccttaagttcagcataactctgcacttgtaagcaaatttcagtaccttttcggggccactgatggtgagtccagccccaatgtctgtcttgcgtacagcgaccaattccactttttaagactgaaatggtacacataattttctgtaaaggaaaatatttcagatacttggtggcttttcatataggcatacctgtgatggcttgagcaccttcacagtttacagtgaacatgagggtttcatctttctaacatgcacgacttcgtgggattttctgggtcatagtgaataatgttcatagatcaactcaggccacacaagaggacaggttttctttggtctttaaaaggaactgattaaagnnnnnnnnnnnnnnnnggtggaagccaggcacagcagctggtacctgtagtgacagctacttggcaggctgaggtagaaggattgtgagcccaggaatatgaagctctcatgcactaagatcacacttgtgaatatcactgcactccagccgggtccaaacagcaagaccaactctcnnnnnnnnnnnnnnnnnnnnnnnnnnnnnnnnnnnnngtttgtggttagaaaaaagtttttatttaagacattcattaaagaaaaaagtactttgagaagagattag

SEQ ID NO: 437265 - DNA, 715 bp, Homo Sapiens
  misc_feature (515)..(562): n is a, c, g, or t
  misc_feature (628)..(628): n is a, c, g, or t
  misc_feature (641)..(641): n is a, c, g, or t
  misc_feature (645)..(645): n is a, c, g, or t
  misc_feature (656)..(656): n is a, c, g, or t
  misc_feature (673)..(673): n is a, c, g, or t
  misc_feature (677)..(677): n is a, c, g, or t
gaaaaccaaccaggaacatttattaaaaaactaagcaagttatccccaagagggtgaagcaccgctggctggttctgacattcgattcaggctgaaggcacggcaactcctccagcccttgctgggaaatgtcctacccaggccacgggcagtgccccagtgcagctgggtcccctaaaagcccccaaacacatgatcccaccaaaggcttgaacagagcaacttcatcaagcaggcagggaccacacctgagacacaagggcaaggaggtaaagcacaggggaccgggagtgggccagggacacccagcccccgtctccaactggcgccccctccaggggggctaacatgtggcgtggggccaccaggacctgtgcttgcccctggtggcggaagagctaccctccctcttgggtggtggggggatgttgtctgcacacagctcagacgaccgagggtacaggaagaatcaaactcagtcaaccattcttcaacccaactgggagtctgtgagnnnnnnnnnnnnnnnnnnnnnnnnnnnnnnnnnnnnnnnnnnnnnnnnggaaccgatcttgttcatctctgtgccccagcactcggcatgtagcccatgatacgaaaatgcagnctgaacaactgtnaaantcttttgtatnactagtgcccggcacanagtnagtgatattaaggtgtgtgggaaagaagaaattgggtg

SEQ ID NO: 437266 - DNA, 596 bp, Homo Sapiens
  misc_feature (1)..(1): n is a, c, g, or t
  misc_feature (206)..(226): n is a, c, g, or t
natgagccactgtgcccagcccaggctctgggaatattgagataaataagatgcttctatccatttattcaagcacatattggtcacctactgtgtgcctggcactcatgtcacaaagataagttcctgattcggtacacttactgagcacctgctgtgtgcagggagctgagctatgggatgggaatgggagtaaacaaggtacnnnnnnnnnnnnnnnnnnnnncctcactgctagacggtgtgggaacttctcactcattggcttctttcccacacacctgaagagcactgactgtgtgccgggcactagtgatacaaaagagtgtgacagttgttcagtctgcattttcgatcatgggctacatgccgagtgctggggcacagagatgaacaagatcggttccttcacttcttcatgccacaagtgtttattgagcacctgtgtgccaggcctcacagactcccagttgggttgaagaatggttgactgagtttgattcttcctgtaccctccggtcgtctgagctgtgtgcagacaacatccccccaccacccaagagggagggtagctcttccgccaccaggggcaaagc

SEQ ID NO: 437267 - DNA, 825 bp, Homo Sapiens
  misc_feature (609)..(609): n is a, c, g, or t
tgggcattattcacaagagcctagaattttaaatgtgcccttgtgtaaaggtaaataaactgtccaatggtaagtgaacgtcagtttacagaacacttgtcctgactttccactgagttacttaatactccctgcccatgaatccatttgcattgattccttcttcatcaactgtctacgcattccgacacagctcagagctgcaaagaacttcattgctgaatcaccagggaggcaactgtactcacttaagacagaaacacaaataagtagccacttaaaacagtacttatttctttaatggagttttcctcttaattataatatagcattagtttctttcttgcattctcctcgtgaactttcatgacactatcaaacaggagcaaatataaatttgtgtagcctggaatatgcaatttaatcataagccataatttccatatcgctgagaagaaaaaaaatcaaatgattatactccagtgcacgaggaacaatcttgaattaaattttactctctgctaaagttaggtttttcacaacaatatcaagaatggtttaaaagaaacagtaaaacatttactgctatattaaaattccatgccccanagtgtttaccgaagatcaaactgctattcctttttgcaaattagaagtgtcttgcagacatcttcaaacctcatgaaagaacgggcaatggtgtcacggtagtctcactgatatttttcttctttatccattcccttccacttggagtcagaaatgatgctctttttgccagaaaaaaatccagaaaatcctcccagatcactgtctcagtgagag

SEQ ID NO: 437268 - DNA, 545 bp, Homo Sapiens
tccagagtagagtttattagaacaataactggtgataatgataaatattgatcaaagactgagcctaggaagtgggtttttttgaggctgcatatactcaaggcaattcttcagaaccacagagggctcattggatcctattaaaagctgagagttaatgaataaacagataaaacagagacctgagtagacggtagtcgatattcttgtacatgtattctacctctagattccatagaaagaactaaaagtacatgaatttcactaccaacatctccatcagttaccagctgtatcaccttggatcagtcaggtaacctcccgcgaatctggttgcttccggggcaggggatccgcgggctgcaggtttgagcctggttgccggcagggtggagcagttggagggccaagcctttgagctccagggggggtggccgggacagtgggtagtgccagccgatcggcgtcctggggattgcctgaatgtgaggtctgggttcaccccgcggtgacctgagtcctgggatgcccctacagggatttgc

SEQ ID NO: 437269 - DNA, 2014 bp, Homo Sapiens
  misc_feature (114)..(114): n is a, c, g, or t
  misc_feature (540)..(568): n is a, c, g, or t
ccagggggccggttccaagaccacgggctgaagttcctgtgctgcccctgggaggagggaaggtttcctggggatcctgcttgccccggggacttcagggatcccagcttctcnagtgcagatggatggactgttcaactttcacaaactttccggtcccttcccctcccccagctgcccttgtctaggaaggctcatgctttgcttcaatgaagcgaggagaccacagaaatacccatggctgtggggctgtgaccagcagtggctgattagggtggaaactggaaagcgtcactgtctcagcagaagaaagcaggaccccacacagcctggggaacggctgcccacccacgcctcggtgaagaccacggccctggcgaggccccaaggtgcttctgagagatgaacgagacacctcagtcatggcacactgggtggtgtgcttcccctccaagtcctgtctttgttttacacagtcatatgaaagacataaccccattgcccaaatcaagcctggaggagatgcgttactatatacannnnnnnnnnnnnnnnnnnnnnnnnnnnnggtggttttcttaaaaaagcctttgagttgcaggtcaggtgagttggttctggaagtaccggaagttctgttggtatgagagagacttgtctacaggcaggtaaacccaagtttgccaaacaaaggcagtaaccccagcgaccagctgctgctgctgcacggtgaggaggaggaggacaccatggacacgagtggaggctggatgggacaacgcagtggacatctgctaatgctctaacacggggttggtgtcacttctgagaagagcgaggtgagtggggatgctatacaagagggctgtacaaactgggcactggataggtagttcctttggtggtcaaggtggctctacctgtccttgagctctcgtgtcactcgcttggtgatccgtccacacatcaggccaatcaggaacaatatacagatgctcccactgatcacagagagaatgtagttcttagatggagacgtcattacttgcatggcaagatcagagaagccatctgctggggccacctttgctgcgtaactccacatctcaatccggtcattgaggcgctttttgcactcgggctgtaacctcacccgcttatcctccagtgcttccatgagacaggacatttgacgcccgcggccaggggtgatggctgcgcagtggtgtttaatgtccagggcacaagcagtatgaagtaccgggtcaacaaagatgtctgctttgctttccttcagcatgtttagcacttcctttttacacaattctgttttgatcttgagcaggttgaccttgaggcactcctccacctgacctgtctgctcttgggctgctgcttcttcagcacatagactggagatctcgtctgagcagtgcagctggagctgaggatccaggcggtagtccagggcggactcctggataatgattcggatctggtcttcacagtctgaagacaggcgctggtcagcatatctcagcttcaggcaagagatgacttgtccttctaattctgaatcatccttggccttagtcaggataccgtgacagaatttaggaatgtcagctttacaggcttttcttaacatggggtttaagcggtaatctgtgttctgggtgatctggcgcttggttatcatctgtttgcatttgggatccatcaattcactgtttttattttgcttcaagcactgcaacatggttttagaatctgcttccggacagaacctctttatcatctgcttacagaccctcatgagggtgtagtctagctctgggtccatcatctctgtctcctgcagcttaaatactttttggtggcagcgggtgcttagctgcttcttgttttctttcagacattcgataatctgagcgttgccatattgcacagcggaacagaagtttttgatgtcactcttgcaggcttcgtatagatatcccgggaattccggacc

SEQ ID NO: 437270 - DNA, 681 bp, Homo Sapiens
gtactctagaggagtcccggagggttgagcttgtctgggaagtttgtctggagtgtgcagaaaggtcaggctggactgcctgtcacatcctgagaccacactaaacctttataagccattgtctctgacctgtattgtagcctgaaaaataaagcaaagtgagtcaaacctctggctcccacttcctgacccactgctccccacacccatcttcaaggacccctcccgccacagtcctgcctcctgatgaagcgcagagcttccagagtgactgtagcctcagcagggccggtccagacatggctgagtcctgtgctgccctggaggaggaaggttcctgggatcctgctgccccgggactcaggatccagcctctcagtgcagatggatggactgttcaacttcacaaacttccggtcccttcccctccccagctgcccttgtctaggaaggctcatgctttgcttcaatgaagcgaggagaccacagaaatacccatggctgtggggctgtgaccagcagtggctgattagggtggaaactggaaagcgtcactgtctcagcagaagaaagcaggaccccacacagcctggggaacggctgcccacccacgcctcggtgaagaccacggccctggcgaggccccaaggtgcttctgagagatgaacgagacacctcacc

SEQ ID NO: 437271 - DNA, 325 bp, Homo Sapiens
gctcagagttaagttagcttccctctctgagcctttatttttctcatctgtaagacagattcatcctagaagctctctggtcctttttagcttcaatgttctgtgattggttctcatttaattgatgcaccaactgaaacactcactaatcatacattttgctggaggttgatcaatccttagcaaatcaggaagaaatgaatgttccacttacttcgtgcagaagctcaggaagctgggctctaaaggcccaagttttagtagttgttgttgtagttgttgtcccaatattgagttgtattagcatgtgatgatgatgatgatg

SEQ ID NO: 437272 - DNA, 1004 bp, Homo Sapiens
  misc_feature (670)..(683): n is a, c, g, or t
ttattttaaaaaaaacagaagcatgttttatttcaatcctgttaagggagagggatggaaaacacaaaataaggggaggggtctctttatataatacacacaccaggatcaactacaatgaataatacccattccatccctcccccaccaactcctatgtgggttccaaggccagctgagaatagatgggacaagaattaagacactttggcacagtaacatggccaatgcaccgaaagatggagagaagagaatttcccagggagcaaggccctgggcctcagctgcttccccagtggaggggtaatgagaaaactttggctcagcaggaaggcggttgtcaaaaatctgggttaccttaactggactctccagatcacagactacgggctgaatagagtcaagatgtctatccagtccattctgttctctgctttctctaagatcacttctcttcaggcttgcaattattgagggttggcctgcttctcctcttcatcttggaaggcagggggagtaagtgcttattctgcccttcctatatctaggccacttaattactattttcttggctctaaagagacagaagccaactaacaagtccggctctctttgtgaaagtcggcttgaaagagcccttgtgttggcaaaactgcctctgcaaatgggnnnnnnnnnnnnnngagcctaccccttatagaccctccccaagcttgttcagacacctcaattgtgtgagatgtgggcagaaaagacttggtccctctccagagttggattaagcaatcccatctttgactggagatagggatgagaaagcaggtgctagcaggggaaagaaccggggaaagcaaggcagtttacactaggttgcagattcaagcctatggattgtgaagagccacctaagctccagagaagaggaaatctctgacacgatatgaacaagtgaatattttagcggcaaccctgtaattcccatagactaaaagagaatggtcaaa

SEQ ID NO: 437273 - DNA, 963 bp, Homo Sapiens
  misc_feature (297)..(305): n is a, c, g, or t
  misc_feature (702)..(718): n is a, c, g, or t
gcagtataagaaaaaaatgcaataaggtgaaaaaatcagggaaatgtgagggaaaattaatatatattttaacatttaatattaacatttctatgaaacagaagaagtacttaagttcaacagtgagtacatttactttaaaaccctgtgtcatgttttaaataatgaagcaaagtacaaatagttaaaagtacagcgcagcagaaattaaactcttgatccagaactcataactgacccagattattctgctagagctcacgttgaataaaatattttatctacgtggaggtatcnnnnnnnnnaatcagacataataggaagattactaaaggaacataaagtatttagcattgccccaagaaagatgccctgcagctgggaagtgttgaatatttaatatagtctcaactacatgaatcatttctaacatggcaattaatactactactaataaacagtgcagaagccagctctttatttgttttatatgaattactttaaaccaggtttgttagacagttcagtgtagctgacagtgaatgtttaacaggaatgcatagcagaccatgttaaaaatgtggcattgtcccaaagtacaacatgactaagacatcctacatttagcagcacctttttgtaacagtaacttaaatgagcagtagagaaagagcataggaaagactgaaatggatatgaccnnnnnnnnnnnnnnnnnctattaaatacatttccagcattttctaggttgactacaaaaatggctctacaactgagtaggttaaggttaagcctttgttgtgtgaaaagactgtaactttacattccgcgggtcagtaaatatcccattgcccttgagattatttcctcatttacagatttactacacagtttacacatatgtccactatacagtttttcacatatagcggctcttatgtcaaatccttcaagctagttccc

SEQ ID NO: 437274 - DNA, 1332 bp, Homo Sapiens
gctggtacggccggaagttccgggatatcgtcgaccacgcgtccgaggaatctctgtatataggaatgcttatgattttgcacattaatttgtatcctgagacttgctgtagttgcttcttggcttaagaagctttggggctgagacgatagggttttctagacatgggatcatattatctgcaaatagagacagcttgatttccttgagatgaattttcaaaacccgttttaatgtagcacctgcttggtgcagaagatacttaagagggcctgcttggctaatggtagtatcagggtatgatgcctggggaaggttgggaagcagtttcccagaagaattcagtggatggatggtatggattcctttggtgaactgccgaggtccagggtctggcctttgggcttaggtcctcatatacctaattttatcatcatacaaaaaatagatttatctcttggggtagactcttaataactaagcccgtgaaactcagtaataaaaacagaatgagaattaatgagtaatgtaaccatcacatggaccagactgaacaaatgcaattttcttattacagctaagcttcataggaagttaataagattgcttggtgaagacaaaatcagaagggtagtcagatttaacaaaagattaatgagaacaagctggtatacctgatatatctgctgcccataaggatgattttgccaataacataatcaaagtcctttcagttctaatccctggcatctgtgacagctatcaatttattgcctcagtttcaaatctacgcttcattgccctgtctgtgatactggactatttgccagctggcatgctgtgagctttatcaatagagggggttgcagaggaactggaagaaagggcttttcttcctggttctggcatgttctttgtgtttgtttctgtagcacatgggacacccagcagtgcacatcccaatgagttccaaaggcccctatccctatgggtagcttcccagcaagttctgtaccaggatcagctccccatggggagcttctagcaccccagagtgtggctcctcagtgagttctgccagctcagcactgcagtggcatctccatccagtgggcttgtggctgtgccctctccaacaaggcctggatctaagacctggcacgaaaggggaagttgtggcaccctcctgcaaatttgttcttacctttgatgttctgcctcagccctagagacactctatatctgttattgctgtattcttttgagtttcactttttgttataacacttagtagttaataattcttaacattaaactttccctgttcaaatg

SEQ ID NO: 437275 - DNA, 813 bp, Homo Sapiens
gaggctctgtacatgaaaggtatcattttattatagaggtaataaaataaagaggtaataaaggtataatgtcattacagaaaaatcagtggaagagaaaagaccaccaaactgttctttgctataattattatttcatgaagtcttatcagacgtgtatttctctcctctcatgtgcaggcaccttcctgggcaggaagcagacctagcagaactgcagtggtggccctcaaaccagcaccccctcttcctgacagcacaggcactccccccggggcctgcgccacagtgagaccagctctatgcagatacagctctgtcctgtgagggggtgagacacaggctctgctggggactgaggctccggctgcattttcttacctattgtagttgtccatcctccccaaatatggctgggggcagaagagagtggacacattcacagacgggtgggtcagtaccaggacatccaggattgccttggttccagcaagatgtctcaggatgggctttccacagggaagaaccagagaagccagggcagagttggggtctctggactaccagggctcagggcatagaggtggggttggctcgcccctgacaccaaccccaaggagaataaataaataaatagtgtataattgtgcagtcccctagcctggcttacccctcaacaaggggtcactagtcactgtcgatctcagttcctctgcatgtcatcctcccagaaacagaggctggctgccagtaggggtcctacccgacctggggattgaaaaaccagggctgagagtgcccatacagttcagg

SEQ ID NO: 437276 - DNA, 691 bp, Homo Sapiens
  misc_feature (389)..(401): n is a, c, g, or t
aaccaactcaatatgtgtttgatgatagtgaattgataaaacccgaagcttttccctgtaaatcttacatctttgcctttaaagaatgggttacaaccatcactagatcacagtagtgcctaatgaaggttgagaaccgtaggagaggctctcatgctgtaaataatgttgcaggctaataacctttcatcacttcctttgtgcgcttcctgccttaagtgacaagtagcaacatggcttgggtcccctgtgcagcatcagcttatgctgccacaagtcagtttgcaccctaggtgccccaggagctagtatccttagatctttctatcgctaacttaattctcttcgttatttatctgaccctctaactccatgtctaacttgcattnnnnnnnnnnnnnttctttacagtcaacccaagcttaacatggactcaggttccccagcagccttaatttgttttgttaacatctgttccttctttttcagctctcctagagtatttctgagtgttgtgttcatctaatcttagtattcttttaattacaaattgacctcacagcttgaggtttcttgtgtcttattctgtggactacctgtgctcctttgcttcccctcccctcgcataataactatattaagaaattttttttggccttgagttggctggaaaaaaaatataaaatttaaa

SEQ ID NO: 437277 - DNA, 484 bp, Homo Sapiens
ctgagcggctcccctccccatctccctctcaccctcaacccacctgcatgcatctcccccagaggaaacactgagggtaggggacaggaggctcaggacgcgccctctgaatcgagtgtttcttcttcacaagtcaccaagagaggacatgagggggaaagtccttttttgcccttctccaaaaaataaccttccacagagacaaactgtccttctatccacttttatcttttaataaatatcaaaaggaaaaagctgcaagggtgcaaagggcctgtgccagaagaaaacacacacagggaaaccgctttttttaatcaattgtagagaatagtcatttttaatctaaattagagaattgtgatacaatggcagtcctcaaaggcgtaacgagttcatctttctttcaccataggggttatagttggcttgtgctactctggaatcattttactgtttgtttttattatcttaagtgctactt

SEQ ID NO: 437278 - DNA, 1830 bp, Homo Sapiens
  misc_feature (1121)..(1133): n is a, c, g, or t
  misc_feature (1749)..(1757): n is a, c, g, or t
ggttacaaagtttgttaacttgctatcctgtggtcttgttgcctgaaattgttattgtttgttatttctctctgatgttttttgtaagacattgtataagtgcccatgtcccacttttttaaccactccgcacatcagtgctgtgaaggcaacctcaccatgtattttcttcataatctatggaaacctctaaggtgagaaagttttgaacttttaaccctttctacccagagctatctggaatgttgatgactttttatactgtcatgatttgagtttgttttggggtgtttccaatttggatttttttccctgcatctatcctctaagttgtttcggtttgactactttgttctttgggttaagatccaaaagaaaacaggaaaacaattccacggaggccaatctaaagggggaaaaaatcctacactacttttactacttttgattatttctcatttttgggaaaagaattcctaatgtgctactagaattccttcttcagttttaacgagtaattggataaaccctgagggaaaacggaggtagattcagcacctaacaatcctgtatgcttttgagatcacgtttagtgctatgtcctagtctagaatattttcatataccttgcagtaaaacgactttgtggcaggacagtctcttgaggggttttgtttctgtttcctaaatactcctaaataatatttctaatcagccattatgctggggcatctctgatcccagtaggtacctctgaatataccaggtgtctggagttagaagcccatagccctttcccagcctttttggtttttttaattgaacacatttcatctaagtaaagctcagttctttatcacaatttactgaccaaatacctagcaccagttcctgctgccactttttaaagtgccatatgactttctacgaacaggtaccttgctgtcttgacaaatcctaatgtcacgcctacagccccaacacaagctccagtcttcctcttcggcatgccctggaagcttcttggcctcagctccccttccccgctcagcaccctgttaggatcagtgtgtgtggatgggatagccctgggatggaaaggactagcctctactgatgcnnnnnnnnnnnnngcaacacaaacgtttccttcttatagcacatgcacttccttacaatgacatgatttgtattatcctcacatgtgtttactactgctggggccttccttcatcctctgagggctattttgtactttctgcagcaatcagcttaataacaacacttattgcacctgtctctctctgagaacacggtgtgtctcgacacgtaccacgtacgtggaaacacaagagcccaccacttgaatttctaagaccatttcattctgaaacttcttatcaattacctaaatctcaacgaaaaacaatttactgaagccgactcccctccccatctccctctcaacctcaacccacctgcatgcatctcccccagaggaaacactgagggtaggggacaggaggctcaggacgcgccctctgaatcgagtgtttcttcttcacaagtcaccaaagagaggacatgagggggaaagtcctttttttgcccttctccaaaaataaccttccacagagacaaactgtccttctatccacttttatctttttaataaatatcaaaaggaaaaagctgcaagggtggcaaagggccctgtgccagaagaaaacacacaccgggggaaaccgnnnnnnnnnaaatcaatttgtaggagaaatagtcaatttttttaatcctaaaaattaggaagaatttggtggattaccattg

SEQ ID NO: 437279 - DNA, 604 bp, Homo Sapiens
  misc_feature (96)..(122): n is a, c, g, or t
  misc_feature (572)..(572): n is a, c, g, or t
  misc_feature (582)..(582): n is a, c, g, or t
  misc_feature (594)..(594): n is a, c, g, or t
agtatacccgtatctctaacattaattctcacagcacgaaaaaacaaatacattttttgtatgacattatgcagaaaaggtaatgaaactacaggnnnnnnnnnnnnnnnnnnnnnnnnnnnaattagcacttaagataataaaaacaaacagtaaaatgattccagagtagcacaagccaactataacccctatggtgaaagaaagatgaactcgttacgcctttgaggactgccattgtatcacaattctctaatttagattaaaaatgactattctctacaattgattaaaaaaagcggtttccctgtgtgtgttttcttctgggcacaggccctttgcacccttgcaggctttttccttttgatatttattaaaaggataaaagtgggataggaagggacagtttgtctctgtggggagggttattttttgggaggagggggcaaaaaagggactttcccccttcatggtcctctcttggggtgacttgtggagggagggaaacactcgtttcagagggggcgcgttcccgaggcctcctgttccccctacccttcagtgttttcccntggggggagntgcatgcaggtnggggttgatt

SEQ ID NO: 437280 - DNA, 1004 bp, Homo Sapiens
attcatgagaacggatgggacggtagtgctgtggtgtggacttgtgtctgagtcgccatgccggtcggggtccttcagaccacatactggtacgggtctgccttcccttggtctggcgtggcaaaggggctggcccagcctagagagaagggtgtggccaaaaaccggctttcatgttctccattttgtttttttagcccatcttctctcttcctttttcaattgttctattcccgtctcatctgtgcagatggagtgcacctgggtcccaaacatcactgatgtgaaaatgaggaagagcaggccctcaaagcacagcaggataaggagaatcactgtggtgggtggagagaaggagctgcactctgtcgaactgaagttaaggggctgcattttttcatgaagagagattccagtctctgccatttcttccctgttcagtccataggttgtccaatcttcttcaaagcaatgcaggaagtggaatcccaccatgatgagggcgtgcaaggaaatgagagctatgtacattgtaaacaggacgaagtacttctggttgttctcgcctacacagttgttgacccaggtacagtggtggtccatcttccgaatgcaccgcttacaaacactgcagtggtgggctcggtcgggcttgatgctgcaggcatttggggcacttgtacaccagcctgcccaggcttcaactgtaaactctcgatgaattctttagtggcatttcctttgggcactgccccggggtccgtcagcatggcccggcagtgggaggccagggccaagaaggccagcaggttgaacacaattccgttgatgatgctatacacgtagtctcgagatggaatcagcatgacaaagaggaccacgaactccgcatagaggaccagaaaccaggtaacgatggcacaggcgatgccacagccgtcaccggataaaccacatggttcccacaggaccagggtaggggggtgggacacacttctctggct

SEQ ID NO: 437281 - DNA, 1241 bp, Homo Sapiens
atagttgtttccaggaaaatgggatttttgttgacacaaggtctaaaggggaccttcatgtgggtcatgagcatgtgatgccatgctgctttcctgactggcccctcgccagggcctcccttcttggcacagaagcagtgaccagctgagatggtttgctttgggcattctgcattctcttcctgggtgatcatctgcagccgtctcatctgtgcagatggagtgcaacgtgggtcccaaacatcactgatgtgaaaatgaggaagagcaggccctcaaagcacagcaggataaggagaatcactgtggtgggtggagagaaaggagctgcactttgtccaatcttcttcaaagcaatgcaggaagtggaatcccaccatgatgagggcgtgcaaggaaatgagagctatgtacattgtaaacaggacgaagtacttctggttgttctcgcctacacagttgttgacccagggacagtggtggtccatcttccgaatgcaccgcttacaaacactgcagtggtgggctcggtcgggcttgatgctgcagcatttggggcacttgtacaccacctgcccaggcttcaactgtaaactctcgatgaattctttagtggcatttcctttgggcactgccccggggtccgtcagcatggcccggcagtgggaggccagggccaagaaggccagcaggttgaacacaattccgttgatgatgctatacacgtagtctcgagatggaatcagcatgacaaagaggaccacgaactccgcatagaggaccagaaaccaggtaacgatggcacaggcgatgccacagccgtcacggataaaccacatggttcccacaggaccagggtaggggggtgggacacacttctctggctggaggtattctggtttccgctcaatgtttcggaagtggtgggtggggataagcatcataagctattctgtccatactggcatcgtgaagccggaggcagttccccagtcccagaccccggtggggctcccgccgccgccgccgctgccttcccctgcagtccccaacccgggacccggcctcgggcttcggcgatggctcctcggaacgaggcgccgcggctctctggactcggccagacaccgggcggcgcgcaggagaagcccatcgagctctcccggcagtggcggcggccgcggctgcaggagcggccgccgcgccctcgtgccgaattcgccacccaggcctcgctccgt

SEQ ID NO: 437282 - DNA, 884 bp, Homo Sapiens
  misc_feature (169)..(169): n is a, c, g, or t
  misc_feature (185)..(185): n is a, c, g, or t
  misc_feature (191)..(349): n is a, c, g, or t
  misc_feature (353)..(353): n is a, c, g, or t
  misc_feature (355)..(355): n is a, c, g, or t
  misc_feature (358)..(358): n is a, c, g, or t
  misc_feature (362)..(362): n is a, c, g, or t
gttggtgggaagaaggacaagcccgctttgtgttgtgccggcggtggtgttctttttgagaacacgaaggtttatccccggggttctctcttctctcttggtggggccgcggcccgcccgccaaaaggggttgaaagagatattttcttggggggcgaggggagcggcncacaactttgtttttntttttnnnnnnnnnnnnnnnnnnnnnnnnnnnnnnnnnnnnnnnnnnnnnnnnnnnnnnnnnnnnnnnnnnnnnnnnnnnnnnnnnnnnnnnnnnnnnnnnnnnnnnnnnnnnnnnnnnnnnnnnnnnnnnnnnnnnnnnnnnnnnnnnnnnnnnnnnnnnnnngggngntgngggnttttttgactgtaatcaaacttttaattcttagtttttattctggtaaatgaaaacaaaaaataatcaaaaagaatttttatttgtcattgacagttcaatataaattaagtaaaacattaattcatttattctgcactattatcagaatttttctaatttttccgtaaaatgaccatttctaaacatatagcttaatggtcaaaacaagtgcaataaaagattaatttacaagtatcagaagtgaagactgtggtcctataactctttcccccaccaaagttaaaatataattgtcattccaggaaatcaaaatcttttagaatagcacactccaaacaagtgatgggaacactactaattccttagacttcctttggcagcattacttttgataagaagtctccaaataaaatacaaaattttggcacagacattttaatcttgtcaagacaatgtaaggaaatgccccaaaatattattaaattgaccataattaccaatatcagtccctaagataatt

SEQ ID NO: 437283 - DNA, 643 bp, Homo Sapiens
aaattgaataaaacttttattatttattagcagtgtattcttctacactttaaaatagagcaaaatatcttttggaagataaactattcataacaaaatacatgtcaaacaatttttattatcagagtaaaattactttgctatatactttctatattatatacatccacttcttggtgtgtctatgtaggcacatgtgtaaagtaatttttagacatatacatgtacatacatatgacacatatacacacataattatgggaaatttacagtagtcaactttacaatcattttaatagcttcacacaaattagtgttcacagaactaaaactgtcaacatgattccctttcccctacttctcaaatgtcatctgaattactttttatgataacttgaaaaaaatactgtcatcttcctatacaattaaccaatttttataataactcataataaaatattttacttttttaactttagaaaagatacataattccacttattttagtttttgattcctaaatcatacaattcgtttttttcatcagttgagtgtaatttttggtactgcagttactgaaggttaatttaacaaacctgagtcaaacattcattcaaatgcctttttttaaaaacataaaaca

SEQ ID NO: 437284 - DNA, 1131 bp, Homo Sapiens
ggcattttaccacacagtccagtttgcatgtatagctaggaaacatgtattgctctagattgggcagtttaagtcattttaaagaaagttagttcatagttgttgccttttaactcatagtcaagcttcagtctttcaaagagaaatgtgtgattttcatttacttgctgatattttgtagtttggagatccttgtgggcattattctaactgatacgtagacacttacttggaaatttttggacattatattaaatgagtgctatctgtgaaattggttatattaggtggcttgactaatgttttttctataattgtatatggactgcatttttaaaaaaaccgcatttgcctttatgctagattgtaaaaaattatattagaatgcataagacatgtttttccttcatatgctagacttttcctagcatttcgtatttctgtgttgtcagtgtgtgatttttaaaccggaatttggtttaaaaaaaatctggtggtaatatatgtgagaaatactttggtgtttaccttatgaaaataaaggattgtaagtaaagtttcctgcgcaccttataccagaattcagtataatacactactttctgttttcaaacagataaatcataatatagtctgtattatctgtaagatctgtcttgtaaaccacattcttgacaactatttgcttttgagtagtttgtattttaatatgtgacttttgtcttgaaaagtagtaaagccatagacttgtgcaaaacaagtttcaagtttatagatattaagtttgtaatgtgagcatcaaatgtgtatgtaaaaatactttttaccagtctggaacttgggaaaatccagggaatttgaaacatagattttaatgagctggtaaacacaaatcatgtcaataaaggtagtcaggatattttatccttagcattgcttctgcatcctgtgtaggattccaattcttgaatatgttcttttcaaaatcttaagaaaagaaccttttttctttattaacatcatgtgtttactttcagcaaatatttgtattactgcttgattctgtgacagtcacaatagatgtagagaaggcattatttttcattaataaatgtgaaattggaatggaca

SEQ ID NO: 437285 - DNA, 1728 bp, Homo Sapiens
  misc_feature (19)..(19): n is a, c, g, or t
  misc_feature (25)..(25): n is a, c, g, or t
  misc_feature (85)..(85): n is a, c, g, or t
tttgttaatagagtattanatagtnaatgaggaaaagtacaatataaaacctaatggaactctgaagtgagatgtgtattttccntgtggtaaaagagttttactggaaacaattaatgcgatccaaatagacaaaaatatctatgaaagaaagaatacatatggtaagcatcttccttgtctttggcttagccttcttgaccaaaatcttctgtaaacttctttaatttcaacaagtcatgttcattgactgtaggttttgtgttagatagtgaccgcaacatatccgacatggaaacaactggctccaaaagtttatctccagggacatccatccatgtcatttcaatggcaccagggtcacctggagagcaaggtgttagcagatcatctacaagatggttaggatcagctcgggaaggtccgcgaacctttttaaaatgagtagctgactgtactttcctaacaggctgcataagggcatcacgtacaatgatacttatatctgcccctgaataaccatctgttttcctcccaagttcccgaaagtctgcttccgtgagactgttctgagtggtccctaggtgcagtttaaacattgctgctcgggcatggggttccggcaagggaatataaattcgtttctcaaatcttcgcctaatggcagaatccagaacccagggtatatttgtagctcccagaaccaaaattccatcattgtctacaccaaccccttgcatttgcactaggaactccgtcttaattctacgtgcggcttcactttcattttcacttcttgaaccacagagagaatcaatttcatcaatgaagataatggagggcttgttctctctggcaagttggaataaattcttaaccagtttttcactttcacctagccacttagaaacaagatcagaggaagatattgaaaaaaatgttgagttgttggcttctgttgctacagctttggctaagtaggactttcctgttccaggcggcccaaataataggattcccctccaaggtgttctcttgcctgtaaaaagatgaggaaatttaataggcagtatcacagcctctttcagtgcttctttggctccttcaagtccagcaacgtcactccatttcacatttggtcgttctataacaatggcaccttgaagttgattctgtagtttctttttttcaggatcatcagattctccttccccatcactgtcattccccttctcatctgctggactcggctgtccttctttcactggcttctgtgcttttttctctttatttttcaggtactcctttagtttttctgctctatcaagatattctgtacactttgccctgatactttgcttggctttatcaccctgtgcttcatatttaacgacatgaagaaaatactgcacagcatgctgatagagctgaagggcttcttcgtagttcccagccttgtcttcttgcgctgctttgctagccagatctatcgctttctggaggttgggcgaagtggatgacatggcggagttcccaggcggttcccaagggaacgaggggcgaggagagccaacagcagcaacgtcgaagcgcgcacggggtaacagccctcaaactggggaggccggtggttctcggaccgcgaagggcagcctcccttccggaacttgttttagacaacactctctccaccagagctccgaccctccccaccaaacttccgcaatt

SEQ ID NO: 437286 - DNA, 546 bp, Homo Sapiens
  misc_feature (307)..(307): n is a, c, g, or t
gtagaatacttaaacttttaaagaacattaatacacaaaattcaggaagttcccttaaaaggactttatttttttctgaactttcccatgacgaatgtctgactgcaaagttcttttctataacatggatttcttcaacaggaaagattcagtacatgacagtagttttcaaatacagtcttccatcttgtattgtcctttcagcatctgttctgccgccactgcggtcagcctctatctctggggtcagagagtcatttaagaccctgagactatctgttgaagctgcctgttttagcgtctgttnctgcttgttcacgccgtttcgtctcaaactcaagtgcttcctgcaattttctctttgccttcttctccttctttagcctcttttgaactatggctctattcttttgttccatagccaactgcttctcaagtgtttcccttagttctctttcccttaaaaaatccatcttcagctcagttttttccagttggacctgtttctcttgagctctggcattatctatagcaactttcaacagc

SEQ ID NO: 437287 - DNA, 2025 bp, Homo Sapiens
  misc_feature (1102)..(1102): n is a, c, g, or t
  misc_feature (1736)..(1736): n is a, c, g, or t
  misc_feature (1789)..(1789): n is a, c, g, or t
gagagtataaatgctttatgattccaattgtgttaattctagaaaaggcaatcaaatctaaagtaaaaaatgtgaatcaacggtttcttagggaaggcaaggagggaatgtaaaggggcatgaggtagctttgcaggtgatggatacgttcattatcatgattatggtattggttccctgagtgtacattatatatgtgcaacactttccaaatatggataattattgcatggcaatcacatatcaacaaagctattaaaagaaactgttgcacataaaaatccaacttcctactcattttagaaaatccgatttggcaaccctatattgactctgtcatctctttcttcttgccttgggagcaaagaatggctggctacgtcatagatactacagtccctatagtataggatctgctttttctcagtccctattttcctgccagcacagcactggccttcagatgcacagcacggagatggtaatccacaaaaccaaaacctttagattatttgctctgccagtaacattagtcataggacagaggtctgaggtcctgagaatttctgcaaaccctgaatcctgcacagccacattcaagggagcattcacggatgcacatttagcagagttccatttctgctggtttgctataatctcgcctactccctattaatcacatccagtgtttctgtacaaattatggtccccagctgggcgtggtatgtcttacagttaagagatacctgcctaatgctgaacttcagggcatatggctccttggcaggtgctaaacagcatctgctttacagtattggggaatatggggcaccccctgggaataagggacccaattcatgctgttcccacatgcactggaggttgtcacaactgccccctcctcgggataaaaattcacgccattcagaccacaatattatacccataaattcctacaatttttcctaggaggccttggtggcaatgcaaatgaggtcaaatctggattgacagttgtttctctgccatcctgctgtcccctccaagataatctggagaccccttcagtttggtagatcttaactctgctcttgacccaccnccacacagtgatcagaacatggaagactaaaggcggctttatcataaggccattatcatcacatgaaccagggcaatacacaggagataagttgttgtgtagagtaacatgaaggctggacaaatccttcacaggcataacatgagaccaacaatgtcccagaaaaagggaaaccttctctagaacaagctgttggcaaaaccctgctcaggtcttcacagccaaaagctggtcatgtccatggctaaaccagccatacaggggcgggaatgacatcttcccaaggcttcagactactcctaattccctttagggattggaaagagagaggagaggtctgccttccctgagcacagtggagtggtggacacactctttggagagctgcagtgtgtggtgctgacatggcttctatcacaaccccagcagtgaaaaaacgctgataaactctacagtaagagaatgtaacttgtctccagatagcttccaacacagctagcattcctagggaacctccccagtgtgggtacttggatgaacaagattcaacattgtagatgacagcgccctgataatgtctgtcctcagagctgatctctggtgtgtgctgtgaacaaggaaggagcacattctncatgctgctgtctctgatgtgaatctaatgatgcatacatgaggtatggcatntgcgtgaatggctgtacctgtgtacctgatctcatcgacctctatggctcatagtcgcgtaatgttgagtacgagttagattcgtgagtcatagcgtgactgtcgtgctcgatggagattagtcatcggcttctcatagtgctatcacggacctaggcacgtaatcgtagtagagatgcatgagtgtgcgtaaatatgaaggcaatgcagatatatggatggaactgcgcgctagt

SEQ ID NO: 437288 - DNA, 485 bp, Homo Sapiens
tatgttcatgtttcaggttaatagaattttaaagtttgccaaacccaactttgtggttatgaagttattggcaggaggacacaaaaaggaatctaaagttcctcctgaatttgatttctctgctcataaatattttcctgttgtgaaacttgtttgagagagactgggaaggtggccataaaggggcagagtcttctttcagacccaactcttagagggcacatcaccaggctccacatcacgggaagtgagatggatttcttgggtaacaactcattataaggaatacttttagtttgacagccttatatgacatgaatgaaaactgctgttttaaagtggtttattatgttccatggaagaaactggtcttattgaatgcattgatgaacgttatatggttttattacagatttaatcacaaatcattttttatgaatgattgagtgaaaatagtgtttataaaggttaataaatttcttgac

SEQ ID NO: 437289 - DNA, 575 bp, Homo Sapiens
gagaaattttgcaatagaaaattagaatgtttctaacagaaaacccagaagaaaagatagacttaaatgattagttttaaaatttaaaaccttttacatgtaaattaaaatatccagaaacaaaatcactacattgggaaatatgtttataattcttatgacatatataatgtctatatctataatatactgaatgaccgttacagtttgaaaacagaaagataaacagcccaatgggaaatggcatgcatagacaattcacaaaagagaaattcacacggtcagtaaacgtgaaaaggagaatcgatgttcctattagtgtgggaaaggcggtagctaatcccaaattctacatccctactatacagcccctatcctggcatccttcattgagcattcatatatccagggaatatgcctaggaagtttctccccacttggtaagcaggaaatcaatggaagcggctactgtaggcgggatcttcctcattggtacatttgttcaaagagacagtctcacacatggaagccatgccctagagtacaattcatccagttcttcattcagacacaga

SEQ ID NO: 437290 - DNA, 1331 bp, Homo Sapiens
  misc_feature (386)..(446): n is a, c, g, or t
  misc_feature (585)..(585): n is a, c, g, or t
  misc_feature (774)..(774): n is a, c, g, or t
ggtttttgttttacagggatacttgggcggggagccacttttttctgtttgctctgctctggacctgattctggtggtggaggctgctttttcttgggctcactaggagtggttttgggaacttcttttcttggcggtcctgtagtaggtggctgaggcgggatgaccagtgctggctgggagacctgcttgcttgacttcctggaagctggagtggtggcctgtttggattcaggcccaggggccgagacattcccttcttcactcttttcctcgacgggctttcgtggaggaggctcactactgcttttctttggggcaggatcctctcttgctgatggggtaggtttctgactagagtccaccacgttcttcacaacactgcnnnnnnnnnnnnnnnnnnnnnnnnnnnnnnnnnnnnnnnnnnnnnnnnnnnnnnnnnnnnnagcttgcttctggaggtaggctttggaaggcatccattgtagattctgacattttctcatcttgcagcactgcttctttatattgcgaccaccaaacttgggcttatctaagcaattagtacaaacaccacagtcctcnggcacctggcagccgggacactgcccacaccgcctccgatcgacgtccttttctttactggaggttcctggggtgccttgtttctagtgacaggtttaattggtttgatgggtggagcaagaggttcagcatcttctgagccagcaaattgatgacttgtcatcattccccatggaagacaaaatcttntctcgttcttcccatggtaaggcactcagggtgggcatgtcatcaggaaacgcagctcgttttcggccaagggcaacagctgctcttctgcagacatgtttaatccggggtcctcgcacagaggtctctgatgagtcactttcttgaccctgtgctttgggctggtcggtttgtttaagactcttactcttctcaatcttgcagagctgagctttggccttttttaggaggctggcaaccctcttgtcagtcattggaagcttgtctgcctgagccaacatggagcctgaaggagaccttgtgggacttcgcactctgacttcttcatctgagccaaaacctaagaattgctcatcctctccgctgccgcctcccccgccgctctccccaaacacggcccggaaccggcgcaggttggtgccgatggcggccgagacctgcagcgccgcgtcgaagcccgggcccacccggagcagggccggccctgaagaggctgaggacgatgacgaagacgaagacgaggcggacgacgaggaggctgctgaggcggcggccgc

SEQ ID NO: 437291 - DNA, 1046 bp, Homo Sapiens
  misc_feature (962)..(962): n is a, c, g, or t
  misc_feature (968)..(968): n is a, c, g, or t
  misc_feature (970)..(970): n is a, c, g, or t
ttcatgcagtcaacacacatttattgagcatcgactctgtgccgggccctgggtgggcacagggggctcagagacaaatcacacgcagaccctacccttgaggcgctgacagcctggcagggcaattggtcacgtcaacggacactcacgatacagtgtggtcagtgtggtgttagaggtagcacaggtgaccgagggagcacagaggaggggcccctgccggcggggggtggcaaggagggcttcttggaggaggtgacccctgaagagggctttagggagtgagcaagagttagggtgtctcgtctgagcaagtggcctgtgcaagggctcagtggtagggacagtggtggtggctgggagttgggcaagggccagtccaggaagggccatggagtccgcaggcgacagggagcgctgaggggtgtgaagcaggcggtcggcagagggcccgctggaagccagcgtgaagggtggcccaggggacggggcaggggagaagggtgggtggccgtgggcagcagaggtgggcgggcacggcccttgcccgaggagtctcgtcctgcctggaggccccctcagcaggggggtggtgggggtgcgggctgccagccgcggggccgcagggtgcacagcacggggtccagtggcttgagtgtggcctgctcctgcagcccgaagcgctgcccgggcaccagccggaactccagcctctgcagcagctttgccatgaccaccttcacctccatctgagcaaactgctgcccgatgcaggagcggtggccccagggagaaggggaagtaggtgaaccgtggcttgggtgctccagggccgaagcgatcggggttgaaagtcagcgggtcctcaaagtatgtgtccatccgccccatgacataggtgctgaacaagagcggggtgttgactggggactctgaccccatcaatcaaggtctcctcttcnagcagncnaaaggtgccccatgctggtgggtacagcctcagcgactctttgaggacctgggacaggtactgcagtctccccagg

SEQ ID NO: 437292 - DNA, 283 bp, Homo Sapiens
cctcccataagaacaggataggaacagaggttagaggcttagtctaacccaggaaagcctggttaaacccttatgtacccaattttgtgttattttatctatattttaaatcatatgggcttctgtgatcccataggaccatctaaataccctttgccatatgtcattctattagaaatgtgtttcaaggcccaaacaccaccaataaaacaaatgtctggaacaccaccctatttgcataccagaaatttcccattccactgaagggttacaagtcattctg

SEQ ID NO: 437293 - DNA, 538 bp, Homo Sapiens
  misc_feature (175)..(201): n is a, c, g, or t
tttttttaaaagccaaattggacgagagttttattattccaaaatccagttaagtgtttaatcaaatacaattaaacatttaaaataaaaatcaactatagtagaaccagaggtgggtgaaggatagattttatcaatgtgattaaaaatatttaaaaggaggaacagcttcagnnnnnnnnnnnnnnnnnnnnnnnnnnntattcaaagtgtttatcaggaaaagaaacactgaatagcactcctagaccacaggcttcttaacatgaaacccaacgaatattcaaaattcaaaagtctcagcccttgatattgaggcagtccagaagtagaaatacaccctaaatcacagcttaggagtaagtttccaaatatccattttatcatgatttacattcagaggtgtgctatccagagaaaccttctgcatctgtagctgtggcacagagaacgacacagacaggagggcattcctccatttccccttcccacacctttgctctagaatcaggaagagcatcagtgaaagtccccaggc

SEQ ID NO: 437294 - DNA, 785 bp, Homo Sapiens
gggaaggcggcggcggcggtggcctttggggccgaagtgggcgtgcggctcgcgctgttcgcggccttcctggtgacggagctgctccccccgttccagagactcatccagccggaggagatgtggctctaccggaacccctacgtggaggcggagtatttccccaccaagccgatgtttaaggcagacacaagagacagcagacaagcctgcctggctgccagccttgccctggctctgaatggcgtctttaccaacacaataaaactgatcgtagggaggccacgcccagatttcttctaccgctgcttccctgatgggctagcccattctgacttgatgtgtacaggggataaggacgtggtgaatgagggccgaaagagcttccccagtggacattcttcctttgcatttgctggtctggcctttgcgtccttctacctggcagggaagttacactgcttcacaccacaaggccgtgggaaatcttggaggttctgtgcctttctgtcacctctactttttgcagctgtgattgcactgtcccgcacatgtgactacaagcatcactggcaaggaccctttaaatggtgaaaatgggcagatgaatagcaataagtggacctttgttactcttctgagttagaaaaattctaatttagtacactctgaacaaagcttattatacttacttaagatgtgttttgatttggtgttcagaaagcaacctgacaatgataatactgtaactatgataaaattgagaataaaaagattttatttag

SEQ ID NO: 437295 - DNA, 987 bp, Homo Sapiens
cgggcacaaataattggctctcaggagacacttttgtgtaccggagagttttggtaataggcccaagacatttggagctacaaattacccaggccattaggcacgggctgccttgccgtgtagcctggcgtaaccaagtccctgcagtgctattttcctctcccccggggatagagttcctttaggaattcagaactcagtggcctccacacaggctcaccgtggctgaatcccacacgacctctaggttcccagcacgaagaaaccggcccgaaaggggctagcgctcacccaggcgaggcttggtctgctgtctcttgtgtctgccttcttgagaaatttggccaggaagattcagagacagtggagagagaaatgcgataacctgaatcagaatgtcagaggttaaaaaacaatcccaaaaaaagccacactcgtgctcctacaggaaagagggatgtgacacagcaggactcactggagctaacataaggtctctgagtgcgcgtaaccggggcgccaggcagcgccaccagtgaacagcagcgcccgtgcggctcgggccccggtacctcaggctgaggcacagagcgcccgggaaaacgttgtctcagcccaaagaggctcggacaccctcctctctcaatcaggatcttaaacactcgagccctaggaggcggaacccagcgcacagcagcggagtgggcagtgggtccctacaaaggccgtctcggggtggaaaacgcacaggtgcccgcgggaagccgggtcatggggagggaggaaagacgatctttctccacgcacaaacatcggcttggtggggaaatactccgcctccacgtaggggttccggtagagccacatctcctccggctggatgagtctctggaacggggggagcagctccgtcaccaggaaggccgcgaacagcgcgagccgcacgcccacttcggccccaaaggccaccgccgccgccgccttccc

SEQ ID NO: 437296 - DNA, 586 bp, Homo Sapiens
  misc_feature (430)..(430): n is a, c, g, or t
  misc_feature (445)..(445): n is a, c, g, or t
  misc_feature (464)..(464): n is a, c, g, or t
  misc_feature (483)..(483): n is a, c, g, or t
  misc_feature (529)..(529): n is a, c, g, or t
  misc_feature (553)..(553): n is a, c, g, or t
cgttaaaggtatttttattgctagtacaagattgcaggatctaggcaaataatataacaattaaatgtgcaaatctcatgaaggtaaactacctttctgttctgtaatatttacccaaatagtcaaggctcagacttgttaaactgtggagttactaaagaaggggggattttccaaattgtagaaacaagagtagtcagattttcccatccctactagctttctaggttaaattcaatgatgtgaaaacaagcatagggtagagtccatatgatattcatacaggaagaatgtccactggggaagctctttcgggccctcattcaccacgtccttatcccctgtacacatcaagtcagaatgggctagcccatcagggaagcagcggtagaagaaatctgggcgtggcctccctacgattcagttttanttgtgttggtaaagncgccattcagagccagggnaagctggcagccagggcangcttgtctgctggtccctggggtctgccttcttgagaaatttggcncgaagatcagagacagtggggagnggaaatgcataacaaactccggccttggtgggg

SEQ ID NO: 437297 - DNA, 421 bp, Homo Sapiens
  misc_feature (351)..(351): n is a, c, g, or t
ttgagttgaggaagtttcccatgatactgctttccatactgaccgcagtatttcagattcccacaaaatgtacgaaaatagtttctccacatccttgcttgtgaagcaggttcactgcacactggttgccaatgtgtctgagttgagtgagagataatctcacggacacacagtaagttacatgaagtgaatttgttacatacagatcggcagatacctgggattcatgcattctgctccccaaggctcaggaaaaccacccagtgcagatgcagtctctctgtatgtgttcaacttgcatcacagctgtgggaggctggaaggcggcccatcctgggtttcatgctccanggatgcatggcacgttggcctaaagcaacaaaggggatcctgttctggggatctggaacacatcctgtcc

SEQ ID NO: 437298 - DNA, 899 bp, Homo Sapiens
  misc_feature (407)..(663): n is a, c, g, or t
tgacacgcacgcctggcccagatatcccctttaataaagctagtccatttatatgtgcactgacctccctggatctggaggtagaggctggtctcaggagattgaagtaatacctcgactggcagaatctcagggcaacatcattgaggtacagccagttgcatttcactaggctcaagaggattgctgcctcaagcaggataaccaggcctgcctggagcagtgccgtagtccaggatcccagtgacctaggtgagaagttggtactcagatcaaagaaaagttcttcaggtgaccccactgtctgcagccaatgggcctgcttgtgggccttatgtatttgtgtttcaaaaataacctgagggcttgatgtgggggtccttatctcccatgcaaggtgattcatnnnnnnnnnnnnnnnnnnnnnnnnnnnnnnnnnnnnnnnnnnnnnnnnnnnnnnnnnnnnnnnnnnnnnnnnnnnnnnnnnnnnnnnnnnnnnnnnnnnnnnnnnnnnnnnnnnnnnnnnnnnnnnnnnnnnnnnnnnnnnnnnnnnnnnnnnnnnnnnnnnnnnnnnnnnnnnnnnnnnnnnnnnnnnnnnnnnnnnnnnnnnnnnnnnnnnnnnnnnnnnnnnnnnnnnnnnnnnnnnnnnnnnnnnnnnnnnnntggcagagaccctgtcttaaaattttaaaaagtattaaaaaactaagttggaccgggcgtggtggctactctggaggctggggcaagagaatcacttgaacccaggaggcggaggttacagcgagctgagtgcctgccactgtactcccgcctgggggacagagggagacgccgtctcaaaacaacaacaacaacaaaaactacgtcgtttatggctatttttataagttactggc

SEQ ID NO: 437299 - DNA, 551 bp, Homo Sapiens
  misc_feature (515)..(515): n is a, c, g, or t
  misc_feature (534)..(534): n is a, c, g, or t
actagtccacggttggtcacggttctgcagggtggacaggaagcacaaggcttctgcttctgggaggcctcagaaatctttcaatctttgtgcaaggcaaagaaagagtgagttgtctcacatggcaagaggaaaacatgcagagtagggaggtgacatagagttttcaatgaccaggtgtcatgagaagtcactcatgatggtgaggacagtagcaaggggatggtgctgaaccattcatgagaaatttgccttcaggattcaatcaccttagaccaggatccaccttcaacgttagggaatataattcaacatgagatggggtgaggacacatattcaaatggcatcatcaatctttgaatataaagacatccacagcaggctttatccagccaaccgtggactagtactagtccacggtgggctactagtccacggttggctatgtggacagcaagagtcgttttcgcggaagcggagtggcagccaggcctgtcgggccccccgaggccgncccatttcccttccagcanactcaactagccaaccg

SEQ ID NO: 437300 - DNA, 484 bp, Homo Sapiens
aatccttttaataaaattaatcccatctaaaaattcccccaatgccctaaggtttctaatccgtggaaagggttagctggcagaatttccagttcagaagtccaacggaggctcagttccaggacagggattaaccgacttgtgctggtatctaggtgcttggattgccgagttgagtttgctggaagggaaatggggcggcgtcggggggcccgacaggcctggctgccagtcgcttccgcgaaaacgactcttgctgtccacatagccagccgtgaagccaaactgcaggcctctgccctcccctaaatgtcctcctaggaggcagtcactcgggaggaagatgtgcctgttaccaagtgcttcgtcccggccccagcgcagacctatgaatgaagatggagggagagctgatgtgaaaggcctgggtcccggccgcagaaggggcgccagaccgaaatttggcgatcgcgtctctcccagc

SEQ ID NO: 437301 - DNA, 483 bp, Homo Sapiens
aggttgcggctgggtagagacgcgatcgccgatttcggtctggcgccccttctgcggccgggacccaggcctttcacatcagctctccctccatcttcattcataggtctgcgctggggccgggacgaagcacttggtaacaggcacatcttcctcccgagtgactgcctcctaggaggacatttaggggagggcagaggcctgcagtttggcttcacggctggctatgtggacagcaagagtcgttttcgcggaagccgactggcagccaggcctgtcgggccccccgacgccgccccatttcccttccagcaaactcaactcggcaatccaagcacctagataccagcacaagtcggttaatccctgtctggactgagcctccgttggcttctgaactggaattctgcagctaacccttccacgactagaaccttaggcattggggagttttagatggactaattttattaaaggattgtt

SEQ ID NO: 437302 - DNA, 429 bp, Homo Sapiens
tcccccaattccctaaggttcctaatcgtggaaagggttaactgcaaaaattccaagttcaaaaacccaacggaggcttaagtcccagacagggattaaccgacttgtgctggtatcctaggtgcttggattgccgaagttgagtttgctggaagggaaatggggcggccgtcggggggcccgacaggcctggctgccagtcgcttccgcgaaaacgactcttgctgtccacatagccagccgtgaagccaaactgcaggcctctgccctcccctaaatgtcctcctaggaggcagtcactcgggaggaagatgtgcctgttaccaagtgcttcgtcccggccccagcgcagacctatgaatgaagatggagggagagctgatgtgaaaggcctgggtcccggccgcagaaggggcgccagaccgaaat

SEQ ID NO: 437303 - DNA, 1601 bp, Homo Sapiens
gctcagaagattcagaagaaagtcacaggctctcggaactccactgagctctcagagatgtttcctgtcctccccggttcccacttgctgctcaataaccctgccctggagttcatcaaatacgtgtgcaaggtgctgtccctggacaccaacatcacaaaccaggtgaataagctgaaccgagacctgcttcgcctggtggatgtcggcgagttctccgaggaggcccagttccgagacccctgccgctcctacgtgcttcctgaggtcatctgccgcagctgtaacttctgccgcgagctggacctgtgtaaagactcttccttctcagaggatggggcggtcctgcctcagtggctctgctccaactgtcaggcgccctacgactcctctgccatcgagatgacgctggtggaagttctacagaagaagctgatggccttcaccctgcaggacctggtctgcctgaagtgccgcggggtgaaggagaccagcatgcctgtgtactgcagctgcgcgggagacttcgccctcaccatccacacccaggtcttcatggaacagatcggaatattccggaacattgcccagcactacggcatgtcgtacctcctggagaccctggagtggctgctgcagaagaacccacagctgggccattagccagccccgggcccccgggtgcctctgcgtccgtgccaggcctcctgatgccaagggcacatccccgtgcttccagtgaccagaccactgagccaccctgactgtccaaacctgtgaccccaggccagggaacggggaggaaaccaaagaaaaccattttcagggagctcagacgtcacaggagggagcgggagcaggatgtggccctggcctcgccagagcacctgaagaagcaggccgtgagcgaggctgcgagtgccctgggcgccgtttctcacgcagtgaatgcttttccaggcctctgttgcttcctgcaccacacctggtggggtgggagcgtcctctaggtgcccctagttctttgtcctgcctcccagagggaggaaaagcccctgggggcttctggctccctgagattgggctctgagacgagacgggttcccaaggccctggtggggctggagtctcacctgtttgcatggagaaatgggctggccccacagcctcacaggagcagtttgtgggctggtttccccaggaatccagaccctaacccgtgagaatctggattttggcttgtgagccctgcttatttggagccgggtctagagggaaccctctatcagcctcaggaaaacaagacctctgtgcacctcacttttggctcactgcagcccttgtccttcacctccacacaggaccagctggaagcagaaagaagaaaggccaatttcacagggcaccaaacaagtatgaaatgtaaatcagaaatgcagacaccccagacgagagcctcacaggagggagggggccccacaggctccccaggaggctcgtgtctttggcccagagccagccttagtttgtccctgccatctactgtctgaggccatcgctgctacactttgtttttatttgtatttcatactgaagtttca

SEQ ID NO: 437304 - DNA, 743 bp, Homo Sapiens
attatacagcctcaatttccgtgcaatggagatatccttgattttagtgtctgtgtcttgctcaaatttgttttgaagatttcttccttctgttaccaataagacgtccaacaaagttattatgagctaaaatcttcaaggggatctcttctgtgaattttatatcttgagcttccttatgcataatctccagaaatagacttgcaagccgcagaggtgccttcaggagtagagaggatagtaatcgacttctcagcagcccccgcattttctttacggtggacatcgattttagactgggtctgtttggtgatgttccgaatggtggcaccttcttttcctatgatggctccaacaaattgggtgggaaccagcaggcgcagaggcaaatcacatggtttctgcttggatacggatcctggagacccctgccttgaggagcccctctgcccaagcccccggcgacctcggggctgctgcaaggggttttgctgggcggccatttcatcagggatataggctactttcaaggtgaaattctctaactgaaatccattcagtttgtctagtgcttgtctagcttggtccttactggaataggttacatttacaactgcagtttccgagtcagtgttcacttgctcacagctctccaccactccatactggactagtaaactatccagcacctcccacagtaaatgagggcgggatatttcgtatctgaagtttccgaatccgtg

SEQ ID NO: 437305 - DNA, 1654 bp, Homo Sapiens
  misc_feature (347)..(410): n is a, c, g, or t
  misc_feature (619)..(634): n is a, c, g, or t
  misc_feature (1113)..(1123): n is a, c, g, or t
ggtgtttctctgtgtttgttctccccctgggtcaaggaggggccgcccggggatcgtcccggtgacgttgggttgtccgccgccgttttaaccaagcgctggtatgggtcgccaggtactcagcccgtgtgtgtaagtgctgagcggttgggtgcgtgtcgttcctgttagttgcgggtggtgtgtcgtgctgtgtgggtggtgttggggttgcgctgctttgtggtggtggttcggcctcgtgcgcgttccaacgggtgggtgtggttctcggtgtgccctagtgggttggcgtgtttagaggcaaaggttttgtgtggtcacgcgtttcgtggtgtaagcgccannnnnnnnnnnnnnnnnnnnnnnnnnnnnnnnnnnnnnnnnnnnnnnnnnnnnnnnnnnnnnnnttgttttcgtgatatttgtggtggggaatttgttgaaccggagttagccagtgtccacacccgggacacgctgatgggccctggtgtatcgcgccaagctcgagagttaaccctccgcttaaaggggaacacaaaagctggtaaccgggcccccccttcgaaaggagttcacaggcccctatggccggagtccacgcgcctggagaggnnnnnnnnnnnnnnnnggcttaacattatgcatttattatattgtatagagccatattacacatgcttggtgcttcaaactgagttatcaatgtttttctggatgcaaagccatctgatgctggatgcggatgccttaaatactatatttctgcatctatgacctatgagctaaggaaaaaccaaggacaattccagaaatggcaaagaacacttaagaaaaagatgtacatgagacgaaatgctaagtccttgagccagggcctacagaagttaccagaaagcgaataaaaacagaatttttctcaccacctgttgataatagagcctcacatgtccgggtatggacaatgtagaaaaaagaggttgttccgtttggtactgatgcctttctcccctccgtgatgtgtgcggacattgtgcggcccccagaagagagcagcagacagaacagagcacagcaaactgccccctcctcaacacatcccagtgctgnnnnnnnnnnnacagcatctggttgtctcatgaaaagcggtcaatttgatcaaacttgccaccttgtggaaaatcaatcagtgtgcttcagatgaatgtgacgccatcacacgcaccctcctctgacatccagaatgctggcgggggacatggggctgggtgcctgctcggccaggacgaagctctccatgtgtcacctcccaccttacggcacccagtttgtgggaggtttgctttgcctgctgacctgatgctaacgctcagcttaaacgctccattccagattttacaaggggactgggtggtaacgtgtcaagtacatgctgcccatacttcccatcaagcctcagtacagtcccagcttaaagatcctctctggcaccacactgatcccttgggcctgggggtggatgccaggtattctcttggccacaaatctgccctcttgtgggttagaggccagccctctcttgcctgacgtgacttgtctgaagggcctgcacttaaaccatcttcctcgtgccaaattcgccacccaggcc

SEQ ID NO: 437306 - DNA, 922 bp, Homo Sapiens
caaagagagttgatcacttccagggtctctgacttctgtgacctggaaatcagcctggcttgggaaattcatgttgttgatctttaattatttaattattctttaataatccttctattttcttgacatctgacccccagcaagagtaaggatcccagaggtcaaaacagtggtgagagccaagctgctcacagacacccacttgatgccacagccatgccatgaggcttcctcccagctgctctgctggcttgctgaagccagctctgagtcacagggttgccttggaccctcggctgtagggggcacctgttctggctccgggccctttgtcctggatacactgacagtaatgtgagcgcagcacttcagagttcaggcccagcaggtcctggcaagtgcattccacccgaacttttaacccaagcggtggggaaggaagccaaaactccaagctgcactttcttggggttctggccatgcacttcttagccttctctctgactttacaggacaaaaggtaccccacgccttcagaatcatgcttacctgcacggcagcatctgactggatggctggctaggtctcatccaccccaaattactgacccttgatttatgttgttactgctcaggttatgctcagatgccctggttgcctgaagatggtttaagtgcaggcccttcagacaagtcacgtcaagcaagagagggctggcctctaacccacaagagggcagatttgtggccaaagaggtttcctggcattccacccccaggccccagggatcagtgtggtgccagagaggatctttaagctgggactgtactgaggcttgatgggaagtatgggcagcatgtacttgacacgttatcacccagtccccttgtaaatcttgttggagctgggatcctctagatca

SEQ ID NO: 437307 - DNA, 394 bp, Homo Sapiens
tagatcacttctgtatgtaacttttttacatacattcgatacattcagcagggactcgtgaaacagcaggatgttgatcagatgttttgggaggttatgcagttgagaaaagagatgtcattggcaaagctgggttatttcaaagaggaactctgatgctctgcgtgggaccatgcctgaactccccgaataactgaaaaatggctgaatatttttatggttacttgatatttatttccaaggagtgagcctaagacttttttccccttttgcaaattgctctaagaagtaccatgatttcttttaaactgatgtatgctgtgtttgcttattctttagttgaacacactatgaagaattccaggtgtactagtgaatgtaatttatagttgcc

SEQ ID NO: 437308 - DNA, 971 bp, Homo Sapiens
tctggacccaacagagtttttattgtacagatcataaaacggatgaaagtatatcacagtaattaatgaagccgctctaatttagcttgaggagattgaaaattcccagtgatggcttgtgctgctactgacgagctcatagactggagctcaacaaggtaacccacaaacagcttccaggccagagattggaaaatcttttcctttcacaatttaaaacttggctgggattctcaacatatcttatcaataatacatgtatacaatccaaaaggtgcagtggcttcttcattctgttccagaatggatcccgtgatttgaacaactgatcataaacttctagtagtctaggtaatggtactccaatttcattcattgtctgtattacgaagcccacatcccagttcaaagtacaaacctgctgttctaaaaactgtacaataaaatctaaaggaaagaagcgtggtgtgccagcataaattttgccaaggagaacaatcttgagactaagagcatgcattctatccgaggagctcaatgtcacactgtcactcaattctttctctatgatatcttgccaaagtgtctgcaccaatatagggtctgaataaccggcacaatgaattattgcaagtttgcactctgcaagtttaaatgggtcagcaaattccccataaagcttagttatgtccatcagctcagaatccagctgagaaactgcatcctgtacagaagaatgatgggaatactgcctttgtagtgtctcctgtatctgaagttggatcctagcaacctccattttttcttctaattcatgaagaaattcaccatcggcagctattgatgaaatggcagtggaacttttggcactaagaatggctcgagcaatgtactctagtcgctgctgaagtgaaatttctgtgctatgcatgtcagccagtctgcctcgtgccgaattcgccacccaggcc

SEQ ID NO: 437309 - DNA, 1220 bp, Homo Sapiens
gcaatggagtgcccaactcaacccttggggtgactggccatggtgacattgtggactgtatccagaggtgcccgctcttccctcctgggcccacaacagcgtgtaaacacatgttctgtgcctgctcagcagagcctcgtttctgctttcagcactcactctccccctcctcttctggtctggcggctgtgcatcagtgggatcccagacatttgtttctgtaagattttccattgtatcctctttttggtagatgctgggctcatcttctagaatctcgtttctcctctttcctcctgcttcatgggaaaacagacctgtgtgtgcctccagcatttaaaaggactgctggatttgtttactacagcaaggctttggtttccaagtcccgggtctcaactttaagatagaggcggccataagaggtgatctctgggagttataggtcatgggaagagcgtagacaggtgttacttacagtcccagatacactaaagttacaaacagaccaccaccaggacttgtgcctgaacaattttgtattgagagaataaccaacttccttcaatcttcattttggaggcagggcttgggaagggagcgctctcttgattctgggatttctccctctcagtggagccttattaatatccaagacttagagctgggaatctttttgatacctgtagtgggactaaaattctgtcaggggtttcttcaagagctgagaaacattattagcacttcccgcccccagggcactacataaattgctgttctgctggatcaaatctcttccacatggggtgcatttgtagcctctggacctgtctctacctaaggacaagacactgaggagatactgaacattttgcaaaacttatcacgcctacttaagagtgctgtgtaacccccagttcaagacttagctcctgttgtcatgacggggacagagtgagggaatggtagttaaggcttcttttttgcccccagatacatggtgatggttagcatatggtgcttaaaaggttaaatttcaagcaaaatgcttacagggctaggcagtaccaaagtaactgaattatttcaggaaggtcttcaatcttaaaacaaattcattattctttttcagttttacctcttctctctcagttctacactgatacacttgaaggaccatttactgtttttttctgtagcaccagagaatccatccaaag

SEQ ID NO: 437310 - DNA, 432 bp, Homo Sapiens
  misc_feature (249)..(279): n is a, c, g, or t
  misc_feature (418)..(418): n is a, c, g, or t
gtagaatgtaaaaagtcattttagatgccacccattgactttgccacatagctgaactgtgtttactggaaaaattcagaggcctaaagtttaaaataaaatttacttcttatgttttaattaaaatgtttgccacattaacttttctgatgccttaaaagtgaacttctttaaagaacctttgtgctattttatcacaggcttacactacaattgttaataaatacttcattgggagatgtatggtgnnnnnnnnnnnnnnnnnnnnnnnnnnnnnnnagcccgctgcatgacccgtctctcctttctgggactatttctgctgcgtcctgcaccctcctgggcccacctccgattcacagaggtttcagggggacccaaatcactgctggttttcaattattttttaacaatacanttttgtggtcagct

SEQ ID NO: 437311 - DNA, 882 bp, Homo Sapiens
  misc_feature (702)..(702): n is a, c, g, or t
  misc_feature (800)..(837): n is a, c, g, or t
ttccctctttgaaccacattttttcccttcttcgtgcatggactccaaggattccattcactgacctcacagtgcacaatactgacacactccatagtatggttgttggcttccaacccttctgggcaattcgtcaaggcactttccacaggtgtaagtaaaatccacttttacattttgtgcagaaatttttgttgaaacaggtatcacagtcagctttgcattttgtacacttatttatatctggatatcgagttccataatatccacttggacatgaagagagacatactccaatctgcttcatgccaattctttccagagcaaaaaatagtctgggcttacatgacaaacatccattgtaatctgagcatgttgcacagcctccttggcagccttgactaacgttaggatgcattcttcgctggcgccttccctgggaggcgttttggctgccgatgtattccataaagttcaaaatgataaaaagccaagaaatcagtcgcaagtgcatagtaacccagtaatgcttcccttcctttctcctctttcttttgattgttaattatatttaatgtttttaaaatatatgtaggtgttaggcgtatatagacagtgcccgagcagcgggacttctcctctcacatccgataggcgtgctgtgatggcaagcgaagtggggcgggtggacagcgaaaccanctattgtactttcaaattatccaagcactgaactgcggcggcttcgctggggtgactccgctctcgacgaattcgagctcggccgatttggcctgatnnnnnnnnnnnnnnnnnnnnnnnnnnnnnnnnnnnnnncgccgccaccgcggttaatccaagtcgccctatagtgagtcgtat

SEQ ID NO: 437312 - DNA, 1238 bp, Homo Sapiens
  misc_feature (622)..(635): n is a, c, g, or t
  misc_feature (990)..(1009): n is a, c, g, or t
gaggggtcttccttggggaaaccccagcttatgggccccaggttccccttacccttaccggggccccgcgcccccaaaccgaaagggtcttgaaaagcttcttcgaagggccgagggcggccgccacggccccttgttttgttcgtggccccgtttttaatagactaataagccaagagctttattgatgcagcaggcactttacaatgagcccaagagtgtccaccttctctgggaagacaggatgtctgtacaaactcttgggtttttttccacttcaaaaacacaagctctcccgtttaccacagcccttggatctgcacctgcccaaaccatccctcccccagtgcacacaggtgcatctgaccaacaccagccgccacgctggtagaccgtcaaaatgtcagttctgcagtactcggagacaaaggcatagactatcagatcctaaacaggatttaggaaacagacgattttcccctccaccttgaaaataaaatacatttcagcagatacatgtcctgaaatagtttacttgggagttcctaggaagatggtccattgtcaatcccttcttcaccagcctgggcatccagaattcttctcaaggtaacatgagtcnnnnnnnnnnnnnnaaacagtctttcttgctgtaagaactcttataatggagcctagtcctcctactgctaaggccttttcgtgccactggagtaacactgcgctgctattttctgtgggcttctcaaagcctttataaatgtacttcattaacaagtcaacgccgtttctgtccagtgactgcacagcctgctcaatctcactgctcttgaagtttgtgagcactttcagcaccacgccctgggctcgctccttcacagcttgattcttggtgttgacgggagagttccgcaaggctgcatggaatgcccgaagcatgtccccttgccgcaggagcccgtccacctcgctcgggtccgggcctggctnnnnnnnnnnnnnnnnnnnntcctcctgctcgtccacaaatttgttctcgtcaaattcgtcgatgtccacccggcggaagcgcgaggacagcgtgttccgggccatggcgggagctcggcgcccgctcagccggctccgctcgcggcccgacctcggctctgctccgctcgcaccggctcctgctcgggggcgggaagcggctgcccggctgctcccagcacctcctccaccgcctccgcgcccccgct

SEQ ID NO: 437313 - DNA, 726 bp, Homo Sapiens
gggagttcctaggaagattgtcccatggtcaatccccttcttcaccagcctgggcatccagaattcttctcaaggtaacatgagtcttgcttatttgtttgttaaacagtcgtttcttgctgtaagaactcttataatggagcctagtcctcctactgctaaggccttttcgtgccactggagtaacactgcgctgctattttctgtgggcttctcaaagcctttataaatgtacttcattaacaagtcaacgccgtttctgtccagtgactgcacagcctgctcaatctcactgctcttgaagtttgtgagcactttcagcaccacgccctgggctcgctccttcacagcttgattcttggtgttgacgggagagttccgcaaggctgcatggaatgcccgaagcatgtccccttgccgcaggagcccgtccacctcgctcgggtccgggcctggctccgccgcccgccgccgccgcctcctcctgctcgtccacaaatttgttctcgtcaaattcgtcagatgtccacccggcggaagcgcgaggacagcgtgttccgggccatggcgggagctcggcgcccgctcagccggctccgctcgcggcccgacctcggctctgctccgctcgcaccggctcctgctcgggggcgggaagcggctgcccggctgctcccagcacctccgtaccaccgcctccgcgcgcaagccgccgccgcccccgct

SEQ ID NO: 437314 - DNA, 1987 bp, Homo Sapiens
  misc_feature (189)..(189): n is a, c, g, or t
  misc_feature (318)..(318): n is a, c, g, or t
  misc_feature (443)..(451): n is a, c, g, or t
  misc_feature (519)..(554): n is a, c, g, or t
  misc_feature (744)..(754): n is a, c, g, or t
  misc_feature (931)..(932): n is a, c, g, or t
  misc_feature (937)..(938): n is a, c, g, or t
cgcgggctcgcggggcgtggggagtgggggtgtttttctcggccacaccggtggttgtggaagatattttataagagagagggtgggcgcgcgcacgataatattgtgagaggaggcacaaatgtgtgtttggttttgcgtgcgccgccccgcgccgtgtgttatatgtaccgcgcgcacagagggggngggaaaatagattattctgtttatatcgggccgcaccagaggcaggggaggacaatagagggagggtggtgagagatgacgacagccgctagtggaggcgcaaatgtgtttatgaggggtgtgtctcgncggtgaatgacggcgctcccgggattggtgggggaagagaagggggagtatttgcgcccacaaggtgtgtgggccgcgcaccagagaaaataggcgcgtttaatatagggggggggaaattgttnnnnnnnnngacccctttgtttattctcgcgaatgacagttagagagatgtgtgtgaccaccaagtgcgcgcgcgtnnnnnnnnnnnnnnnnnnnnnnnnnnnnnnnnnnnnaaataatttgaggagagacgcttgcgcgcgtatgtgaggaagaccctccctcgtgggtgggggataggaagagattcccccgaagtatagaggggcgacctcttgcgagagagaacttctcccaattcggggagaattttgtgtttcggaaggaatacggctgcgggtggttccgccgcgcgggggcggnnnnnnnnnnngtggtgggaaggaaattcccaaggccatttaggttcaaggggcccagggtattttcttttggggaaacgagcttatggcccatggttcccgtttcccttgctggggccccgcgcggcccaaacgaaatggtgctagaaaggctttttgaaggggcgggggcggcgcggacaggtttnntggtnngtgagatggagtgttttttttcgagaaaataaaacatttattcggtttttaaacaattaaaaaatcttgtctgggcaggccctttgctcaggcctgtgtgtcctgctcagccactctgtcgaccacactgacccaggggctgccccggacatagaagcggaggggtttccgggcccactcccctgcatggccgacgcccacccgggctgctgccactacagccggctcactgggctccaggggaccacgctccagccatacagcttcatcctgtgccaggtccctctggtcaaagctcttgttgatggccagggcctggcacagcttggaggggccactgcagagctcgcggtccttgaggacacggctggcggtgcctttccggagggtgctgcgaagctgacgcatggtctccagaccttccaggggctccagtgctcgcagcaagacgcaagccccgtccccctggctggagatgttcatgcagaagtacatgccgtaaatgatgtacacgtacagggtccccggcttcatgaacatgcctcggttgcggggggtctgccggccaccccttgagtgggcggcttcatcctctggccccaggtatgcctcggtctccacgatgcggcctcggagttctgtgccattaggaagtcgccggactaggacctgtcccagaaatgcccgggccagggggactgccggctggtcgaagaactccaaccccagtcgggtaaggtggccctttgggcttgagaaatagatgctgcggtatgggcccggagtggtgggcggtcccaagcagcgctccctggggcaaggtgcctgggctgcatcggacgagctgtgtggctgctctgcaggtgcctgggctgcgtcggacgagctgtgtggctgccctgctctagctggtcgctgcttcttttgccccatccgtcggcaaaactgggccccgctgcgcgcgggcatccggcggctcgggccggggcttcgtgggactcggaccccggcgcggagcccagcagccgccgaccacggaagcaccccta

SEQ ID NO: 437315 - DNA, 555 bp, Homo Sapiens
ttaaattaaagtattaatgccgataatccttttattaacaagtatatttgaacttttagaaatggaagtgttttaatcaattttgatatgtaatcataaatagactgtaggctcaaacccaggtaaataaagatttaaatttagtaagcgtaaggcactaaagcagcctttctattttctcttggagacctagttatcatatcaggaagaacaaatttgttcttaagctggtttcagcccatcaggtacaagatcaccattgtaccaaatgcctatttttgaatgcatgtgcatatatgtgcattttagtgcataagtgtgcctctcaccagggcctaaagatggaaaattggaaaagccaaagccgctgtcctttgcatgatgcctctgtgagggtgtgaaggcctttcctttcgcacctgtgaaggtgtgaaggcctatcttgggccattaatgattctatatttttcaaatcacagggcttttagaattgttcataatgttatcactaagtttctgaaaatgttaaaatctagattaattgtttcattttta

SEQ ID NO: 437316 - DNA, 501 bp, Homo Sapiens
  misc_feature (15)..(15): n is a, c, g, or t
gacaggagtggattntttttgttatgttttttgtttaaaatcatcataggtttttatccaagtaaaaaaggtaaagaggtgcatctactatttcaaattccaaaatcgagcatctacatataagaaatcaccttggttaattttttcaagattatccctctttaaataattgccaaatctatattggacagaacagacacaaacgtgtttgtgcaaattatctttaaaaacatagtatggcttaaaagttatcaattatttccacatcataatatatgaacatattttagtcattattctgccttaaccattgttcttagttcgagtgaacacaaggtacacctactggcactataaatgaaattactctgccccaaataaaaatagagttttaggatgctattgaaggaaattaatttctaggaattttggcaaggacaataaacattaatataattccagacataagatttgcagagtttatctctaccctttatatcc

SEQ ID NO: 437317 - DNA, 442 bp, Homo Sapiens
tcagcttcaatgaatttttaattttgttcaatcttgcatttgttcaaccaaaaacaatttaaagaggaacacgacaatcagccttagattgagcaagttcagctcctcactagggagttcttgaatccaccatgaaaatcaacagtgtgcatctaacagttttcttttaatttgagaactgaaaagtgaatcatcacatcaaatattcttcaggggtctctttggtttccagattaaacatgtaatgtgacggtcatcttgccacattctcacatttccattttaaataatcataaataagaaaaccttactattctttggcataacacagctgattgattccgctgagtttcaaagtcttagaaattgcactcattccttctttagagtcctgcttcatggcaaaagttttcagctgaaagactctttattgtattcaaat

SEQ ID NO: 437318 - DNA, 653 bp, Homo Sapiens
  misc_feature (641)..(641): n is a, c, g, or t
aggaaattaaacagctaaataatgtggttatttattaaagatacattaataattcttgtaattgatgcaggttttcttttttctacagactactattattttattcttgtctctctggaaaatgaaaaatccattagtttttctcttttgcttttacccagaaattaaaggttggtaagtggtaattagcgtagctcctgtcaaagccagttgcctcatgaggaccgacatttgacttaagctgaaataatggaatatggctaatgtaaagttcattagtcccagctgctttctttgacattcttttcttctaccacaagaacgggcatgccctgccctctctcactcctatttttagacgtattgctgcgctcctatgtgtctattctacaaggctggaggcacagtggttatagggaaggtaaatggtaatgggacaatatgtctgtgaccacgttcattacacatctgggatagagctctgactctttgatagaggactccagcaccccatctgtctgcccctgagaaacgaaagagaaccactctccactgtctactatatgttaggtactaggatttttctcattatagcacttcattcctttcttgggggggactggattatttattttgagacnagggatcccgag

SEQ ID NO: 437319 - DNA, 1735 bp, Homo Sapiens
  misc_feature (352)..(360): n is a, c, g, or t
ttttacaaatttctcgaactttattggtacactgcacaatcacaaccatctcgtattcatcctgaattagaaaaggttacaactacaatgtaacatgcacaaaattcaggtagtatattcacccttgatacaattattgacagaaatcaagtcttcattgattttttgaaggaaaaaatacgaaagaaaataaaggacaaaagaactctagaaggctgacaaagtcatactcttgtatcgtgtgataaatttttaaagcatttgaacatagattttttttgaaggataattgtgagaatgggcacacccattgtctgacacagctataacggcaccattgataagtcataannnnnnnnnaaatctaaaggactctgaacttgacagacacattttcgttcacccacacagtcctcacaactgcacttgacatgtcacgaaaatttccgaacgattaaaaatgctccctttaactaacacaagggcagcttgcagtacatagcattgttattactgatagctttataaatctgccaaataacatagaatgtagcctcaaaaggatggtcgagggttcgcaatctttctttctccacccagtggtgtgggagcaactctgtgccttaaagagggcaccatggaaagaaacaaaaaggaatctctttcaaaatgctggaaattaggcttagctcactactttcaggataaagacaactgcatctaattaagtccactcccacatttcctttggactctaagtattctgcacctgaaggctaaattgaactggctcagccctatcttttttgccacatctttaattacaaatctatttcttcttcctttcatttacttctcttctcttaagtaagaaatgtgggaaatgagactggcagttttgtttgtttgcatgtggtgatcattaggcgttctcatcatatggtctctttttgaaaatgttgccttcctacttacacacctgtgaagttttactcaagtgctcaaacttatttgtcttcaagtaaaaagacagggaagctctgaataataggaggggaggcaattgggtataagagtttccaagataaggtcacgtgcaaaatgaaaacaaaagattcttgctgttggagaaaaagaaaataaatgcattttttccaaaaagaaaaaccttatgctgcttcccttaattcccaaagggattgaacaatttgcttttgtgtgtgtgttggtctgtttcattttggactggttttaggtaatgcatagccagtttttctttctcaagatcaaagtcagtatggaattgaggaaagatgccccaccaccagatcttacctcatcttaagccattcctcccctcctaccatgggctggcgacagccaaccagcacttgaaaattcaatgtacagccactcctgatgccgccacagggataagctctcgtcggggttgcctgcccactttggggttctctgcttttctcatggaatagttctttcagcataaatagaacttgctgacttctctttgttgaaggcaaattgactgaattgatgcagaaaaagattctgaaacccagcctcagttttgaagttgctagagtccaggaatagtcttctcacccaggttttgagaacaaactgcccaatctgtaaatgtatcatctagtaagaggcatggatgtaagaagaaagagactggggcctctttgtgacacaacaccttaccttttct

SEQ ID NO: 437320 - DNA, 441 bp, Homo Sapiens
  misc_feature (389)..(389): n is a, c, g, or t
  misc_feature (405)..(405): n is a, c, g, or t
  misc_feature (414)..(414): n is a, c, g, or t
  misc_feature (419)..(419): n is a, c, g, or t
aactcttatacccaattgcctcccctcctattattcagagcttccctgtctttttacttgaagacaaataagtttgagcacttgagtaaaacttcacaggtgtgtaagtaggaaggcaacattttcaaaaagagaccatatgatgagaacgcctaatgatcaccacatgcaaacaaacaaaactgccagtctcatttcccacatttcttacttaagagaagagaagtaaatgaaaggaagaaggaaatagatttgtaattaaagatgtgggcaaaaaagataggggctgagccagtttcaatttaggccttcagggtggcaggattacttaggagtcccaaagaatgtgggagtgggactttatttgggtggcagttgtcttttttccnggaaagttagtttggntaaggcctnatttncccggctttttggaaagaggtt

SEQ ID NO: 437321 - DNA, 940 bp, Homo Sapiens
tagtccagccatctgttttccaagcttccaatagattttgctgacctgtgccactgccctcatcatacggagagttgtacccataagccaaagccccagctggtagtgggtctctgcaaggagccgggtcgggggcttccaggtactgttcctccagttaaggccaggactgaactccctccacagcttgcacatagttttcagattcaccactacgttctcccgagtttaagatgtgcctgggcagcataaagctgtgcttcttttgtttcttgccttttaaaaatgatctttgctaaatccagcatatcccaggcaagctctagggttcccaatctcctcctcctcattttcttgaagagacttgttttcaaggactgaatcatttggcatttcttcagtcttatcattttctttatcatcctcttccgagccttcagtttcatctatgttatcattattttctaccagagattcatcttctgttttttctccttcttcctcttccacatgcacaccttccaaggcgtttcccaacacaccattctccattcttgccaactccagaagtgatttcccatagaaaaagaaggcttctccacactcattagctgtctctccatacttcttacctaaaagactagctgcttcctggaatgcattgccagctgctggaatatcccccatcaccagatgtttctgtcctaaacccaatagtttcttagcttcactatccacatccagactctccactttatctgcagatgtagaaggagcaggaacatcttcaattttgtcggcagaaaccagctccgcggcgacggcggcagtggctgtggactccatggccatcgttcccctgaggtggcgaaccagcgaacggaatagagcctgcgagaaaaacaggcaatttggacgccagagactcaatccggataat

SEQ ID NO: 437322 - DNA, 2755 bp, Homo Sapiens
  misc_feature (81)..(81): n is a, c, g, or t
agcaaccatgggaaaaacaaagggcctacagccaccacttgatcacctccacgttagacagatagggattaggatcaggancacagatcagtacagaaggccagaacaaaacctttggctaatatataaaaccagcagtgctccaaggcagattcagccaataattaagaaaaaaaccatcaaagcctcaacctttgcttacaatctttattgaagttatacaaaaagaatcctccaaaagtgaaaaaatacattatatacaaaaacactttcccttgggaggagggctgtgcccctcttaacatgcagtgctttcaactgtagctccagcctccactgtcccctccactgctgcccggctttcagcctgattctcagcctcctcctccatgttttccgaaacttcatttccactggggacagcatccccactgcctccgttcacctccggctcttgtttggctttctttgcatcatctttccggggactctcttcctctggtttcctcttctttctgacaaggtgggaaatatcagtcacacaatttgatgaggaagcaccgtctgttggctttctactggcaatcatggagactgaagagcctcctccaccaggagtgaaacctgaagtagaactctccaccagagtagctttcagagccagttcagctacattcccactacgctgagactcctttgcatcttctatcttctctctaatttcgggtagcagttcctttagttcctcaatttctttcttgtattcagcagacgatccttcagcctccttcacctgctcgtttagtacagccattctgttctcaatgacttcaatagatttgctgaactgtgccactgcctcatcatactgagagttgtacccataagccaagcccagctggtagtgggtctctgcaaggagacggtcgtgggcttccaggtactgttcctgcaggttaaggcaggactggaactcctccacagcttgcacatagttttcagattcaacactaacttctccgagtttaagatgtgcctgggcagcataaagctgtgcttcttttgtttcttgccttttaaaaatgatctttgctaaatccagcatatcccaggcaagctctaggttcccaatctcctcctcctcattttcttgaagagacttgttttcaaggactgaatcatttggcatttcttcagtcttatcattttctttatcatcctcttccgagccttcagtttcttcaccctctttcatctgttcttctctctcttgtgtctcttcattagcagctatctgaactttgtcttcaggtgatttctcagtagctccctgggctaccttggtatcaaccccatctccagctgcctcagactcttctacagacagcttagtctcctcctgactaggaaccagctttgccctgaccttctcctctagtcctgagccatcttttgtttctgtcagtctttctatagaagtctgtggttcaataggagtctgatctcctacaactgacggtccattgactgcaccatccttagggagaactggagcctcctgcccaggcttttcagagacttctgatccagcctctacagctgaggcctctgcagcctctgttgtcacctctggtgactcttcagcaggtggtacttcttgacctaccagttgttcaagaaccgcctttcctgcctcgttttcagaggtaactaccttctcctctggctcgtccccacccacatccactggcttgactgttgggtctaaagactctgcttctacctccactgcagtgccctgcttttctagagtcaccacaggctgctcttctgaaacttcttttggcttctcctctatgctcacaattacctctccctgcttctcctgacctcctttttctctgcactcttcttggacatcagttccagaaactgatttttcttcctcagcatctggtacttcctgttctggcttcccagaagtgacctcagcttcattcggtccttctggtgctgctcctccttttgcctcttcagaggtttcagttaaccaatctagagtcaagtcaactttttcctgtggctcctctgcagatttacttatatccatatcttctcttccacccttctccatttcactgtcctgttctttatcagtttcaggctttgccaaagacttgtcttctgtttttttggcttcttctttttctcccatggcgtcataaacctgttctctcaactcttcccttgcttcctcatctatgttatcattattttctaccagagattcatcttctgttttttctccttcttcctcttccacatgcacaccttccaaggcgtttcccaacacaccattctccattcttgccaactccagaagtgatttcccatagaaaaagaaggcttctccacactcattagctgtctctccatacttcttacctaaaagactagctgcttcctggaatgcattgacagctgctggaatatcccccatcaccagatgtttctgtcctaaacccaatagtttcttagcttcactatccacatccagactctccactttatctgcagatgtagaaggagcaggaacatcttcaattttgtcggcagaaaccagctccgcggcgacggcggcagtggctgtggactccatggccatcgttcccctgaggtggcgaaccagcgaacggaatagagcctgcgagaaaaacaggcaatttgggacgccagagactcactcagggacagc

SEQ ID NO: 437323 - DNA, 1168 bp, Homo Sapiens
  misc_feature (541)..(541): n is a, c, g, or t
ggcttttaagaccccagtttcaggttacattttcccccattagcggttgagagcccccttggccaattttaaattttccccttaaaaattcgggggtagccagtccccttaagttccccccaatttcttttctgggattcaagcaagagggttcctttaagccttccttccacctggttggttttagttcaagcattttcgttctccaaaggatttccaatagaattggctgaaccggggccccatggcctcaatcattggggagagttgttcccccataggcccagcccaagctggtagtgggtcttctgcagggagaacggtcggtgggttcccaggtactgttcctggcaggttaaaggcaggactgggaactccctcccccagcttgcaacatagtttttcaggattcaaccattaactttttcggagtttaagattgtgcttgggcaagcataaagctggggccttctttggttttctggccttttaaaaatgatctttgctaaatccagcatatcccaggcaagctctaggttcnccaatctcttcctccttcattttcttgaagagacttgttttcaaggactgaatcatttggcatttcttcggtcttatcattttctttatcatcctcttctgagccttcagtttcatctatgttatcattattttctaccagagattcatcttctgttttttctccttcttcctcttccacatgcacaccttccaaggcgtttcccaacacaccattctccattcttgccaactccagaagtgatttcccatagaaaaagaaggcttctccacactcattagctgtctctccatacttcttacctaaaagactagctgcttcctggaatgcattgacagctgctggaatatcccccatcaccagatgtttctgtcctaaacccaatagtttcttagcttcactatccacatccagactctccactttatctgcagatgtagaaggagcaggaacatcttcaattttgtcggcagaaaccagctccgcggcgacggcggcagtggctgtggactccatggccatcgttcccctgaggtggcgaaccagcgaacggaatagagcctgcgagaaaaacaggcaatttgggacgccagagactcactcagggacagaaaatggcagattccc

SEQ ID NO: 437324 - DNA, 1097 bp, Homo Sapiens
tcttctctctaattttcgggtaacagttccctttagttcctcaatttctttcttgtattcagcagacgatcctttcagcctccttcacctgctcgtttagtacagccattctgttctcaatgacttcaatagatttgttgaactggtgccactgcttcatcatactgagaagttgtacccataagccaagccccagctggtagtgggtctctgcaaggagacggtcgtgggcttccaggtactgttcctgcaggttaaggcaggactggaactcctccacagcttgcacatagttttcagattcaacactaacttctccgagtttaagatgtgcctgggcagcataaagctgtgcttcttttgtttcttgccttttaaaaatgatctttgctaaatccagcatatcccaggcaagctctaggttcccaatctcctcctcctcattttcttgaagagacttgttttcaaggactgaatcatttggcatttcttcagtcttatcattttctttatcatcctcttccgagccttcagtttcatctatgttatcattattttctaccagagattcatcttctgttttttctccttcttcctcttccacatgcacaccttccaaggcgtttcccaacacaccattctccattcttgccaactccagaagtgatttcccatagaaaaagaaggcttctccacactcattagctgtctctccatacttcttacctaaaagactagctgcttcctggaatgcattgacagctgctggaatatcccccatcaccagatgtttctgtcctaaacccaatagtttcttagcttcactatccacatccagactctccactttatctgcagatgtagaaggagcaggaacatcttcaattttgtcggcagaaaccagctccgcggcgacggcggcagtggctgtggactccatggccatcgttcccctgaggtggcgaaccagcgaacggaatagagcctgcgagaaaaacaggcaatttgggacgccagagactcactcagggacagcctcgtgccgaattcgccacccaggcctcgctaccgttaaaccgtagagtacatgccgttcg

SEQ ID NO: 437325 - DNA, 1625 bp, Homo Sapiens
aaggagcgaggcctgggtggcgaattcggcacgagggcttcgggttggtgtcatggcagctgcggggagccgcaagaggcgcctggcggagctgacggtggacgagttcctagcttcgggctttgactccgagtccgaatccgagtccgaaaattctccacaagcggagacacgggaagcacgcgaggctgcccggagtccggataagccgggcgggagcccctcggccagccggcgtaaaggccgtgcctctgagcacaaagaccagctctctcggctgaaggacagagaccccgagttctacaagttcctgcaggagaatgaccagagcctgctaaacttcagcgactcggacagctctgaggaggaagaggggccgttccactccctgccagatgtgctggaggaagccagtgaggaggaggatggagcggaggaaggagaagatggggacagagtccccagagggctgaaggggaagaagaattctgttcctgtgaccgtcgccatggttgagagatggaagcaggcagcaaagcaacgcctcactccaaagctgttccatgaagtggtacaggcgttccgagcagctgtggccaccacccgaggggaccaggaaagtgctgaggccaacaaattccaggtcacggacagtgctgcattcaatgctctggttaccttctgcatcagagacctcattggctgtctccagaagctgctgtttggaaaggtggcaaaggatagcagcaggatgctgcagccgtccagcagcccgctctgggggaagcttcgtgtggacatcaaggcttacctgggctcggccatacagctggtgtcctgtctgtcggagacgacggtgttggcggccgtgctgcggcacatcagcgtgctggtgccctgcttcctgaccttccccaagcagtgccgcatgctgctcaagagaatggtggtcgtatggagcactgtggaggagtctctgcgggtgctggctttcctggtcctcagcagagtctgccggcacaagaaggacactttccttggccccgtcctcaagcaaatgtacatcacgtatgtgaggaactgcaagttcacctcgcctggtgccctccccttcatcagtttcatgcagtggaccttgacggagctgctggccctggagccgggtgtggcctaccagcacgccttcctctacatccgccagctcgccatacacctgcgcaacgccatgaccacccgcaagaaggaaacataccagtctgtgtacaactggcagtatgtgcactgcctcttcctgtggtgccgggtcctgagcactgcgggccccagcgaagccctccagcccttggtctacccccttgcccaagtcatcattggctgtatcaagctcatccccactgcccgcttctacccgctgcggaatgcactgcatccgtgcccttgacgctgctctcgggggagctcgggggccttcatcccggtgctggctttcatcctggagatgttccagcaggtcgacttcaacagggaagcccagggcgcatgagctccagcccatcaaacttctccgtgaatcctgaagctgtccaatgtcaaccctgccaggaaaggccgtaccgggaacggct

SEQ ID NO: 437326 - DNA, 2241 bp, Homo Sapiens
gtagcgaggcctgggtggcgaattcggcacgaggtgggcacaagatggctcggaagacgagccccccaaagactcggacggagaggaccccgagacggcagctgttgggtgcagggggcccactccgggccaagctccagctggaggggccggcgccgaggggaaggggcttttcccagggtccacactgcccctgggcttcccttatgccgtcagcccctacttccacacaggcgcggtagggggactctccatggatggggaggaggccccagcccctgaggacgtcaccaagtggaccgtggatgacgtctgcagcttcgtggggggcctgtctggctgtggagagtacactcgggtcttcagggagcaggggatcgacggggagaccctgccactgctgacggaggagcacctgctgaccaacatggggctgaagctggggcccgccctcaagatccgggcccaggtggccaggcgcctgggccgagttttctacgtggccagcttccccgtggctctgccactgcagccaccaaccctgcgggccccggagcgagaactcggcacaggagagcagcccttgtcccccacgacggccacgtccccctatggagggggccacgcccttgccggtcaaacttcacccaagcaggagaatgggaccttggctctacttccaggggcccccgacccttcccagcctctgtgttgaggttgccgggggttaagggtggggccacacaaatctccaggagccaccactcaacacaatggggcctgcctcccaccgcttttatttctttcggtttcggatgcaaaacaaaaaattttaaaagaaaatgtgaccttccaaggaaaagaacaaagtttccaaagacttgggggagtgaaggcagagcctggtgcagatggacgaggtctgcagacggagggcagaggtggtggaaggggccaggggcctgcaggcctccccctggaactgggactggtctcggtctgctgacgtcagggtcagctcccccgcggagctgacttcagcagcccacagctgtggggcttcagcagccacaccagcccagcccagcccagctctcgatacgtttggtctttcatgctgaaaaataaataataaagcctgtcccgtgtctactgcctcccccaactgcacagacgccagcctctaggcctgactgccagggaggtggaaacactggccaccagcccggcagcccctacaggccccccagatgggctgcctcagtcgtcctctgagagctgcagatcctccagctcgtcctccggcccctgggccagctgctgcagctccccaggggccagccccgcctctgcgtctgggtctccatcctccgagttgctgctgtcctcctcgccctcctcctcgtcctcttcatcgtcttccaccccatgccgagtgctcaggggcctcagtatccctctctccgagaatccctcggtgtcgtcctcttcagagctgttcaggtcaaagaggtctttaaattgcttcctgtcctcatccttcctgtcagccatcttccttcgtttgatctcagggaagttcaggtcttccagccgctctttgccactgatctccagctggatctcccggtcacgcagcttgcgccagtggctgtagtacaaggtcaagggtgtcccctcttcccgggtcagcttctcccaggcttccactgcctgctgctcagagacgccgaaggaaaccctctggcggcggctgcagatgtatgccgagttctcctgaaccttcccaagcagctgctgcacctgccggcagtagttggccaccttgcactcccggaggaacgacttcagctgcaggaccacaggcagcaccagctccgggaagccgatgcagtgtgcctggctgtgcaggtactccagggtgaggtcgtacagctgctccaccaggccgtcccggtacgccttctcctgcaggttgacattggacagcttcaggatcacggagaagttgatgggcttggagctcatgcgccctggcttcctgttgaagtcgacctgctggaacatctccaggatgaaaggcagcaccgggatgaaggcccccgagctccccgagagcagcgtcagggcacggatgcagtgcattcgcagcgggtagaagcgggcagtggggatgagcttgatacagccaatgatgacttgggcaggcctcgtgccgattaaccgcccggcctctcctag

SEQ ID NO: 437327 - DNA, 349 bp, Homo Sapiens
ggagtaagtagattctgagtttattgttaagatttctttatttacagtacaagtctccaaaagttcaaggcagttatcttttaaataacatgtcaatcatataaaatagctagaaccaaagtagagaaatatatacaatacattaagtactttcaatatagtggcatttttcatattaaattaaaagaggctactatgatttacaatgtcatttccctagtttaaaattcaacatgtcaaaagacataatgtacattttttacaaaactgacacagcagtattaaaactgctaatgcttgtagtttttattttttctataatacactggcacctgtgttaccaaaaaaa

SEQ ID NO: 437328 - DNA, 1498 bp, Homo Sapiens
  misc_feature (936)..(936): n is a, c, g, or t
  misc_feature (1409)..(1409): n is a, c, g, or t
  misc_feature (1427)..(1427): n is a, c, g, or t
ccatgttaacattaagcccatttattaacaagtatctggcccaataattatagttaggtaaataaaatacttcagaactattttataggctgccttacaaataagataactgtcaaagatgcattctctttatgtgaaaagttacacattgttctaagtttaacactccacaatgaactgtgaaatttccctaagctaatacttaatattggaaaacttcaacagaatattggaaaacttcaacatcatctcttttctcaagcaccttcatattgctccccatagttcttataaattgtccaataacccagacaaatttccttgtggacaagaatttttaaaatttaaagtattatatattaatacaatgactttagttaaaagtaaaaatttattgatccaaaactgccaaaaaccttatgctaagcaaaaacttcatttaagcttaatgctctttttaactcctgcacgaatgccagataattcaccactataacgttgctcttctttacgaacttcacgaacctggcctcttcttctaattttggctcttctgaacttctctctgtgtttcactctgggattgcgatcaatcttctttctcctaggagtaagtcccctatttttagcaatttgataggtaatagctctctttgcattttgatcttcaagagcctgttcttcagtgctattttcttctttctttctctttagcttttgcctgtcttctatttctttatagtacttcagttttgctttttcatcaaaatcagaatcatcagaaagatctgtaacagcacaggcagcagcagaagtctttgaaacagactttggtttgggcttggtggattttgcttttggaatcagttctttctttacagcatcatccttaagtgtcaacagatgacgaatttctgaggacagcttttgatccanaacggacagcttgttgatcaaatttcggtaggtaacaagcctttctatgacaggatgtccatgtgctgggactttcctagctttcaggatcaaataaaaactgatgttcgagcaataattcaagtagaggttgtacttggtcctcaagtattggcttctttttccgggtggaatgatcccttgttccaccaactctaacattggctccagctcatccttaacctctgtcaacttgactttcaggtcttctatcagctccaagagttctggtgattcttttcgcaacattttcagcttctctttcactgaaactttagccaaatccttcacgacccgtgtttcagcctcatctacctgaggcactggttttgcaaaggcctcaacccaggcgacaccaaaatcatcctcttgcagcgcttgggctaggcgccgctgaatgatctgtgcctcctcctcctcctgtctttcctccncgtctgcctcctgttgantctgccggcctcgggacttggaaccatagtccgtgtcatagtaaagttttttcctctgaccccacgacaaa

SEQ ID NO: 437329 - DNA, 791 bp, Homo Sapiens
  misc_feature (627)..(665): n is a, c, g, or t
catcgaaaatcagcaatcatcagaaagatctgtagcagcacaggcagcagcggaagtctttgaaaacagactttggtttgggctatggtggattttgctttaggaatcagttctttctttacagcatcatccttaagtgtcaaccagatgacgaatttctgaggacagcttctgatccacaacggacagcttgttgatcaaatttcggtaggtaacaagcctttctatgacaggatgtccatgtgctgggactctcctagctttcaggatcaaataaaaactgatgttcgagcaataattcaagtagaggttgtacttggtcctcaagtattggcttccttttccgggtggaatgatcccttgttccaccaactctaacaatggctccagctcatccttaacctctgtcaacttgactttcaggtcttctatcagctccaagagttctggtgattcctttcgcaacattttcagcttctctttcactgaaactttagccaaatccttcacgacccgtgtctcagcctcatctacctgaggcactggttttgcaaaggcctcaacccaggcgacaccaaaatcatcctcttgcagcgcttgggctaggcgccgctgaatgatctgtgnnnnnnnnnnnnnnnnnnnnnnnnnnnnnnnnnnnnnnngttgactctgccggcctcgggacttggaaccatagtccgtgtcatagtaaagttttttcctctgaccccacgacaaactgggatccacagaggcctcagcttcactttgcacggagctcccacccc

SEQ ID NO: 437330 - DNA, 1051 bp, Homo Sapiens
  misc_feature (337)..(378): n is a, c, g, or t
  misc_feature (431)..(449): n is a, c, g, or t
  misc_feature (589)..(627): n is a, c, g, or t
agcgggtctgcaaactccggtggtaggggagcgcgctgctgtttagagccacgagttaccggagcgcctgattcctgcgccgaagtcagtggtggccgaaagtccggagtcgctgtaaaacctgagattgtgagccatggtggggagatcccggcggcgcggagcagctaagtgggcagctgtgcgagccaaggcaggtcccacgctcaccgacgaaaatggagatgatttaggattgccaccctcaccagggacaccagctactaccaagatcggtagatgactttcatgaggcacgatcccgggccgccttagctaagggctggaatgaagtacnnnnnnnnnnnnnnnnnnnnnnnnnnnnnnnnnnnnnnnnnntgctagccctagatatggacgatgaggacgacgaagatggagggaatgcgggnnnnnnnnnnnnnnnnnnnaatgccgatgatgatggtgggagctccgtgcaaagtgaagctgaggcctctgtggatcccagtttgtcgtggggtccgaggaaaaaactttactatgacacggactatggttccaagtcccgaggccggcagagtcaacnnnnnnnnnnnnnnnnnnnnnnnnnnnnnnnnnnnnnnncacatgatcattcagtcggcgcctagcccaagcgctgcaagaggatgattttggtgtcgcctgggttgaggcctttgcaaaaccagtgcctcaggtagatgaggctgagacacgggtcgtgaaggatttggctaaagtttcagtgaaagagaagctgaaaatgttgcgaaaggaatcaccagaactcttggagctgatagaagacctgacagtcaagttgacagaggttaaggatgatgctggagccattgttagagttggtggaacaagggatcattccacccggaaaaggaagccaatacttgaggaccaagtacaacctctacttgaattattgctcgagcatcagtttgttatttgatcctgaaagctaggagagtcccagcacatggacatcctgtcatagaaaggcttgttacctacc

SEQ ID NO: 437331 - DNA, 409 bp, Homo Sapiens
acttttaaagaacatttttattactttcaagtttatacagtaatctggcacaagctattgccagcattcctgccaagtacaaatgcttggacctccccttaatcaacagataaaatacataacttacatttaaggggagtggatacctcaaagtgcttaagtaaaaatttgttctctttaatagtttgaactgtcccttgttagtcgtgtctaaaacattgacctgaataatgagaaatcacaagctaatgttttacttattccttatatggtaagagactaccttttaaagcaccattttccatttggcatttcaccaaggtctaatgtccctggaattagtttttttgttttgccttttgaatatcgataggtgttcatctgaattaaactacgtttagtttgatgg

SEQ ID NO: 437332 - DNA, 397 bp, Homo Sapiens
  misc_feature (152)..(162): n is a, c, g, or t
aataaaagaaaatttattttgtataaatccatattaccattatttccaatgttaatttttttatttataaagtatctttatatggccaaaaagatccaacctgttatcattttaagtccaaagtatttttagaaatccattataagccattnnnnnnnnnnncgatatttcaagattggttcttacatgctatgaccaactcatatgaaagagcaagttgctcccccttcattccttcccccaactccaaagggaaaggaatttgatatttaggctttaaaaaatttcctactacctttatcttttaaaaaaccctactcaaaacaactatctcttataagggaaaatatcatagataagattttcctttagaaaatgacattaaaagtggcatgag

SEQ ID NO: 437333 - DNA, 682 bp, Homo Sapiens
  misc_feature (19)..(19): n is a, c, g, or t
  misc_feature (663)..(663): n is a, c, g, or t
gtggcctttttttgggccntttaaaagtataaaccttttcatttcctcaatcacaatttgtacaactcagtgttatggcattcggcagcaatagtgtttgttccttattctctttttgtcacgttaaaaagaaaagcaattggaccatattaaatgtcactgctaaacaacaactttaaaacgccccttcataaagtgaccaagctattttgagagggttgatgctgacatgtccagtaatgacgttacaatttgtagcttaaactcaataactttaaggtccacatatccagtttactttgaaaactaaagatgttttaaaacttcatgaatacatcaacctgaggagtattttaggtcccaaatccagtttttaaatttatactccacaaaaaagaaaatacatacataaaaatttaaaccacagttctgggcccattaaaacaccaaaaaagaccccccaaaaagttaagatttccagcttatttctggaggggtgggacaaaataagaatgtatattaaaaacatttttccttaattcagacaaactaaaatcttaagaggaaacccagaccaagatatcactcatgcaacattaagtgtattaactgattgatatgcaatgccatattggatgaatagcaaattatatgatgcaatancatttaaaaacttttaacc

SEQ ID NO: 437334 - DNA, 532 bp, Homo Sapiens
aaatttgaaaacctgatagggaactattgttcactgccagaaacaaaagggatcctttatcataaagagctgggcttgtttctttgtcattctaatcaaatacatatgtatccctcgtttccaccacagcaggaagatcagcagaagataagtatggggtctcactatggtaattgtagtcagggcacaccttttgcacgagtttataatcaacactgtaaaaggcaatgtaaatgcaaatgaccttgaagggcttggagcacaaccaagacacatggctctgagtctgctcctggtagcagatcttggatgggtcaaagttgcacagggcggtctttttcgcccgatctgttttttcatactcaatgcgacaattgaaagatttggattccttggtctccaaggtagactggggggaaacttcaaattccaccaccttggagggtggtaccaagctcactgaaacattgcccaggcctgttgaattatgtcggaaatacacactgaaggttccatttccatggtcaacaat

SEQ ID NO: 437335 - DNA, 983 bp, Homo Sapiens
ggtacgtctgagagatgcccctaaaagtcagaggaagaatcttctgtatgctacctggacttcaaagctcccattagaacagctaaatgaaatgataagaaacccaggggaaggacatttctggcaggtggatcacatcaagccagtgtatgggggaggaggacagtgttccctggacaacctgcagactctctgcacagtctgtcacaaagagagaactgccagacaagctaaggaaagaagccaggtgagaagacaatctctagcatcaaagcatggatcagacatcacacgatttttggtaaagaagtaaagtagaaaaatatatgaatgaatgacaaatggtttacatgtggaagactttaatacagaagttttccatgtttgtttaatatatcgagagtaaaaattttcagaacaaaaatcaagaattcaaattctcttctactaattacttttagtattaaatacattttgaaagtacttaacagaaactaagatacaatactgaatatttctgtggtctttttgatttgattcagactcgcaattatgtttcagcaatgttttgtaaagctctttacccctaatatgcctaatcactgtattgtgcatagattgtgtttaaaaaatgtactctcaattacctaaaaatgcttctggattagtattgttctggactgtcataggtatgagtggaacattgcaaaaccttatgggaaatttcagacgcaaatcattatttgggaattctgggccaagcatgaccagcctgcttaggattcaagagagactgtccactaaatacctccagaatgagctaggggcacacattttgggtgttgcttttcttgctttattttttagctagtcatctttatcaaaaatatccttttcaaaatgaggtacctatggtgtttgtggacaatttgggggttctgtgtaaagtaattgttaaaactagtaaataactgaaaacataa

SEQ ID NO: 437336 - DNA, 259 bp, Homo Sapiens
  misc_feature (205)..(205): n is a, c, g, or t
  misc_feature (214)..(214): n is a, c, g, or t
  misc_feature (248)..(248): n is a, c, g, or t
ttaactatgatgcactccaagtgccatatatctattttattcttcaggaaattatatttttcttttacaagagcacaacaggaaccaaagtaaaagagtaatagatacagcactcaggataaatcatatctttaaaataataataaaaaaatttacaccttgtcctatatcctgttagtattttcataatatggccatgattganaaaacaaangggcaagcatgctacaattttttttgataaaggnctttttatgcc

SEQ ID NO: 437337 - DNA, 273 bp, Homo Sapiens
ttttgacaggaactgtttttattccaaccacctcacctccttagaatgggaggcgaacagtgaaatagtgcatttatcttaaaagtgaaataattccaggatggtagggcgagaccctgtgatgggtgaatttacctcacttgataccaagggcccttaatactcggggaagtgggactttgtcgacaaagccaggacaatccccctacccccaccccacccagcagtgattaaaaacccgtacggtcactttctatgggatggctgtctccc

SEQ ID NO: 437338 - DNA, 1582 bp, Homo Sapiens
  misc_feature (286)..(307): n is a, c, g, or t
  misc_feature (556)..(582): n is a, c, g, or t
  misc_feature (720)..(728): n is a, c, g, or t
caatagccaaaatagttatttattaataatttaaggttttacattcttataataaattccagctctaaactttacaccacgaacataatggagaatttaactctcccttcttcacaatcaaatgcatttctcttatcaaatgggtacccatgctcacacacacacacttccagttttatacaaatttttttaaaggaaagaaaccaacccaaagtattgcatttgaggtgacactccctgaagaattttatacagaggtaatatactgtttagcacagctgaaggnnnnnnnnnnnnnnnnnnnnnnaaagtgagcccatgatttggtgtctttcccagattatcccctttgcgacaacacaagcaaaaatatttacaaaggtaaggcatagtcaaactacataaagagaaaaaatcatgaggaaaatacatgaaaaagactaaagacttcgccataacaaggtcttagtgataatagtgtccgtaaagatgtcatcagaattggtaaagtcaagcatgctgcaaatataccctttggattagaaaagagcacaannnnnnnnnnnnnnnnnnnnnnnnnnnaagaagtggcatactgctctttctccctttggataatttcttttaagcccatcaaaggaaaaaacaaacacaattcaaacaaacactgtcaagtgattcaagatcaaatatttacaataatcaaatggagtatcagannnnnnnnnccaaactgataccacaaatacagagctgaaatctctctttggctcctctatatgcaaaattgaattagtcttcattgaagacaattatatagtcagttccagatgcaaaaggaaacagccttacaaggccctaaagaacacatgctcctaccctatcatttggttctaccctatgcgcctggaagtcctcgaatcccagtccctgcatgggtaggctgtacacatgggtacagagcaaacctactgcctgtatctatacagcatgtcctgttattccaaagagaatggagcaaatctctctgttagtattaaccaattccgcacttggtaaccttgtctagtacagacagctggtgtcattttgacacctggggccacacacaaagaaagcagcccagctgatgctgccaagagaaactgctgaagggccagacacattccagcaaggaggggtgtggggtctttcacgtagattgcagagagtccacctggtatacattctggttggaaggggtggtaaaatacagctgctgtgctggaaccctgttgtcacatgggctgctgagtcccagcgtcctctcgaagtccagcagctgacccatgaagttgaagttaggggatatgttggattttttcattttgacaatgtcataggcatcgttcatcgacagattgagcttctgcataaggtaagccacagtcacagtgactgagcggctaatgccagccaagcaatgtaccaagacaccacagttcttgccccgggcttcatctatgaaagaaatggcctcagggaaaaactgggacaggttttggctcccagtgatccgtagatccgcaggaattccggaccg

SEQ ID NO: 437339 - DNA, 536 bp, Homo Sapiens
  misc_feature (359)..(359): n is a, c, g, or t
  misc_feature (388)..(388): n is a, c, g, or t
  misc_feature (403)..(403): n is a, c, g, or t
  misc_feature (427)..(427): n is a, c, g, or t
  misc_feature (444)..(444): n is a, c, g, or t
  misc_feature (462)..(462): n is a, c, g, or t
  misc_feature (469)..(469): n is a, c, g, or t
ttttttttcattttgacaatgtcataggcatcgttcatcgacagattgagcttctgcataaggtaagccacagtcacagtgactgagcggctaatgccagccaagcaatgtaccaagacaccacagttcttgccccgggcttcatctatgaaagaaatggcctcagggaaaaactgggacaggttttggctccagtgatccgagatggggatttgcttgtatttaaactctcctgcgttctcaaagagattcggcaaattgggggtgacgttcaagatgtacttgatgccgaattcctccaacacgtccaagttggtggagtctttgggcacagcccaagtaggagggaagggcaagancttccactggggaagggaaggttgggctnttgggacagcggganttaccattccgagtttgtttgcantattgggggttttcggntcaaggttcagggttcgntgttccnagggaaggattcagagttgattcccgcaggtccccgaggccccagcattgggcaacggcgggcgagt

SEQ ID NO: 437340 - DNA, 1168 bp, Homo Sapiens
  misc_feature (682)..(709): n is a, c, g, or t
aatttaaaaagacaaaaagcagatgtaaccattataatgtgcataaatagtcataaaattgtctttaacagtctaccatacaagtgtactctgcaaataaaatgaattttactttaaaaactaaaggctgtttattatttggcctttggttccaatgcttgaaaaccccaaaataacaaaactcatctcccttcctcccacctcccaaaaagaaccctgcagctccccaaagttggtagactttggcaaccactgagcacatgacactatgtatcagcttcttctgatactaggagcttccacttctcatgagtaaataaaagtggtctccaagaaaccttccttcacaagacatgtcttagcatttcatcagttttagtatattttatattgacacaaaaagtgcttatcagttcaaatgataaaaaataaagacaaattaaaattttgcattaaaatttaaaattataccatattcctcttcggcatgtgcctttccaggaattcttgtttctgaggtcactcattttactcccggggactaagcgaccccacctttagtgaggccacaagctgtttggcatctattggtcactataccacaattatcattctacagtcagtttactgtcattacctagacaacctggtaactggaagccacaatacatttgtttttttnnnnnnnnnnnnnnnnnnnnnnnnnnnntagtatatctcaacaataaaactggcacaagaaacatttctatcagaaaggcaagttgatactcagctttctccttaacagtgttcagacctttacgaaagcaattcaagaaagtcttcaaagagtcttgacacaacataggatattaagttatccccagtactacattagtggtcagtcaaatctggtatgtaaaagtaatgacattagggaagttatgcttagacacagtacaacaaacattcatataaaaaaagtaaactccacatggtgaactgtggttttttcccttggtttgacaacattttatacattaaattcatggtagtgtttgcatttaaatgctgtcatatataaaattaaaagtgcaatttcaaatccacagaaatcatttccagaatggtggtataacatgacaatgtgcatgaatttgccctaggtggggagacacctgaaact

SEQ ID NO: 437341 - DNA, 411 bp, Homo Sapiens
  misc_feature (360)..(360): n is a, c, g, or t
cgggagtaacaggattctattttttttcaactttggtataaaatttttcctaaatattaaagcattaacatttaaaaattctgagggatattgatgagaactatgatgaaagattcacaatatttcacttttaaaacataaaaaactactcttcatatcctagcctgatgacttaaaagttaccggcagagtatcataaaaataaacctaacactcaaaatgggttttaaatatcataaaggctaaacattatgattctaccaaggggaaaacactaagaatatgagcagaaataacatttcacaatttctgtttgaagctttcaaaataatacactagtaattgattcccttctatttnggctacattttgagtaatagaacagaagcattgaacaaaatgggtgctttt

SEQ ID NO: 437342 - DNA, 777 bp, Homo Sapiens
tcagagagccttgctgatgattttacaatccaattgtcagatgggaaacataagatacttaaaaccatttcagtagaggtcatccctgttaatgatgaaaaaccaatgctgagcaagaaggctgaaattgcaatgaatatgggtgaaactcgtattatttccagtgctattctttcagccatagatgaagactcacccagggagaagatttactatgtatttgaaaggcttccccaaaatgggcaacttcagcttaagatagggagggactgggttcctctctcccctggcatgaaatgcactcaggaggaagtggatctgaacttgctgagatacacacacaccggggcaatggattcccagaatcaagatagcttcaccttctacctttgggatggcaacaacaggtcccctgctcttgactgtcaaatcaccatcaaggacatggaaaaaggtgatattgtcatccttacaaaaccactcgtggtgtctaaaggtgatagaggtttcttaacaaccaccacgctcctggctgtggacggaacaggcaagcctgaggaactgctctatgtcatcacctcccctccgcgatatggccagatcgaatatgttcactatcctggagttcccattacaaacttcagccaaatggatgtagtggggcagacagtttgctatgtacacaagagcaaggtgactgtctccagtgacagattcaggtgagccccatggaaacttttcaaaccccttctttggattaatacttacagaaaagga

SEQ ID NO: 437343 - DNA, 623 bp, Homo Sapiens
  misc_feature (555)..(555): n is a, c, g, or t
  misc_feature (593)..(593): n is a, c, g, or t
  misc_feature (608)..(608): n is a, c, g, or t
gcccaactgagtctttctgtggacttacatggaacttcttattctcttaaatcattaagttacttgacaatattcttggatttggagaaactggatgtagggccgtatgaaaaaatcattcgaaatcagatttaggggtataaggttggataggaatgttttagaaagaagaatgtaaggcagataactaatttgtcacatccaaagtataaaactgctactttttccctagaaaagggaagctcattttaggcagcctaaaccagtaagattttcttcctcctccaagtgcagatttttgtacctttcgtttgtcaaaacattctttggccctatgcatgccagagtgatatagaaaggaagttaccacatttttttgagaacaaatcactcctgataaaatttcttagacaattgataatcattttaagaagaaatttaattgtatttagctctgtgtctcgcccctttggtgtcactcttctacctcttccatcactatagctaaatatttaggaagtatatcttggacacctaggcacaaatgttttgggntaaggtatcttaaaaactggatgggatgggtatgggcntgggggccagccatnggcttcacggcccgt

SEQ ID NO: 437344 - DNA, 1113 bp, Homo Sapiens
  misc_feature (451)..(461): n is a, c, g, or t
  misc_feature (517)..(517): n is a, c, g, or t
  misc_feature (520)..(587): n is a, c, g, or t
  misc_feature (589)..(594): n is a, c, g, or t
  misc_feature (597)..(604): n is a, c, g, or t
  misc_feature (606)..(606): n is a, c, g, or t
  misc_feature (608)..(610): n is a, c, g, or t
  misc_feature (612)..(614): n is a, c, g, or t
atcatcgagcgccacggcgtggtcgtattatcaccccggctctgttcgatgcggcggcgccgctgtgccggagagaggcttagcccccgcacttcggaagggcggacacctttgtcgagggaggggtggtcgaccccacggcatcacgagggggtggcatggaggcccgtgccgcggcccataagtactccacagggcggagccaggggggggcggcgccggccgctttcaaaagttccccatagacgccccgcgccaaggcgagggtgggttttgttataaacaccgcccacgtccctcactgcgggtgttttttctcgggggggaagacccccacgacggtccttttggggtgggtttctctcggggccgatctccccccccagtgtttttttcaaccggtaggccccgggcccgggagaacaaggggcttaataagctcttttgcgcnnnnnnnnnnncgttcggaaattttttcttcggggctgcggggggggcgacggagggggtcggcgcnccnnnnnnnnnnnnnnnnnnnnnnnnnnnnnnnnnnnnnnnnnnnnnnnnnnnnnnnnnnnnnnnnnnnncnnnnnncgnnnnnnnncncnnncnnntaaaaatatgtttatctttaatgatccaagattctgcaagacacactgatatacccagaattgggtggaaatacagcatctcagcagtgctactgccagcctgggggtggggagctggatgctggctgaaggacccccatggtgaagtcgattccaacctcacgggagcctcagtgccctatctccatggaaaccagcctggcactgggatggggccctagggagcctgcatgaacatctctgagaggtatttcccattaaaaacaaccacaggtgcccacccccaccccaagctactgcccagctccccctcctctctgtgttgtcggccaagataaaggaaatgggagtgaccacttaacgacaaacaaaagcagattgtacctcctattagggaagaaaaaggaagggaaagggtagtaagggagctgcacttcaagctcagaattctgccaagaccctagagcggctatggcagacagcggtgcatgactgccag

SEQ ID NO: 437345 - DNA, 1029 bp, Homo Sapiens
  misc_feature (426)..(426): n is a, c, g, or t
gtttaaagggttttggggggaggcgcaatggggttttggaaaagggtttctttgccccttagggattttacccctttggggccaggcaggttttttattggggggccttagaactgttatttttgggaaccccttaggggggtgttccatggttttctgactaattataggaaccctccaaaggtttgagtttaagcacgttttataaaaaattggaggtgccactttttaagggggaggtttgttttaaacacttcttggagtcattttaggtgggacaaaccaaataaaatggtgctaaaggcaaacattcaatatgcttcgttttaagctaaaaaattaacatataaaatgccatgcacagcagacaccattcttttttttacatatttacaattttacatatttacttatcaatataatttncctatctttacaattataaaattattcccaaactgtggaagagtggtaccatttaattttccttgaacatacactttgtagcattcatttgtttaatccctttaaaaggcaattatttacccaaaaccacagtgaatcccagaggaagcacataggaaaatcatggagggaaaaaagattgagacaaaatttgcacacaagccttaaatgaatctgtatcagtaactcaaataagtagtattttattattaactaaggttcccctgctaggaaaaacgaaacaatccccatatactgtacctttaaaaaatgctctgacatttataagcaatttagttacattctagatcccaatcagttgagtgtagtaagggctacctacaatttaggctcaaataaatactctccactaaattgtgatcatcctgcataaacttgaggttgcagtggtggaggaagtttatcattttcaacgttttcagagtcaatagctgctaacggttgattcggaggcttaatttccagtgggtatttctcaacgatgtcttgaacttctcttgcaattccatctgtccaatctatgatcccgggaattccggaccg

SEQ ID NO: 437346 - DNA, 976 bp, Homo Sapiens
  misc_feature (275)..(275): n is a, c, g, or t
  misc_feature (562)..(562): n is a, c, g, or t
  misc_feature (572)..(572): n is a, c, g, or t
  misc_feature (574)..(575): n is a, c, g, or t
  misc_feature (581)..(581): n is a, c, g, or t
  misc_feature (625)..(625): n is a, c, g, or t
  misc_feature (627)..(627): n is a, c, g, or t
  misc_feature (742)..(775): n is a, c, g, or t
taaaaaaatgaagttattcacccttggtggtggttatgtttcagaagtcaaatggtggatggcatttgtactccacttagtgtttcccttgatgtgtggatatgcagaaggttttgaaagtttgatatagtaccttttctaattcccttcttgttgttcctgcttttaatgtgatattcgaaaaacctgccaaaaccaatgttactaggcttctccctatattttcttctaagtgttcaagagttatatgtcttttaattttatgtttttatgtntagtgtgtgtaaagtattttgtttgcattgaagagaaaggtccaagttcgttatctttcatttagacgttgagttttctcacaccattggttggggagtctgaccttttcttcactgtttggtcatggtaacctagtaaaagattatatgataatacttgcacaggtttatttctgggttctttgttctgtcatgtatctttttttcactttatgccattaccacattggttttatttttgtagctttggactcttttgacatcatgaggtatggtactttgttctnttccaaagcngnnggccantcatggtaccttgagattacacatgaattttagaattatataananatctctgccaaataagtaacattggaattttaataaggatgacattgaatttgtacaatactcagaaatattgacagtttaacagtattacatctcctggctgagaaacatgtannnnnnnnnnnnnnnnnnnnnnnnnnnnnnnnnngattggcatcagagatagtgctgagatgcaagacaaagagttcaaagtgtttccttggcctgtctctggtctcctgcacaactcttaacatacagaaggtaggctaaccacttgatcctcaactggtttatcttcttagatgtatcattgtcaagttggtaggaaaataaaaattcctttcacaagttgaacacaattgtc

SEQ ID NO: 437347 - DNA, 1083 bp, Homo Sapiens
  misc_feature (18)..(18): n is a, c, g, or t
  misc_feature (72)..(73): n is a, c, g, or t
  misc_feature (151)..(151): n is a, c, g, or t
tggccagaccagtcaaancccacaggttttctgggtagctgacgaagtagcaggtttcccagtattgtttgnngtgttgaaactcaattttgctggtgaaaggaccagcagaggaagttttggctgcaaaagctgcccatcccagttaagnccactagttactgacgagggaaacgctggcactagaagaattttcctgaaataactgtggatgtcttgacttctgttctcttaaacgctagaaaagttgtctcttgtttcagtttagtttctggtttcttaaccaatggatctttgacagctggagttacagaaacaactgcaggggctggtttctgcggtggtttctgagttttttgagccattcttttcatttgtctggtacatcgggcacaataccacaccaggcgagggtcattcgcttccttgtctgtcacctggggtttatgacaatctcggtggtagagattatggcactcctgacattctactaattgattgccagatgccaccatcatttgcctacaaacaacgcaggccaatcccatctccatggcaaaatcatcagcactggtctcctcaaaactggaaaggtcagccataggtaaatccttgctactttggacagtaatgggagatgactgtgtttctggtttctccaatctaggtttctttggaatatcaactccttcagtgatgtctgatttcattttatcagcaggtctcttttcagcttccttctttaccttttcagttgtgaggaccttgccattattattaccagaaggaagactggatgatattttgggctcttgcttaatggaaatgttttttgtgcttgaaattttgggtggctccacatccttttgagatggacggtaactggaatcaatgccccgagccaaagattcatcaagcagtgcttttagcttttcagcagaatctttactctttgaatgcaagaaacctagtgctttcaaaaaaatgggatcaagttccaagttcacagtagcagccattgcaaacgccgttccgccccgccctgccgatccgtctgttcccggtggtcccttcggaaacccc

SEQ ID NO: 437348 - DNA, 324 bp, Homo Sapiens
  misc_feature (47)..(48): n is a, c, g, or t
  misc_feature (93)..(93): n is a, c, g, or t
  misc_feature (104)..(104): n is a, c, g, or t
aggaagactggatgatattttgggctcttgcttaatggaaatgtttnntgtgcttgaaattttgggtggctccacatccttttgagatggacngtaactggaancaatgccccgagccaaagattcatcaagcagtgcttttagcttttcagcagaatctttactctttgaatgcaagaaacctagtgctttcaaaaaaatgggatcaagttccaagttcacagtagcagccattgcaaacgcattctatcttcagaatcaccattctcagcttggcgttcagtacaacttggcaattctctcatccttctctggtcaactcac

SEQ ID NO: 437349 - DNA, 1731 bp, Homo Sapiens
  misc_feature (1244)..(1244): n is a, c, g, or t
ttcaggaatataggtttatttcattaaaaaataaaacaaaacaaaccagactcatcccccaaagagtactttatcctttaaagcagcagcaatcacaaggcacatatgtacaaaatacctcaagcaaaatagaaactgaacattcaaaaagtatgtgttgtttaaaaagatgttgaagaccatttgagtaataagcacaggttataaaaatcacaattttattcttctacctttaacaagagaaggaatgatggcataatatttatatgctatattgtggcacgtataacaaacctttacaccacataacctggtttgctaaagaaaaaacaggtaaagtactgcttaaaaatggtatttttagtgctttcacatcttttgtagatatctggaatttgtaagatgaaaagaaaaattctctttttccttggcttagtaaaagcctgtagttacacgtccctaggcaaacccaccatacaaaaaaggaatacatttgagatattctaaaatataaaggatatgatttatattatgggatcaacataataaccaactctcttcctaaaacagattagaggtgaacacataagaaatgtaaagaaaggttaattacattaaaataaaatagcttctgatttaaattattgctcacttaggaagtataatgaatattctctggctaaggatgctcagattagaaatggtgtgacatcaatatttagtgtgtacaaaagttctaagattcaaatacaatgcaaagtttataataatcacacaaaaagtgttccttttagccaccatttagcttcacacaacgaagactggaaaatacgtggtttatttagatcttcaatataaatttgtaccacatatgttgaagtgttcctcttagctttaatgttgcagtcatttttctatgaaatactaaggagttaaggagtgcttactgaaccattactattagagggagggaagagacactgaagctccagttttaaacgacaacaaaagaatataaaatactagtataagaaaacatttaaatagtactaaatgcacaatttaaacatcagttatacactgtcattagttttcctcttaaaaaaatcagttcctgggcttttagatgtgttttctttttaaaaaaaataagcatccttctcatggtcacacaattggtccatactgacaccatttggtaacaatcctatcaaagatccacatgttcttgctctctttcgagncactccatggccagcgggagtcttgagtcctctctgcgtgttgtgtggcaggaggccatggtcccgggactctgcctagagcaggacggcctgggctacctccttgatggtggacgcagctctctccagttcttcctctgtttgttccaccgtgaccacaacccgaatgctgggaggagggagacacttctcttctttctccaagtagcgcgcctgagttaatgcaatacttctgttcatgcattgatctacaatttcctgaagcagtctgacatcttgctcgcgagacccagtgctctcttccagttgtaggtgaaaggctggagaaagggactcccccaccacttttaatccagaaatgccttgtaaagctttatgaatttgtccgcacttttccttcaacactgcaaaaatacctggattctcttccatgatgttgagggcctcaattgctgcagcagctaacaggggaggtaacgaagctgaa

SEQ ID NO: 437350 - DNA, 406 bp, Homo Sapiens
  misc_feature (178)..(215): n is a, c, g, or t
gtggtcttttgtttttgttttaacctttgcaaacacgatggtgatgaggaatgccttgccaggctctcccagacacatctgtggttctgggctgtgaatgttaaacacacactgggatagacgaccagggatgagtgttccctatcttctccccgcccaccactgtcaatgtggcctnnnnnnnnnnnnnnnnnnnnnnnnnnnnnnnnnnnnnncattgagtttccctgcatttagctgaaacaggatctcgtctgaagggctggaggagcagccggatcagcactgcctcccggcccacggccgagcctccgctcaggctggcagccccagctctgcacgaggaaggcaatgttctgtccttcagcagaagtcatacaaaataaggatccaaagtgaactcaag

SEQ ID NO: 437351 - DNA, 1063 bp, Homo Sapiens
  misc_feature (963)..(1004): n is a, c, g, or t
  misc_feature (1012)..(1012): n is a, c, g, or t
  misc_feature (1015)..(1015): n is a, c, g, or t
  misc_feature (1032)..(1032): n is a, c, g, or t
  misc_feature (1035)..(1035): n is a, c, g, or t
  misc_feature (1040)..(1040): n is a, c, g, or t
  misc_feature (1042)..(1042): n is a, c, g, or t
  misc_feature (1047)..(1047): n is a, c, g, or t
  misc_feature (1059)..(1059): n is a, c, g, or t
ttttagacagaattgacaagagaaatttattactaaaaataaagcagctgaaggttttcccagggaaaaccatcaccacaggaccttccatgatgaaatacgttagtatcttctttacttctgaattgctgccttctttcatatacccaaaattttagtttaagttaaattaatcacgacaaaaacgatgtggcatctgatcccttcttgttcaatctgaagactgaattgggctaccctgtgatggagacttcaagtgctgcaggtgagtatctaccaagggttcatgtgtcaggtacatgggctggtaagaagacacaaaggctgcaggctgaagctctgggaggtccaaggatcctggcagaaggggatcattctgatcttcatcaaagatctgtctctgaaaggcttcaaagctcatagctgcatcattctccggcagcccctcaggtagctgcccatctccaggtttgcacacatcaaatttcacccactggtaattgatgcattttcgagctcctggacagctctggatcaggttgtggatggctggatgagaaaatccaaaaaagtcagctccagctggaagcaggttaggcattagtttccccatagtagtgcttatagtcctgagcagttctgcatgacaagcatctgcagaagagctgacaatggcattctgggggtcatcttcaggaacaatttcaaactgaggctgcacaccaccatccttgatctgacaggtatatagacacttctggtctgggcacttcatgctggcatatattcgagttctgcaatagcccacggggtagatggcactctcatcatgaaagccaggtcggtcggtgatgatctataaaaaacattcccccaacctgggattgaggtcactgaagaatttagaagtccagtttcctgtggtagcctttagaaccactttgggggcttccagtttgttgnnnnnnnnnnnnnnnnnnnnnnnnnnnnnnnnnnnnnnnnnnccaatggntcncagccccagtgctgggnccngaaanangccanctccctgtatanttcc

SEQ ID NO: 437352 - DNA, 1388 bp, Homo Sapiens
  misc_feature (1058)..(1093): n is a, c, g, or t
ctcaatcaatccacccaccacagcctcccgagtagttgaggaccacaggtgtcgcaccaccacacctagctaatttgtaaaaaatttgtagtgatggggtcttgctatatagcccaggctgggtcccaaactcctgcctcagccattttttgtttttaatataagcaaattatctcctccatccctccctggggcaggagacagctaaggtggggaaggctccccagaggggtgcagagctgggtgagggagaggcacctgggagaaggcgcttcccagcctgggctgaaggccgttttttctctatcagctcaacccactcctaagaagcagattcccctcaggtgacagcagcgtgggtgggtggagcgaggacaccaggcctcgtccctgcccggaagcaggcgaaaggggccccgaaggcctgcctcggccctgtgtcccccgacctgctcagggttgtacccgaagagctgggaagctgtccacactcactaccaaccagaagggcctgggggcctccctcatcctgagccatgggaggtgcaggggtgctttgtctgcaaggaagcctctggaacacctgcgtttctctcgggtgagagaaacaaagatagacaaacccccaggagagagtttattctgcaaaggtgggcgcagacggagggaggccccagacccccgggcttcccctggccaggtgcacaggggcggccaccagagagcctgggcctcctcccagcaggcacagagtgggcacaggcactggcaccagaccatcaaagcccaggagccggggtgaggcgagagcgaggccgtgagtgaccgggctgtgccgaaacccggggcgtcctgccccccccccgaggctcaccctccaattaccgggtctctttccctgcctggtctgtagccaaatcataatattttaaaacaacaacaaaaaaacagcgagatgctctgacctctcagagaatcctggttctgagaaaaacaatgtgtttgttttgttttgtttttcttaaagccacaaatctagaaaacaactttggggatannnnnnnnnnnnnnnnnnnnnnnnnnnnnnnnnnnnaaacaatatgtatttatagaaagagcctcacaaaggttggtttatgtacagaagtgacaatctcaaaggttgctcagtagggcattgcagtagcaccttttcgagaagaagagagcttacatggtttaaaattctgagtagttgagtggggtgctcccctggccggcccccgagcccgcctggccctgctccctgagtctggggccgcgtgcggcgtcccgctggctcctgtcgccctagggggcacccgcggcttggaggtggcctctcgggggtcggggacacgaggacagga

SEQ ID NO: 437353 - DNA, 1049 bp, Homo Sapiens
  misc_feature (541)..(541): n is a, c, g, or t
  misc_feature (543)..(555): n is a, c, g, or t
  misc_feature (570)..(630): n is a, c, g, or t
  misc_feature (677)..(677): n is a, c, g, or t
  misc_feature (686)..(686): n is a, c, g, or t
  misc_feature (723)..(723): n is a, c, g, or t
  misc_feature (726)..(726): n is a, c, g, or t
  misc_feature (728)..(732): n is a, c, g, or t
  misc_feature (734)..(736): n is a, c, g, or t
  misc_feature (738)..(741): n is a, c, g, or t
  misc_feature (745)..(747): n is a, c, g, or t
  misc_feature (751)..(754): n is a, c, g, or t
  misc_feature (760)..(760): n is a, c, g, or t
  misc_feature (762)..(762): n is a, c, g, or t
  misc_feature (764)..(765): n is a, c, g, or t
  misc_feature (768)..(769): n is a, c, g, or t
  misc_feature (777)..(779): n is a, c, g, or t
  misc_feature (785)..(785): n is a, c, g, or t
  misc_feature (796)..(797): n is a, c, g, or t
  misc_feature (807)..(808): n is a, c, g, or t
  misc_feature (850)..(850): n is a, c, g, or t
  misc_feature (855)..(856): n is a, c, g, or t
  misc_feature (872)..(872): n is a, c, g, or t
  misc_feature (942)..(942): n is a, c, g, or t
  misc_feature (973)..(973): n is a, c, g, or t
  misc_feature (975)..(975): n is a, c, g, or t
  misc_feature (995)..(995): n is a, c, g, or t
  misc_feature (1002)..(1002): n is a, c, g, or t
  misc_feature (1014)..(1014): n is a, c, g, or t
  misc_feature (1016)..(1018): n is a, c, g, or t
  misc_feature (1023)..(1023): n is a, c, g, or t
tttttttcgcagcgttcatgaacctttaattcattatgaacctagaggcagggacattaggcaaaaaatacagcgtatccttcatctcgggtggggaaaaaccagggcactgggttttgccgcgtctttgcacagagtaagacacagagataccttcgtggggagagtgtgcagctccggcctgcccttctgtggcccatctgcgcaggccgcccaggagcccaccaggggatgggtgtgacccccaagggacaagggcagcaggggcacccgcccgcttctttacaatataaatagcattttcaaacaacataagaatacagtgtcagcgccacgccgggcgagggctgcgtgcagagggacacctccacgttttgtctgacaccccccaacctccccgaccccggccctctccagggcaaccgcccccctcccccaccaaggaaatgaaaggcttgctcctgcgtaacactctctctgttttccttagtcctctctagcccggggactgttaggacactcttttataatataaacattncnnnnnnnnnnnnnggagacagggtctcnnnnnnnnnnnnnnnnnnnnnnnnnnnnnnnnnnnnnnnnnnnnnnnnnnnnnnnnnnnnntggactcaagcaatcctcccaccacagcttcccgagtagctgggacnacaggtgcnaaccacaacacctagctaatttgtaaaaaatttgtanccncnnnnncnnncnnnngggnnngggnnnnttttanantnntgnntcagcaannntttgtntttaatataannaaattatctnntccatccctccctggggcaggagacagctaaggtggggaagnctccnnagaaggatgcagaacnggtgagggagaggcacctggagaaggcgcttccagcctgggctgaaggcgttttttctctatcagctcanccactcctaagagcagattccctcaggtgananagcgtgggtgggtggaggangacacangcctcgtcctgncnnnaagangcgaaagggccgaagcttgctcggcc

SEQ ID NO: 437354 - DNA, 224 bp, Homo Sapiens
ggcagcgttcatgaacctttaattcattatgaacctagaggcagggacattaggcaaaaaatacagcgtatccttcatctcgggtggggaaaaaccagggcactgggttttgccgcgtctttgcacagagtaagacacagagataccttcgtggggagagtgtgcagctccggcctgcccttctgtcgtcttctcgcagccgtatagtagtagtaggcggccgc

SEQ ID NO: 437355 - DNA, 219 bp, Homo Sapiens
ccagttctctagtatctttattatccattcccgggggcactcctggctgcccaactcaggggtgcagatgtctccctgcaccatgccaggtgtggtgcagaatgggaggcagggggatggagcagagagaggcctggactgcctgtggcctttgtcgagtcactgcccttctgtcgtcttctcgcagccgtatagtagtagtaggtagtaggcggccgc

SEQ ID NO: 437356 - DNA, 1548 bp, Homo Sapiens
  misc_feature (55)..(64): n is a, c, g, or t
gaggcgagagcgaggccgtgagtgaccgggctgtgccgaaaccggggcgtcctgnnnnnnnnnngaggctcaccctccaattaccgggtctctttccctgcctggtctgtagccaaatcataatattttaaaacaacaacaaaaaaacagcgagatgctctgacctctcagagaatcctggttctgagaaaaacaatgtgtttgttttgttttgtttttcttaaagccacaaatctagaaaacaactttggggatattttcctttgttttcctgtgtttcttgctattttgtttaaacaatatgtatttatagaaagagcctcacaaaggtggtttatgtacagaagtgacaatctcaaaggttgctcagtagggcattgcagtagcaccttttcgagaagaagagagcttacatggtttaaaattctgagtagttgagtggggtgctcccctggccggcccccgagcccgcctggccctgctccctgagtctggggccgcgtgcggcgtcccgctggctcctgtcgccctagggggcacccgcggcttggaggtggcctctcggggtcgggggacacgaggacaggaattcacagcaagcgaacgcccggggcatgccatggcctccccgccgggctgagggtcgcctgagcggccagctgtcctagaagggggctccgggccggccctgcacctgcaggaggctctccacgaaggccacgtagtcctggctccgcccggagtcctccgtggcaagcggggtgcccacacgcgggcgcttggcggccttggcctcctcccccgagaaggcgggctcctgcggtgcccccgtgctcagtgacaccgagacggaccctcttggcagctcctcctccagggtgaagatgtccccacgcttcaccgtcagctgggacccgtcctcaaactccacctggtagatgtggctggtgacggaggagatgaacttggccttgtagaggttgccgtcagtccaccggagctccaccagctccccctcggaagggggtcccagctggacacagtccctactcgtgatgctctcagggtacaggttgtcgctgtaggagccatcgtcgaagttcacttcgtagcaggtctgcgaggcggcaccgatgacgcgacagcggtagtacagcccgttgcggttcttggtgatgaccacctggcctagggacacggccctcaggagttggacagcgtgaccccccgacttgtgcttgaggcaggtgatggagaccacatagggccagtcgtccggctccatgagcacgcctgcggcgtgggcgcaggtcacgtggaaggacgtggagcagtgctcgtaggagcactggatacaggcacctgacaccttcttcatccgcttccggcagtacacgcatttcagcttccaccgctgctcggggatggcgctgatgtccacagggtggcgctcaatcacgttcaggaagcgcgcctcggggactgcgatggcacagatcacgtggatccacctcccctcgtgccgaattcgccacccaggcctcgctc

SEQ ID NO: 437357 - DNA, 232 bp, Homo Sapiens
tacttgaccgagctcatcgacaggtacaagagatggaaggccgagcagggccaggcgggctcgggggccggccaggggagcaccccactcaactactcagaattttaaaccatgtaagctctcttcttctcgaaaaggtgctactgcaatgccctactgagcaacctttgagattgtcacttctgtacataaaccacctttgtgaggctctttctataaatacatattgttt

SEQ ID NO: 437358 - DNA, 476 bp, Homo Sapiens
  misc_feature (139)..(148): n is a, c, g, or t
  misc_feature (238)..(238): n is a, c, g, or t
  misc_feature (428)..(428): n is a, c, g, or t
  misc_feature (436)..(436): n is a, c, g, or t
  misc_feature (450)..(450): n is a, c, g, or t
gcactggaataatttttatttttttccttggcaaaaagtcaagtgctacatttttaaaaacagaaaatctcaaacaatcaaacgcattacccattacagaagagggtctagcaatagtacaaaacatcctactgaagannnnnnnnnnaaatatacaagtcagtttaaaatgatagaagttctgtgagaactaagaaatctacagcctgtagtttaataataggaaaaaaatttaagnacaattaaaaggatctataggcatccaggcattttgcttaattccctgtttataggcacctatttctctagggttcgaaggatgaggatttccaggaacctgtgggtatgtggctgtgttaacaggttaggggtgggacttgctggtctctcctctccagtaggccccccaccatttaaaggggggattntatatatnatttgttttttccnttttcccttctttacacccggggtgg

SEQ ID NO: 437359 - DNA, 460 bp, Homo Sapiens
ttaaacacattatacaaactacacgacataaaggatataaagaaagaaaataatcagaaataagttaattcagatgtacatattcagaaaacaatattgaagttaaagaatatgcgacttaaaaatcaatacagcgtccttttcgttcccaatctccatatcgggtaggttctgggcccctgggtccacctttttctttggtcactggattaacatcatctggaaatttttccagtggttctttctctaaatgggaatcctctggtgcatcaaaacgaccttctggtaacttcggcttcttaagggactgtttgacaagttcagactttcctccttgagaagaacttgttttcctcagagaatgacacagaaggggtgatcttgccgctctccacgccgtggccgagacccagctaagcaaccagggaagcctcgatggggtcatggcgccgactccccc

SEQ ID NO: 437360 - DNA, 1068 bp, Homo Sapiens
  misc_feature (129)..(129): n is a, c, g, or t
  misc_feature (151)..(151): n is a, c, g, or t
  misc_feature (179)..(179): n is a, c, g, or t
  misc_feature (497)..(564): n is a, c, g, or t
gctgtgtgcccagcgtgaagttttttcagggggacggccaacgggtccatttgggatttgaaggacctcccgcttccggggggaagcgtccgggccctttttatgcctatggggatttatcctcggctncctacttttactttctaataantacgccctttcaggaagccccattatanccagctagaatgtgcatctgagctcccgccctctgtccctaatcctggtctttttttcttcttgcctccctcctgctgagggacttgtgctcgtgcttgggtttctccttcttcagctccctctctaggtcttctgctccaccagagtaggccgtcctggatttggggagcttctgcccctccctgggctctgacttctgagctctctctgagttcttgctgctgtgcttctcagggccagtgtcatccttttcctttactgtcttgcgtctgggtgacgaagaggatggttgctctgcctgtacctcccggtcggcnnnnnnnnnnnnnnnnnnnnnnnnnnnnnnnnnnnnnnnnnnnnnnnnnnnnnnnnnnnnnnnnnnnncatcttcagagctctcagacaaacttggtgagggggtacgagccccacagcccttctcctggagttgtctggtcacatcatctatttcttctgagtccttaggagcccgatagttagacacatgatccactcggatagttcttcctttgatcttgatcccattaaaattgtcgacggccagaattgtgctcctctggtcttcatagcagaggaaacagaatcctttggatttcccagttttcttgtcccgcacgagattaatgttaacaatctccccatattgtgagaacacacagatgatgtccccttcagtcagttcataaggaagccctcccaggaagatccaggcgctgtccttgtactcggagtgccaggacaccttatcggccaccccaagctggacctctcgttcattcagctcgttgatcagcttcaccttagttaaagggttcatctcctcgggttcgcgctcagcactcaggaatcagcgcccgggaaaagccc

SEQ ID NO: 437361 - DNA, 822 bp, Homo Sapiens
  misc_feature (707)..(774): n is a, c, g, or t
ctgggtctatgggttcaagagccatattatgaccaaagttcaggatacatacctctggtacagggacaatggatggtgcacacaatatccaggatatctagctgttgaaactgcagccctcccaatgactctaaatagtcaagggattaaaagaatccagccccagaagttttagatacaaaaatagtaaccacccaactgaatttgactgcatttaaaaaacataattatttccaaatctactgtgcagctgaagtcttcagtgacgccaacggtcactgggattcgaagactcccgctcccgggagcgtcgggcccttttatgcctatgggatttatctcggctcctacttctacttctataactacgcccttcagaacgcccattataccagctagaatgtgcatctgagctccgccctctgtccctaatcctggtcttttcttctcttgcctccctcctgcttgaggacttgtgctcgtgcttgggtttctccttcttcagctccctctctaggtcctctgctccaccagagtaggccgtcctggattttgggagcttctgcccctccctgggctctgacttctgagctctctctgagttcttgctgctgtgcttcttagggccagtgtcatccttttcctttactgtcttgcgtctgggtgacgaagaggatggttgctctgcctgtacctcccggtcggcnnnnnnnnnnnnnnnnnnnnnnnnnnnnnnnnnnnnnnnnnnnnnnnnnnnnnnnnnnnnnnnnnnnncatcttcagagctctcagacaaacttggtgagggggtacaagcccgct

SEQ ID NO: 437362 - DNA, 801 bp, Homo Sapiens
ctaccagtatgagctgccaacaccctctcccatgaaatgctgctgctaacacctcagcagaatgaagaatatacaggtctcctattcattcttgttcccttcgggctgtgattctcagcctccaggcagagattgcctttgctcactaaccttacactcatcgagaaacaaagaaagcaaactacgaccttctgttttttaccccaatttcctctgtgctttgccccaatcgtatgacgccacacaggtaagggccagaagggccctgtgaccatgggttacccctagtttgcaagagcccaaggagtccagtctgttccagtctaggcccaggctgaacaagcctcagtgaaaaacaacagaaatagactaggatccccaagatgccctcccaaattaacaaacctcttggatctcccacagaacattctagaaccatgtcctgggactgatctagaacagaagctccagccctccccatgcagggatgccattcagcctagagtgaaaataagtggtttttgtgatgccacaaaatgtattacagaaacaaagtactctgtcgactcaggaggcaggaaatgaaaggacacttactgtgagaacacacagatgatgtccccttcagtcagttcataaggaagccctcccaggaagatccaggcgctgtccttgtactcggagtgccaggacaccttatcggccaccccaagctggacctctcgttcattcagctcgttgatcagcttcaccttagttaaagggttcatctcctcgggttcgcgctcagcactcaggaaa

SEQ ID NO: 437363 - DNA, 510 bp, Homo Sapiens
  misc_feature (184)..(207): n is a, c, g, or t
  misc_feature (474)..(474): n is a, c, g, or t
tttttccattaagttgtaggaatttattttaaataacctacagttgattaaaagggaattcatgataaaaatagaagatacttgaggaaagatgtgggaaatggactctgcacacacactaaactaacaatgcctctaaaactaatgattatagcaaaaaatgtcttcacattaaaattctgcnnnnnnnnnnnnnnnnnnnnnnnnacacaattacaaaagaaaaaataaaagccctaaaatcttgattatttttcctttttttggaccaaatactcattttcctctaagtttattgacctgtgaaactttttatacaataaaatctttcaagtgaaagattagggttaaaaagaaaaagatggatatcttaaagggtacagcgaatgctcagaacaaaggatgatgggaaaatggtttcagtcactgattatttcattatccttagattcactcgcccttcatccctccccnaccccaatctacacgatctttaagatcaagaaaaag

SEQ ID NO: 437364 - DNA, 1134 bp, Homo Sapiens
  misc_feature (697)..(697): n is a, c, g, or t
  misc_feature (716)..(742): n is a, c, g, or t
ttttgccttagacacagaagctttatttttctataaaattattcccgagagaaattttcttttaaatgcccaaagtaaataacttatatcccttcttgaaaacatccccaaagatagtctgtcagaaatccttcggtcaagcaggtcagctggctcccatggcccttggggtggcctgactctgtcactattcctaaaaccttctaggacatctgctccaggaagaactttcaacaccaaaattcatctcaattttacagatgggaaaagtgattctgagaccagaccagggtcaggccaaggtcatccagcatcagtggctgggctgagactgggcccagggaaccctgtctgctcctctttttcccagagctgtgagttctctagccaaggctgcactcttgagggagagccaggaagcatagctgaggccatgacaacctcactcttcacctgaaaatttaacccgtggcagaggatccaggcacatataggcttcggagccaaacaggcctaaagaaatagttgacacacttcctcccccaggtcatctcccctggagtcaagggtctgccaaggctaagtgcaaggagacacttctgttttgaaataaagaagttccacatgcctttgctttgagtctgtgtgatatcaatctgcttggcaactgagattcttttcttgctgcgcagacgtnccttgtgtgtctttatttnnnnnnnnnnnnnnnnnnnnnnnnnnntttgctgggataggcaaagtcttttgggacacgaggtcctcaaaggtggtggaagatgaacaaaaccatcctcggggctgaaaagtgagggcttctgaactatgcaattgcagagggactttctttccaagtacggcattcccgatataccagaaaggggtggaagaatgtcagaagaatggcaagcatgaacatcacattcacgtaaaatgggtcattctgaagggagcctttgatgagggtgaagatggggaactggagcagagacaccacagccgacaaggccatcaccagcccaaagagcttgccaaagtgctttgaagggaaagcaagggtgaggaaggccgcgttgctcccatagaggaaggagcggctgatcacttgcaggatcc

SEQ ID NO: 437365 - DNA, 662 bp, Homo Sapiens
  misc_feature (475)..(475): n is a, c, g, or t
ttttttttctatacaacgtttttaatgaataagatatcattaagaatttatattctaaacaaacaatttaaataaattttggtatttactaacttaagtattcaagaacctggtttgaagagtccaacagactgaaagtctgcttttcaagagaactatgatcgtctatcaatggagagattttcgtatttctatattctaatagttcacgatccttgcttgatgtcagtaattcattatcgactataccaatagttgcatcttccaccagaatatttgcttgatatgctccaatcggaatttcaggcaatccaatgtaggtcatgatctgccactactgaaccttgcaaggggataaaggactttcttgttcactgggattctcttatgtaggggcttaaggtggggacattttggataggtcttttcagtctaaccccagtgttgtctctcaggggcagcacatccactttcntgtaatatagtctatggcacaagggcccacccattcaggcttgaaaacggccatccttccacccatttttcctttgtcttaaaacttcatgacccacttttaaatgaaatggatttaattgtttgggtttctttttaacaatgatcttgcttttatttagttcatccaaattgttgttctccatctg

SEQ ID NO: 437366 - DNA, 635 bp, Homo Sapiens
caagtctttgtacttctgttaacggaaggaaagtcttgagtgttaattgtccaggttcttggcgttttgaacaaaggattggacaaaatgcgtaaacaacaaaggaacgaagcagcgaaagcagaaatttgttaaagcaagaaagcactgaatagggtgggaatgggcctgagcaagtggctctagggctgagttacaaagtcttcttggttttaagtactccttttgaggtccttattggttgccccttatctggatgaaggatttggtctaatactaataaaaggctgaggtgaattggccccctgtgcagatgaagggatggtccctgcttggcccgtggcccagtccagggcactctctctttccacctgagacctggcagaagggagaggattgtagggagagtagcctttgctatgtgggcatggggagatggggttttcctttctggttcagctttaggaagttggcattaattggccttaagttccctgcccccaggtgttttcccttgattcaccatgaatgactttaatttctctgcctccagaccccatctttctgcctcagttcaaacagtcatgctgccctggatccagtgcagggttgcgttaacattgatgttcgttcaa

SEQ ID NO: 437367 - DNA, 819 bp, Homo Sapiens
gcggcattggcagggggggtgcagtccgggccattggagatggcccccacagtggcctcagagtctacaggtttggagaggtcgatgccgtggatgaggcgaatcagctgttttaccttctccagggagctgtgcatctccttctgccgggccaggatggtgttcttcatttccatgcatttacttatggaattgctgagctgtttcaccttttgctctagttgttctcgttcttgttttaaatctgaactccatttaagtaacttctgtttctcttcttcttttgctgctttgtaggcaatataggaatgaacaattgctaaagttccaggccatggaattgcttcttccttcttcagcatctggtcctgacatctgggacagatccacatgcccttgggaattgttttcagaggggggtctaagcagtccaaatgatatacacgggaacatgtgtcgcacatcagtaactggccactttttctgcaaacgctgcaaaaatcctcatgaatatcaccctttggccagtgttcctcattggctctcttccgggtcccagggtgcattgtgctgtttaggtatgtcactgcactcttcttacgctctggctcaaagactgctccactgtagaccggatttgctgttgttcttctttttcgctcttgcctcttgctttgggatttcttctagatgggtcatgtgttaccaaccctaggggacaccatggaagggcaagtttctgaggggttctcctcccgtttttgggtttggggtgcagcaggtgggggtgatggtgcggctctctgtttgtttctcaac

SEQ ID NO: 437368 - DNA, 532 bp, Homo Sapiens
tgaagctttttccacagtgggtgcactcaaaaggcttttgaccagtgtggattctctcatgtaacgttagactacctttttgccggaaggattttccacactcctggcactcatagaccctttgtctcactccaggtgaatcttcctgtagtgtcttcgaatctggggatttttgttccagcttctctcttctgaaagaattttggatatcccagcttgaggatcctgtagcctcagagtggtcatatttgtggtgggcttcagtcatcacattgaagaacgctacattctgggcatatcttccatgacagtccagcagggtagctgttggaaatccaaacatgtccactcctgcttacgacctcagtcaccacctcttcatatgattcttccatgggctgttcctgagcacctcggcatcccgctctccggtccacgggaccctgctctgcggaccgccgacctctccgctcgcggctggcctccctcggggcccgggccggccaggcctgctcatttccttggcggccgc

SEQ ID NO: 437369 - DNA, 1632 bp, Homo Sapiens
ttttttttaatcataataaacaagacatttatttttcatactcttttgggggaaaggaaaaaaatcagtttgccctacccaatgatggtctttctgaaagattctccattcattccatagaactggataggttgcttcatctcagaggattttgtactcttaattcataaagagaacttctcttcaggaaagtggtcaaagggtgagcctctgtgagcagcttcgctggtgcacagccagactccctctctgggtgaagctttttccacactggccgcacagatagggtgtctctcctgtgtggattttgccatgcagaatacaattccccctggtgtggaaactcttcctgcactgggtacaggcatagggcttcaggcctgtgtggactctgatgtgaacaattaagcttcctttctgactgaaggcttttccacactgatcacatctatagggcttctcaccactgtgaactctcctgtgaacagcaaggttactctgattcctgaagcttctctgacaaatagcacactcgtagggtttctgtccagtgtggagtctctcgtggacagcgagactacctcgttgactgaagcttttcccacactccttgcactgataaggcttctctcccgtgtgtatccgttgatgtgtaacaagattgcctttggccctgaagctttttccacagtgggtgcactcaaaaggcttttgaccagtgtggattctctcatgtaacgttagactacctttttgccggaaggattttccacactcctggcactcatagaccctttgtctcactccaggtgaatcttcctgtagtgtcttcgaatctggggatttttgttccagcttctctcttctgaaagaattttggatatcccagcttgaggatcctgtagcctcagagtggtcatatttgtggtgggcttcagtcatcacattgaagaacgctacattctgggcatatcttccatgacagtccagcagggtagctgttggaaatccaaacatgtccactcctgcttacgacctcagtcaccacctcttcatatgattcttccatgggctgttcctgagcaccgcagcggcgcgtgcccgcagacaaaggccggcgccgagcccgcagcagcgccagcgccggcgccggcggaatggactacaactcccaggagtctccccgcgagcccgcccgccgggccgtgggtctcggcggccccggcttcccaagagctctgtgggaaatgtagttctctggcgcgccctgcgctcgggccccgcaggtccctagggcgcggggacctcaagccgtcccgtttggactggtaatccggagactcacagcggtgacctgtcagcggacgcggagccgggacggagccacggccgctcagattagcaggatctgattgacagcatcggggtagcagacgctgagccagggactcaggaatacagggttcttgcagggcgtcgcggaaggaaacgaagtttttgggagaaatccgtttgataaagccttggcggcttcgaggtcatgtgttgagcctctggctgcatgaacaaagcgaagcccgctttcatggagcttctgtgaagagcaacaggaaccaggcagtccagtcgtcc

SEQ ID NO: 437370 - DNA, 500 bp, Homo Sapiens
actcctgggcacttcataagacccttttgtctcacttccaggtgaatcttcctgtagtgtctccgaatcctggggatttttgttcccagcttctctcttctgaaagaattttggatatcccagcttgaggatcctgtagcctcagagtggtcatatttgtggtgggcttcagtcatcacatcaaagcaaggtctcctctgcttcctcagactgccgaccagtgctgagaacagggacactgaatatctgtgagctgagcgcatccagccatcaactgactcactcactgaagaacgctacattctgggcatatcttccatgacagtccagcagggtagctgttggaaatccaaacatgtccactcctgcttacgacctcagtcaccacctcttcatatgattcttccatgggctgttcctgagcacctgagggagaaaaacaaacagaaacaaacaggaaagggcagaataattgatatgtgagaaggaaaaagtcaact

SEQ ID NO: 437371 - DNA, 631 bp, Homo Sapiens
  misc_feature (43)..(43): n is a, c, g, or t
gagggcggcccaccacgtttgtgtttttgttaaggccctgtgnttttgtataaagaagccaagtttattacaaccgaaggccacaaaacatggagaagacttagtgtggagaaagtaaacagtcaaatgtcctttgaccacttacagaatgcatttctctactccatttcatcaaagtgtcaacattctgactcttagtccttgtccccatctttgccttcagagagagtataaggaatccgaaggttgccctgcacacggctcagggtcgggctgcactggcagtctgtggtggacagacgtggtcttcctgtgtctgctgaggtgagacttgaggctgaagccccgcccacacgtcttgcacacatatggcttctcccccgtatgtgtcatttgatgtaaggtgaggtgtgacttttggagaaagccttggccacactctctgcacacacaaggcttctcttccgagtgagcccgcttgtgtgtgattagagctgacttattgccaaagcccagtccacactgcctgcacatgtagggcttctccctcgagtgcttccgctttgtgcctgatgagaccggcctggtggctaaagcctcgcccgcactctcggcacacatacgccccctc

SEQ ID NO: 437372 - DNA, 1121 bp, Homo Sapiens
gagtaacctcgtaactctgaagaagttcttaatactcagatatcccaataatgcctatcttaaacgcagacattctaaaccatgctttaaaggtctccccatatgaggatgattgtgaaaagaaatctggaaccgaacataagtgaccagcaggttttctcagtcctgcggagtagacagtgatgctccttcttgttattacaaaacaatcatgattaagttttgccaacaatatcgctccagtgtgggtttacatgaggcaccatgctacagtaagagcagctacgatgccattcaaaatcgccatgctatagcccatgtggaaagaatgtccagtcagtttcttgaacctggcaggtgaaagaggagtaggaggaaacattcctggttcaaaagaatcaaagtaagtcactgtccaagaaaagctgcaacaggagaatccagcagttagggatattataagtagagtccagaatcctaatagtccagtgtctacatcatcttcatttttcaaattctcagcatgcaactctttaacgatcaagtaggcgatggcgaggaggaaggcgagaagaatggcgaagagcagcgagcagagaatagagaggacctggaccggccaccgccgaggctgggctctgctgcccgcggccgcgggaaagataccattgcgcttatcgggcagaacgggcgacccgttcccgtccggcgggagcaccgagcgctttctgggctctgaccacgccccagccgagaactccgcccgcaggtcgcgggccacttggtcgcatccctcctcctcgtcgacttcgccttcaccccagctgtccccctgagtaaaggaggaatacgatggccgagccacagggcccggggtgccgggaccgcggcgccgcagagccgaccgccacccgctctcagcaaacgacatggcgcgaaacacaacgaaacccgcggagaacgagcctctcccacctgccccgccccgggtccgcaacagccaatccgcggcagtggccgctaccaccaggcctcagagcccaggggtaaaccacggagagcaagggtgggcggcgggttgcaaaggaagccgcagggccaaaggagaggcggaatgcgct

SEQ ID NO: 437373 - DNA, 565 bp, Homo Sapiens
cctttctcctgtgtagtctctggttgttcacattccaaaatgatgtttactgttttccaagggagtgttcaggagggcagctgccttggaggtaggtcaccaggactcctttgcattttgcatgcaaataaagtagaaaattactcacataaaatagtgcagacaacttagaaacagcagacaagcaggctcaagcaagaaattcataagaaaaccataatctctccagtcaccctctgatgaatgaataggcattagtttgcataagccatcaggtagtgaggaagcttgctttgtaataagaaagttaggaatttttcaatggagctcacccagtttgttcctcagatgtggcaaatcatatatccccacagttcccagctgcatgaacaaatgactgataaaatcagtgacatcctacaaagagtttacaatggtaaactgagtcattatgttgcgattaagcatcatcatgaaagaagacataaaatagttaggcaggcactcagtgctaaacttctgatacttttcctccactgaaatactcttacaagtaaacccaaag

SEQ ID NO: 437374 - DNA, 760 bp, Homo Sapiens
ttcatctctaaacattttaaaagaatgaagcagaaaatgtaagacaggctagtaattgatccaaaggagaaattctgaaggccagaacataggagtcagttaatactgtaataaataaattagacaatatccatatataacaactataggtccaatccatccaagtgcaacgctgaagggacgtattgattgcataggccagaatgttggcaaaaagctggtaaatcctgcagggtgccaccagaccgcgtgctgcaaacaaataacagctagagagaggagaggcttggttgaatttcggccttgactggtctgaagactccagaggcgggacgaatttgcggacagttctaccccatcccacatggcgtcagcttcccttccattctcatgactccatggtccatggctccaacctgggcctctgttaggctgtgtcctgtggcacctggaccatcgcggtagcctcggagcttctgactgtgtctctggttgcagcccctacacgctctcttccttacaggagcggagcgatctttctcaagcgcgaatcaaatccttccacgagtccccgcacctggagcgaaggccaaactcctcagcttagaagctagactgccagagtagggagtgggaatggaaaagtacatcaggagcacgaggggtattcggatgagggaaggccagtatagggcgccgagaccttggagtgtttctgagctgaggaggaatgagactttcacgcgggcaaggggacccc

SEQ ID NO: 437375 - DNA, 1915 bp, Homo Sapiens
  misc_feature (34)..(35): n is a, c, g, or t
gacaaggtttattttgttttttgtttattggttnnggtagttatttttaaaactttattttaaaaatatgagcatctattttaaaagttttgataattattgccattattttcttgtgattggtacaatttaaaaataagtctatgttttcacattgattttaaaaaatatagcatgtttgaattacaaatgattaagcaaactctattacttcatagctgaccatcttccagaaaattcccacttaattgaatacttagaaaaaaatggccagtggccgattgaaaggtatattaaaattaagggcagttttaattctgaagacaaatatcttcatggaaatctatttgtaagcttctgagattgctgctgaaagtctacagtctgtgaatataccaattcccctttacaactgatgcagatcattatgaaatactggaaggcataccctacaatttaggaattggtgtggctgccactgctatgctctcaattgcacactcatcagttcctctgcggatccggaagtagccattctcaccccagccggtgccccagctgtttttaacaatccagtaatccatcccagaggctgagtcagtgccatagcccacaagcagaacagcatgattagtcagctcaaaggggttgaaagggtctcttagaccagtgtggtggtagatcccctttttgtagtggaggaagtcatcatatacttcaaaagcaactgccatgggcccatgatggaccaactcaagcttcatcagggcttcattgcagcctccatagaaacctcctacatagtggtactcagaggagtaataacgaaagcagtcttccttcattttgcatggagaatcagtgcctgtgtaggggaagcaagcttcttccaccagcccaaaatcttgggcgtactttcctgcaataaggtatgggaagccgccttcacagccttgagcatactggctacaagacacaacctcctgagggcttaggattggggttctgagaattgttggttagtatacggattctcgcttctagcatacccatagaagcaaatgagtagcagctgccacaggatgcttggtttcgaacaggactgacaaaattgataccatgaacatttctccagtcccaagatgttggcaaatgcaaaatcttttgctgtatttcagcagtcagtggtgcaggtttgggccttgggatttttcgactgtggccaccacttctcctaatcatatctcccagggtaagagtctcatattccatgtatgtagttgcagtccaagacttctgaatggcattgatagctttcacaaagttgtgatcatacttgtagagcctattagaatacttttcctgagaattcttaaggtgtgctgtgttgacatacacattctcagaggcagttcccaccttctttccggtgaaacaagcccagttccggcccaacacatcatgcacccacccagtcattgtctcgttgcagtaagtggtcaccttgctgccctcttctttatacttaaaaaaggcaaaccacttgtagtcattcaacacaatctcaaagccttggttgtaaatgatggtgaaatggccagaattgccaaggtcatcatatgctgtatccagcttctgaaggtacaccactacttttttttcttgtggtcccataaccgagcagttgacatcgcgctgggaaccgctggagcccacctggaagacccaggtgcccagcaggtcaagataggtgcagttggcaggtgtgtcgcagcgcacggcgccgtcgccggagagaagcagcaggagggcggcgagcagcaaggagggcccagcacccatgctgcagggagctgagaaaagaggtgaagaattaccaggaagccgagcgctgcgggctagcggtgagtccacc

SEQ ID NO: 437376 - DNA, 774 bp, Homo Sapiens
cccttttctccctgtgttagtcttctggtttgtttcacatttccaaaaaaggatgttttactgttttcccaaggggagttgtccaggaggggcagctgcctttgaaggtaggtcacccaggactccttttgcattttgcatgcaaataaagactccagaaagggactgtagctgctagaggcctttgctagctgctacaggtaggtccacactgtcgcaggctgctctgtctcttagccccaacgtctgttcatggctgtggttttaaaagagtccctcaacagatgctctatttaataaccagtttgttcctcagatgtggcaaatcatatatccccacagttcccagctgcatgaacaaatgactgataaaatcagtgacatccttaaaaaaggcaaaccacttgtagtcattcaacacaatctcaaagccttggttgtaaatgatggtgaaatggccagaattgccaaggtcatcatatgctgtatccagcttctgaaggtacaccactacttttttttcttgtggtcccataaccgagcagttgacatcgcgctgggaaccgctggagcccacctggaagacccaggtgcccagcaggtcaagataggtgcagttggcaggtgtgtcgcagcgcacggcgccgtcgccggagagaagcagcaggagggcggcgagcagcaaggagggcccagcacccatgctgcagggagctgagaaaagaggtgaagaattaccaggaagccgagcgctgcgggctagcggtgagaccc

SEQ ID NO: 437377 - DNA, 1026 bp, Homo Sapiens
  misc_feature (242)..(242): n is a, c, g, or t
cctaagtcaggggcccagggattattccttagggaaaaacaggtttaggggccaatgtttccacttttcctacacagggtccggggggggccaaaggaattggtcttagcaatcttctcggaggggccgagggggcgccagcaagggatggggcccagtgagattaaggagagggggtatattgttccttttattaaataagtgaccggtgaagtccacccaagattttgcatcttcagaantgcttttttcctttgctcctgtgtagtctctggttgttcacattccaaaatgatgtttactgttttccaagggagtgttcaggagggcagctgccttggaggtaggtcaccaggactcctttgcattttgcatgcaaataaagactccagaagggactgtagctgctagaggcctttgctagctgctacaggtaggtccacactgtcgcaggctgctctgtctcttagccccaacgtctgttcatggctgtggttttaaaagagtccctcaacagatgctctatttaataaccagtttgttcctcagatgtggcaaatcatatatccccacagttcccagctgcatgaacaaatgactgataaaatcagtgacatccttaaaaaaaggcaaaccacttgtagtcattcaacgcaatctcaaagccttggttgtaaatgatggtgaaatggccagaattgccaaggtcatcatatgctgtatccagcttctgaaggtactccactacttttttttcttgtggtcccataaccgagcagttgacatcgcgctgggaaaccgctggagcccacctggaagacccagggcccagcaggtcaagataggtgcagttggcaggtgtgtcgcagcgcacggcgccgtcgccggagagaagcagcaggaggcggcgagcagcaaggagggcccagcacccatgctgcaggagcctgagaaaagaggtggaagaattcctcgtgccgattcaccacgcggcctcgtaccttagacctatgtttttttccctcc

SEQ ID NO: 437378 - DNA, 217 bp, Homo Sapiens
agcagttcacatagtttattcagcaatataacaggagagaacctccattgtaagagacataaggcagatacagggtgcatctctggggtacattcttcatacagactaacaaataacttcaggtttcacaacatgtagcaagtatgattctgttgcacaccaacagccattcattcctcacgttttccttgctaaaagagccctggtcaggcacggt

SEQ ID NO: 437379 - DNA, 352 bp, Homo Sapiens
aacaggaaacattttattatagaaaaaagattaatgataaagtcatattggttgaaaaatattttttaactgtgttcatgattgttgattctccttctacttcagtgttatactgtgtgaatcaagcactgtgtcaaaacagagcatttccctcttaaaaattacaaaccgaagtgatagaagcatgtcagaattgagaagacattttgaagcaagaacaatgtgatgtacctattttattatgtttgtatataaatactattgtaaattgttcagagtgaaaacatttgacaaactctaacactacaatcattttttctaaattacataaataaagctaattttcattatc

SEQ ID NO: 437380 - DNA, 865 bp, Homo Sapiens
  misc_feature (45)..(167): n is a, c, g, or t
  misc_feature (188)..(198): n is a, c, g, or t
  misc_feature (222)..(232): n is a, c, g, or t
  misc_feature (247)..(385): n is a, c, g, or t
gggggccccgctggggccccctcctgtttgaaaccccccaaagannnnnnnnnnnnnnnnnnnnnnnnnnnnnnnnnnnnnnnnnnnnnnnnnnnnnnnnnnnnnnnnnnnnnnnnnnnnnnnnnnnnnnnnnnnnnnnnnnnnnnnnnnnnnnnnnnnnnnnnnnngtttctttttcctttgggggnnnnnnnnnnnaaaaaagtttttaaaaattttttnnnnnnnnnnngggcccccaatttcnnnnnnnnnnnnnnnnnnnnnnnnnnnnnnnnnnnnnnnnnnnnnnnnnnnnnnnnnnnnnnnnnnnnnnnnnnnnnnnnnnnnnnnnnnnnnnnnnnnnnnnnnnnnnnnnnnnnnnnnnnnnnnnnnnnnnnnnnnnctattggaaaagtaattatttattatgacaaaaataaaactgttgaatgaaaacaaatgaatgttacactatattgcaccatgattggaaatgagccaaaacctgtctaaaagatgaacattccagagcaaacagcatcgttttacttgggttaagtaggcatgcaaacaactcattataacataattgcagaaataaaaattatgagtactggcaacctaaacttaacatataaaagaagcacttcataactaataaagtattaaaaactttaaaacatgtcatttaaacaatcccaccatcaggaaaacatgctttgaaccattttcaagaagtgatcatgtgaatgcattaatttacttgttttaaattttttgttgttgttgttaatgcttatatattggaccaatggaacacatttgtttggctggagttcagacacacagtttgtggtgtgaaagacatttttctttcctctgc

SEQ ID NO: 437381 - DNA, 2191 bp, Homo Sapiens
  misc_feature (233)..(254): n is a, c, g, or t
  misc_feature (2053)..(2061): n is a, c, g, or t
agtggtcccattcgtctttttatagaggacagaaatcctgttgcttaacataaaaagagaacactaaaacttagttcatctttaccactgagaaaaactgagaaaaagtaggcgtcttagatcatatatttattacaaaaaaataaagtgggaaattgacaaagtgaccacattataatgcatgctaacatggatttcccaagcctgtgagagaatcatttgttgagcactgnnnnnnnnnnnnnnnnnnnnnncgggacttcctcaacaatgtaaagataggaaacttttcaatccaaattcaaggtctttattactagttccacctcacaagctagtgggatgtatctgtgtcacaagctgaattcctcagtaaagaaagcttgagaagacactaaacaaggatgttactaaaagacaatgatttgttaaaattataaagcaatcatcttttggcctgcaaacagtcaacattagaactctccaccactgcggatctggctccccatcacagtattattctgaatccaggataattacaatcacatggcatttttttctgcatgctttcttggcccaaaccctgcatgacaacatatacaatttacaagatgggacttgaaattcccattctcacacaggatagttagggcgtgttaccaataataaagaataaaagttatacaacattgattattataaattatatttgttcttatccacccccattctccttaatatgttactttctttcctgcagaaaacatgatgttcctatataccaattacatcattaatgatgattagaatgagctgtagagaccttgattctgaagacatgtatgtgcaggtgagacgcaatctgattgcaaacactgacacagtagcggatcaaatcaaagaaagagaaaaccagggcaatccaaagtacaatatattcatcaataaagctgttaaaatactggtccagaaacaaaagtgccggacctatgaatgctgtgtcatgcaaatgcatttcacttttcgtcatgtgtgcaaccacaagcttattagtgattttagcagacacaaaaccaaatgtcagtatataaagacagggatgcttttcaaaaagctgaactgcagatttcttgtagatcattgcagctaatgtaatcactgatccaatatggagaaaaggagaaaggacacttgttcctgctattgttgatccatttttgccaacaccacctgtgaagattacacggaagtaatttgtacaggaaaatatggtccctgctacagtacaaagtgcaggaaaaattttcatttgaatattcagcactggaatcatagattgccaaaaaggtggtcctccaatcactgccagcaaatgcatgattattatgaagatttgcacttcagtcacatcaattattccaaatcgcaatgttccagaaacatacgtttgccagtgcgcacaatagaacataaatgtccccgcaaaacaacaaaaaaacatccaatcagggtttgtccccagctgcactgcaatacaagttccaagaaccacaaaaactgttgatagtgaatcacagccatgatcaaaaagttctcccagaggagaactactattggttcttcttgcctgtttcccatcaatagcatccaaagactggtaaatgaaaaggccacaggcacaagcaatatatgcccacagaggtgcctgctctgtagctgtagggcagtagaagactaataaaatagttgtacagatgtttattgacagtccaatgatggtgatgagatttggggcaatccaggagggaactcttctaacgagccattcccaatacccttgcattaagggctcaagcagggaccgtccagcactttgatatctgtgttcttctagccgctttagttggtgtcttgacaatggtggtgttggtaactgaaacaatttatttaatacacatcctgtagtactcatatgcccgaagcccactggggactccgggtgagaatctccacatcttttccttgttgatcgatgcccactcatggatcttgnnnnnnnnnaatatttaaagacagtaatttcccttcttttgtaggtttttgtggctggtgcttaccctgaccccaacaagtacacccctagaaatatcgcctccgactccagccgactgggtgactgatcggccccgct

SEQ ID NO: 437382 - DNA, 644 bp, Homo Sapiens
  misc_feature (345)..(364): n is a, c, g, or t
ggacaggtgacaactacaacacaaaaaaaccattgacaggaaaaatgaacatagttctcctttttaaagtttctacaaaatagaaatgtcacaagacacatcacaacaatgcagtggaccacattttcttatttattaaagaacagaaataaattttgcttaaatttaaaaaaataacattaaaacttagtttatctttccactgagtaaaactgagaaaaagttggcttttagatcatatatttatttaaaaaaataaaatgggaaattgacaaagttaccacattattctgcatgctaacaggatttcccaagcctgtgagagaatcatttcttgagcaattnnnnnnnnnnnnnnnnnnnnggacttcctcaacaatgtaaagataggaaacttttcaatccaaattcaaggtctttattactagttccacctcacaagctagtgggatgtatctgtgtcacaagctgaattcctcagtaaagaaagcttgagaagacactaaacaaggatgttactaaaagacaatgatttgttaaaattataaagcaatcatcttttggcctgcaaacagtcaacattagaactctccaccactgcggatctggctccccatcacagtattattctgaatccaggatcc

SEQ ID NO: 437383 - DNA, 3809 bp, Homo Sapiens
  misc_feature (1094)..(1136): n is a, c, g, or t
  misc_feature (3168)..(3177): n is a, c, g, or t
  misc_feature (3239)..(3239): n is a, c, g, or t
  misc_feature (3265)..(3265): n is a, c, g, or t
  misc_feature (3545)..(3545): n is a, c, g, or t
  misc_feature (3689)..(3708): n is a, c, g, or t
aaaaaaataagttgcgtgacatttattttgtcttgttaacattaatatctgtagaaacatttttattgtcagtataaaaattaacaggttttattaaatactttctccaattttgtaacacataagatcagtgtaatctgcattcatcttgcacggctattgcaaagtgagtgggtgtttccaaagcaaaacacaatactttagtacagaaggaacaacggcgatattttgtctgatgtaggtatgaggctggatcttttggtgaggtcctgccagaattagatgaaagcaatcccttaaaaagatggacgtatccccaaaactatcagcagaacaactctgtgtttcaattttctatgatgggacttgaagatcctaacaggcgtctccaacgccaaagagtctggaagccattatcaaaattcactgaagagaatacaggctaatctgattaatgtgcaactcagaagcagaaggccagctgccagagagaagcacattctgctatcatttcaactaaggtctgtcctcaaggaatggattaaggcatcttttaagaggacgctggtaccatttatcttgggaagtccagttagacgttgcgttgacgtaatgacagggttgcacaccaaaatgaaacaccttcctatgaatgagttcttttaatatggggcatttaggaggtctaagaacaatcgtctgacagcagcatttaaacacaaataaatcaaaacttcattttccccaaattagtcatatattgtaaatattctcttttcaaaggatctgataactagttaagtccaagcaatagattaactagtctgctgtgctgcctgcatagaaatgccacttaaattacaaaaaaaactataaatgattaattgttttgtatattaccaatttattaataaattaacgttataccattttccctgaaagcaaaagtatttttccacctctgctcggtgaaaattaagaaattatgtgtaagaacagcatttagcaaatagctattaaaaaaagagagaccaattttctaggtgcattgggacatccatttaaaatcaatacaaaaaataactccttgtaannnnnnnnnnnnnnnnnnnnnnnnnnnnnnnnnnnnnnnnnnncatccagcacctatatactgcatttgtgctctgtaagtgtgtgctgacataaatcttctccaattattacaaaattaacaaggaaggcagaacgcacgtccaccttgagtcctactggtccacagccaatacgcacggcaggtgagaggggttacatggtggcttgtggcagtccactgctccagaaaccttcttctcctcctggggaagattacaagttttcaactgtataaatctttacacatatgctgattacttttccaattatttactcctctgatccatatatactagtggagtcatcaagctctgggaggcatggtctccctgctcagtgtagctaggttcccagtgctgtcctgtttggggacaggcagacacagtcattcatgttttaacactgccgtttatgtgtggatactgaggaaggcatggttcgtaaggcatggggtctggagaaaaaacagaatcatctcctgaagaacaagaacttcttgtgtcagggtaactaggtgaatactgttcgagaggttggctgaggtccaagtattcctcattggttgtgagagtgagaattcgatccaagtcttctaccaactgcttgaacgttggtctctgggagggcactgcatgccaacagtccctcatcatcatgtacagttcgttggtgcagttggctggcttatccattctgtgtccttccttcagcagcttaaaaagttcctccacgggaatccctgggtagggcgagccccctaaagtgaagatctcccacattaacaccccgaaggaccagacatcactctgatgagtgtatactctatcaaacagggcttctggagccatccacttgactggaagccgcccattggtggtctttttgtaatagtctatattgttgatcatctctggcgagtccaaagtctgctattttcatcacattgttttctgttaccaaaacatttctggctgctaaatctcgatgaatacatttttgggaagccaagtactccatgcctctggccagctggtaggtgcatgacaccaagtccttgaaggtcatctgctcctcaggaacacggttaatgtcataggagtactccatcccgggtggcctccgggctcggaggtattctcggaggttgcctttagaggcatactcaactatgacatagagaggcccatcctgtgtgcaggctccaagaagatttatgatattcttgtgtttcccaatcatcttcatcatctccatctctgacaccagatcagaaaggtctttctctgtggcatcatctatgaacagtaggcatattcacaaatcagttcatttcctctaactcatgggcagctactgttagttgccaaagacttagttgaaacagcatgaaattgaatttcagaatcagaaaagattttccaaatcatctccctcattttatcgaggaagggacaaaggcctacacagggaactgcctcactctgtgtcaaagagctcactggggggccaatggggccaagagtcaggacgagagcaggggcttctgacactaatgccaattctttcctagaccatgagataatctcatcctctgccatatctaaggcgtctcagaaaaccacaccaaacttcatggtgcctgaaaccagcgaggagaccgagggtagggccatttcaaatcactacagacttgctcccgaccaagcattcttaacccagcccctcgaggcccttagagcgttccgaggtgggttcagacggttccccataaacagggccataaacgtgtgtgcatgtgcattctgagcaggtaaagggctgcgacttctagtggcttctcagagggcactgcagttcccatcctaagaaaagttacataaacttccgctctgtaatttcaagcaagaatggcacaggttccacatacgcggggctcgcaggttagcttctcttagattctcctaagtggcaagactttcccatgtgccctccacctcaagctaattcagtatggaaaaatctgggtttcctttnnnnnnnnnntgaaatatgggcatggataagaaccatgttgcaaacagttttttagcttcacaaaaggaagntcaatacaagtgactgtgtgtgcaanatttacactgatgtatgtgaaggagggagccacgggccatgaggagggagggagacacagccgtgggctgtaagaaaggacacgccacaatggcttggggactaatatccttctgtgtcttacagggaaggctgccagcctgggcatcacaagagaaagagaactcccagacctccctttttgcaatatcccatgtaactctgagctccattagcaaaaccagaagttccgccaaaagagatgagaagcctgggtcctccccacacctggccctggtacnagccaggggctgcctcagtcagtggtgccatgacacctggggcaagacagcacagtgttcctccccggcatcaggctccaaggtggggaacatctcaaagcactctagttttccttgggagtcactcagataaacagccttttnnnnnnnnnnnnnnnnnnnntgcacatcttgttgacaaagtccagcctgctacttccccttgggagggatgtgatgactatcccatgagaacccacaaaagaaagacaaagcctaacatcc

SEQ ID NO: 437384 - DNA, 412 bp, Homo Sapiens
  misc_feature (397)..(397): n is a, c, g, or t
atgctgtgctgccgtatattaccaatttattaataaattaacgttataccattttccctgaaagcaaaagtatttttccacctctgctcggtgaaaattaagaaattatgtgtaagaacagcatttagcaaatagctattaaaaaaagagagaccaattttctaggtgcattgggacatccatttaaaatcaatacaaaaaataactccttgtaaatatataatatatatttatacataatttgaatatatttacatacatccagcacctatatactgcatttgtgctctgtaagtgtgtgctgacataaatcttctccaattattacaaaattaacaaggaaggcagaacgcacgtccaccttgagtcctactggtccacagccaatacgcacggnaggtgagagggggta

SEQ ID NO: 437385 - DNA, 1803 bp, Homo Sapiens
cggggagaaaattaaaccttatttatttttaaagtcaaaccactaggaaaatatatcacagcctggaaacagcaaacggacaggctatattataatttcaagtaataagttggtgaaaattcaacgaagttgctatcaaaacaataaggtgccatgctggggcaggaacactgccagctgcacaagccccaggcaaaaatggtatttggtaatgggggctgtctctcctttgctctaagggagtcagctcatcctagcccaagttgcttactttttctcccttgaatttcctgttgccaggggtttgtctcaattgggctctgttaattcagggggctaagtaggcaatgctaggtgtaggctttcattccatatgttctaataaaaccaggttttcccaaatccagtacttcatttactctgttgtaatcaagtagccaactgctcctcttttactgttcattcctagatactagtatatatcacaatcaaaacccccttctcttcaaggggaaagtgttactgcaagattgtcctgtcattttgttacacacagcctcaggggccatcagccagtaattctgcttcccataattagtgtgtcatcacctctcatgtttctgcacagtctccaggctgaaagatgcagcatgtaataattttaagaaatgtacatccacatcttgatgaccagaaatggggatccacaaggaacatttcaaagttcttatccaaactagtctacctcccagttccacatcttaaaatcaacttgtatgcccttgtataaattaccccaaatcaagaaaacaaagacccagaaaactttctttcccttctaagttagtgacctcattgattttgtttcacagcttatggaagatggtggggtgacacttttggtaaacaggatgttggcaacaaagagaaaatatctctcctcagactccaccaactctaacctgccagcctgttagtacctgtgtagtaagaagagtctggtaccttggagggctctggcttgttacaggggagagccttactgccaggacaagcactggccacaggaaataataagctctaaaactctcctgtaatatctctgactcgatttagcaccacttttttccaatttcattttttagggactgaaacataaaataaccagtgtccagaggcaagtgacatatgccttacgcttgtggccatccttcatttcttcattcgtaaactttgcttaaaagactaaaattcccaattccttataaaaaatatattcttgccctcagccctgatggccactggcaaatacttttattttccaattgataagagagcctccttcatcttcttggtcatagttgggatgaggtgcatgtggtcatccacacacttggtcacacaactgtccagctgctgcttcacctgaagctccttactcccagcatctattgaatctttggctttgtcattgcaatgcatggtgcaccgggccaggcggtcctggaacttctccagctcactggtgaccaaagcctgggcttgagccagaggcacatggcagcgctcgatgcactggtgcacctgcttcatggaggcctggctgtcctcacaacagctggcgctgcaccggaacatgagaccctgcatcttccggatgttctctctttccagactcttcaccatggactccaccgcctcctgcacccggagctgctgcagctcagccatggcgaccccgcgctgccccgcggcgctccgcgccggcgcccatatggaatcggcgtacgggcccgccccccc

SEQ ID NO: 437386 - DNA, 605 bp, Homo Sapiens
gtttggctgtcgtgcatgcatggtgcaccgggcctggcggtcctggaacttctccagctcactggtgaccaaagcctgggcttgagccagaggcacatggcagcgctcgatgcactggtgcacctgcttcatggaggcctggctggggctggcgcttcaccgtctatcccatcatgccagctgctggccctaaagaactcctctctgaccgctgcgtcctctcctgtccatccatggacttggtgacgtgtctgttagacttccgactcaaccttgcctctaacagaagtatcgtccctcgccttgtggccttgctggcagattgtgcacagctgagtggcctagccaccagtcacagaatgtgggcccttcagaaattgaggaagctgcttacaactgaatttgggcaatcaattaacataaataggctgcttggagaaaatgatggggaagcaagagctttgagttttacaggtagtgctcttgctgctttggtgaaaggtcttaaggaagctttgcaaaggcagtttgaatatgaagacctataaaggggggtggcaaacagctgctccacagcccattctttaaggtactgtagctctgct

SEQ ID NO: 437387 - DNA, 835 bp, Homo Sapiens
aagattttgagaattagtaaatccagtacatgattccataaaagcttattaaagttaataattctaatttactccaaatgattactttcaatatgatctttggggagaaaaagcctttagtgaattttcttgagggtgataaatcacatcattgcgatctatatcacctccttgagaatctctcccaggctgaaaatgtgatggtaatcatgggtgtttttaagaacaaatctaatttttatcaagtgttctttcctctacaaaaaaggaaggaggagaaaaagcttccttaaaactgattattttgattcaattttaagtttctaaaaaaggtgatattaaagtatatgtattccttcagcattaccttaaaggctagaaaaacgggataaatcttcagaaaagtgtcaaaagtgtcacagtacatgttcaaatttaaacttgaatcctggttcatctttgacttttgttgtgcatttttaatgcttctttgtttttgatacacagaatgcagttgaacttgatcttttaaaattgagacatgtaagctaatcagcaaaagacagaaacaaaactgcacatctgtaataatcagatagcaattctactgcacaattcattgattgtaaggtatcctgtaacaagcaatgtttgtctcctattttttgatacctcttaaacttatgtcttttagaaagacagtgcctctgtatgctttttgtatttttactgagtgtaaatatttgttatatttttggttaagagaatgtaaaaataccatttattattatcatatctactaatacattggtggaatcaataaagaatctacatt

SEQ ID NO: 437388 - DNA, 646 bp, Homo Sapiens
agttgtatttcttaggccatcccttttctacagagagaaccgcaagtcatcgtgagggtggaaagaatcgatagtactaaatgtcctttgcctaggctgcaagaggcacaatttcctttttcaatggatgaaagtaaaacggcaaactatttttgtttggactttgttgacttttgtgaggaaaccatatgacagctttaatatctaattttaaaattcagagcaggaaatgaggcaatcccgtacacaggccaagaaaaaaaccgtatcaaaatgtaaatatcaattccacattacagccagttaaagaacaatgggaagaccaagaaggagatggcagtgacagaagaaaggagaaggggaaataatgggcactaagaaagcagaaagagacatatttggagggagatggctaccgaaatctgggcttttcttagatcctctccaaggaaagttatcactggaaatacccaaggccctgattgtatgcactgtgctagggagaaagacattcagatgctgaaataaaaaactagggaattagtaaaaattggatctctaagacaaataaattgatcaaactataataataatcaaacttctaataatgtataacctctccagagatgaactccaagaacagctc

SEQ ID NO: 437389 - DNA, 815 bp, Homo Sapiens
caggcagactataggaaccatcaaattcccggggaaacccgaccgcttagtacagccacccagaagaagaaaagatcaaatgagaccggctcaacggggtcttcctgtagtgacccctgagttaaagtatttattttcacgctgcaactgctgatcactttacagagacatatcatgctgtagctctgcatggagctgaagacaaaagcaacatttttattaatgttataattattataattatctttaacaaagctattaaataacctgtacaaagcccaaaccggtcctagcgaaaacccgagcactgtttcaaatctcccaagttcctttctattcagttcagcagcatttcctatatacaaggccagcccagggtggtcccccgaaactgtaggtctccctgacggtgggaacggtttagagtttggaaccgccctggcgtacggcagagctcccaattacaatccaaatgccccagccccaaccctacctccccgctcctgggaactgggtcccatgtccgaaggcagcggaagttggaagcctggctccattttgggaggcaggcaacggagagggtccgtctgctgagtctcccctccgccagctgcccacaggtccccggatctctcgcagaggtgctgggaagggggtccacctccgggagggctcacaggtcccgcgcgtcctcccgcttaaccccggcctcagcgactttgagcttcttattctggtgagtcttgacgtgcttcgcgaggtggtcgctgcgcatgaagcgcttgccgcactcgggacaggcaaagcgcttctcg

SEQ ID NO: 437390 - DNA, 308 bp, Homo Sapiens
ggttaaaaacagaaaaatgtgttagaaaacacagcacagagaaactgtggtttcagctcaacgtgaccatgtcacagagtccatcactgtcagtgttgcattcatcctgctggtcaggctaattatcaagacagtgaacttctccctcggatgtttccttattccagaccagggtgtgaaagcggtggctgtcaagagtccaggaagatgtcccatcaatagaacgcatacagcagacaacaggatggtacagatgcccaataacacaccctatagtgattagtattagcatgatgatgatgatgatg

SEQ ID NO: 437391 - DNA, 193 bp, Homo Sapiens
ttttttttagtgaatatttttaaattttattaatgacaaagcaaaaattaacacagaagtatatatacataggttgtattaaaactaaatgttttaactctcaaatgttttaactctcaaatagaaaacatacacatctattacaggaatcacaaaacttatctccataaggaaactttaaactccagaggca

SEQ ID NO: 437392 - DNA, 1204 bp, Homo Sapiens
  misc_feature (756)..(756): n is a, c, g, or t
  misc_feature (758)..(759): n is a, c, g, or t
ggggtttttcttaatcaaagttttacatttggtagcataagtagttctttatgcttcacaggacattgtcttcagagtaatctctctgctaaaatggtacatgtgggtcacagattggtttatgccactgacttggttaagtttccaccccctccaatttgtgaaaaacagagcagtgacctagctgttgcatcatcatgactgccatgtaacctgtaattgctgctctccagtaattgtcttttcattttgatggtaggggccagactgaatgaataatgcattctttttttattcaatttatttcattcagtttattcttggcaatcaaacatcccatagactttgcttttattatcaattatgaatatgaattgtctggtttactaatgtagtcatttgttcatctttacttttagcagattagcaccataactaacttaaaactaagtttgttacctgctttttatactgtcacaaaggtttttgaaaaagctggggacactattttgtcttttagttttaaacttttttaaggcaaagcaagctccccaatccctgttctccaatatgtgtatgatgtgacttccatgtagatataaaaatgattgtgccctaaccaaacttcctcagattgtgcactgtttgtttaaaataatcacgtattttagtctgatgctgttgtattttttcattttatttaaaacactacttacttcttattctcttaacaaattttaaaaggtagtgatcttnannaaaaaatcactggataactaggaaatatttttgttgttgttttgtttcttaaagagtaccagaggcccattgaagccttttgctcctcttaccgtgaaaatgaaatgtttagccattgtatggctaggaaccaatgcacttggcagttaatggatcctgctgttgctggagtgtgagcgtggacttgatgcagtgatgacaaatcattgcttagaattaatgttttcaaatgtgcaactctagtttttaaaacaaaatttggttctttacattcattatttcgtttttgtttccctttagtatttaatggtctttggagaaaaaataataaaacagagtgttatatatatattttttggtgcaagataagattttctgttttttgaaataagtctgtagcataaaggttaaactattttaagacaaaataaaatagagtgtattt

SEQ ID NO: 437393 - DNA, 1686 bp, Homo Sapiens
  misc_feature (1505)..(1572): n is a, c, g, or t
  misc_feature (1650)..(1650): n is a, c, g, or t
attccacgccttgaaagctaaggtggtccggtttccgaaatcccggtggaaggttgtaaaccaaatcccggccaagcagcttggagaagggagccagccaggtgccttctccatttcccccaggggctcatgatagtacaacaggtgccccaccatccttggcacaggccacctccatgctgagcgcaggcttgcgtcgggacacaaagacgctccgcagcacgcgggccagctcaggcagccgttttaagcgctgcagccgctgctcctgttccgggcaccgcgtcatctgtgccagctgcttctgtgcctccttggctcggatccgctccagcagatcctgggacacccccttcagagcactgggagaggctgcaggcggggtgtctggtggggtagccggcagtgctggcctgggagacccggggctgctgggcgcagcagagcgcagggccaattgactcaaggccttctccatcctgggtgaaatcaggttgcgggcccgggccagcacctcctgagcagtggtgagcttctccgtggcgggtggctggggcagcgcggccggctcgatgtcgggtacttcatccacgttgaagcgcgggtgccagcgggtcagctggtcctccggcaccaccatggcggggctcagggaggccaggaaggccttgtggtgctccttgacgtgctccaccagcttctggctgaagatctgccgtcgctgcaggaggcgcgaggccgtgagctggggggctgctccgtcagcctcctgctccagcagtggctcgatggtgagctggtaatctgacctcctggtgccatccttgaaggtggggacactgcgctcctggcggaagcggtaggaggccgggtacacggttttgatctggccaacattgcgctcctcaaaacgcctacgcatcatgtcctggacgccccgctggaccttggcaaaggtgggcgtctcggagcggttgtggagcatgcccacgatggtgtccatgctgcggaacatctccgccagcacctggtacttgtagggcagcacgagtcccggcaggccgggctgggccagggcatggaagcgctggtaggcgggcgccttctcgccacatggctcctcagggcggccctcggcctctggggtgcaggactccccagcatcctgggcactggccttcagcgcccggactcttgcccccagctcccgggcccgttgcaggcatgacgcaagctcagagatggtgtcctggtcctgcgcggatgtcaggtggggcggctgacctgctgccggggtggatttctttatcttctggcccggagaagggcaggctgggatgtctggggcctcgggggtactggggctggaaacctcgtccaccgacagccgcagtctcctgcgggccggtggcctggcctggtcgcgtccgggggcggcgggcgggcgggcgcgcttgcggctgccactggtagcggaggccggggcgcggagtgcgggcctggcnnnnnnnnnnnnnnnnnnnnnnnnnnnnnnnnnnnnnnnnnnnnnnnnnnnnnnnnnnnnnnnnnnnnagaagtcggtgacgcggcgctgctccatggcggcggagtgcgccctctgccggaatacaccacccaggcctcgtttcntttggtttggttgttatcctccccgctccgccaccc

SEQ ID NO: 437394 - DNA, 1180 bp, Homo Sapiens
  misc_feature (1032)..(1115): n is a, c, g, or t
tttttaaaagtccttaaaatttattgaaagtgtaagtaatatttttagaacatatactcatgtaaccaaattcaggccaaaagatagtctgagaatggaaatttacattccaaacacacactgaaatagagatgcaaaaatcctaaacaaaatattaacaaataatatgattgatctcagaaacagtattgagtaaaacaaggaagacacaaacacagatatgtacaattccattcacataaaattcaaaatcagacaaaactgtgtatttttttaggaatgaatacatgggtggtaaagctatcaagaaaagtaagaaaagtattataaaagttgaaataaagctaaccttggagttgaggacttgtgattaaagaggtgttcatgaaggatttcttggttgcaaagcagtcttctatcttttaggtgtggtctcataaagtaagaaacaggtggggggactcttctttattttttctaatctcaggagagtttgtgtagacttgaattattattttttttgaatgtctagtagaaccaaccattgaacacatctggccctgaccttccctatatggaaaaattttaaactactggttcatttaatgattacaggattatcattatagtattcacataacataatactgtcaaattatatttttaaatgaattttccattttatctaacctttcaataatattggcagaaaaattgttcataatattctattatctttttaatttttacagcacctatagtgatttcctttccaattatgatattggttagttgtaactgcattatttccatcagtctcaccacaagtatgtcagctctactagtattttcaacaaaccaacttttggatttgtagatcgtctcttctattctggttttatttcattcatttctgttttaagttatcctttccttctttcttttgatgttctacttgatgtcattttcctaacttctttagatgggtgcatagctacataatgtacagacttccttcttttctaccataannnnnnnnnnnnnnnnnnnnnnnnnnnnnnnnnnnnnnnnnnnnnnnnnnnnnnnnnnnnnnnnnnnnnnnnnnnnnnnnnnnnacttaaaaatattttctaatttcattttgtcttacttgacatatagattacttagaagtgtatct

SEQ ID NO: 437395 - DNA, 749 bp, Homo Sapiens
caaaggattgaggtttccccccaaccagccaaaggaaaattccccaaggggccaccccaggggccagaaaaagggggccttgggaagttgaagaaggcccgaaggaagttccatgggggaccatagggggtttcctttgggttcccccacatagaccgaggcattatgttaagggcctggggttaaaaagttcctttgactttgctcatcctgtccggactgctaggtttggaaccttgtcacagaaaatgtgctgtaaaataaatgatagtgccctgaagttaagatctagagaactgtgggagacagatgacaagctttaggaagaggccagggtgttcttcaacattttccccgtgttgtttgttgaaggatacggtcattaagaatccaccaaaaaggaacataaatacaaagtctgctgtccgacctcggaaagagccttcttctagcattcgacagtaacgatatagaaaaatcatgttaaataaaaaattgaatccaactggcccaaaaaataagaagttggtgattaatctccatatttgaaagtgtttaaagattaattcaggattgaagtacaactgaaaaggtgtgatcaattccaacacggcggcggtggtgaggacgcaggcagtggtgtaggcgcggctgaccggtgtggatctgcaggtactccagccgcaagctctggtacgccatcttccccaccgtcgcctgccgcggcgttggatgcagtcgggtaccga

SEQ ID NO: 437396 - DNA, 1330 bp, Homo Sapiens
  misc_feature (1137)..(1147): n is a, c, g, or t
  misc_feature (1194)..(1229): n is a, c, g, or t
  misc_feature (1232)..(1271): n is a, c, g, or t
  misc_feature (1289)..(1289): n is a, c, g, or t
acagtgagagaaaaatggaattccgttttattttgtcctctctgaaacttccatttacaccatggcctcatctatcaagaagaggaagaaaaggctctgctttataccataaaaatcaagtactcatgtacttgttagaggtggcaggatatttgtttctccagttttttggctctaagaaattacactttcagtaccagtgtagtgaggaaccactggcaaactgttggaaatgtcttctggattagtcagtgtaccatttcataaagtgcttctggagttaaaatctgccaagctgtcaaaagtgtccacacttttgcaacaaaggataaaagatcccagtgggtatcaccgagtccttcccagctgggtctcattattggcactgctgctttaacctccaagcccgctggccctcaccccaggcgaagcctcctggccgttcctcaggtagtggattgtaatttggatcctcatctggtgtatcaaaaatagctttcaaaatagatggtgttttcagaattcttattccaccaggttgattgggaaatacatcttccaagaaaaaatatatgtgtccaactgcaatacccaaaaggtccacaatgattgagttccccaacaacaaggaaaatcccatgagcacccagggcagaaagggggcctggaagttgagaaggccgaagaagttcatgcggacataggggttccttcggctccacacatagacgagcattattgtaaaggcctggcccaagaaaactaagctcacaaacagaccaaaaagggtcattaagaatccaccaaaaaggaacataaatacaaagtctgctgtccgacctcggaaagagccttcttctagcattcgacagtaacgatatagaaaaatcatgttaaataaaaaattgaatccaactggcccaaaaaataagaagttggtgattaatctccatatttgaaagtgtttaaagattaattcaggattgaagtacaactgaaaaggtgtgatcaattccaactgcacggcggcggtggtgaggacgcaggcagtggtgtaggcgcggctgaccggtgggatctgcaggtactccagccgcaagctctggtacgccatcttccccaccgtcgcctgcccannnnnnnnnnnggccgtaatggccgaattcccgggcatatgtccggtaccgtcgactnnnnnnnnnnnnnnnnnnnnnnnnnnnnnnnnnnnncgnnnnnnnnnnnnnnnnnnnnnnnnnnnnnnnnnnnnnnnncttaacgcagtgccatangtgagtcttacagttgcacagcgtcccgcggttgttttttt

SEQ ID NO: 437397 - DNA, 477 bp, Homo Sapiens
  misc_feature (374)..(374): n is a, c, g, or t
  misc_feature (440)..(440): n is a, c, g, or t
ttttttttgaactgggaatctcaatttattgaaaatacatgttttggttgacaaagatctgaagaacagttctgtacacttctgaagattaagaacaagttttaaaaatttataaaatacccgtgaatagggaacttatagcaatattttacctatttataataatcacccaaaagataacttggaacatcaaaaggaaaaatgctcagatttcagtttgataactgtaccttcagcaagtatttctgagtgcctaatacgaagagggactgcttcatgtgtttgagatacactgtgaataaaacagacaaaaattcctgccttgttttctatctttattagcttgaaggcccttagtgggtgggcagacagantttcagctcctccagagtcttctaggatgaggcatccatctggctagagtaaaagaccttgagttngctaagggtgttcaccgggcaaggagagggggcctac

SEQ ID NO: 437398 - DNA, 1070 bp, Homo Sapiens
tcaatatttattaaaatctttattcattttcttttttcagaattgaaacccatagaacacattagaaatttagatccatatctgtcttgtttggtatcttaccaagtacaatctctgtctgtgcaacagctctgagaggaaatccttggcagatcaaaagagagggtagtggctcccacactttccatttaagcaaataaattagcttctgagtagttgttcccagtttcacccaacattttgtgtttatgagaaacaccttagttcctaaaaacctgtggtagtccagtacctagcccctaccttgtcaccacccagacttgaggaattgaagggaaaaaaactggccttcccctgtaggatgagtttcccaaggccagatgtgcctggctcactagtatgtctggcctgtgctggcacactagagttgctcagtagttattcgctgatgaatggtctttatgttaattagggtccactctcagagactgagaacctttcactaaggttctttctgaatccttcagaaagtcagtgttcccctttgtcaaaataaatatgtttttcttgctagaatacatatacgactatatacattacatatacttttactcatgtttcctgaagctcaaactcacaggatgaggcatataagatagcttactgatgatgctgttttaccatcattgaggtgtggtcatttactggtcaaagaatacacgggtgatcgagaagaaaggctgaagaaatatggcggatggcgaagggaaggaacgccaaagccatctgtttttttgaagcaaacaacaaacgatcgattcctttggaagataatgctgcttccatgacattgaaaattgcccgttatgggactctttcccaaattattgcatgaggtctgaattttccatcttctaatcttgaattacctaatcacagggcacagccttaaaactgggaacactgcaccactatatatgttgaattgtctcccccaccgccgagagagtaactatagttatagaaccgccgattatgctcattaaaatcatccatgtatgggagcaagc

SEQ ID NO: 437399 - DNA, 1322 bp, Homo Sapiens
  misc_feature (346)..(382): n is a, c, g, or t
aaagattcttctttagataatatttttactcctcttttgagaagggccttctttaaaatgccttctcgttataggcttatttgttttggtcgcccacatatattttggtgcaccacaccccctacagagatgtttaaagcggttgccctctgcacgccatagattcccccatgcttatgcacagttgttccccatgtcttcggcaacttttttagacagcatcggtcccgttgcctacgctttttaatatagcgactcctccttattatggggacccctctttggaacacaagaaactctgggtaacgcctataactttggccccctcgagggaaaactttttagnnnnnnnnnnnnnnnnnnnnnnnnnnnnnnnnnnnnnctctttaaaaggtttattgatcatatacaaaataaagaaaaccttatatatcacaaacatacactatgtacagcaataaatacccggggggccaggcccagtgctgcccctcctggacaataatttagcaataaatactgcgcagggcaggggtagggcaccaaggccactgccctgcaagaggtcaggcccctgcccgccctacacgaagtgtgagcgctcgggcctcaccccgcatccaaaccccagcccctcctcacttagatctttaataacctccatcccaccccagcagatcccggggtcttctcccacacacacaacctcccctggctagacctaggcagggcaggcaggggactgatcaactctgcttggacccacctctcagcgccaggagagcaacagggctggacacgcgggcagcccttgtcctgttgccaggagaaggctttctgtgcccactcccgtttggttaaaggcttcagggactagcagattgagggggtgggaagaagggcagggctgggacacaaggttgctggaggggccaaagcccaactggggtcaccaagaacagggaggtctcacagtttatcggggacacactctagctcagactcaagggacacccatggtatcaaagctgctgctccaggggcagggtggaaatgtgtgggactggcccagcaggtatggtacacacccaggacacaggccagaggcaggacaggcattagtctctcagacacgccctgcctctgtgtggcactgattatgtactctactctcccgacctgctccaaggccagacagccaacaggaaggcaaaaatacaccaaaagaattattcagtggcttctgggggaaaaatcgttccctcgtgccgaattcgccacccaggcctcgctacctttacacccgggattaactgccgtcg

SEQ ID NO: 437400 - DNA, 1267 bp, Homo Sapiens
ctccaccagacggggtggggtggaaatgtgtgggactggcccagcaggtatggtacacacccaggacacaggccagaggcaggacaggcattagtctctcagacacgccctgcctctgtgtggcactgattatgtactctactctcccgacctgctccaaggccagacagccaacaggaaggcaaaaatacaccaaaaagaattattcagtggcttctgggggagaaatcgttaatgtgttggttcctttcaccaaaccacagcctaaaaaagtaactcacaagatcccagagcggaaacggtgcagcaggctgcggctccgactttccagatgtggatgggcgctttggccaagtggccactccagagggaggcagcagggacaacatgggacctgaccatcgtcccaaagcaggctgcagccgctcagggccgtgggccgggccctgatcaccagtcagaagtgtacacacatatctgaaacatgcaccaagagctgagccagcaacaccagtgccacccccgagcagcagccaggggcctcactctcctggtgagagctgacctgtccctgctgggtattcctctgaaatctgagcgtccatgttaggataaaagaggagttggggcaaagttaaggtggaagggaagacatatatcatggtttacttggcggacaagtttgagagaccctggccttggccaaagccctcgattcgctgtgtcagaaaaactgaggtgagaagagaccaccacccttctccaccaccctctcagtaggaaagcgggatcaacagagatcagaaggacagcacactcacacctgcacatgaacacaccatctatgtcaggaaatccaggggaaggggaagaggggtggagtggctccgcagggctgacctgacaggggacaggaacactcccctagacccagggaagtcgccccaaatccaaagctcttgaaaggaggtatggcctcgaaactccagaagcctcttctgccaacgcaccgaggacctgcacctcccattcagcacgcgtcgacccttacaccctcctcttccacactcccttcgcctccaggtctgcagcctggcagaggtgctcaaaatggatggccacccacagccaggacaaaagtgggggctgcacaaggacaaggagggcctgtttctccccactccgaggcagatcatgacgttttcttcatggatacttatgatatgattccaactaacgcctggattctacttagacaagatcagac

SEQ ID NO: 437401 - DNA, 513 bp, Homo Sapiens
agggaaaggggaaaaaagggtggaattggtccgcagggcttgaacctgaacaggggaacaggaaacactccccctaaaaccccagggaagtcgccccccaaatcccaaagctcttgaaaaggaggtatggcttcgaaactcccagaagcctcttctgccaacgcaccgaggacctgcacctcccattcagcacgcgtcgacccttacaccctcctcttccacactcccttcgcctcccaggtctgcagcctggcagaggtgctcaaaatggatggccacccacagccaggacaaaagtgggggctgcacaaggacaaggagggcctgtttctccccactccgaggcagatcatgacgttttcttcatggatacttatgatatgattccaactaacgcctggattctacttagacaagatcagactgaggggagggggatgaagtcactaaatgacaagagtcaacagccaatatttccattttcaagtgacgcaggtagacacaggacttgtc

SEQ ID NO: 437402 - DNA, 465 bp, Homo Sapiens
  misc_feature (224)..(224): n is a, c, g, or t
  misc_feature (398)..(398): n is a, c, g, or t
  misc_feature (455)..(455): n is a, c, g, or t
ttttttttctctttaaaaggtttattgatcatatacaaaataaagaaaaccttatatatcacaaacatacactatgtacagcaataaatacccggggggccaggccagttgctgcccctcctggacaataatttagcaataaatactgcgcagggcaggggtagggcaccaaggccactgccctgcaagaggttcaggcccctgcccgccctacacgaagttgnaggcgctcgggccttcaccccgcatccaaaccccagcccctcctcacttaggatctttaataacctccatcccaccccaggcagatcccggggttttcttcccacacacacaacctccctggggttaggacctaggggaggggcagggcaggggattgattcaacttttgtttngggacccacctttttaggcgccagggggtagcaacaagggtttggacaaggaggggnaggctttttt

SEQ ID NO: 437403 - DNA, 223 bp, Homo Sapiens
gcgtctagaattctactatttgtattaaaaatagatatataaatatacatatttataaacttgtaaatgcatagaattgctatgaaaggatacacaacatatagataacagtgattaactctggagaggggactagaggctgacctccatggggaagcttaccatttattgtatacccttttgtattgtggaatgtcttaccatgtatatgtattaatttttc

SEQ ID NO: 437404 - DNA, 522 bp, Homo Sapiens
  misc_feature (344)..(387): n is a, c, g, or t
ctttttaggactgaagaatctgttttcaaagcactggtacctgtgtgagtgagtatgtaaattaaagttatttaaatggtgtggaatatgtggctccttttccatcactacatcttttcttccggatcttcatcatggaagtttcatttgttgcggaatatggaagcacctcccaatggtacggtgcaccctgtggtggtcttggacagtatgtggaaacagaagctccatgacggtagaagacttctcattggggagcaactttttgacgcacaacttttggtgcgtttttctagttttaataccttaagctttttcaagacctaactgcagccgctttgggnnnnnnnnnnnnnnnnnnnnnnnnnnnnnnnnnnnnnnnnnnnnctgctttgcataaaacagtcacctgtttcctagtacctcaaacttaaccaagggaactctctgcatttgtcagtactacctgtcgtcgttgtggttaaatgtagagagaactgctgggcaagatggtgaatggag

SEQ ID NO: 437405 - DNA, 881 bp, Homo Sapiens
  misc_feature (454)..(470): n is a, c, g, or t
gttatcaaacaaataagttttattggcatctaaaaacaaaattcacccaacattgaaacgtactttaatatttatgttgttgttttcttgtttcttttttactcactgcagtatgaggaacaaatcacaaacacttactttggagaaacagagaccatagtgtagattttacaaaatcactttttaaaatctctgtattgtgctcctcaaatacctagagccagtctttgcataaaatatccacagctttatctatagccttaaaattgtgcagcagcctaaagatatggataaggatataccaccacttgctattctgaaatatatctattaccatatccaacctaatgatagtatctaaaaaattctttcttccataggaagtctctgacaagctgttattcatttccttgacgttaaaagaatctggggccaacatttgtattttatcagnnnnnnnnnnnnnnnnngtttacctaccatgttcatattaagaacaatgtctatacaagtcagttgtacaattattttaagagaaaggtgaacatgaacatcagattaacttaattctggcagacaaaagtgaacaactatggtccagtcagccattatctattacagagagatgacaactttacaaaaggtatcttttacctactgagtgatgattatgtcccctcagtttctgtgctttctaccactggttcactttctatatcagcaactgtgtcactcttctccttgtttatttcatttgaagatgtcagtttttcataaagttcaggatcattctgtactggtataggtggtggctgagcatgtctctctgtattttcaccattaacctgaggcacattatcaccttttcgttgagaagtggc

SEQ ID NO: 437406 - DNA, 749 bp, Homo Sapiens
gactggtgaggaatttttattttccttttcatgttcactaattgcaagctttctcattcggggtaatatctaagaatgatctcctcttgtcgggggtagatttttccagtagcttctgaactccctgacccagaagcggtgtattgcgccctcagcatggaggaggacgtgaaggcgtacggagtctgggagtagtacaccacgtaggtaggtttgtactggtttggctttgtgtactgtgttccccaggcaattcgaatccagactgcattctcctcagtttctctgaagctgactgtcacattttttaatgctctctgaagaattttcttgaacgaatttttaaattgtttcatatcaaaaaggtcaacatcttcacctggtcctttactcatctgaaaaacatcccaaactttctggtgctgatgaaattgcatataaatgatgtctaacagggcagcatcactgatacttgcacgcttttcctcacacagatggatcaagtgctgaactacagattcctttctctgtcggaaatttacagtctgcagttgattttcagacaaaaaatcccaggccttcaggattgttgtcagttcattcatggggattttcaagatggtcctcttgatgaactcagcaacagtctcatccatctctttggcacggcccacatctcctgcagtctcactcctcaagagctgttcccgctcgccgcgccttcaaagccaccaattgcagttcccccc

SEQ ID NO: 437407 - DNA, 781 bp, Homo Sapiens
  misc_feature (103)..(111): n is a, c, g, or t
ggactgttttctcactttcctcccatatctccgtccttcatccaaaaccttcccagaatccatcagcaagcatgtttgaggcctgtggtgtaggggactgaannnnnnnnnaacttctattccattttaattgtaggatatctttgtccatatacccaggtgtcctgatttgaatgtactttgatcctcattgtgttcaggcaaaaaataggaaatgagtaattttgagtttgaaatctctcccagaagacaaactacttcagtgagtaaaagctttgacattttatgttttattcataaagggggttaattatttgctacaaagaagcacgatctattttcatcatcgatttgaaaatatctgtaactcctatagatcctataggcagagagttttcctttctgactttttccctttgctttcgtgtgaccacatgttttctgtaccagtcactggggaaagaagtgagtttatctcgtttgttttaaaagttttgcttgtctatttagcattcctttttgggtctcaagatttatggaacaataaatgtcatttaatgctgtgtgcttattttgaattcctcatcaggttttagaagcggggtaaaaatacttagatgcttatcagacttgaaattatactgagtggcattgaacgtgagtttgtcccagtgaaacaggctaaataaattttggcaccagcaaatttgttactttgtttttttaatagtaggatgtacacatttcagtataataaatgttttctgattgttttgcaaaa

SEQ ID NO: 437408 - DNA, 341 bp, Homo Sapiens
  misc_feature (19)..(19): n is a, c, g, or t
  misc_feature (239)..(239): n is a, c, g, or t
attctcgagaaccctttgnctgttgttatttttcgccgtgtcctccgaaaccaagggaaatgcggctctgtgggttctgttaacgtcagcatttaataagtgaactctaaatgcattgccccttatggttgccgctggcctcctgagttgactcagctcttgcaacgtagctagttgataaccctcgaaatatagcgaattgagatgtgctatattgtaaaatacgggacttagtacgnaaaaactgatgtaaaaattatctcaatactttttaatactgattacatgttggaatataatgttttgcatatattgggtcaaataaaaatgttattaatttc

SEQ ID NO: 437409 - DNA, 355 bp, Homo Sapiens
tcatagaggagtttggaaacacactgtgtgtaaagtctgcaagtggatatatggacctgtttgaggccttcgttggaaacgggatttcttcattgaatgctagacggaagaattctcagtaaattctttgtgttgtgtgcattcaactcacagagtggaacgtccctttagacagagcagatttgaaacactctttttgcggaatttgcaagtggagatttctagccatttgatgccaacagtagaaagggaaatatcttcaaataaaaaccagacagaatcattctcagaaaattctttgtgatgtgtgcgttcaactcacatagtttaacctttcttttcatagagcagtttg

SEQ ID NO: 437410 - DNA, 129 bp, Homo Sapiens
acaagagttgtatatttacccacatatcaaccattgctgatactcttcattctttagtgtagacccaaattttcaaataatactctttctttctgattttatttcttgcattgcagttctgttggcagt

SEQ ID NO: 437411 - DNA, 605 bp, Homo Sapiens
  misc_feature (255)..(255): n is a, c, g, or t
aatgttctgtttctgactgattatgaagcaacaaagataccattaaaattcctagctcacattggcccttcatcttccatttttcaaggcataaaattgtccatatattagattggccaaaatcctccacaaatacaaatataccctacaaatgtacaagagagatccttttcagttctcttattcatagaggcataagcaaggaaaaatagagagatcagagtctcataatagcagagaagtcttgatctgtgntactgggacaaagcgtccactttaaggttgtcatttgcttgtggggagaagcatctctagtttagctttactttaagatctctgatggggtgtacagttccaagagtctcaagggacccttctgagttgtgatattatgaacccaaggcccaaggtcccaacgtttttctgctgtgtggatggcaaagacagtctttctctgatgttgttctcaaaagatacaatctctaagttctagattatgaagggtttgattattctcagtcaatagaacatgagaagctttctttacctggtaaaaatataccttggcataatgtattaaagcattgcagcatttagctctatca

SEQ ID NO: 437412 - DNA, 1095 bp, Homo Sapiens
  misc_feature (103)..(142): n is a, c, g, or t
ttttttacacaaacattaaaataagtttattaaatagagtttgggagaaaaaaagtaagaaattccatatatatgcaaatgttgactattatcgagagcagcnnnnnnnnnnnnnnnnnnnnnnnnnnnnnnnnnnnnnnnngtaaataacagaagatttgtttccaaaaagtaaggtgccattcagaagtatataattgaattaacataaaaggaaaattgtgaataaaaaacagaacatgagatattaaaggttaaaactttctgttcagttatttgtatctgaagttaagacaatgacataaactgagctttcaaatactggtaatttttccacttaaatgtagatcaagtaccatatagactattttgttctagaataaagtttctttgaaaaaggaacatatttataatcaaatttctgtagataaatggcaaaattttcagagaactagcttgaaatggatttagtagaaagaatgactgcttcctttaaaaaaacaaatatagaaatcttgcttccacgtaactttttaaaaactaatgtccattgtttttcccaatctgaatatgtttccatacatgtatgtatttgcaatttctattttccaatatgtaaaaagttggtagacaatgaagtagtgtgcaaatttttaggagagaaaacaatccctactggtttactaccaaactctcacagttatatagaatctattagcactataaactaactcaaaatgcaggcttcagaaaaactgcttcaatagcctccctatcaatctgtcgccttctatgaagtcttcacctgctattattccacaggctgagaattacttctgaaagaaatggtcaattttttcaacagcttggtatgttgacagcttagcaacggtacttgaatcacctctttaaaaaaacaacacaccactaaaaacacacttatcatccatgcttggtatatctcacaacaaatttgaaccatgagacattcctaataatttgttgtgagatataccaagcatggatgataagtgtgtttttagtggtgtctcatggttcaaattcacacgcaatcccataaaaaggatatgcagc

SEQ ID NO: 437413 - DNA, 857 bp, Homo Sapiens
ggcagtggaaaatgcttcagtactttattgaaagaaagcaataaataatactgtgataaaaatagttcaaaagtagactgtacatactttgttacataatcaggaagttgacaaaagattaatagaaaaacagaacagtaacaatgaattgtacaagtaaattaaaagcagaaaccaactgaaaagacaggctgcctctgtctctggatctgctgcacaataaataccacgccatggtctgacacactttgctggcttgttaatatgccatttaaaaagtaaaagccacatctgcaacttacacaatccaaaatggctagagcatcaaagtctaaaaatgtcccactaggttcgttctttaaacatgtttacaaacaaatgtaaaaagatgatttacataagaaaaataaggcctttattagagctgcactgcactgctttctgggtctcctgccttcatccactgtgtgcgccgacttgcaggatgagagcgtggtgcttggtgctggccctaaggggagccacatgggtgtctctccacccgctcccaaggagcagaggcagggaagagggtgcaggggctagactggtccccaggttaccccatcccgagtctctccagctgagagaactgctcccagctcacagtctcagccactgaagacaagctccccaaatccagagactagggctaggaaagcgttaaccagtgctaggggcttctcatagtgttgtgatagtgttttcagtccacatcttattaggagctgatatttaacaccagccattttaaatctgttcatgctgcagaataaagcatctcttgctagaaaaagtacagttaaggtcagtcatac

SEQ ID NO: 437414 - DNA, 859 bp, Homo Sapiens
tttttggttttatttccattttatttattgggcgcatgttgtgtgccaagtactaccaggccgacctaatccttcacttccttctgcctggaaaaccacactatccccaagtccagctcaaagggctgcaacctccagcaggccttctggcacatccttacactaccctgttccaaggcagcctccccgcctcttccgggcttccctttatggcagccttgatcacagcagttaggattttcagtaaggtttacattagtgagatttccccgggccatgatgggagtggaaatatttgacaaagataaaagtcctcgccttggcatagaacaggctcatcacttctctgacctcatctcttcctcttcttcccctgactcactgccaccatactagcgctctttctagctgtttgagtgaagcgggcacaatccagccctcaggggttttgcatttgctgtggttccctttgcctggaatgctgctggcccacatccacgtgcctcattctctcacttcttccaggtgcttgcttcaaagtcatctccatgaagcctttccgatttaaaaattcctacctgcactgccatcattccagatccccagatcgggctctattcctcgccttttgaagagcactgatcaacttctaaggtacaatttgcttactgtgtttataatctattctgggtgtcaacctagcagaacgtaaaaccccaagaggacagggatctttgttttatccactgctgtctcacgtgcctagaaagtgactggcacacagcacacaacaaatgtttgttgaatgcctgccagagcaggccaagaaaataaaatgatcagaaggaggtgggcaaat

SEQ ID NO: 437415 - DNA, 265 bp, Homo Sapiens
  misc_feature (63)..(73): n is a, c, g, or t
ctcattaagattttaatgtagctgtaaatgaaattctcgttttaaaaaaattaaagtttccannnnnnnnnnnagaataaagatttagtgcacaaatacagcccaaagccaacagaaaaattgctttgccctgtcatttccctaagaaagcactgaagttaactcaaaataggctgaaagaaaaaaagcaatcctctgggttctaggtttcacaaaaggaccacgtgttaaactatgtacatcggtttgatgtgcaagtatgcaa

SEQ ID NO: 437416 - DNA, 1034 bp, Homo Sapiens
  misc_feature (2)..(2): n is a, c, g, or t
  misc_feature (7)..(7): n is a, c, g, or t
  misc_feature (10)..(10): n is a, c, g, or t
  misc_feature (26)..(26): n is a, c, g, or t
  misc_feature (30)..(30): n is a, c, g, or t
  misc_feature (48)..(48): n is a, c, g, or t
  misc_feature (215)..(215): n is a, c, g, or t
  misc_feature (520)..(520): n is a, c, g, or t
  misc_feature (524)..(584): n is a, c, g, or t
  misc_feature (872)..(873): n is a, c, g, or t
  misc_feature (881)..(899): n is a, c, g, or t
  misc_feature (948)..(948): n is a, c, g, or t
  misc_feature (983)..(983): n is a, c, g, or t
  misc_feature (997)..(997): n is a, c, g, or t
tntcctngcnagatatacattgtttnagancccctgatacagaactanctttgagatggtaagattagaatatcatgaaagtttaaactgaatccttgcagcgacttccggaatttaggaagcattccctcttctaacaggggtctggtcacaagggctggattctctgacaaaaatttcttctatggattctggacagaagacacttgagggtnatatgttttaaaggaaagaggttatgcttatcttcttagcagttgataaaatattaaaactctcttgccatagagaatacaccatcaaagaaaacacaaccctttccctttggtgtacagttatttattaagttgattttggggtttctttcgccagggatcttttcaaaactggtagtagttatttttaaaaatcatgtttgacatctttctattgctcgtaaccagtccctgtagctgtctaagttatgggtggagaagcctgggtatgactttccgttgtgtacactcacacttcatgattnacannnnnnnnnnnnnnnnnnnnnnnnnnnnnnnnnnnnnnnnnnnnnnnnnnnnnnnnnnnnnaaatatgtttcctttttgaacttacagaattgttgaaattttctactaacagccagctaaaatttggtatatgttagctctatctgtttcacttggacgtttcattttgaaagaaagaaattttatgtttcacatatagttttatacaaagtagccagtcccataatgaaatgcttgtattgccatagtggtcacacccaagtggtccagtatctcaatggtgaggcagccagactgggcagggcgggtttgttgaaatgtgatgattgtgatatgccgtctttgtcnntttctctnnnnnnnnnnnnnnnnnnngttttattgttgtagatgtagttttttgtttttaaataatgtttttatnatttcattcgtatacctaagtttgtattttttgtnatttttgattctancagtttgtatattgtgacttctaatgtgattactata

SEQ ID NO: 437417 - DNA, 186 bp, Homo Sapiens
gtaaggtgttaatgtaagatgtttattagtggaatttatttagtacagtaatcacattagaagtcccaatatacaaactgttgaagtccaaagtcacaaaaaatacaaacttaggtatacgaatgaaattataaaaacattatttaaaaacaaagttctacatcttcaacattgggccaaaaaagg

SEQ ID NO: 437418 - DNA, 2448 bp, Homo Sapiens
ttttttaaactttttgtttggaggcacaaacacaatttatttcaatgtaaaggtactaccaaatgaaacagtttaaatgcttgtaacaaacgtgttatccaaaacagcacaatatgatgatgctaagacttacaaaattaacctaatttacagtattgtcaaacatgatttcatacaaacttgaataaacaccacatctaactaggtcaaacaactaccgagttcaaataattgatatggaagtattttggtaaagtgcccatagtgagagtttaaaaagcagcccctgttttctatagaaaaagttgtgacagtgaataactcatcacattctctgcaatactactcagcactcatatacactcaggggagcaataccctggacacatagcttatttcacattagtgaacaaactcaagatttttataaagttctgactttgggccagaagataaaatgtcccatatatacatatatacaaaccctaattcctaccctcttaaatcctctagttctaagaatggctttttgacttgtctttaagtttagaaaggaaaaagtgtgcaatgcgcttgcatctgtacttgctgaattatgaaacaaatatgttaaatgagaaaaacaccttgggatggtactaatacacttcgattatatacatgatctttgggtattcatgacaatcagtttaaccatctgttgccttatgaaaaacttaatttcctaagttacccaggaaatgtatttaaccatttacaaaaacaaaaattctaatatgcactttagaaaatcgtggtcttatatacctgcatatttcttccataagacaggtacacattaaaaaatattgctcaatgacataaaaatatatattatttctttcctttgccatttatgcatataaatatttcaccgaagaagatgcatcattcaataaacaaatgcaaaaactactttatataaagtgtggttctctatttagcaatataaaatataaaacgataataatacagttagctattaaagagctaaattcaagaaatttgcaaaccagtacagcagtgaacagtcccttgtataatacaaaagtccattatgaaaaagtcaagtctattttgtaacaggttacataaaaatatgggccaataaatgcattatgaatgcagaaacagcactgctccatcagcacattcttcagtcttgtttggactagatgccaaacttactgttcatttttcggttcatcttgttttccattaagttcttgatcaacttgttttatgcattctggtatgccaacgtattccatggggacaagttctgctagttctgccaaattaaacacgtatctaattttttggctgaatttcgagctaataaatggtcttgtaacagccagaagtgttctgataaaccaagaaggatgtacaatgattagggattttagatttttccgtaaccttctatcaatttgctgataacatttcctgagccatcccagactgggcatttttcttcgagttgttgcaccatttaaataaactatcatgtagttttctgctactagtagctccaaagtgccaataacatatttaaaaagattgtccatcaggtatctatagttaggctgactactttcaggcatgaaacagacagcaaacacaacaatggcatttaatccatccccataatatcccccatggctgataacttttttatagggttcaattgccttcatatcaaccctgtggtcctgttctccaatcctgaacatacgccagcgtcgtccatcttctttttcctctgctgctgtgtattcagtaattgagcctttcctaattacttcagtagtcttgggttttggaagatcatcttcccactcaaactcattactattctctgacggtgtgtctaagccatctaagtcaatctccccactttcatccaaatcatctgacaatacagagccatcactaggatccagtgtcaggctaatgtctggagccattagtttctttctcactttatttccattaacttctagtgagccaggctggtcctctggtccagttatagctagtatatctgcttcaatactatcatcttctggtaaaggtatcggaaaatcttcatcttgccattcttctttaagttccacaccttccatcctcagcctggattcaatgtcaactacaaactcttgataatccagggagccaatgtccccggaggaagccttggccccctcgtcctcttcgcccctccaggccggcgacgtggggctgacggccaggtcgcaaaaagcagggccgagcggagcccgctcccctcggtcggcggtggagaccccggcccaatcccccggccgcagcggtacggcgtcggcggcagcagctgacccggacacccgctctcgacgaattcgagctcggccgatttggcctgat

SEQ ID NO: 437419 - DNA, 430 bp, Homo Sapiens
  misc_feature (360)..(360): n is a, c, g, or t
  misc_feature (410)..(410): n is a, c, g, or t
gttttttaatcagtcttttaaaactaagctatccgaactacataacagttatgtatatatatatattttttaaacgctacaaagactttaaacagctgttgataaaaattttggtagaatcatgaggttcttctctcatctacatatttaaaaggagaaattgaaataagaatgggtcaaatattgaccaatgaactcgataaacatcaactaatgtagccacatggcacaaaattaagagagtacaaaacaaaacctttcaaggtgggggtggggggcaaattaagaaaagtgaaacaaaaccataaacaaagcagcggggttcacgacgctaaagctattctaaagacttggtgacgnggcgacggtcgtgggggctgggtcccggccaggggagtctgtggggaatnttaagggaagtagttcgacg

SEQ ID NO: 437420 - DNA, 789 bp, Homo Sapiens
  misc_feature (322)..(335): n is a, c, g, or t
ttttttatctgcacatactaagttgcttttattaatccagaacggcatgctacagatactgtacagcatgaacatttattcattacaaaaatggcttccaaaccattaaaaatgaacttggaataagagcataaaacggaacagtaacatcacaactgttaggaaacattcaaagtattcacaaaaaatgttatagttagcattttaataaaccagagaaaaatcggagacagttttacaatcgcttcatgtcaactacaatggcactgaatgaacaggtttcagctttatacagcattttgcaacatcaacatgcctaggnnnnnnnnnnnnnnaaagtctgctgcctactcgtatgtaatatgtgtacataaaagcggcagctggtttttcgtttaagagtaatctaatatacagaattttggcccttaagggtttatacctcttcatttaaaatgctttctggacaatctgctaccaaacacattttgttataggtgacattaaaactacatacaaatctacctatgtaacatcacagcaaaacatgatgaacaaaaattacagcatcaaaaagagggagaaagctaaattcactgagaattttggcacgtaaagttttgtacacggtcagtccgggtcctaagggcgcagggtagggcatcccactgggagttcaaaggggaaacgaagatggttcccactgctgctcagacagtgtcgctaaaattccctcactcattttcaagtcttgttttacataatggcttttaaagcaacttttgttcc

SEQ ID NO: 437421 - DNA, 1633 bp, Homo Sapiens
  misc_feature (1405)..(1405): n is a, c, g, or t
  misc_feature (1420)..(1420): n is a, c, g, or t
  misc_feature (1607)..(1607): n is a, c, g, or t
  misc_feature (1624)..(1625): n is a, c, g, or t
tttttttgtcaagcacagagcctttattttacattttctcaaagaggacattgtttaagtgagcagctaacagaatttataagagagaaagtgacagcaaaggtaactggctcaagtccctctgtgtacggtacgccatgtacatttcatgtctgagcaccttgtgtgtgtggtttaagtgaaggtaaggcagtgtagattgtgcgaacaagagatctgtgttctgtcatcaggaaaggctactacatgcatcacacaaaatgcacaacctgaaatgcttcaatctgcaaccgaagtttcctcaagcaagaattcgcatgaacactgacgaacacatacagagcaacttgggcagagagaatggatgatgccatgaggcagtgaggttagcacactgatcaagagccccaaaagcaggagccgtcccagtggcagagcaggctaggagggtgagcagcagccatctccagccaccttgagttccttcctgccttcactctaagttgagcagctccacgtcaaagatgagggtggcattgggagggatgacaccggggtggcccgtggctccatatgccacatcaggggtgcaggtcagcttcgccctctgccccaagctcatctagcagggatgggggcagatggggagaggagaaagaggacccagctgggctgcaccctcttcaaaacctttgatgacttcctgtttgccaattctgaacttgaaaggtttgtttctgtctctggatgaatcaaacttcttcccattttggagcattcctgggcttgctgtctgctaagtggctgtcatcgagtttgccactttaggaagcaggtcacaaggcagggtgctcacctcccttggaacaaacacctgctcatgatcttcctgccagcagtcctgaagaactcactctacctcgcctgcagataaagagcatccaactgggatcagtcccgctctgggctccctcagtacccagagaaaagcactgccatcaccccacccctcaaatggcatcggagcctctgggtgacttgtctgtcctctcccctcctcttcttctctaatgatactgcaggatggagagaaagtctgcggggagctctaggagggatttccaaatatcagacagacccagcagggacaggggctccaccatacctgcaacagaaggaaggggactgaaggtgtttgactcacctagaagctggcaccatggatggcccttgctggtagaagagggaaagagttggccttccaagcctcctttatcattcccactagactggctgggaggagtagaggatggctggtcacagggagaccctgctgccttgggctttagccctgatccagaggcaggcacctctggagagaagctcagaggacagccctgccttngggaggggaaggacnttggtgggggctgagggggtgagacttacctgtgtagtgcaccacacacgtttggcccttcttggggaatgtcctttcgtctccgggggagatggtttcgatctccacgcccatagcggtcccacaggccccgcctctggggggtccctgctgctgcccgaccccggctcggctccggccccagccnccgccgtcgctccggcnngcctcctc

SEQ ID NO: 437422 - DNA, 1324 bp, Homo Sapiens
  misc_feature (719)..(719): n is a, c, g, or t
  misc_feature (750)..(750): n is a, c, g, or t
  misc_feature (776)..(776): n is a, c, g, or t
  misc_feature (820)..(820): n is a, c, g, or t
  misc_feature (847)..(847): n is a, c, g, or t
  misc_feature (901)..(901): n is a, c, g, or t
  misc_feature (940)..(940): n is a, c, g, or t
  misc_feature (996)..(996): n is a, c, g, or t
  misc_feature (1046)..(1046): n is a, c, g, or t
  misc_feature (1054)..(1054): n is a, c, g, or t
  misc_feature (1123)..(1123): n is a, c, g, or t
  misc_feature (1126)..(1126): n is a, c, g, or t
  misc_feature (1128)..(1128): n is a, c, g, or t
  misc_feature (1133)..(1133): n is a, c, g, or t
  misc_feature (1217)..(1217): n is a, c, g, or t
  misc_feature (1226)..(1226): n is a, c, g, or t
  misc_feature (1232)..(1232): n is a, c, g, or t
  misc_feature (1296)..(1296): n is a, c, g, or t
actgcattttaagaagagtcttcaggctatgatatagaaagggagtgaatatgagattggggacgagattgaaagcagggaggagagactgaagatggggagattagctcaggggctgctgagggatgaaaaggcctcagggagatgctttctgggacccagcagcaatgtttcctgcgtgggcaaagaagcctgtactccaggggatatctgaagtagtggctgggattggacaaggaagatggcctggagccaagaagttatccaatttcctggggaggggagctgttcatattaataatatctgatatgaagtttgcccatcaaaccctgcagacaatgggggctttggtattaattaaatttcaagaaataaagaaatggctattccttgcacacccagacccagtaatggggggacttgggaaagtgagacacggaagggggataaagaggatcacttaggagagaaggtgggaagcgagagttctgttttggacttgctgacccagggagcaccctgggacgtccagggagaggttcggcccgtaggtcgcagggctgggcttagaagcttcaatgtggaggccatgggagtggacagggtggccagggagtctgaaagcggcggcaggataaagcgagatccggaagcgggcaagggagcgcttcccctttccccagcctcgcggtctgtccctacacccgcttacagcccngcctgcagggaagtgaccgaggggaggcccngcgggggacgcgttaggaggaggtcnccgagcagcgggtatccgagagaaggtcctgttttccagagctngccgagtagggcagggaaagtgaagcngaaacccaggttggggtatcagcagcagcggataaccgaacgactgcagccgcnaaaggagaagcccggggcggtggcgggctgcagaccccngcttccgggctgcagacccccgcctccgagtgccgcctacattcccctaggtgagngcggaagaggatggcggaggatggtctcctagacccccaagaatcccgtnccggcgtntccgcctgccttccccatcacagccccccgacccttcagcaccctccacgccacctccgaatcagaccncancnccatnccgctccgccccgggacccctcccctcccctggctccggagggagcccggtaccgtctccgggggagatggtttcgatctccangcccatagnggtccnacaggccccgcctttggggggtccctgctgctgcccgaccccggctcggctccggccccagccnccgccgtcgctccggctagcctcctcgc

SEQ ID NO: 437423 - DNA, 925 bp, Homo Sapiens
  misc_feature (845)..(854): n is a, c, g, or t
agcgggcagtggcggcgaggaggcgagccggagcgacggtggggctggggccggagccgagccggggtcgggcagcagcagggaccccccagaggcggggcctgtgggaccgctatgggcgtggagatcgagaccatctcccccggagacggaaggacattccccaagaagggccaaacgtgtgtggtgcactacacaggaatgctccaaaatgggaagaagtttgattcatccagagacagaaacaaacctttcaagttcagaattggcaaacaggaagtcatcaaaggttttgaagagggtgcagcccagatgagcttggggcagagggcgaagctgacctgcacccctgatgtggcatatggagccacgggccaccccggtgtcatccctcccaatgccaccctcatctttgacgtggagctgctcaacttagagtgaaggcaggaaggaactcaaggtggctggagatggctgctgctcaccctcctagcctgctctgccactgggacggctcctgcttttggggctcttgatcagtgtgctaacctcactgcctcatggcatcatccattctctctgcccaagttgctctgtatgtgttcgtcagtgttcatgcgaattcttgcttgaggaaacttcggttgcagattgaagcatttcaggttgtgcattttgtgtgatgcatgtagtagcctttcctgatgacagaacacagatctcttgttcgcacaatctacactgccttaccttcacttaaaccacacacacaaggtgctcagacatgaaatgtacatggcgtaccgtacacagagggacttgagccagttacctttgctgtcacnnnnnnnnnnataaattttgttagctgctcacttaaacaatgtcctctttgagaaaaagtaaaataaaggctttgtgcttg

SEQ ID NO: 437424 - DNA, 879 bp, Homo Sapiens
  misc_feature (43)..(79): n is a, c, g, or t
tgatatagatcatatggggactgggattacgcggtggcggcgnnnnnnnnnnnnnnnnnnnnnnnnnnnnnnnnnnnnnatcaggccaaatcggccgagctcgaattcgtcgagagcggcggtggcggcgaggaggcgagccggagcgacggcggggctggggccggagccgagccggggtcgggcagcagcaggaccccccagaggcggggcctgtgggaccgctatgggcgtggagatcgagaccatctcccccggagacggaaggacattccccaagaagggccaaacgtgtgtggtgcactacacaggaatgctccaaaatgggaagaagtttgattcatccagagacagaaacaaacctttcaagttcagaattggcaaacaggaagtcatcaaaggttttgaagagggtgcagcccagctgggtcctctttctcctctccccatctgcccccatccctgctagatgagcttggggcagagggcgaagctgacctgcacccctgatgtggcatatggagccacgggccaccccggtgtcatccctcccaatgccaccctcatctttgacgtggagctgctcaacttagagtgaaggcaggaaggaactcaaggtggctggagatggctgctgctcaccctcctagcctgctctgccactgggacggctcctgcttttggggctcttgatcagtgtgctaacctcactgcctcatggcatcatccattctctctgcccaagttgctctgtatgtgttcgtcaagtgttcatgcgaattctttgcttgagggaaacttcggttgcacgattgacagcatttcaggttgtgcatcttggtgtgatgcatgtagtagccctttcctgcatgacagaac

SEQ ID NO: 437425 - DNA, 716 bp, Homo Sapiens
caagattgagctccctcttgcaatgtttctcaaattcatcacgattggaacataccgacggaattcattttctgtctgaagcaatgagtgctatacatgaaagttttcctcacatataatattcatcaagtttatttacagtataagctttccgatgctaagggctgagatgtgattaaaggctttgccgtattcatcacattcaggaggttcctttctggaataaaattctctgatgtctatgtgaactgtcccacgtatcacacgtcaacctctctatacatatttagcagtttcacttttatgcctttaatattaagtgctttacatatcaagatgtctcatagatcgataatctcaggttttagccttgcctgccagggctggagtagaaacaaataccccacaacctgaggattttacttctcttcctggcaagggtagggtatatattgaaaaactcttcaaaaatttccattaggacaactagcatgctaatggttaactgtagaatgtttcaactgttaacagacttcagcgggccaagaacttttgaatgactatcttgaacgccaattagatgttgcaagcgtttttgaccatgacccaattacactttgcactgagcatctgataaacgaatgcactgcaagtggttttaataaacagttgtagcctgttttcctcagaaacccacgcgtccgcccacgcgtccg

SEQ ID NO: 437426 - DNA, 2439 bp, Homo Sapiens
  misc_feature (323)..(358): n is a, c, g, or t
  misc_feature (1065)..(1080): n is a, c, g, or t
  misc_feature (1250)..(1272): n is a, c, g, or t
  misc_feature (1543)..(1543): n is a, c, g, or t
  misc_feature (1825)..(1825): n is a, c, g, or t
  misc_feature (1828)..(1837): n is a, c, g, or t
agagatcgccatctattcttaacatctctagggaaggcagtttccttggcaacacaattcagctctcttaggttttctcacaataagaaaatatcttggccagtctttgagggttaggcacctggcaacagttgtggtgatttgggccattgtactaggggattcaagggaagttgggtttccccctacatttggtgattattacattaatatatgatcacttccataagtctcctaagaaatcagatttttaaagaaagacacggattcagagacaatggtctgtaacatgaccaacttttgacaaatatggctgtactagnnnnnnnnnnnnnnnnnnnnnnnnnnnnnnnnnnnngattgctcttatgtcggtaggtaatgtcaggaaaagtgactgtttcagatccccagtacaaacatctttaactaggatcaaatgacttgacttttaaggtgttccattttctaagaagttacaattacaaaaagtaagcattttctacattcttacttctaagtaatgaccttctcattaatctttccttggcttaaaatgacaaataagaatccaaagtttttccactcctcctgtgggagataggaatagttgtgaagagtctgatggaataaaatgactccagagatttacacagccaccatttgatcccagcctttgtccttgtgttatttaaacaatggcttcctgctttctcaggggtcaggaaaatgatttaaaaatttgtcttcttgacaaggcctgaaaacgaagggaggtgtcgtggagaaatggtgatttttctggttacatcacttgattcaagcactccctggagctttcaaagccttttttatctgctcagagttgacacccaactcagagtcagaactcaccagaagatgaggaacacccccgaaatcaatgtttcctttctccatgggatttttttcaatcttggtacagctgcatatctcccaaactcggatgctcttgtgaaatgacagccacatcagtgtggttactccccacaaataacactagggggaaatgaccttttttatttnnnnnnnnnnnnnnnnggctaatgctatagaatgatcatgtaaagaatgttgaataaaatttggcccatgttttaattgactctaggcacctctattgaaataagtctgaggcatagtttgtgaaacatgtttcaaaagtgtttgatgtataataaatgctagaaatttacagtacagaaatagtnnnnnnnnnnnnnnnnnnnnnnncctgtagattacagctctgttcctaagaacctcagcctttattgtgtcttagtaaagttgatctgctttatttttagtttattgaatttctggtgtactagcctcttaagatagaacttttaatacatatgtactggttaatgcctgtttacgcagaaaatggcactttgttctttcagtgtgtttccctcagtgtcacagggtatatcaatttgatagatcatttgacatttgtcaaaaatacgtttcccattttaaaaatatgtataantggttgcatagacatatgtcactttttgcagtgtcttcatcttgatcatagttttagacatcaactatgtttcactttccaacttgccatagaaatttggtacatttgcaaattctgttggaatctagtgagctgaatgtattggtagatcaaatgatccaaaggacttgggtgttatccttcaggtctgtgttgaaccattcaagatattgggaatggtccttacacaagggaagtcttttgagaatatttgttctcttattttttgtttgtttgtgctgngcnnnnnnnnnngtaactttaaaaactcagaaaagccactgaactgtattttgtgaccttatgattagttttatctttcaactgatttttattgttacttttactcaatatcaacagtacttcaatagatatttattagttatgttcaatctaatgacttaaaacagttgaaaaggaggaaaatcaactccagtccacacatacagtcatgttacattaagatgtcatgttgtatgtcacacagtttctagattgatttctcttgtgtataagttataacatcaaaaatgccaaagggtatataaaataagctacaataatattcaacagaacttaacctggaccttatgttgtaataatttattcatattagctgtagtcttctgtatttatattttcagtatttattatgaatgacatggaaattcgtgtatttattgtggctttttattgcagtgtgtatatatatataacaaataagcatttttaagtcttatccttaagtttcttttattagtggcacttgtattatgctgtactttttattacatattgtacaatatcttgtccatttgtttgcagcagagtaaaaccggtttctaagttgtaaaaaa

SEQ ID NO: 437427 - DNA, 1550 bp, Homo Sapiens
  misc_feature (401)..(411): n is a, c, g, or t
cctgaaaatacagcagtatttgaaggactaatttttctctgcatcagttataaggaagcttcccatctatgaacaggaacaaaaaaagtatctacaaaccttgtaaacagatctgtatcatttataaacataaataatccaaattattaacagccaacagcagaaattaaactatcaattcaacgatccagggctctttgtcttgcccagttttactcctccctctctctcccatccagggactgagataaactaaagctctgctaatacactgttcagggaccatgcttggggtactactgatgatccacaggtcacttacgctgagttactgtttatctgtcagttcatttctcccaccccccaaaaaggcaccctcagtctggcagaaagctttgtcnnnnnnnnnnnttaaaaaaataaatctacattcgtacaagtgtgtcttctgttgaagtccaaagacaagaatactagcttgtccatcacaatatgtgaaaagacccagtttcaatttgtttctttacaatgcagctagtgtgttaacattcagcttacaatcagagtgatgtttccaaactatgtagtgggcttcctggggatgaagaggtagcagacttgttcatttctattgtaaggtgaattccactgtcaacagcattgttatttttgttgggagagggtggaggactggagttacgttttgtaggagcatcatcttcggcatcagtgtcatcaataagggggatatgaggctctgaatcttctatcctaaactcaggatgtgtcataaagttgtgaatcgaacttcttgattccggtttttctaacccttcatataaagaactacgaaatgcattcaccactcgaatctgtgtttggattctgttcagacctctaaaccacaagatttggccacgccgcaactccctttcagcgtgatcaatctcttcaacatcctctgctaattcctcctcaggtatttcttccttttgtgttccatgaccagcttctttgaggaattttaaacggctagttggaattgttgaaataagctggccccagagtaatgttcccattcctaggaatattgaccatagccactgttctattgaaagttctgaacaactgaaaggttttccaccaaactgcacaattattatctgtaccacaaaagtgcctaaaacaattgtgcagaagatggcattgttaaagattccttcgaatacatttctttcaccatgaattttccgggcatttatttcgttgaaaagttgcatcagcacaaaggtattaaaaacaatagtataatgttctgaaggaggagcatgcaaaggagcatttcttccactatcaatgtcaaaaaacttttctccagcaaataagagtgtaaagactactacaagttgatagaatgcatgacccaaaatattcttcatcattgtacgtgagatgagaggcttatttctaccataaggtttccgaagcaagagagactcagtgggtggttccgttgccagagccagggaagcgagtgtatccattatgag

SEQ ID NO: 437428 - DNA, 1776 bp, Homo Sapiens
  misc_feature (1177)..(1177): n is a, c, g, or t
  misc_feature (1338)..(1338): n is a, c, g, or t
  misc_feature (1400)..(1400): n is a, c, g, or t
  misc_feature (1410)..(1410): n is a, c, g, or t
  misc_feature (1450)..(1450): n is a, c, g, or t
  misc_feature (1510)..(1510): n is a, c, g, or t
  misc_feature (1543)..(1543): n is a, c, g, or t
cctggtaccggtccgcgaggttctcgggatatcagtcgacccacgctgtcgcgtgacgcgtggggccgtacttatggagggagtgggaggccctgtgccagcagaaagctgcagaggcagttccccgcaacccaggaggcacaaggggaaacggagcctactgaacaggcacctgatgccttggaggcaagcagcagacacttctagacggaacgcagaaagctccagaggccaccacacagcaggaaacggaccactgatctcccagaggcccctccaccccccctagaacctgctgtcatcgcacgccctggctgtgtaaacctgtccctccatgggattgtggaggatcggaggccaaaggaaaggatctcttttgaggtgatggtgctggccgagctgtttctggagatgctccagagggatttatggctatagagtttataagatgctactgagccttcctgaaaaggtcgtgtccccacctgaacctgagaaggaggaggcggccaaggaagaagccaccaaggaggaagaagccatcaaagaggaggtggtcaaggagcccaaggatgaggcacagaatgagggcccggctacagagtcagaggccccgctgaaggaggatgggcttttgcccaaaccactctcttctgggggagaggaagaagaaaaaccccggggcgaggcttctgaggacctgtgtgagatggccctggacccagaactgttgcttctgagggatgatggagaggaggagtttgcaggagcaaagctggaggattcggaggtccggtccgttgcctcaaaccagtcagagatggagttctcttcacttcaggacatgcccaaggagctggatccctctgctgtgctccccttagactgtctgcttgcttttgtgttctttgatgccaactggtgtggctacttgcaccggcgagacttagagaggatcctccttacccttgggatccggctcagtgcagagcaggccaagcagctggtcagcagggtggtgacccagaacatctgccagtaccggagccttcagtacagccgccaggagggcctggatggtggccttcccgaggaggtgctcttcggaaacctggacctgctgccccctcctgggaaaagcacgaagccagggtgctgcccccacagaacacaaagnccttggtgtcccacaatggcagcctgattaacgtggggagcctgctgcagcgcgcggagcagcaggacagcggccggctctacctagagaacaagatccacacactggagctgaagctggaggagagccataaccgtttctcagccactgaagtaaccaantagacgctggcggcagagatgcaggagctgcgagtccggctggcggaggccgaggagaccgnccggacggcngagcgacagaagagccagctccagcggctgctgcaggagnctcgcaggcgtctgacccccctgagctggagatcagcgggtggtggaaaggctgcagctnggtgagaaagagagccgcactagcactgacggnctgacgaactgcatcctggaggcagcgtggcgcccgcaaagtgagccctgcgtacagaagcacgagagcagactggaccaggccagggtgctgaccatctagctctgggacggagcatagctgggctggcttgggaatgatggtagaacccgtcattacactaaacacatcttgccccagatgcatttgctacctggatttccgggccttagctggcgactttctgccttcgt

SEQ ID NO: 437429 - DNA, 964 bp, Homo Sapiens
  misc_feature (923)..(923): n is a, c, g, or t
  misc_feature (947)..(948): n is a, c, g, or t
  misc_feature (964)..(964): n is a, c, g, or t
tccctctcccttttactccgcgcccccccgattgctctggttttgtcccttcttttgctttttccttgggtgtggctcgtctgtttcgtttgtttgtttctctcgggtctgttggtgttttgactcttggttttatttttatgacccagccccttttatataaataaattaaaccccaactttatatacaaagtcaaactgaaaccacggattatggaaagaggcaagaattatgggtaacaggggagaaggctgggccagagccaataccacattctgaacacaggagccacggggaagaggtgctggtttcttctggcaagaccggggtgactggaacgcagtgttctactggcaaacccagcccaacactgagctctttctagcatggactccattcccgtgatggccaagggagacccttcccccagaagcctgtgtccggaacctagcagagcctgtgccatccggaggagggggctgcttagccccagccaggctccatgtcttgctcttcagttccgttcactgacatcagaccttgtcccacactcgaaaagcctttttctcccctgtcttattctaaactggaagaggacaggagaaagtcagcacaagactaaaagggccccaggagaaataccaaggttgagggcaaaatgacattctaggggtgcaaaagatgttgtatttagttgttaagtggaaccggggttcctcacacatccatcccacatagcacagcccccagcctgatggcctgccgtcccctagaggctgagcatggggtcagccacccctgccctggctcccaggtctcgctctcgctgctttctggtaccgcaagggctccaactttgccgggcgccaccgctgccctcacaggatggcagttccgtgcgaggcccgtcagttgctaggtngccggctcctccttctccacccannttgtcacccttttccn

SEQ ID NO: 437430 - DNA, 902 bp, Homo Sapiens
  misc_feature (816)..(852): n is a, c, g, or t
gagtcgaatgtctcctttctgcaaattcttcttaatgtcttcatagtactcttttgacaccaaggatctatagtaccataatcaaatgtaagcttacataaatgctcctttatggtttcgtcatctctccttcaccacctccatcatttcttggcccccaaggtaggcagcattagcaaggcagaatggttctaaatatattcaatggtgaaaaattcattctctaggttcattacttgaaggccccttctgattagcaaggacttgattgtctcaggacacggtttcgataataagtagccagtaacatagagaacatatcgaaaccagcactaaagtggagtggcaattctgccattgggtgactcagacattcgttcaattgttggaaagagcagaaaggcacgaattaccgggagctcagggactcgcttcagcatctgaagtgtgaaatagctgcctattgaatggccaatgagcacaagtttcatgtcctttggcacatgagttctcaggaaagctagtttgtgctctatttgtccatttagtccataaatgtccttaatttcttgagcgtttgaatcctctgatgttgtaagaatcttcttgtctttgggagccaacgcatgcccagcatgactgatagtccaaactggaaagcgtctgtttgtcaaagagtataaagcctttgcaaatggcacataaaaggcagaaaaacctgggttacctgtccaccttgaaggctgcccgctctccctgaggttcctgggaagccccgctctcgacgaattcgagctcggccgatttggcctgatnnnnnnnnnnnnnnnnnnnnnnnnnnnnnnnnnnnnncgccgccaccgcgatgaaggccgggtcacccattagtacgcgtatccgct

SEQ ID NO: 437431 - DNA, 2082 bp, Homo Sapiens
  misc_feature (37)..(37): n is a, c, g, or t
  misc_feature (65)..(65): n is a, c, g, or t
ctgggctgggtcttgaactccctaacctaaagttganccacctgcctcagcctcccgaagtgctnaagatttcaggtgtgagctactgtgctgagcctaaatttaacatatttttgaacaatcatagacatgtcctatttttagcaggagctcaaagaaaatgtttgataaggtacagatttattatattttagtccaacccctatatttagcaaatacaaaaccacagtcatgtttacaatgtaaaaactgtagaatagctctgtatactaaaatattattaataatgcagtttttgagaaccaaaatatcagctggctgactttgcttttatgatgtatattaacatcttttagcatgacaataccactaagagaagttcaccattctttcagtatcttttgatttccagtatgcattactagttggcaaatttattttaatggcagtatggtaagaattcagtccaaagagcaaagattcattttgatgaactatttgatcatacaacatgcagcggcaaattttcaattcataaactatttttatcactcagtgaggattactattatagttggcataatcatgagaactttttcctgcttgattaaaagcatttaccattaccgttagattggctatgacatgcaagaggtccataaccccgccaaggatgtggcattcacctccccagcatgctcagttcgtatattaatggctgccttgattaagcttgaacatgaaacaccaacacacttcagaacatgtgtctcaacagagcttcctacaccttccccactagctaatcagacacgggtcatcattgtttggcttgacttctccttccagcagcagattcatcaccgcctttgtcaaatagctgcatgttcctctttttcccaggggaggagtgttgtaaaaggaagtcatgtcatcttgtttttcaatttcctttagccgactctgatctttttgaaattcattaaatgcttctttgaccagtctgtctagatctactttgtcttgaaattctagctcggggtttctttccagtacaatggatacaaccataagtaactctacaacgatctgtctgtactgtggctggtcaatatttcccaacgtgtcttcaacaaggagagagaaattcatctcatacatggtcatatctgacagggttggttgctgaggcaaatgcttcccagcaacaatgatcccattgggcgtgcgctccagaatctgccacactcggtcatagaacccggtgggagttctattcaaagacccatcgatctgacgcctgttcagccaacatcttccattctgttgaggctgcagaatattccagcagaagctgtttaacttcactaggtgacagctgatacaagtccaaggctggcttgtctccgccacggatctgaagttcatactccatggcatggatgatccacccgattcgtattttcagcatgccactgaataactcagggttattggagatgatccagccaatatggatgaccagttcttgctgaatgaccgcttccctctcatcatgggtgttacacttataatagatgatgttttgaatcactcttggagacaaaaggattagagataacttcttcttccatgcccaaaggcacccagagttacctgtttgccctgcactaaaacattagtaatggatggggccaggctgtccactactttacttaaaagacttgctgcacggcgtacaaccgaccaaagtttttggctgccagctcttctatagactctctcaatgtgatcagaaacggtaccttcctttgtgatgaagttggggccttctcttttgagcagtatacccagcaggatggcttggctagccagacaactgcaatcattcagtttttgaagaatttcgtgggtgggtttgtccttccattcactaatgttgacatccggctgctgtcccagttcaggagcactaggggtgctgctttgccgtttgacttttgaatgtttgggaggttctagttcctcaaaactcttaaattctggaagctcttctgtgtcactgattcgtaggaaatcaag

SEQ ID NO: 437432 - DNA, 980 bp, Homo Sapiens
taacctaaagaaccctacttctagcacctcctctgaaagaatattttgctccaataccacgtgcaacaaacttatttagacagtatcaactctagcccttaataggttcaaggacaagtttactgcttcctttctacacgcttaagttacactctcttctcctgttctgatgactctaaatcttcagcctctcccagcattaatgtgtgagtcaacattgcagacctgagaaaggtttctagaatggtaacccaatgttctttagaactggagaattccattttccttttctggctttagtgttaatgtctgggaagggaggctcatgataaggaaaataaaaatgaggaaaagaaggatctagttcataaaatgactataccccacgtaagtttgttaactgcacagtgttttgttgtacgggctcaggaaatgagcaagtgttagtattattaggcacacatcacgttcacagcttcgcgcagagacggatagtgtatttggatatatggaagtcatccaaatgcgttgctagaatatcaggcctatgtttgttctggtagaaccacagagactcacacaaagttctgaccctaccactctggtctgggctgagaccaccccaaaaaatcatctagagaatcaaaggggctcacatctcagttgcattctatttaaaagataaaggggccatactctccactgcaaagaagcattagtaaaacttcccgcacccaaattataatccggcaaccctagcttcagctaaaaagattatccccaggaatcttaaaagcttactattgttcttttcttgggagtccaaaatggcttaggcagttctggcagtttcacatacaaaacttcaaaactctttttattcctgtattctgtgagttccttgatgatagtaattgggtcttattcatcactctgtatcctgtggctcacacagaatctggcaaattgcatatattcaa

SEQ ID NO: 437433 - DNA, 449 bp, Homo Sapiens
  misc_feature (224)..(224): n is a, c, g, or t
  misc_feature (429)..(429): n is a, c, g, or t
ttttttttttgttcaataatagttttatttacttatttcactgttaacttggggataatattcaccacaaagttgcaggcatcattttatagtacagactacagacgattgactttttcaagattaaaaatgaacatggtttgtgacacacctgaaatgcctactgaggaagtgctggccacgaggtaataaaaaaaggtaaaattcagtgcctttggcaaagnatgtgggacactgttttaggatgcgagtatggatacatgccctttgcttacaaaggcaaatatacacccatctgtttttgggactgcggtttctctatccaccagaggaggcatctttaaatggattcacggacatttccctgaggagcttcctgccaagagaaatcagcatgctgattcaccatcgtggaagcccatttttatntaattattcctcaagcctgc

SEQ ID NO: 437434 - DNA, 658 bp, Homo Sapiens
ttttttttgttctcaaatattttttaataaatagacgaaaccacgaaaccactagactgatggcagcaaactaaggtcagatgagaggggaaactagagaaggagcagcctgagtcagtgacacaacctcctccccgaccctctaggttaaggcacttccggggaggcaggtccttggggtcctgttacacagggtgaatgggagaggaagggattaggatcccttctccccacctttgcatcaggacacccctgcccttctcaccctaccccatggccctgtccctgatttacccactctcatctcacagcactctaaggggaagttgggtgggaggagttcttgtgggtgggagaggtctgtgcccctgaggaagccgatcctgccaaatcttgatgcgacaccagcagcccactctaccctcttcatcccaaggagccatctctggggaagggatggagggcagccacaggccaggctgggacatgggaacctaggcggtgcctggccctggatgcccatcggggcccagctcgggatgcccgtcagcagccaggatggggtgtgcatccgggccctcccgccgggggctgccccagttgttcctcaggatggtgcccgtcttctcctccttgaactgctgtcggtcttcccgag

SEQ ID NO: 437435 - DNA, 704 bp, Homo Sapiens
  misc_feature (412)..(514): n is a, c, g, or t
  misc_feature (573)..(616): n is a, c, g, or t
ggagatgggcgatctagacctagtggattccccgggcttcaggaattcggctcgaggtttttctgactgaactgttcaggcactgactctacatataattatgcttttctaccccctcacactcaacactttgactccagcaatcccaaatccccagatccctaagtgtgctgtgctatttcacatggctctcagacttggccagtgctgtttccattttggtctttattccccacatctctgcctggggggtagattctaccctgaaaaatgttcttggcacagccttgcaaactcctcctccactcagcctctgcctggatgcccttgattgttccatgtcctcagcatatcatgtttgtctttcccagcactgacctaccatgtgtcacccctgcttggctgtaccttnnnnnnnnnnnnnnnnnnnnnnnnnnnnnnnnnnnnnnnnnnnnnnnnnnnnnnnnnnnnnnnnnnnnnnnnnnnnnnnnnnnnnnnnnnnnnnnnnnnnnnntgttataattatatgtttaagatagttgttcaaataaactctaaataaccccagaaaannnnnnnnnnnnnnnnnnnnnnnnnnnnnnnnnnnnnnnnnnnnccctgcggtaccccaacttaatcggcttggacattccccttttgccagctggcgtatagccggcccggaccgatggcccttcccacct

SEQ ID NO: 437436 - DNA, 506 bp, Homo Sapiens
ttttttcatctttatcattattttattttagtaataagaaactggggctcagaaagtttaggtaacacagtaggaaatgatgaaactgaaacaagaaatcatgtctatttgattgcttttttcctgtaaagacagtcattaatgctcttcaccaaatgttttcatttcttctgacacatgccaagatcgcacttccccatccttttgaagttacttgcagccatgataattgccctggcccaatgcaatgtgaacaggtaaaagacatattttacttctgggccaaagcttcaagaaccagtgcatattttgttgtcttctctctctctaatgcagataacagaagtcccatgagcctgggtcccacaaagagacatggagtgtagcatccagcaatgtcgttataaacttgtagtgggaattaacaatacacatttgttgttataaactaagatttggttataaaccactaagcataacctagccactgctgactgattaattca

SEQ ID NO: 437437 - DNA, 434 bp, Homo Sapiens
  misc_feature (40)..(40): n is a, c, g, or t
aaaacaaggaaaatccatgtccctaattggaatggccttnttttccctgtaaaagaacagtccattaaaggctccttcaacccaaatgttttcaatttccttctgaacacatgcccaagatcgcacttcccccatccttttgaagttacttgcagcccatgataattgccctggcccaatgcaatgtgaacaggtaaaagacatattttacttctgggccaaagcttcaagaaccagtgcatattttgttgtcttctctctctctaatgcagataacagaagtcccataagcctgggtcccacaaagagacatggagtgtagcatccagcaatgtcgttataaacttgtagtgggaattaacaatacacatttgttgttataaactaagatttggttataaaccactaagcataacctagccactgctgactga

SEQ ID NO: 437438 - DNA, 695 bp, Homo Sapiens
  misc_feature (17)..(17): n is a, c, g, or t
  misc_feature (491)..(491): n is a, c, g, or t
ttttttgctagtacccntccttgaatctatgaagctacatttcaaagtggaaaaaatgactcaaagagagttttaaggagcagattaaatggccagtgattcaatatcagacaaaatgtaatgtagctgtcttcgttttcaattcccttttctttttccactagaaaacacagacattggaagacgtatgagactagggaaactaattttctcaaggtcaacaaatagagttggaaaataacgaaggaacaaagaaatgctgacagtaattatgcaaattatttagacctgaaaaacagttttggcagttgtacaaatgctatggtgttttacccactaatttggacagaaaattttaaaatctatgtttgaacgtctattaacttttccctctcctctttccgatttctcatatccagtataaaacattttgtttttcctttgttaacacattttaggtattccttccattctctattgctccacccctncttctctcctatctgagttattttaatcaacaggatttgctatctccctgccttcatgttttctcctccaatcttatttccagacagttgtatttttattcttcataaaaaaatttttagtcttcagcattttcagaataaaggtgaaacatctccaactattgcctaaatttttctacagggtcccgccttcaagcattttac

SEQ ID NO: 437439 - DNA, 873 bp, Homo Sapiens
  misc_feature (637)..(653): n is a, c, g, or t
caaagtctgggacagtctttattggagcttggaatgtcatagcaattcgccctcatcagaggcagactgtgagaaagagcagcgatgtggtggacccccagcagggggaaggccgggctacatgagggagccctgcttgcctgcaagcagggcacaggcgcacacgcatacactctcctacatgaacttacactcacacctgcgcactcgctgccggtgggtcagaggacaggtgccttgggctgctcccctcctcatggagaggcctcctccactctgggggatccgctgagctgagacgggagggaaccgcttgaggatcagggacgaaggagctggaatctgcaggcattttgcagttagggagaagggatccaggacaggagggatggcccagggactaaccaaatgggagctggagaaggccctgcagaggccagggaagggggaagaacgatgctggatatagggcagaaagtggagggagaacagatcacctcctctccttcactcactgcaacctcaccgctggggaacagaggcctgggcacagaaagcctggggagcgtcaaggagtcccctgtgtcctaggaaggcacctgaaataagggcacagatcctgggagccagagtgctnnnnnnnnnnnnnnnnnaaaggggaccagaatccggaaatggtgaaaccggaaaggttctaacatcgctggttgtctgggacaagaaacctggggaagcacagattctgctttctcaccccaaacggtgggttgggggtgggctgagatgcagaccctctggccagcagaggggagggagggccagggctgcccctttggtctcaagggcagtgaggcggggagcccggcctcaccc

SEQ ID NO: 437440 - DNA, 1843 bp, Homo Sapiens
taagatggtggtgctgttctggatgcttccagtgggccccgaccaggtctggacaatgcctggcgcccgtcccccgcccctcatctacacacacgcaagaattcggagctccatggggaacagaagcaagatatccgtaaaatcaaagtctagggggtgggaatgaaaagggaaaagtgaggaacggggagccaaacccaggaagacgcctctgttcctgcacattccctctcctttatatactcagctcttggctgtctccagtatgtacccaccctggtcttccaagctgggagccactttttataacacaatccacagtttcacaaaccccaggaaaggttccatgtggagagaggttaagtttcgcccttgcccggggaattatgacactcagaatatcccccttggtgtaaatggaagacacctgcgctatagcagctgttgtaggcccggtccgggtgggagggcatacttcttatacatcggaatagagtctcctgccttccttggccttctcgagacaccacctgacccatggtgaaagtcacgtcttgaaacaggacctggctatacagcagataaactccagcatcctggattcggacaccatatccttgggcctgtaggcctctcccacgcctaagagctggttgccacatcacctctgtcacatcggagtcatccttggaggtggcgttaatgggaaccaggtgcaggacagagtgctgcttcttctgtttttgggtgagcactgctctccttttccgggatctctccccactctcccaggcttccagggcatcggaactctgctccgggagactctgccagggatacccttccccattctgggaggggcctcctgtcccctgcagccggctcacctctctcctgaggctctgcagctctgtttgttgggtcagcagagccatggcacaagccacggcccccagagctgccccccaactcaaccagagggcaactgagagtgccggctctctgactgggccccccatgttgcctggaggccctttgggggctagcaagaaaggagatgaggctggcatgagctggggaccctgccaacagctgtggtttcaagagtggggtagcaaggaggtggcggggcgggtaagggtacgggcagtggtgcagaagggaagaaggttgttacgcaaggagaaataaaaaggaacttgaaaataaaaaggagggaggaggaaagcaagctaagggtactgttagtgctcctggcactccgtcgtggggccagcgttgccttgagaccctccaccctccctcagcctcaggagaattaggttccagtccctctaggaaggacagggctgccagtgacacccaggaggaacaggcagtgcgcaggaaccctggggcggccccagggttgggggagggaaggttggctggctagagggcattgtgccaggagcaggatggggggccaagctgggcagtgtccagggtcagggcgagggtggaagaccctcggggtcaagcacagcagagatcgctggggcagttcactaggggtgactgaaggtgggaaaggaggggtgggctcgatggggaggagaaccaggggcacggaagcaagaaactggctgagttctggggttaaggctgggccgggtgtgttggaataaggcctgcactactccctgtgctgaaattggcaagcaggacttcctgtttcccgagaaaagctcttacataaggctctggacgaagagacaaagcagcggcctcaagccccccggccactgcgggattcctccccagcacacagggttccgatcccgagaattccggaccggtccag

SEQ ID NO: 437441 - DNA, 497 bp, Homo Sapiens
cttaggcgtgggagaggcctacaggcccaagcatatggtgtccgaatccaggatgctggagtttatctgctgtatagcaggttcttgtttcaagacgtgactttcaccatgggtcaggtggtgtctcgagaaggccaaggaaggcaggagactctattccgatgtataagaggtatgccctcccacccgggaccgtgcctccaacagctgctatagcgcaggtgtcttccatttacaccaaggggatattgtgagtgtcataattccccgggcaagggcgagacttaacctctctccacatggaaccttcctggggtttgtgaaactgtgattgtgttataaaaagtggctcccagcttggaagaccaggactttgattttacggatatcttgcttctgttccccatggagctccgaattcttgcgtgtgtgtagatgaggggcgggggacgggcgccaggcattgtccagacctggtcggggcccactggaagcat

SEQ ID NO: 437442 - DNA, 1563 bp, Homo Sapiens
  misc_feature (42)..(84): n is a, c, g, or t
  misc_feature (1036)..(1036): n is a, c, g, or t
cggagtgcgaggcgcgggcgtccctgtgggccaggctccccnnnnnnnnnnnnnnnnnnnnnnnnnnnnnnnnnnnnnnnnnnnacacgggttcggggcgcgatcgcgggtgcgagcggcgtgcgtggctcgcagctggacgagctggtgggcgcgtaccccaactacaacgaggaggaggaggagcgccgctactaccgccgcaagcgcctgggcgtgctcaagaacgtgctggctgccagcgccgggggcatgctcacctacggcgtctacctgggcctcctgcagatgcagctgatcctgcactacgacgagacctaccgcgaggtgaagtatggcaacatggggctgcccgacatcgacagcaaaatgctgatgggcatcaacgtgactcccatcgccgccctgctctacacacctgtgctcatcaggttttttggaacgaagtggatgatgttcctcgctgtgggcatctacgccctctttgtctccaccaactactgggagcgctactacacgcttgtgccctcggctgtggccctgggcatggccatcgtgcctctttgggcttccatgggcaactacatcaccaggatggcgcagaagtaccatgagtactcccactacaaggagcaggatgggcaggggatgaagcagcggcctccgcggggctcccacgcgccctatctcctggtcttccaagccatcttctacagcttcttccatctgagcttcgcctgcgcccagctgcccatgatttatttcctgaaccactacctgtatgacctgaaccacacgctgtacaatgtgcagagctgcggcaccaacagccacgggatcctcagcggcttcaacaagacggttctgcggacgctcccgcggagcggaaacctcattgtggtggagagcgtgctcatggcacgtggccttccttggccatgctgcttggtgctcgggtttgtgcggagccgcttaccggcccacggaggagatcgatctgcgcagcgttggctggggccaccatcttccagctgcnccttcaagcacgtgcgtgactaccgcctgcgccacctcgtgcctttctttatctacagcggcttcgaggtgctctttgcctgcactggtatcgccttgggctatggcgtgtgctcggtggggctggagcggctggcttacctcctcgtggcttacagcctgggctgcctcagccgcctcactcctgggcctgctgggcctgtggctgccacgcccggtgcccctggtggccggagcaggggtgcacctgtctgctcgaccttcatcctctttttctgggctcctgtgcctcgggtcctgcaacacagctggatcctctatgtggcagctgccctttggggtgtgggcagtgccctgaacaagactggactcagcacactcctgggaatcttgtacgaagacaaggagagacaggacttcatcttcaccatctaccactggtggcaggctgtggccatcgttcaccgtgtacctgggctcgagcctgcacatgaaggctaagctggcggtgctgctggtgacgctgat

SEQ ID NO: 437443 - DNA, 936 bp, Homo Sapiens
cgagcgtccccagaaccgtcttgtggaacccgcctgaggatccccgtggctgttggttcccgcagctctgcaacattgtacagcgtgtggttcaaggtcatacaggtagtggttcaaggaaataaatcatgggcaagctgggcgcaaggcgaagctcagaatggaagaagctgtagaagatggcttggaagaccaggagatagggcgcgtgggagccccgcggaggccgctgcttcatcccctgcccatcctgctccttgtagtgggagtactcatggtacttctgcgccatcctggtgatgtagttgcccatggaagcccaaagaggcacgatggccatgcccagggccacagccgagggcacaagcgtgtagtagcgctcccagtagttggtggagacaaagagggcgtagatgcccacagcgaggaacatcatccacttcgttccaaaaaacctgatgagcacaggtgtgtagagcagggcggcgatgggagtcacgttgatgcccatcagcattttgctgtcgatgtcgggcagccccatgttgccatacttcacctcgcggtaggtctcgtcgtagtgcaggatcagctgcatctgcaggaggcccaggtagacgccgtaggtgagcatgcccccggcgctggcagccagcacgttcttgagcacgcccaggcgcttgcggcggtagtagcggcgctcctcctcctcctcgttgtagttggggtacgcgcccaccagctcgtccagcggggcctcgggcccgtccgggaccccgagcaggtcctcgtcgccctgcggccccgcagcccccgccatcgggtagagcggcggctccgcctccatggcccgaactactgcggactcgcggcggtcgccccggagtccctgcgaccgcccggccacttccatcccgggaattccggaccggtacc

SEQ ID NO: 437444 - DNA, 368 bp, Homo Sapiens
ctcgtaggagctgtggcggctgtagctgggggagcggcggcgactgtaggggctcggggagcgcggcagccgccgagaataggggctgctgccacctccttccgggctgggggacttgcggctcctcaggctctgagaggccctgtgggacaccgggctgtcgtcccggcctcccagtgggctgagggaccgccgccgcctgtaggccttaggctcggtcttgtcctcccggtaggccttgggcggttccttgtaggccgaaggcggctccttggacgacttagtccggctgcggtgggccttcgagtcccggtccttgcggctgctactgctgctggatgtggccgaagcgcttttccggcggccgc

SEQ ID NO: 437445 - DNA, 1914 bp, Homo Sapiens
gtcccctcttcaaaaagggggtttctcctttccccccccacctgggagagctttccaggggagaaggcggaagctcctggttcttgggtgaaaccagctggtgagacaggatccctcgagttttgctggcaggctcaccatttcagccacatgggtacaaactttttcaaaggtttctttggacacccctggggagagttgccatggtggcaaaacccttctcccatagggtccttgggggatttggaaacaagggccgccagacacaacaacctttcaaatatcacacaggggcctcagccccatttatttgcacagccaggggttcctgccacaaacagcagttttcgattatcagtagctgtttccctctagcctgggcaggggctgagagagacacacacagaaatatgatatttcagactcctttgagatctgaagaaatcatttcctcctttcttgccatctccataagaccacctctggaagtatgctatgctcaacttatactcacacatacagatttgctcataggttgaacagtgaagtttaagtaaaacccattgcacagactgttcctttcatcacagacacaaagaaggtgagagtaagatgctatcaaggaactagccaatcttggaccaagcgtacatgctcccttccttcttactccatggaagagactgctccatgggcctctcctggacctgttgccacggggagatttaggaggccatccaaggagtgactgagccttggccctcttccatggctacaggaatattgttcctgcaggtactatccagatttcagctctagatgtaactgaaaaaacctgaaactctgaggaaaggaatctaaggcttatagtgcttgagtactgatggggaacaactgcagcgaacagcaccagggaagctggaggatgctcagtaggtgaatcgcatcttttgtgagtagcccagtttgtccaagttgggatggcaggccagctgcaccattgggggtggcccacaaagcagtaccagcacatcatcccctggagcgggcaggtgttcccggatcatgtcggcagtcacaaagcccttgctgtaggcccaatcttttgggggatgatccagagtgaaccagagcttaaagcgattgggatagcgggcctgcagttcctctaagtcctcccgcaagatgatatccttttctgtctggttggcaaaaagcagaaagcactgggttggatcttcagggactttcaggatggcccggatcagctgtagcattggggtgattcctgtcccgccggcaatcattcccagtttcttcgccactcggggttctggtggagatttcttgttgggctgaatgttaaaatgcccttttccagtgtaagtgagcaacccgcttggcccccgaaactccaccacatccccaaccttcaggctatccaggtactgagacatcttccctccctcaggaaatttggggtgcacacccttcaggtagaccttgatgacaagatccacatagccttgatcctcatcactggtgacaggagtgtatggcctgatgaccaggctgccatcaattcgggtggagaggtagatatgtttgcccacaggcagccccagagtgtggtgggcggtgggcagggcaaagcggaacctcttggtgttgtggctcacagtcgtcttgtctagcagtcgtagcaggtacttttcattggggtccaggagagtgacctgaggccggcgggacctccgaaccaagtaggagcccacagccaggccgagcagagtgaccagccccacccccagggaggccagcaggacggggctcgtctggatccccatgacggagcgccttttcctccaccacctgacaagccgacagatcccacaatgcgccgcggggcggatc

SEQ ID NO: 437446 - DNA, 667 bp, Homo Sapiens
ccccttttccagtttaactgagctacccgcttggcactccgtaactccaccacattcccaacccttcaggctatccaggtactgagacatcttccctccctcaggtaatttggggtgcacacccttcaggtagaccttgatgacaagatccacatagccttgatcctcatcactggtgacaggagtgtatggcctgatgaccaggctgccatcaattcgggtggagaggtagatatgtttgcctggggaccgtgcagagagctacataagggttgtctgtgatgtgctgcatccctcaaaatactcaaagagatttgagagaacaagatgtcttgcttcctgctgtggtcccaaggagccacaggcagccccagagtgtggtgggcggtgggcagggcaaagcggaacctcttggtgttgtggctcacagtcgtcttgtctagcagtcgtagcaggtacttttcattggggtccaggagagtgacctgaggccggcgggacctccgaaccaagtaggagcccacagccaggccgagcagagtgaccagccccacccccagggaggccagcaggacggggctcgtctggatccccatgacggagcgccttttcctccaccacactgacaagccgacagatcccacaatgcgccgcggggcgggtcgga

SEQ ID NO: 437447 - DNA, 853 bp, Homo Sapiens
  misc_feature (707)..(707): n is a, c, g, or t
  misc_feature (737)..(737): n is a, c, g, or t
agctcacacatctttattggcctggatgtggggttgccaaaccagttgcccctgtcctgtgtcagccagctgtggcaatttcacccttattccttggagaggccagctgcctgctggaaggagtcagaagtcggtggatgtcattgaggccttggaggccccagtctggcgggagagaaatccacacctgtgcctggagttctcccttccctgaccctctgaaacgggggcttaaaatgctgtcccgcctggaccagggaggccacatccagcagtgcgtcctcaatgtgctgccccagcctgtgggaatcctggaaggagaacaggtcagagccaggggaagctgggagatgggatcctggaggctgagaaacaagagggctaagggcctggattcctgggtctgagggaggaggggctggggcctgggcttctgggtctgagggaggaggggctgggggcctggactcctgggtctgagggaggaggggctggggcctggactcctgggtatgaaggaggaggaggggctgggggcctggactcctgagtctgagggcggaggggctggggtcctgaagtatgactctgcccgactcagggctccagcgtgacaaggctgaagcgcaccaggccgtgggcttccgaccctcgctgacctcggacggggctgaagtggaactcagtgcccctgtgctgcaggaganctacctctctggcctgcgctcctggaaaangcatctctcacgtttctggaatgactttctcaccggtgtgtttcctgccagccccctcagttggcttttcctcttcagtgccatccagcttgcctggttcctccagctggatcctt

SEQ ID NO: 437448 - DNA, 1482 bp, Homo Sapiens
  misc_feature (577)..(598): n is a, c, g, or t
  misc_feature (1202)..(1210): n is a, c, g, or t
  misc_feature (1322)..(1322): n is a, c, g, or t
  misc_feature (1324)..(1324): n is a, c, g, or t
  misc_feature (1326)..(1326): n is a, c, g, or t
  misc_feature (1391)..(1391): n is a, c, g, or t
  misc_feature (1447)..(1447): n is a, c, g, or t
  misc_feature (1460)..(1460): n is a, c, g, or t
cggtcccttttgcttgctgccgttctcgtgtctcgctccgctccgctctgttcgttttctttcacgtctcttctgtctagcgtcgtggtgtgcctcgcttgttgctgttctgtcgcttgcttttttctacacaccaagctccctggtggtaactacaataaatctgtgtccacctataagttcacatatctccccgcgttacgcgcccaaactttctccaatcacgcgcaggcactatatggcacacctatgttttaaccacgcacgttattaccacctttaaacaatgtgttaaaatgtaccctatagagacctttgaaatcctcctgtataggtaatttggtccccaaataatggccacccccccagaaagtaaagggtctccttctcccaaagagtctcccaacgtacccactgtttccccagtccacgacctgtgttgaaacggcggcccagtgtccttagctttataaatataccgactccacttattaggggacccaccttgtaccagaaaaacttgggtaccgcgttaaactttggccccccgagggataactcttagacggcccccccnnnnnnnnnnnnnnnnnnnnnncccagctcacacatctttattggcctggatgtggggttgccaaaccagttgcccctgtcctgtgtcagccagctgtggcaatttcacccttattccttggagaggccagctgcctgctggaaggagtcagaagtcggtggatgtcattgaggccttggaggccccagtctggcgggagagaaatccacacctgtgcctggagttctccttccctgaccctctgaaccggcgcttaaaatgctgtcccgcctggaacagggaggccacatccagcagtgcgtcctcaatgtgctgccccagcctgtgggaatccgtttttgtgcttgattttttgctggagatgtggaaggtgatcatgccatcccccatgaagatataagaaacaccataaccatggtcatcagcaggcccgaatccaccgcctgaggaaacatagtccgggtaattgtggacgtcaaacagatgcatttgctgaacagggatctggctggtggacagctgccactgctccgaatggacctgaggacaggagcccatcacatgtgcaggacagagatctgcagttccggcccttggctccacttcactccctgcatccctggcnnnnnnnnnacccgtaaatccgggcctccttctccctaaccacgcccttctcctgaccacgccctatctggccacgcccctcactcgtctcaccacccacacccacgtccctctcctcttntncntcggaccacgcccctcctctgaccacgccctttcctcttatccccaccccactgaccctctcccnttttgtctgctcccgttgtcccgttgcctctccgccttctgccttgccgccccccnacaactgacttcntctgtgacgcatcctttctcaa

SEQ ID NO: 437449 - DNA, 2145 bp, Homo Sapiens
  misc_feature (51)..(51): n is a, c, g, or t
atctttattggcctggatgtggggttgccaaaccagttgcccctgtcctgntgtcagccagactgtggcaatttcacccttattccttggagaggccagctgcctgctggaaggagtcagaagtcggtggatgtcattgaggccttggaggccccagtctggcgggagagaaatccacacctgtgcctggagttctccttccctgaccctctgaaccggcgcttaaaatgctgtcccgcctggaacagggaggccacatccagcagtgcgtcctcaatgtgctgccccagcctgtgggaatccgtttttgtgcttgattttttgctggagatgtggaaggtgatcatgccatcccccatgaagatataagaaacaccataaccatggtcatcagcaggcccgaatccaccgcctgaggaaacatagtccgggtaattgtggacgtcaaacagatgcatttgctgaacagggatctggctggtggacagctgccactgctccgaatggacctgggtcaggaagggcgactgcaggtggaggaatcgggacacgatgtacagcgcaaacaggtggcggtcaactccctgcccgctcatggctgccttcagcagagcctggtgcttgtccactgccacgcggaacagggcgaggcactgtgggtccgtcttctctttgtcctccatggccctgacaaagttgcaggcctccctcgtgcaagaccgcaccgtctccgtccggccttccaggaataagcgagtcatggccgactcataagtcaggcagaattgacccctgtcccggaagtgggccagttgcaaggcgatctggatgaagctgtctgaagagaggtggcagcgtcggatgaagctcttgccaaatagggagaatggaacgacatggcagtcgacattttcagacaagatcttggctcccctcagggctagagagatggaggagtggatctggtctggaaggtcccattgcagccgctggggctgggggtagtgtggggtccgggtgccccttgcagtggccgtctgttgagtagcccagctgaaagcattctgtagccagagtgaactcccacatgtgtcctgagatggggcagtcggcccaggagtgctccacgctgaggcccagcttcccgttagagaagacgattagggtgaaggattttgtcaaaaccagcgatcatggccccggccggccaagcagagcatgggcgtaggcatccaacgacgctgccgggtcctccctggtgagccccgcgggctcagcatccagtgacacaaagaaagcggccccttccaccgcctccagggcctccgctgcctgggtcttcagggatgtccgcacctgggcccacgtgcccctgggagcagctgtcagagctgccagatgttcctcgtgggggcaggccggtgagggatcatccaggattctctgaaactgctgctccagggctctcgggggaaagcaggctgtttcgggagtgggtccccatgcggaagaatcggccccggtggaagacagccacgtgttggctgtcatggaggtggcggatgtagtctttttggaccccttggaatccgcgtggtgttgaagatcttctcgtactgggcagagcataaggggcgcattcccatcagcaaagtcgggggtatctcctggcggttcaggcggtggcggtacaggccagagaggtagatctcctgcagcacaggggcactgagttccacttcagccccgtccgaggtcagcgagggtcggaagcccacggcctggtgcgcttcagccatgtcacgctggagccctgaagggtcttgagggtcctggtttgtagacccggagtttttgagggaaggaaccttccaattcgggacctcacgttgaatcaagggtccgctgatcggatcctgggggtccaaaacccgagtccacccccgccccccgattttgagcgccggccccaaatctcccgcttgcatatgtccaatcccagtgcaaggagtccaccaccgggtcgacgggcctttggagtcctgcccaccccgagatcaccgtcacccagaaaccccgattcctgtcctcgtgccgaattcgccacccggcctcgtacctagccgttgttatgttttccttccc

SEQ ID NO: 437450 - DNA, 660 bp, Homo Sapiens
  misc_feature (383)..(499): n is a, c, g, or t
  misc_feature (631)..(631): n is a, c, g, or t
ggtacacaattgttgaaatgtattaacccacttacgaatgaataaaataaaaaccttatgtttatttcatcactaccaaaaggctgtgggtgcaggggtgctggtttctggtcctagcctaagagactggcagtttccaccttctatctcttgggacagtagctctgggagccctgagctgtcatgcaggaagtccagctaccctgagaccaccatgctggaaaggccacagggaggagctctgtggacagtcccagctgaaccttgccttccagctgtccctgtcaagatgccaggcatgtgagtaaagccatcatggaccctttagaccagactgcccaccagcagggtaccatctggcagccacatggagggcagtccannnnnnnnnnnnnnnnnnnnnnnnnnnnnnnnnnnnnnnnnnnnnnnnnnnnnnnnnnnnnnnnnnnnnnnnnnnnnnnnnnnnnnnnnnnnnnnnnnnnnnnnnnnnnnnnnnnnngggagtgagatgggtaagggaagatgggccacagtgggtgtgtctccatgcctacccccactgtgggcagctgctggagcacacgcctcaaagtcttccctgagggagagggagctgaggtgtttatatccnagctctgtcaggcattggctgaatgtcta

SEQ ID NO: 437451 - DNA, 1123 bp, Homo Sapiens
  misc_feature (119)..(128): n is a, c, g, or t
tggcgccgagatgtcctacacgtgtgaaaagcgggtgcctcagcgatgtagcggaatttgggtgtaggtgttgtgaacagttgttgcttagccaaccgtttttttaaacaaaattgatnnnnnnnnnnggacctggggccgcaggttcccactgccagcaggcgacgcctggcaaccctcagggaattccttgcgccaggaaccgcggtcccagttagaagtcctcgttcggagaggatgggccgggaccgactccaggtacttgcgcacggtgtcctgcacagagggcacgggctggcgtggcagggagcgctggtaactgaacagcatcgggtggcggccagagaagatgcggaccagggccagccaggtcttgttgggggaggacatggctccgtggggctcaagaagccagccgtggtaggacagaagcagcctcagggccacgtgcagtgtgaagatcagggctccccacaaacacgaggcaaacagcgcggctgccaggaccccccggagcccgtggtgttgtccaccccagtcaggcagcaactctttgatcttctccatcagtcctaaggaaggatccagctggaggaaccaggcaagctggatggcactgaagaggaaaagccaactgagggggctggcaggaaacacaccggtgagaaagtcattccagaaacgtgagagatgccttttccaggagcgcaggccagagaggtagatctcctgcagcacaggggcactgagttccacttcagccccgtccgaggtcagcgagggtcggaagcccacggcctggtgcgcttcagccatgtcacgctggagccctgaagggtcttgagggtcctggtttgtagacccggaggttttgagggaaggacgtcaattcgggacctcacgttgaatcaagggtccgctgatcggatcctggggtccaaacccgagtccacccccgccccccgattttgagcgccggccccaaatctcccgcttgcatatgtccaatcccagtgcaaggagtccaccaccgggtcgacgggcctttggagtcctgcccaccccgagatcaccgtcacccagaaaccccgattcctctctctcgtgtcccatcccggaaatt

SEQ ID NO: 437452 - DNA, 787 bp, Homo Sapiens
cgagaggatggccgaccgactccaggtacttgcgcacggtgtcctgcacagaggcacgggctggcgtggcagggagcgctggtaactgaacagcatcgggtgcggccagagaagatgcggaccagggccagccaggtcttggtgggggaggacatggctccgtggggctcaagaagccagccgtggtaggacagaagcagcctcagggccacgtgcagtgtgaagatcagggctccccacaaacacgaggcaaacagcgcggctgccaggaccccccggagcccgtggtgttgtccaccccagtcaggcagcaactctttgatcttctccatcagtcctaaggaaggatccagctggaggaaccaggcaagctggatggcactgaagaggaaaagccaactgagggggctggcaggaaacacaccggtgagaaagtcattccagaaacgtgagagatgccttttccaggagcgcaggccagagaggtagatctcctgcagcacaggggcactgagttccacttcagccccgtccgaggtcagcgagggtcggaagcccacggcctggtgcgcttcagccatgtcacgctggagcccacgttgaatcaagggtccgctgatcggatcctggggtccaaacccgagtccacccccgccccccgattttgagcgccggccccaaatctcccgcttgcatatgtccaatcccagtgcaaggagtccaccaccgggtcgacgggcctttggagtcctgcccaccccgagatcaccgtcacccagaaaccccg

SEQ ID NO: 437453 - DNA, 753 bp, Homo Sapiens
taaaaacagtgcttctgttctaggaaattcaagtgaagacagagtgcctcttgctgtccttcagtgccagccagcgcggtgctgggcagcggccgggtgcagggcgctgtgggggtgggtgctcatgctagacagctcaacgtggggattggggggcctcctaacagcactaaggacacagccgcagggagtcgggaagaccggccgcctctgctcagtcctgctcctccggcgtccgagcacggctctcacttcggtccgaagatgcgaggtcagtcaatcctcttcaccacctccatacatgtccgccagcttcttgaatctgggcccccagtcgttgaggtaatcgtagtcttggtccccggaactggatgagttcagggagctgacggagcctgcggtggagccgctcccctcgtagtcgaagaccagcagggagtcataggggggtgccgtggggtcgttgtcagcagccggagtccctcattgatgaagtcaccgatgtcgcctgggtgcggcaccatgggcctgatcgggtactggggctcagcacccaccggccgctcatccacgcgacgcacgccaggggctttgcttggcacgtgccccatggcttccggctgctgcagctggctgaggtcgtagtcctggtcctcctcgccaccgccttcctcgtcatacttgaggatgttgtcgcggacgtcgtcctcggggtcaatgagcagctgcttcgtgtggcgctccttctctcgc

SEQ ID NO: 437454 - DNA, 578 bp, Homo Sapiens
cctggttgtagttccctgggtgctaaaaagcaggaaatactccccagacatttgtgtacccttcccatagggctgttttgaaaatatgacaattagcaaagttataggttaaatcgtctattaggcatcatccttgagtcattgttactgcttttgtcttagaaatatggcgtcctttacatgcacttactgcttctgtagcaacaaggcagccggagctctcagtctgaacaggtagactctcattaccttttagggctacaggagagctagtgggcattctgaaattcttcacaaagtgatagttctctcactggcctttggtaggagcgtttctatgagaaaacgtgtttcaagcatagaatttcgggatggccaaagatcttaaaagccctctagagctaactcctagctgatgtgggaacacttttaacagtatccctgaaaggtgattcttgagttttggtcaagcaccttttgtgacaggaagtttattttgtctcatgatgtatgtactcagtaaaaatttgatgtataaacatatggatagagtgtggcaatatctttattacatctaa

SEQ ID NO: 437455 - DNA, 2660 bp, Homo Sapiens
  misc_feature (2541)..(2592): n is a, c, g, or t
caagttaatttttttacttttgtaggggagctttcaaaatgcagcatattttaatttgtttcaaataaagcaatatatgtatatatattttttcagaaaaacaccagatgttaaattctacaaaagcgcatgtgtcctcagcagatcatgtttgtctgattattaagaattcttttttgtaacattaactctctaaagacaatcaatggactgacatcactgctacaacacaggttgctaactgagcctctgatcttcagccacatcttgattttcctaataatgagtaaatactgcctggctaaaatgctgcaaagtcttgatgagagaaagcatcaacagatcaagcaaagccatgaaaattatgaagcaagctagagctgattattagaattagtaaaaatgattaagagaggatgacacaaccatacgggatttgtatattctgattgacactcttttggcagcgaattgggtcagcacctcgggcagggaaccaaaactgagtgaaaactgctctttttcctcctagctcaggccaccaacgtcacagccgggactgagagaactgctgcatctgtggaaacttctattctcgtggggcagagattgcactgtgaaaccctaccgacactaccccggaagggcctggcctccgaggtgtctgcagcgtgctgcctttcgccggggcttttcagaatgggccggggcctcgggggtcttcatccccaaggaagcctcttgatttttggcaccgcctttgtttttgggccggaagccgttgtgcggctgtcttctgtgttcgtggcggctgttgccctttcccagtggctcggcttcattcccactgccctgcgacttggcaggcccatttagcctgttgttatgatactgtggattaaatctccgtctttggttagaagatccattctgcttgttggccggcatggtctggtgagaggggtcggcggtgctggggagactgctcaccattttggggtttgccgctttgccttcagagggcttattgtgagtggatgattttcgggaaaagttactctgtttcccagaggttgctgcgtgcgcattcagcagaggcagcagggagctgcagggagttcttgaggaatagttgttctttggatgtgtaatttctccgcagagcatgatttgggccttcagctgttcgatgtcacaggaaaaccgggcagctttcccgagctcctcgtcatatttacgctcgctgacaaagtgcttaatttctgccctgagttcggccagctgcatctctgccatctgactggcaaggtcagtgagtctctttagttcttctgctttcttctgacgagcagtcaggatttccatggcttcttctttaactttatccatttctgccattaatgaaacttctttgtcaatgatgcagttgtgtaattcagcaaaggcagctttgatcttcttcacggaactatccacttcttccttaatcatgacgcgatatctagttagagaaacggtgcagcgttgcaaatccttcactgatttctcaatatttgggcctcttttctttgccaactcatctggctttatttcaagatgagctgcaggggtattggacttaacaggagatgtttttgccttaggcttgcttgggttacaaggctgctcagctgaccactgtaggccatctgacctctctgttgttccatgtataggtttggggttcccatctaaggatagtttctgttgcagtagtctgttgccttctgtgaccccacgaagtgcctttgaaggttcctcaagtatcgagatctttttctcacgagggataagggctggtttttcgttagcagaatctgtggacgagctgtccttctcgcagccattcatggggccgttttgaatctgtggtggctgcggctgcaggggccctgcctcaggcctctccaccttgtctttagcatctttgttgccttgatgctgcttggacttgcttctttttcttttattgttcttcttttttcctgtcatattccattcttttagaacttgaattgcactgccatccacaaaggcttgcacggctttatccacattaaaatcaaactgttggagcaccaggactatttcattattgcttttgttgggaacaactgatctaactgcatagatcttttccttgacattcacatgagtattgagttcagccatcttgcttctagtggaataggccctgggaatccacagcaatgttcctgaaagcagcctggtttctgaagagctctctgtgtcgagcgccggctcctccgtcccgggccggagccggggcccgggggcgcggtcgccaggggaggcgccgcggcggtggcggcccctgcggctcggagggcgggccgagcgggagccgctgcctgggccgcgcgccgtccggagctcgccccgcgctgccggcgcttggcggagggcgcagccagctcggcccccggactggattccttcactgacacaactccggctcggccgccccacgcagggacactnnnnnnnnnnnnnnnnnnnnnnnnnnnnnnnnnnnnnnnnnnnnnnnnnnnntgtcactcaccaggagcacacaccccagccggcgcccctcgctcccgcatcccgggaattccggaccc

SEQ ID NO: 437456 - DNA, 546 bp, Homo Sapiens
  misc_feature (64)..(64): n is a, c, g, or t
  misc_feature (72)..(72): n is a, c, g, or t
  misc_feature (84)..(84): n is a, c, g, or t
  misc_feature (101)..(101): n is a, c, g, or t
aaactttaacccaagtccggcccaataaaggaaactccttggtccaaaggaagccgatggtgtnaaatccangcaaaagggcancctttggaaccgccctncaagggaaactatccaacttccttcccttaaatcatgaacgcgaatatcctagttagaagaaaacggtgccagcgttgcaaaatccttcaactgaatttctcaatatttgggcctcttttctttgcccaactcatctggctttatttcaagatgagctgcaggggtattggacttaacaggagatgtttttgccttaggcttgcttgggttacaaggctgctcagctgaccactgtaggccatctgacctctctgttgttccatgtataggtttggggttcccatctaaggatagtttctgttgcagtagtctgttgccttctgtgaccccacgaagtgcctttgaaggttcctcaagtatcgagatctttttctcacgagggataagggctggtttttcgttagcagaatctgtggacgagctgtccttctcgcagccattcat

SEQ ID NO: 437457 - DNA, 2449 bp, Homo Sapiens
  misc_feature (2260)..(2318): n is a, c, g, or t
gctctttaaatttgctcttttaatgcataaataaatccatatcatgtattactttctggaaaagggttaaactcaaatatctgaaatactttcattataccaggtcaagaaaaatgccacagccagaaaaatttattttaaaatagaaacatacattaagctttaaaacaaccaactctcaaacaaaagaggaaagagcctttgatcccagagtccatgcggaatgaattccatacgtgtttgaaattcacataaggagcacttagaaaaccacctgaaatggaaatccaacagcccccttgcctgtgagggctcccacccctgcccgcgtgaggacatggccgaaccccggacactcgtgtgccgggagccaccacagctcaaggtgaccggcagcacccagctctgtgaccaagacagatgttcacacgtgggggcatcgtaagcgctaccagctccaaatctgacgtgatgggaacttgggagatgtctgagaaatgtccgaagggattttggcaacacagaaaacgcaatgtctaggaattcctccaaatgcttccaaaaatactcattgacaattcaagttgcacttggctggcggcagcccgggcggccttcagtccgtgtggggcgcccgcgtggccttctcctcgtaggactccccaaactcgttcactctgcgtttatccacaggataaagccaccgctggtacaggtagaccagaaacaccacgtcgtcccggaagcaggccagccggtgagacgtgggcatggtgatgatgaaggcaaagacgtcatcaatgaaggtgttgaaagccttgtaggtgaaggccttccagggcagatgtgccactgacttcaacttgtagttcacaaagagctggggcagcatgaagaggaaaccaaaggcatagaccccgttgacgaagctgttgattaaccaggagtaccagctcttatatttgatattcaggagtgaatagacagcacccccgacacagagagggtacagcaggtatgacaagtacttcatggcctgagtatcgtactcctcggttttcctctcagattcgctgtaagtgccaaactgaaattcgggcatcaggcctctccaaaaaatagtcatcttcaatgccttcttcactttccacagctcaatggcggctccaacacccgccgggaccagcaccagcaggctcgtctgctcgtccagcaggaacagaaagatgaccacggtgctgaagcagcgccagagcactgccttggtggacatgccgatcatgctcttcttcttcttccagaaactgatgtcatttttaaaggccaggaaatcaaagagaagatggaacgctgcgacaaagaaggtcagcgccaggaagtataagttggtatctacaaaaattcctttcacctcatcagcatctttctctgaaaacccgaactgctgcagggagtacacggcgtcctgcatgtggatccagaagcgcagccgccccagtgagaccttgtcgtaggacacggtgaggggcagctcggtggtggagcggtttatgaccatcaggtccttcacgcggttgctgagctggtcgatgaacaggatgggcaggtaatgcacggttttccccagctggatcatcttcatgtaccgatgcacatcggcaggcagggaggacccgtcaaagacaaagttgtccgccatcacgttcagcgccagccgcggtcgccagtgggacactggctcatccagggcactcgtcggcttcttctccgcctcgatctgctgtgtatcagactccccggtgagcaggttgatttcttctggcttggggaccatgtaggtggtcagaggactgaccaggtgcacctgcttcccgtcgtgccacggcaggaccccagcgtgatggaggaagatgtaggcatacagcgtcccattgtttctcgttttctttggtacagaaacattaactgtcctttcaaatttggactccacatcaaagtcttccacattcaagaccaggtcgatgttgttctcagcacccaggtgggacctcgtcgtggtgtacacgctcagctgcagcttgggccgccgcgccaggtagggctggatgcagttggcgtcgccggagcacgggcgggtgtagacgatgccgtacatgacccagcaggtgtgcaccacgtagaccacgaacacgcccaccaccaagctggtgaaggagctgcggccgctccacatggcggccccgcgcccggcgcccaccgnnnnnnnnnnnnnnnnnnnnnnnnnnnnnnnnnnnnnnnnnnnnnnnnnnnnnnnnnnnctccccgctcactggagaccccgcgcgccaccgccaccgccgcgggggaacgaatgcgccgcgcgccgcagaccgccgccgcccacgatgctccggccccctcgccaattaacaccagcacgtacctagcc

SEQ ID NO: 437458 - DNA, 353 bp, Homo Sapiens
  misc_feature (175)..(175): n is a, c, g, or t
  misc_feature (311)..(311): n is a, c, g, or t
tacgcagcactgcacgagactcggatactgaacaggagaaacacaaaactctccacgcctggacacgtcgcagccgaggcaccagcggggatgcacagccggcctcagtctccatctgcgtctgagtcagcgaacttcagctcacacttgacgtcaaagggcttgtccctggcanaaaggtcgtcgatcctctgtgagtcctccctatccgtggggactttgctggtgatggtgtcttgctcggtctcatagccggtgtccagggctggcttggggtgctccccattctgctgggagaagctccctggctnctactaacgtctccttcaggctctgctcacggtcacagaaat

SEQ ID NO: 437459 - DNA, 1002 bp, Homo Sapiens
cactttaaattattttattcaagaagtgggggaggacagacaaggggactgagctgagccctgagtccctgaacctcccagctcagcccccacagcaggactggactcaaagtcagagggtggagactccagccccacccagacacggttggggacagacaggacccaggaataccgactgactgtcctccaggggatggcggccgcagcacacagggcccggcccgtggaccgcccgggtggggctatttgggggtgccgccgcccttcttgggagtggtgggtttcttgccctgccagaggtgtccctggatggtgaaggcatcgacgctcatggacatggtcttggcggggatctgggtgaagcgcttgcggtccgagttgtacttgtagatgccttccaccatggcgggcgtgacggtccggggcccataccctgccagccgcgacagctcctctgtctcccccgacagcgtgtagagcgcccggaactggcagctcgagtcgcgaaagaggatcaggaagtggttggccttgcttttctcaatttcctccagaatgcgattcttctgcggttcgttcaccttgcccgccaggcagcagtgtgatagggcattgtggatgatgaacttgttggacttggcgctgggttctttgtacagccgtggacctgtgtactcgggcactgacgctggggaggaggcattgctgccattttcccagtcccgttcgcggcttccaggcaggcggctttggggacatgagacctgacggggacgggagccccgagacgtgggcctcttcacccgaggtcatcgtgggcctcgttggccacagtggacagtgacagggtgcactggcgaattaggacttcgctccagccgaggagcccaagcaggcccgccgggctgggcctacgtgccagggctgaaggtcgacacagcaacaccgagcgacgccggggtggccctccggccggcccgacctggaccccgggaacca

SEQ ID NO: 437460 - DNA, 494 bp, Homo Sapiens
tgaaggtacgaaataaacaccgatctcctttattctgatctcacattcagcaaatgtgagagaaatgtgaatgtactgaaatgtctgccagaaaaaagaaaatccaacccctcaaaagaatgacatcaggggttttgatatctattcacctacacttccctcttccacaggaagcggcccaccttctgacccacactgcccatctctgtgcttatcatggagctttcaagagtgaggatcggaggctgtattgagcagtgggcacaaaccacagggagcgctgttcaaaaatggaaaacaaggtggccctgacaccgggtgctgctgggcaccctctcagacctgccctgcaacagcatcaggaggctgagggtccccagccagaaggcccaagaggggcccaggctggaaactttactgcgaagcagccctcatcttaaggtggctcaacaccacacctgagatctagcccatgcgacagtatggaagcagga

SEQ ID NO: 437461 - DNA, 343 bp, Homo Sapiens
  misc_feature (299)..(299): n is a, c, g, or t
cgcggttgtcctggagcaggggcgcaggaattctgatgtgaaactaacagtctgtgagccctggaacctccactcagagaagatgaaggatatcgacataggaaaagagtatatcatccccagtcctgggtatagaattttgagggagagaaccagcacttctgggacgcacagagaccgtgaagattccaagttcaggagaactcgaccgttggaatgccaagatgcctttgaaacagcagcccgagccgagggcctctctcttgatgcctccatgcattcttcagctcagaatcctnggatgaggagcatcccaagggaaagtaccattcatgggtttagt

SEQ ID NO: 437462 - DNA, 1116 bp, Homo Sapiens
  misc_feature (284)..(367): n is a, c, g, or t
ccgctataaaggcttgttttgctgcagggctcatgctcgggagcgtggttgagcggctggcgcggttgtcctggagcaggggcgcaggaattctgatgtgaaactaacagtctgtgagccctggaacctccactcagagaagatgaaggatatcgacataggaaaagagtatatcatccccagtcctgggtatagaagtgtgagggagagaaccagcacttctgggacgcacagagaccgtgaagattccaagttcaggagaactcgaccgaggcactctcacnnnnnnnnnnnnnnnnnnnnnnnnnnnnnnnnnnnnnnnnnnnnnnnnnnnnnnnnnnnnnnnnnnnnnnnnnnnnnnnnnnnngccaagatgccttggaaacagcagcccgagccgagggcctctctcttgatgcctccatgcattctcagctcagaatcctggatgaggagcatcccaagggaaagtaccatcatggcttgagtgctctgaagcccatccggactacttccaaacaccagcacccagtggacaatgctgggcttttttcctgtatgactttttcgtggctttcttctctggcccgtgtggcccacaagaagggggagctctcaatggaagacgtgtggtctctgtccaagcacgagtcttctgacgtgaactgcagaagactagagagactgtggcaagaagagctgaatgaagttgggccagacgctgcttccctgcgaagggttgtgtggatcttctgccgcaccaggctcatcctgtccatcgtgtgcctgatgatcacgcagctggctggcttcagtggaccagtaagttctaaccatcctttccgacagtctccaggggcccggccacggccagctctaacactcttattctgttgcagaggttgtgctcagctttgggctaggtagcagtcttagagatgccttcaggtctgttgaaaggggtcgatggattttggcaacagctggaaggatgacagggcagtgttgccagagaacgaaatggaactggcttgattcctgggtgggggtgaaatggaactgactccagttctgcacaggactgtgcttctcggttgtgtgttaacatgaactgac

SEQ ID NO: 437463 - DNA, 1168 bp, Homo Sapiens
  misc_feature (357)..(370): n is a, c, g, or t
ttttgctgctataagataatttattacagactagcctataatctcctgtaacaatggcacatataataattaacaacagcaaagatgcttggtttcttgtttcatgtaatggccagtacatctgtggacaatgtcgagtcctcaggaagtccaggaggctgctacagaggaaatccaagaaccatgtcacatctctcaacaagtcttgggaagtccatctgactctctgaaacagtttgtctctgacctcccaggaagtgtggagggccccttccatccagcctgtacagagggatcagagtccaggctccttctatagggttgaatatcagaggggaatagcaaatgaccccgatnnnnnnnnnnnnnnccaaaggctagattctttctgcaaggtggaggacggctagaaggcagtggccacagatgagcaggactttttctagactggtttctacaatttttggctttgttcagggcccacccaagaagaaaatactcctggatccttcaactagccctcaggtagacacatgttagaacagcctgtcacgtcctgaagcatcactcccctgcctagaggagtgaggcagggagactcccaggcaggtggcccctagtgcctggggtccaaagaaatattcttctcagggctttgaagcaccacgtgaacctgattctactcatgatacaatctggggaaagggattagtacagttcatttctagaagttatcttgttcagtttcaaagccttgttctcactggagccacagaaaatcagtggattctactcaagggacagtctaaattctattctgtgtactcctgccctggccatactccaatccagaccaccgggctcagcaacaggctcagctgactacccagccagccaggcacaagttccacaccttctaaacttgttcttctaatgattggtatgtatgtgtctaactggataaggtgtggcatggagatgggtagaggtgggatgaggagtggagaggtgtctaccaagaatggctgacactctcagaaatgtttgtccttctctcttaatggaaaatctctccatgtggtaaccccacatggagggattttccattaagagagaaggaaaatctctccagtgtggtaaccccacgtggagagtactccgtcgaact

SEQ ID NO: 437464 - DNA, 757 bp, Homo Sapiens
  misc_feature (571)..(571): n is a, c, g, or t
ttgctgctgcctgattggcacaggagtcgaaggtgttcagctcccctcctccggggaacgagactctgatttgagtttcacaaattctcgggccacctcgtcattgctcctctgagataaaatccggagaatggtcaggcctgtctcatccatatggatcttccggcccaaggggcaccagcaggcacagctgcccttggctgtgacatccctcagaggcatcacagccagccctagcacgcgatcttcccgggcaaagcagtaatccttcacgcatatctgcaactcataggactcgggcccctcctcatttcccaggaggaagtggaatgtctcattgtacttgggggcccagttgttgcttttggatttggttgtgaacttcctcttcttatcactttggtgtgggccaaccatagtcacctccacgaaaggccggaacatacccgctgtctgccacttgaggtcattggcagccaccactttcactgtgaccttgtgctccccagtaccagggtgtgtaaacaagtccacctgaatagagacttctcccaggaggatcgtccacacncagacccttgggtggtctgcgagcgcacaaaggtcttgatgagagtgtcagtagtctgtgtgtacagagacagggcatagcgtagagactgcagatctgggctcttctccaggaaggttttcttcagcccattgcctcctgcatggaagtattgcttgatggtgtccagggcgaggtcaaggactg

SEQ ID NO: 437465 - DNA, 389 bp, Homo Sapiens
  misc_feature (155)..(186): n is a, c, g, or t
tgtctgtctcacacagtttatttaacaataggtaataagaaatcaaatttaacagtctatacagtgatccaaagttcatatttataagtaatcaactttaattgcatgatttacaacagttgagggtttttgctattttcaagttttatagaaannnnnnnnnnnnnnnnnnnnnnnnnnnnnnnnggaagtggggggtagggtaaggaggaagaaagcaagcaaagaagaaacccccagggacattttgcatgttaaaatcatcccaccggaatcgtttcttaccctctttttaatttttttactttgttagatgtaaaaataaccgaaaaaaattctttcaagaaacagaaaccacaatatataatacatcaatttggcagctgccc

SEQ ID NO: 437466 - DNA, 1242 bp, Homo Sapiens
gtttcctggtacttctttatttgacaatgtgctcatagggcatcccccaccctggtaccccatagtagctgcacacagtaggaaccccagaaaagaccttgccccttctgtccctgcagatgacgtccacggctcccacggccggcaggtctgccgtcggcatgagctctacgtcagcttccaggacctcggctggctggtaattgctgactcttcttgtttctgtgccgcaccgcaggcaggaagctcctagatggtgtggctctcaaccttttggcttttcccccagtttctctcttggccatctttgttttttctggatcccctggcttttgatgccttggtatctggggcaacctgaatttgccgcaagacatttaggccttcggtgacctctccaaacaccacatgcttgccatccagccagtctgtcttgtcacatgtcaggaagaactgagagccattggtgtttgggccagagttggccatggatagtagacctggtcccgtatgcttgaggataaagttttcatcatcgaacttcttcccatagatggacttgcccccagtgccattgtggtttgtgaaatcaccgccctggcacatgaactgggggatgatgcggtggaagctgcttcccttaaagccaaagcccttttcatgagtgcacaggcagcggaaattctctgctgtcatgggcacgacatcagaacgcaggagcatctggatgcggccagccggcttgttcccaatcttgatgtccatgtacacctgaggatttgagcgggcctttttagcaatgggctctccctcctgggtctctgctttgggaggctctgacccttcttcctctttattctcttcaagcgtcttcccagaaaacttcttcaaccagtcatcatctgaccaaactggcctggaagagccttccttaattctcattggtttggccaaattgacacgaattgtacgtccaaaaagctcagattcattcatgttgtcgatagctgctgcagcatcctctgccaactcaaattcaacaaaagcaaatcctcggtgcttttctgtttcataatccagaggaatctgaatatctgtgatgtctccaaaaggaatgaacgcagcatgaagaactttgtcgtccacttcctctgccagtccacccacgtacaagacgcgcttggtggtggcctcgtgccgattcgccacccagcctcgctcctagccatatcgtctaccctt

SEQ ID NO: 437467 - DNA, 1237 bp, Homo Sapiens
  misc_feature (1169)..(1169): n is a, c, g, or t
taagaactagggtttattttagcaaagaaaacacgtaagagccacactggtagtcccaggagaggcccagcagcaaatgctgagaaaagccagtggctttttgcacagcctgcccatggtggaggggagcacctgagctggctcctgggcccacagctgtgcctgggaatagtccaggctgtgcctgcagaggagctgctccaagcagaccctgaggaagggcacatatcccaaatgctgcttgcttcaaacaggcaccctcggtgctgcctcctctgaggctggcagttccttcctggatatgcagggtcaagagcggagggggaagcagagagagtgccgccctcacacgtactccccacagtcggcgatgatcaccttctgctttggcttcccgtccttgctgccctgggcctcaatttgccgcaagacatctaggcctttggtgacctctccaaacaccacatgcttgccatccagccagtctgtcttgtcacatgtcaggaagaactgagagccattggtgtttgggccagagttggccatggatagtagacctggtcccgtatgcttgaggataaagttttcatcatcgaacttcttcccatagatggacttgcccccagtgccattgtggtttgtgaaatcaccgccctggcacatgaactgggggatgatgcggtggaagctgcttcccttaaagccaaagcccttttcatgagtgcacaggcagcggaaattctctgctgtcatgggcacgacatcagaacgcaggagcatctggatgcggccagccggcttgttcccaatcttgatgtccatgtacacctgaggatttgagcgggcctttttagcaatgggctctccctcctgggtctctgctttgggaggctctgacccttcttcctctttattctcttcaagcgtcttcccagaaaacttcttcaaccagtcatcatctgaccaaactggcctggaagagccttccttaattctcattggtttggccaaattgacacgaattgtacgtccaaaaagctcagattcattcatgttgtcgatagctgctgcagcatcctctgccaactcaaattcaacaaaagcaaatcctcggtgcttttctgtttcataatccagaggaatctgaatatctgtgatgtctccaaaanggaatgaacgcagcatgaagaactttgtcgtccacttcctctgccagtccacccacgtacaagacgcg

SEQ ID NO: 437468 - DNA, 145 bp, Homo Sapiens
gtgtcattcatttatttgacaaatgtgctcatcagggcatcccccaccctggtaccccatagtagctgcacacagtaggaaccccagaaaagaccttgccccttctgtcgtcttctcgcagccgtatagtagtagtaggggccgc

SEQ ID NO: 437469 - DNA, 883 bp, Homo Sapiens; identical to SEQ ID NO: 320456

SEQ ID NO: 437470 - DNA, 510 bp, Homo Sapiens; identical to SEQ ID NO: 320457

SEQ ID NO: 437471 - DNA, 1589 bp, Homo Sapiens
  misc_feature (19)..(19): n is a, c, g, or t
  misc_feature (29)..(29): n is a, c, g, or t
  misc_feature (41)..(41): n is a, c, g, or t
  misc_feature (104)..(104): n is a, c, g, or t
  misc_feature (138)..(138): n is a, c, g, or t
  misc_feature (195)..(195): n is a, c, g, or t
gccttctgccccccaggangccaatgaanaaaagaacccangctgctgctggaactggacaatggtgagggtggcaatctaaatcactttaaaacaagagctgncaggtgtaactgaactctgctgttctctgggccnacctctcccgcagctcaggagtgaatgctaagagggacggagcactcaggacttccnaccccgccaaatttgttaactgtggggaatgacagagctgacgtgacttgctccccattcccagcctgctggtcctcgggctcctacatgaatgttcttgccctgcagcagtgccagcccatattcccaccacagctctcccaggactcctagttcaggttcccaccagtccagggaccacaggactgaagaactggccctgcagagggccgcatccaggtcagttctcaggaagcaataaatagatggaggttgtcttctcttctcagggcagcaactggctctcagcactaaaaacaaggcctcaaacccgcaggggctcagaaaataccttgcaatgcccacctgtgcctgctgatctggaggtaacttggaggcacgtactgcttaaaaacctccagggagcccaaaggagggaaagggtcctgtttttttcaagtgacaaggctcagagagggcaggagatctgcctgagtttgcacagcagctgtgagtgccgagtccaggctgcaggccccaccttgcctcttcccttgggcattccagagcccactactgctgtaagctatctatccagaccagctgcaccccacccaccacgtgctgctcggcccacccgcccccagcccccaggcttggcctcccatgggcctccctcccttccagggttcgcaggcctgtggcctctgtcccttgctgggtgggcatgaggagggtggcctaaggtaggggggctcttgcgccttccggagacatgagcatgtcaaacttgatgagcggcggggcgatcacgcgcacctcggcgttgagtgggttgaagcggaggttgatgctgcgcaaggctggcatggcggccagcttctccacgggcacatctacgatctcgttctcctccaggttgatggtctccagcgccggcagggcggtaagctgctcagggaagtcctggaactggttccgggacaggtcaatggccttgaggtgctgcagggcactgacctcgctggggaggcggtgtaggaagttcccctccaggtggagctctcggagctgactgaatgtggtcatgaacttgctggtgagggacttaagctcgttgttagccagggtgatgaggtggatctggccagagacattccgcaggaccttgtagatgccaatgggaaaggagaccagcttgcactcggccaggtccagagtgtcagagccgctctccaccgtctcgttgaccttccttgctactctggccacggcctcacccatcttcttcagcatgcagacacaggtgtcctgccgccagcccccaggctggtctgcttctcacaaaagggcctgagcggcgacaatgcctcctagcgccctgcgcagcgcagtcacgctccctccgccccgcg

SEQ ID NO: 437472 - DNA, 316 bp, Homo Sapiens
  misc_feature (46)..(46): n is a, c, g, or t
  misc_feature (229)..(229): n is a, c, g, or t
  misc_feature (238)..(238): n is a, c, g, or t
  misc_feature (243)..(243): n is a, c, g, or t
  misc_feature (261)..(261): n is a, c, g, or t
accctggaagtggcacgctccgtcccctcccatgtggcagtccctnggattggagcagtttcccctcccgaccccagggaagaggtctccagcttcacggaggcatcctggctgaacgtgccagcattcactggagccttcttgagtgggggcttccagtaccacatcctgtggactgaggggcttcacggacatttattctcattcagttctctgggccgcaagtctnagatgaagntgtgnccagggctaggtccctcnaaggctgaaggggatctgccctgggcctctcccagctcctggtggtggccggcat

SEQ ID NO: 437473 - DNA, 916 bp, Homo Sapiens
  misc_feature (31)..(31): n is a, c, g, or t
  misc_feature (37)..(38): n is a, c, g, or t
  misc_feature (40)..(40): n is a, c, g, or t
  misc_feature (52)..(52): n is a, c, g, or t
  misc_feature (59)..(59): n is a, c, g, or t
  misc_feature (61)..(61): n is a, c, g, or t
  misc_feature (67)..(67): n is a, c, g, or t
  misc_feature (73)..(74): n is a, c, g, or t
  misc_feature (76)..(76): n is a, c, g, or t
  misc_feature (82)..(82): n is a, c, g, or t
  misc_feature (93)..(93): n is a, c, g, or t
  misc_feature (95)..(95): n is a, c, g, or t
  misc_feature (104)..(105): n is a, c, g, or t
  misc_feature (111)..(111): n is a, c, g, or t
  misc_feature (198)..(198): n is a, c, g, or t
  misc_feature (228)..(228): n is a, c, g, or t
  misc_feature (231)..(231): n is a, c, g, or t
  misc_feature (334)..(334): n is a, c, g, or t
  misc_feature (719)..(732): n is a, c, g, or t
  misc_feature (857)..(866): n is a, c, g, or t
  misc_feature (908)..(908): n is a, c, g, or t
aaggttaaaaacaaaattgagtttttaaaanaacagnntnggggaagggggnttgcttntnatcccnaccttnntngcaggntgggatcaagncntggaaggtnnggctcnccacccagtctgtaagcaccagtgtgcccaccttatggcctggggacccaggtttgcaggagggaagttaacagtggggctgttttncccccaaagctgtgggtcactgatcctgtnttntcactggctctgatcatgcagcttgggaaccacagagacatgagactgcaccaaacagggctgatgatttagccagaaactcaggaaggtctagcacagcccnccacacacttcccaggaagtgtttggtctggccctgcagttgggactaaacttatatgcacctgcaggtcttgttgggtgcaccgtgagcaagttctcaccccaaccacctgacccaccctctgaaacaaggacgaaagggctggcagctttcattataaggggcttctcatacccatggcatggctgaggggtgggagtcagcctgctcgatgacatgtctgcaggggatgacctaactgaaccaactcagtgtttctattcccagtggcatctcttttgcacatcttcattttggagcctgggatgactgcctaggccacttatgctagacctgttaatgccagtgtgaaatttccaactaaatacttaataaaataattacnnnnnnnnnnnnnntgacacattgcactctccagccagaatgatgtgtgtgaatgacacacttgctgccagaagctgtgagtcccttgggacctgcccattgccaaggacttgttcaatggagacagcttgcctggtannnnnnnnnnctctaaccccatgttatttagttcaagtgggaagttaccaanacttgcat

SEQ ID NO: 437474 - DNA, 1151 bp, Homo Sapiens
  misc_feature (7)..(7): n is a, c, g, or t
  misc_feature (20)..(20): n is a, c, g, or t
  misc_feature (30)..(30): n is a, c, g, or t
  misc_feature (34)..(35): n is a, c, g, or t
  misc_feature (39)..(39): n is a, c, g, or t
  misc_feature (45)..(45): n is a, c, g, or t
  misc_feature (52)..(52): n is a, c, g, or t
  misc_feature (54)..(54): n is a, c, g, or t
  misc_feature (57)..(57): n is a, c, g, or t
  misc_feature (79)..(79): n is a, c, g, or t
  misc_feature (92)..(92): n is a, c, g, or t
  misc_feature (98)..(98): n is a, c, g, or t
  misc_feature (126)..(126): n is a, c, g, or t
  misc_feature (144)..(144): n is a, c, g, or t
  misc_feature (1150)..(1150): n is a, c, g, or t
ggttttntttcgctttgatntttcgacgcngagnncaanccactnttttcantntcngagtctcgtcgcatttttgtanaatcatcactggngtccanaggtcagggtcggccatgtgcgtcgtcnctcggcaccttttcatgnttcacttggtcactcctcgcttcccgtttgtcttcagggtactttggctcgggatagccacttgaactctcgcctctccctcttcttgccaggccatccgagtggccctcattgtcattggcggtatccctccacctggaagtactgtgtggcatatcgtcatcatcatcagtatcaaaaaaaatttttggtttcacgcagtttggacttgccaggtttctgattttgggcctgaccacaggttcctctgcactctttgaggtgttttccccaccaccacaaatactcacaggagccctgctgggacgtgcaggtaaattttgctcccttctctccctctccgagctgtcaccttttgtagccagcttgccttcagaagacgactgtgaggccacactactttgtggcaggaagtcagctctgctagctgagcatcttgctgcagggactgggtctaacttgtctcgctcctctctcacatcacggctaaaactagagaaatgtggaggtggcccagccaaagaccttgcccctttctctgggtcatacagcttatcatctttaaacttgccagttttccctctcactggcggtcgctcaacaggcccagccccctcctcctcactatcatctgccccataagagtcaatatgtccataggccattcctcttctgctacccgaagctctgtactctcttggcggatacctggaatagtcctcattatcaatattcaggttggttcccgaactctcgctgtcgtcccaactacgacgagtagtggaaaatggcgatcggctcctcttggtggtttgactgggggctgatctgtgcattgggacttcggagttcgtctttctctggctggcaatcctttcccgctggctcgtgggtggcctgaaacaagtccagaaagccacacgcttttcagagaagcagagctctcggatctccgaccgccacgaccgccagagccgctgctcccgctcccgagctcctccctttnc

SEQ ID NO: 437475 - DNA, 1081 bp, Homo Sapiens
  misc_feature (8)..(9): n is a, c, g, or t
  misc_feature (22)..(22): n is a, c, g, or t
  misc_feature (27)..(27): n is a, c, g, or t
  misc_feature (31)..(31): n is a, c, g, or t
  misc_feature (41)..(41): n is a, c, g, or t
  misc_feature (47)..(47): n is a, c, g, or t
  misc_feature (51)..(51): n is a, c, g, or t
  misc_feature (54)..(54): n is a, c, g, or t
  misc_feature (69)..(69): n is a, c, g, or t
  misc_feature (72)..(72): n is a, c, g, or t
  misc_feature (108)..(108): n is a, c, g, or t
  misc_feature (174)..(175): n is a, c, g, or t
tttgggcnnacaaagttcctcngactnttgnggttttcccnccacanaaanatnacagagccttgtggncgngcagtaaatttgctccttctctccctctcgagctgncacctttgtagccagctgccttcagaagacgactgtgaggccacactactttgtggcagaagtcannctgctagctgagcatcttgctgcagggactgggtctaacttgtctcgctcctctctcacatcacggctaaaactagagaaatgtggaggtggcccagccaaagaccttgcccctttctctgggtcatacagcttatcatctttaaacttgccagttttccctctcactggcggtcgctcaacaggcccagccccctcctcctcactatcatctgccccataagagtcaatatgtccataggccattcctcttctgctacccgaagctctgtatctctcttggcggatacctggaatagtcctcattatcaatattcaggttggttcccgaactctcgctgtcgtcccaactacgacgagtagtggaaaatggcgatcggctcctcttggtggtttgactgggggctgatctgtgcattgggacttcggagttcgtctttctctggctggcaatcctttcccgctggctcgtgggtggcctgaaactgacataagcatgccttcttccatacctcctacctgtattggactgataccctcctgttggattgggccatacaggcttgctagattcctgacccatcactctgacttaggagggtttccaatacagttggggctcgggtaggagggctcctgctccctgcacacgtttttgagatgggaaagtaaaatcagtttagaataaaggagcagggagatttattttcacttcagcaggcaggtaacagaaagaataaggggcctttaaaattagtttcactttcttctaaggcctggagtagcattccagtgactgtcaggtgtagaccaagtccagaaagccacacgcttttcagagaagcagagttcatcggatctccgaccgccacgaccgccagtgccgctgctcccggtcccgagatcc

SEQ ID NO: 437476 - DNA, 501 bp, Homo Sapiens
  misc_feature (28)..(28): n is a, c, g, or t
  misc_feature (41)..(41): n is a, c, g, or t
  misc_feature (51)..(51): n is a, c, g, or t
  misc_feature (61)..(61): n is a, c, g, or t
  misc_feature (108)..(108): n is a, c, g, or t
tgaaactgtgcaaaggggaactcggaantccgtcctttccnctggctggcnaaaccctttncccggctggcctccgtggggtggccctgaaaaactgaacaaaaacangcccttccttcccatacctccctacctgtaattggactgaatacccctccctgttggattggggcccatacaggcttgcctagattccctgaccccatcactctgacttaggagggtttcccaatacagctggggctcgggtaggagggctcctgctccctgcacacgtttttgagatgggaaagtaaaatcagtttagaataaaggagcagggagatttattttcacttcagcaggcaggtaacagaaagaataaggggcctttaaaattagtttcactttcttctaaggcctggagtagcattccagtgactgtcaggtgtagaccaagtccagaaagccacacgcttttcagagaagcagagctctcggatctccgaccgccacgaccgc

SEQ ID NO: 437477 - DNA, 609 bp, Homo Sapiens
  misc_feature (157)..(278): n is a, c, g, or t
  misc_feature (313)..(375): n is a, c, g, or t
  misc_feature (485)..(504): n is a, c, g, or t
gttgattacagatggtgttttcttctctatcttcctgtcctgcccattgggtctatagaactttctaagtgagaagtccctgcatgagggcaggcaggaatgatttgatgttgatgttatcaaatattcctggggtggccaggcacggtggctcatnnnnnnnnnnnnnnnnnnnnnnnnnnnnnnnnnnnnnnnnnnnnnnnnnnnnnnnnnnnnnnnnnnnnnnnnnnnnnnnnnnnnnnnnnnnnnnnnnnnnnnnnnnnnnnnnnnnnnnnnnngccgggaggctgaggaaggagaatcacttgaactnnnnnnnnnnnnnnnnnnnnnnnnnnnnnnnnnnnnnnnnnnnnnnnnnnnnnnnnnnnnnnnagactccatctcaaaacaataaaaaagaaacaaatcctggggcactggcctgtaactctgactgggtgtgtagctttaggcaactcactctccctctctatactcatccnnnnnnnnnnnnnnnnnnnngcagaggtcaaacaaaatcagtgggttcccaaatgtggcttcataatcccttagagatcttcctacttattttcctgataaaatgcattttaagtttatgctttc

SEQ ID NO: 437478 - DNA, 1946 bp, Homo Sapiens
ctttttttacttagtttaaaaaggccttggtggcaggaatatagtgtaaaaatcattggaaaaactaaaaggcatcgatacatatccgaatatacattttgtacataaattacatttcctttagtctttctgagtgaggtcctgattcagtactgaggtctagtaattaagaggtcccgggagctgcacgttcaggccggcatagtccaccatgtacattggccattgcacgagtgagatctggttggccgatgccactgaatccgggttagaggacgaggaagaggaagacgaggaggaagaggagacggaatttccttccgagacccgctttctcttgcgcttgggaatgctgctgtctttggctggcaccttggcatcattgcagatttctgcaaagggttggagctggttaatgatgaccatgcggacatgctctcgggccttcaggatcttctccagccggtggatgtcgtacgtgttggggttccggaaggggatgtcatcaggcagacccgtgacctccacggcgtctgggctgtcccggattagtttataagggaccagcaccggccggttcaggcccagggcctcaccgtatttctcgttgaagagttccttacatctgctcccgcaggatcaccttctccccgagtctgttggcgtcatcttcatcaggctttgggatgagtccttggaaaggcctggtgactgtgaacttgatcttgtcagccacagcaagaatcctctccaggttctgggagccgaaggtacagggctttcggaacgggattcctgggggcagcccctcgatgatcacggagccggggttactcttgatccgcttgtaggggacctggaccgggtacttgatgcccaaggcttccccgtatttcttattgaaaaggtcctggacctgctcccttagtgtgttggcgatgtcgatccgtgagagcctcgcgtcataattttcttgaaagccctgtctcttcaggctctcgtccaccagagggtccccggaatccctctctgggggcagggcagggggagagaagccaagtgaggaggcagttccttgactatccatgatgggctctttgactccctcagtgagcagctcgggcctcttgatgacaaactggatgctgttgctggcctccagaatcttccggagcttggcgatcccgaagcagttgggcctgcggagggagatgccttcaggcagtcccaccacaaacagctcctccgggtgccatcagaaacttggagtacggcaccttgacgggctccgaagatgccaatggccttggcgtatcgtgtgttgaagagcagctccacctgcttccgcaggggccggatcacgtcaccgtggctgtcctccacgggcctctcctcgggccgcgctgtcctcactcagacctttgtctgtcagcatctccatcccataaccagaatcctccgatggcaggtgcccaggcatcgagtctgtcatgttcctcagaggttggcgaggggtctgggacggtgacctgaatgatgtccagatcctctggctcaatttgtgatcggcctcagcccgcccagctccccggaggttcctggcccacagtcttcagacatgctgcccttgtctgaccgagcattcccagcaaggtcaaggacggtggccctagagacctctgcagaggtgtcctctggcgggctggctggctccagcttcgtggtgtctttggtaaacttgttccctgtgaaaattcgctcatcaaacatcctcttaatgatgaagtggatactatggcgctcctccaggatccgcttcagcttggggactccataagtgcaggggcgcttgaaggggatcttgtccggatgcccacgatctccacagcctccgggtcaccgacgcgtggtcgacgatatccaaaaagtccggaccgtaccagcca

SEQ ID NO: 437479 - DNA, 433 bp, Homo Sapiens; identical to SEQ ID NO: 325061

SEQ ID NO: 437480 - DNA, 1198 bp, Homo Sapiens
gggccagcttttcatagagctcgtcacaggtcatgcccacagttagggtgtaccttccagggctcaactatctcccagagaaggactccataaggaccagacagtcactctttggtggtatagacacttgtagtttcagggaactcaatggccattccagcgcacagggagacgccccatcgtcttcttcacataaacctcctctccccgagaaaaggccgaagtctgcaaatcttggaggcccaggttctctccgaccagcacattccgggcagccaggtccctgtggatgaactgcttctcactcaggtactgcatgccattggccgcatcactggcgaaacgcagcagctgccgggagctaagggtagaggctgtcccatgctctcgagcaaaagctgggtcagtctctaggacccggcttttccgcagaaaatctagcaggttccgtagggggcatattcaatagcgatatacaagtaacctcggttcttacaggcccccaggaggttgatgatgttggggtgatgccccaatttgcacagaacttccagttctcccgcaagtcacgatggtcattttcagaggcatactctttcagcattttgatggctgcgttcatcttcagcccgtccttcttgatcatggcccggatgacctggccgaagttcccctccccgatgaggtcctcaaaggtgatgtcctcccactctagcactgggtagctcaggggctcgggctgcagttttggccgccgggtaagtgtcaaggtccctgagctgaactgcaggatggtctcctcgcccgagcctgactggtaggtgaaggtgcgtctccgatgcaggcagcttctgcggatgcacaccagggttaaaagggcggccaggatggtgaggcaggtggcagacacggagcccaccaccgccaggatcagctgctgatccaggccctcttcagctgcccggctctcttggactgggccctcagcctgcagcccgttgcccagggtggactcttctactgtgttgctccagtccccgagcccctgaatgctggtccgcatgcggaagaggtagcgcgtgctggcgttgaggccacggatgatggtgcttgtctactcaggcctgtccacgtctatccacagtgggtctcctgcacccacagccacctgcacctccacaacgtacttggatattgg

SEQ ID NO: 437481 - DNA, 206 bp, Homo Sapiens
  misc_feature (79)..(79): n is a, c, g, or t
  misc_feature (156)..(156): n is a, c, g, or t
ggcagccagttcaagctgaatttcagaccgtgcatgttaactagatgtcctgtatttactgtggcaaccttacccccangggacatttggcaatgtctggaggcagttttggttgtcactggggatggttaggtgctaccagcatctggtgggaangcaccgggggtgcttttaaacatttcacaatgcataggacagctgaggcc

SEQ ID NO: 437482 - DNA, 411 bp, Homo Sapiens
  misc_feature (347)..(347): n is a, c, g, or t
  misc_feature (351)..(351): n is a, c, g, or t
  misc_feature (359)..(359): n is a, c, g, or t
  misc_feature (366)..(366): n is a, c, g, or t
  misc_feature (385)..(385): n is a, c, g, or t
ctagggcaccgcaacatttttgcaatgcctgactcaagggaaggaagccaacatttgtgaggcatttaacgtgagccacgtgttgagctgggcccatccctgtggctcccatttgattttgacacaaattcttagagccaagcactgctacagatggttttgggaagtgtagtgagttccccataagaagtgtggctaaaaatcagtaagaaaaggatgatcagtgtgagaggaaaaggagagtaggaaaagagaattcttaggtgaagccataaaaatggcgaagaaacctatgcaaaggtactcctctgttgtggcagagatcacaagctgttctccatatccancttnccttcttncacaggngcaaaaccctttcattttnagccaggcatgtggtctattattaag

SEQ ID NO: 437483 - DNA, 1109 bp, Homo Sapiens
ttaaaaaaacctgtagtttcattacctttttgaataatgtcatacaaaaaatgtatttgtttttttgtgctgtgagaattgatgtttgtagattaataatcattttgtttagaattacaaaatagtttttaaatattgtctgagaaaagccaaagttaatgcaacctagtggaaactgtaagaccatttgagtattgtttgttttattgatgcatttggattttgttgtttgatggaatttgagccacaaaaaaaatacgcaggctttcctatttctacaactgattgtacttatgcattttgtaccagtggaactttttatactggagattaaaaaaacaatggaaatttttgtggcttgctctggtgggcccctgacaatgactgatttcaagtttgatttcgggttgattgattgattgattgatagaaagaaagttgcttttcttttgagaattaaaaactttggcttgatttcttttttccctttgcttatatctagcattagaattttgtcttaaaataacagcggtaagtttcactttttattctgtattgtgcagttacacaataaggtaattagatttagaagtactcagtcactttaagtggataaatgtattagttaaaactttagggtttgcttttttgctgtttagatcaaagttttttctgattcttctgtcctcattgtgaacataaccgtgtagttgaaacagtcaaacttatttttgtaatgtatgttattgtgtgatgcagttttttgcttctgtctccaatattaaaccattttcctaatacttgtttctctctctgcgtgttgtattgttggtagtcattatatgttggtgatacatctgcacacctcactgtttcacgtatctgtttttttctctatgttgtgtaaaaagatacagtcgattccacttaagtgaatatctgatttggggaagaggaaactgcacagcagccacctttgatttatgtacaaccgcccacttgaactcctgcttccaagatttatacacttttttcctacagttcacctcagtaactgcctttggggttggattgccaaggtgttttacgggtcttttgaccacacaggt

SEQ ID NO: 437484 - DNA, 480 bp, Homo Sapiens
  misc_feature (240)..(391): n is a, c, g, or t
  misc_feature (448)..(448): n is a, c, g, or t
aggtgtaagccgccatgcccagccttgttttatatttctatgagcaccctccaaattctcattctgaaagaaacttgaaatactccatggctaaaggcaggtgacttggagtaaataccaaacctttaaaacaggcataattcagtgaagagggttttacaggtgccaaataagaccataaattgttgctgaggaaatattatgtatataaagccattgtcagctgggcatggtggcatnnnnnnnnnnnnnnnnnnnnnnnnnnnnnnnnnnnnnnnnnnnnnnnnnnnnnnnnnnnnnnnnnnnnnnnnnnnnnnnnnnnnnnnnnnnnnnnnnnnnnnnnnnnnnnnnnnnnnnnnnnnnnnnnnnnnnnnnnnnnnnnnnnnnnnnngtaatcttttaaaaagcccatgtcatcagatcaaagtaaggttagacttctgggaanggtttggaaatgcagggctggcttgcttaact

SEQ ID NO: 437485 - DNA, 430 bp, Homo Sapiens
ggaagatggccttgaaccccctggagttccagggcaagtagtgcacccctaactgtgccctgtgaaatggcccattatattcccaccctgggcaaacatagtgagacccccacctcccaaaaaaaatagtaatcttttaaaaagccccatgtcatcagatcaaagtaaggttagacttctgggaagggtttggaaatgcagggctggcttgcttaactcattaaaatgctagagtgactctcaaatgtgagaaaaaaggaatactttgagtacttctgaacagtgtatctgaggtcaccaacgaaagaggcatctgttttgaagagatgagccaagataagaattaagtttccaggacaatcttaggttggaagtcccctaatcagtctatatacaattttagctggtgcttttggtgactgagaagcag

SEQ ID NO: 437486 - DNA, 784 bp, Homo Sapiens
  misc_feature (593)..(593): n is a, c, g, or t
  misc_feature (748)..(748): n is a, c, g, or t
tatctggtctctgggcatcatggtgattgagatggtagatggggagccaccgtacttcagtgactccccagtgcaagccatgaagaggctccgggacagccccccacccaagctgaaaaactctcacaaggtctccccagtgctgcgagacttcctggagcggatctggtgcgggacccccaagagagagccacagcccaggagctcctagaccaccccttcctgctgcagacagggctacctgagtgcctggtgcccctgatccagctctaccgaaagcagacctccacctgctgagcccaccccaagtatgcctgccacctacgcccacaggcagggcacactgggcagccagccttgccggcaggaacttgcctgcctcctcctctcagtattctctccaaagattgaaatgtgaagccccagccccaccctctgcccttcagcctactgggccaggccggacctgccccctcagtgtctctccctcccgagtccccagatggagacccctttctacaggatgaccccttgatatttgcacagggatatttctaagaaacgcagaggccagcgttcctgggctctgcagnccaacacagtagaaaaggctgctgtggttttttaaaggcagttgtccactagtgtcctagggccactgcagagggcagactgctggtcttccacagattacctgctgttcttcagctccagctttcaaacttcggagttttcggagaggggccanggggtggttttttattgaccggaattcccgtttcct

SEQ ID NO: 437487 - DNA, 795 bp, Homo Sapiens
tgaaggattcaggcccttatggccggatccagcgctggagagctttttggttttttttgaacgatttctaaactttatggaaaaagccaatgacaatcaattagccaaaaacgagacgccaaatcccatctcactccagcgccatgccctcttctcaaacgctcgccggctctaggacctctccaccagcacagttctcaggagtcctgctggtctcccagtgctgttctaagggtccacatgaaggcaggtcaggcgggactccccgggcaagcacttctgtacgcggaaagcacgaggcgcaggagccatggagagccggtcctttggagacaggaatacttaagaggattggcaaaccggagaaacgctgggagaggtgccccgcactgcggtggtaaggcagagtctcagttctcctcgggcttgtcggctggcggtccacaaggctgaagcatcttttccatcaagttgaagcggactcgcgctttgctctcattctccgcaatggcgaagtagttgagaaggtcgaagtggcccatgtaggagcagtacgagtcgcggtgttggttcaccagccactcccacttggtggtgtcggcgtggcccgtgccgatgtacttggactgcaggtgctccagctggctatggatggtgtagcggtcagtcatctcgccgctttccccttcgctctcaggtcagaggacgcaggtaacaactcgccgctctagcgttttacaggagagtgaagccaccgcgcggaagctccaggtccgcgccgtcgcagaagccgct

SEQ ID NO: 437488 - DNA, 1447 bp, Homo Sapiens
  misc_feature (1359)..(1395): n is a, c, g, or t
tttttttgagaatttaaaatcatatttattgttttgcaaacaataacttagacatttcttaatattttaaaaaccccaacacaaagtaataaatttggcttcttttccccacaaaaatgggaaatacctttcagtaaaggaaattttaaattatttttacacaccagttggttgttggaatttatagctctttaacatatgacatcagcaaaaataattagcattaactgattaatacataaaacaatttacaatcatatggtaagcaggaaacaaaaaccgatcagaaaacaccgttttatagtaattttcaaacagataaattattacagtatactttatccccaacatctctgagcccattaatagagtacttctatacatataaagatataataaaaggatacggtatttattgcaacagcaaattaaaggttgttaaaatatatgtaacttaaatacccccccaacattgatatagtggcttcttattccttaaacatagaaattccactcttcattgtagaaagataaagttctttcatcaaaaggcacattcttatcttcgaggatgattggcatcaaacaacgtgttgtcatcatcctcatcatcctgttctaaaggtgtcaattccatattttctatgttagtgtccaaaactccatatctcctagtctttcggtttcttcttctcatcctgaccgtcctgaccacgaagtacaccagcaccgcgccgctcaccaccatcaacacggtcagggcccgctgggtcatgggcttgtcgccagggttggggctcacagcaaggccgccacccaccgagccttccccggccttccctccgtgatcgtccgtctcaagcccggccacagggttgctgccattgcctccctcggagccccgcggccccgcagcttcagccagaccacggcccggctgctgggcaggggtagggcccggtggcagcggcggtaatgtccgtggtctagggtcaggaggcccaagacctggcgcggcctcggctgcctgcagcaggactgccaggggcccgcttagttcaggcagcaacagcaggaggaggacggaagccaagaggtggctgagacagcagcagcactgcgaggccttcatcgttcccggaccgctctctcaccacccgggagccgccaggcccgccacgctggctccaagagggaccataggcgcggtggagaatgaagcagaggtgaccaaacgccagggagaggcccggtcgtggcaggtggcagaagctacagcagtggcagctgcccggagaaccggaagttcgtacatctcccgctctcgacgaattcgagctcggccgatttggcctgatnnnnnnnnnnnnnnnnnnnnnnnnnnnnnnnnnnnnncggccgccaccgcgtgaacctccagttcgccctatagtgagttatcagttcc

SEQ ID NO: 437489 - DNA, 644 bp, Homo Sapiens
  misc_feature (358)..(358): n is a, c, g, or t
  misc_feature (371)..(371): n is a, c, g, or t
  misc_feature (470)..(470): n is a, c, g, or t
  misc_feature (572)..(572): n is a, c, g, or t
  misc_feature (589)..(589): n is a, c, g, or t
  misc_feature (595)..(595): n is a, c, g, or t
  misc_feature (602)..(602): n is a, c, g, or t
  misc_feature (607)..(607): n is a, c, g, or t
  misc_feature (610)..(610): n is a, c, g, or t
  misc_feature (623)..(623): n is a, c, g, or t
ttaagttaaatgcttttcagtaatggattctcccaggcactaaactacttaagccaggagtataactacttcaaatacactatgagaacctaaacttgggtctctggagatctgctgccagagtctacttgttctaacctgtgtatgcgcaagatacaccacattataatagttttgcatttgctatcatacattagttatgtagaatctgtgtcagcaaatgctggactctccctaatactgaaatttaaaaatcacctcagaaaactgccagttctgagttctcaaggcagcttttagaggtaggaattccttctctacagaaagctatcttattctttcagaacaaaatgactgntttatttccacangtaaagtagataaaagtgaaagctgctgaggcttactatacccaagagaaagctactcactacgtagcaacctaggtaggtgccacccagctacatttncagtctcatgaaaagatctgaaaatccatcaatagacaattcagcacattttgggaataggaagagcctaccaataattgaatacttcaaaatactgagtgnttgacacagcatgctgnaaacanggaatgnaaccngtnggccacagtgctngaggaattcgaacttttaagc

SEQ ID NO: 437490 - DNA, 1101 bp, Homo Sapiens
  misc_feature (233)..(248): n is a, c, g, or t
  misc_feature (372)..(387): n is a, c, g, or t
cggggcggggagagtgcgaagcgcacggggagtagaagcacaacgtagcgatcgcggaggggtgaggggatatcgacaagcgggcggggggcgtggcattccgcggcgagcataaaggagcagcaccggcgtgtagggcggggaaaaaattatagcaaacagagcccggggcacggcgagcggcgataagggggaatacggggccgagaggccaagacggaggcggcgctcannnnnnnnnnnnnnnnataaaggcgaagcgcccaaggcggggcgcacacaatcgttggcgcgcaatagttggaaagcagggtgcggaacaggcgaggaaaaaggccaggccgttagcgccaaggcattgcgcaggccctnnnnnnnnnnnnnnnnccttgacagggccccccaaggaggggcagagatgcgtgggtccgcagtggcagttagggccggtgcagctatgtgggatgtggggcaggactccagcctgctccgtggagcgggaggccccggtctgcagctgtggtttgggcggctgcagctgcacctgggagggtggggttcccacctgctcccaggctccgagagcacagggatgcctgggtccacagccgtggcttgggcagctgcagcggcatgcagggagctgccaccccgacttagaatgggagaggctcctgcctgtccccagctcctgccagttccatggaacatgcagccccagccgtgcctccctgctgcagctggtgtgacagcagcagccgctccagatggcctgccactgccaccactgagacaggtgtgtgtatagaggtccattttattcaggctggcgaaggaaggcttctcaggggaggtggcccttgggcttcctccagatgctctggagtcctcagtgtctgactccggcaagtctttctgaagaacaagcaaagctctttctcttgccaccgccaaaacatttccaagggactcttcagaagagagtcagtctgcacagctcccctggggcctgggcggtgggggcagagatcttatccaacttctcaaatgagattctgcaggctccagtgactcgctggaggtcacccatcccgggaattc

SEQ ID NO: 437491 - DNA, 841 bp, Homo Sapiens
  misc_feature (787)..(787): n is a, c, g, or t
  misc_feature (797)..(797): n is a, c, g, or t
  misc_feature (821)..(821): n is a, c, g, or t
tggacatttctcataacttaaagtttggaatcatgccataaggacgtcattcctggccctgccccactggagaatcattagggtaaaaactgcattgttaacccggggtgaatggacatgagctgctcttctttagtgctcctcagtctgtctctaggacaggttaatccccttcccatcctgccccttcagaaaggagtaaagtcctacacatgacaaggaaaagaaatttctaggttgaagccacagaataggccactcccgaaagttagggcagaatcacaagctccattttgtccatttctcatctaaggttaaaagagtctgtctgtcatcgtccggtttgataggaggctccggtcccgcctggttgggggagcgaccacacgaagcgcgggtggcgggcagggtccagccccaccgggacctgggcctcctcttcaagggtctccgcgaaatgctcggaagttgtgtgcttcatttaaaagggggaggccggttccgtggcaagcggctggttgacaattccctccttcaacctgatgtctagagagggcggtggctcggaaagctacgactccacccgcggctccacagcgccaggtgacaacatgggagcgctcgactgggccgcagccgcgacatagctgggcagcaaaaacgaaacagccggcgccatgggagtgtcccggtgggtgtggcatccaggctagaaaagccttctgaccaccactgcccgcgagacgaccccggctgggggtattcccctagcagcggcctcctcctnacgcgcgttnccgggtacccctgtcttggggttnccgggtacccctgtcttggg

SEQ ID NO: 437492 - DNA, 434 bp, Homo Sapiens
gttcatacatgtggggaaataaatatcgaggcacagagagggaaagagtcactcaaggtcacacaatgtaggatgaaagaggaagatactgatcaggagacctcctgggagaagccctcctgtccagtcttacctggtgccttcactggcctccctccagcccccaccagcacaacctggtgctaggctcaccctcccaaggcccaaaaagagtatacagagtttgccgtcttttctattttattattgcattcctgtcccaggggccacctgctcaccttagaagtctctagcgttagaagtttcaggggatggggcaggcacagtgacttatgccggtaatgccagtactttggaagggcgaggcacgaagatcgcttgagaccaggagtttgaaatcagcctgggcaacatagcaagacccctatctctac

SEQ ID NO: 437493 - DNA, 258 bp, Homo Sapiens
cacagatatttgcataacctcagaatgactaatatttaaggaagcaccagccactgaatgaaaagcaacactggctccataaggaggagacgcccaaatgatttttaggatttctttgtaggggtcaagcaacacacaaaccaaggcagaatctgtgaacacaacttgtgtagactttctgaaagctgttgccaagatgataccagaagcataatgacctttaaatttttaaattttgtgccgggcgtggtggctcat

SEQ ID NO: 437494 - DNA, 1407 bp, Homo Sapiens
ctgatggctaataaggctgcccttctgactaaaagatttcccgcactcctcacagggataagctctctctccagtgtgaccttgctgatgttgaatgaggttacccttttgaccaaaagatttcccacattctctacactcataaggcccttctccagtgtggactcgctgatgtttaataaggctgctcttttgactataagatttcccacactctccacaatcataaggtccttttgcagtgtgatctcgctgatgattactgaagcttgacatatctgctaaaggattttccaccatcactgcacacataacatccatctctagtgaaaagtttctggtgtggaataactgagtgtttggtgctgaaggcttttgtgcgttttccacaactgtaattagtttttccctcctgaaagggtgggccatgcatagtttcactgtctgtcttctctacagcagcttcttcttggcacaatcctgaactgggcagaacgtccttcccaaactcgcggaagacaaatggctcctgtgacaccctgagcttacgtttctttacaaacgatgcttctctgacactctttctgtagaatttctctccaatatgctgcttctggtgctgatgaaggtatgcagtgtcatccaagttttttccacatgctccactcctgttcagcttctgcttgtgatgagtttcctggtggtcagcaaagtgaaaaacatcctccaagatgaggccacacatttcacaggggtgagccttcttaggagaaacacctgccctaggagtcctgctctgagactctctttgtacagaaattctctgcttacaaggtgcctcctcatcttttgatccacaccaacaacccagcgaggatatgagagccaggttctctagcatcacatcacggtacaagcacctctgagcctcactaagaagacaccactcctcctgggaaaagttcacagccacatcttcaaaggtcacagtgccctgccagggaggacataagtgccaggttctccagagtcacatcacggtacaggcatctctgagcctcactaaggagattccattcctcctgggtaaatttcacagccacgtcttcaaaagtcactgtgcccgtttaggggtcatgtagcttctggctccaagagtctgaacctcgccaagttgctcctgagtagggcgcttcggcgcagccgcagccatcggactacttggggaaagcactgcccgggagcagcaggcgccctcaccgggctgcagagccgcctctgtgcaccgagaacggttcctctccaccttctgggttcattcaccgcagtcccacgtagcagtccggggccactcactgggcaaacacgcgtatcgcagatcaacgtggccgctacaagaggaccccg

SEQ ID NO: 437495 - DNA, 656 bp, Homo Sapiens
  misc_feature (395)..(461): n is a, c, g, or t
gctgttcgggagacaggagttttattattcaaatcagtctccctgagcattctgggatcagagttttcaaaatttggcgggtaggggcttgggaagtggggagtgctgatcagtctggttggagatggattcatagggggttaaagtgagtttttcatgctgttttctgttctgggtgggatggcagaactgattgacccagattaccggtctgtgtgttgtccgctgatccatccagtgcaggatccagggaggatataagtgccaggttctccagcgtcacatcacggtacaggcatctctgagcctcactaaggagattccattcctcccaggtaaagttcacagccacatcttcaaaagtcactgtgccctgtatcaaaatatctcctgtnnnnnnnnnnnnnnnnnnnnnnnnnnnnnnnnnnnnnnnnnnnnnnnnnnnnnnnnnnnnnnnnnnntgagcggagagcctcagcgtagccgcggcagccatcgaaccacgtggttttaagcagagtcgggaggatagggcgaccagccaggagatatgggcacgacggtccgtatcctggcccaggagtgggtcacgctgggcgccgtcacagagctccagagtagcctctgtgcagcggaggacaactgctcctcgtgcc

SEQ ID NO: 437496 - DNA, 438 bp, Homo Sapiens
tttttttgctgttcgggagacaggagttttattattcaaatcagtctccctgagcattctgggatcagagttttcaaaatttggcgggtaggggcttgggaagtggggagtgctgatcagtctggttggagatggattcatagggggttaaagtgagtttttcatgctgttttctgttctgggtgggatggcagaactgattgacccagattaccggtctgtgtgttgtccgctgatccatccagtgcaggatctgagcggagagcctcagcgtagccgcggcagccatcgaaccacgtggttttaagcagagtcgggaggatagggcgaccagccaggagatatgggcacgacggtccgtatcctggcccaggagtgggtcacgctgggcgccgtcacagagctccagagtagcctctgtgcagcggaggacaactg

SEQ ID NO: 437497 - DNA, 948 bp, Homo Sapiens
acagcactcataaggcctttctccagtatgaactctcctgtgtttaacgagacgggatgcttcagcaaacgatttcccatattcactgcactcataaggcctttctcctgtgtgaactctgatgatgaaggagggtagagcttcgctgaaatgtttttccacatttggtgcattcataaggcctttctccagtgtgaattctcctgtgtttaatgagactggaacattcagaaaaggattttccacattcactgcacttataaggcttttgtccagaatgaactcttttatgaacatgaagcgcagagctggaaagaaatgatttcccacattcactgcattcatacggcctttctccagtgtgaatcctctgatgtatagtcacgctgtgcttattgccaaataatttcccacatacctcacacgcatatggcctttctccagtgtgaactctctcatgaaccagaagatgatacttcctgttaaataatttcccacattccctacaattgtaaggtctttccccagtgtgaagtctctggtgttcagtgaggtgggatctgtacctaaatgatttcccacattccttgcactcatagggcctttctccagtatgacctcgctgatggtgaacgaggttgcccttttgaccaaaagatttcccacattctccacacttgtaaggcctttctccagtgtgaacacgctgatggttaataaagcagaacttctgacgaaaagatttcccacattccccacagtgataagctctctctccagtgtgaccttgctgatgttgaatgaggttacccttttgaccaaaagatttcccacattctctacactcataaggcccttctccagtgtgaacaagctgatggctaataaggctgcccttctgactaaaagatttccctcgtgccgaattcgccacccaggcctcgctac

SEQ ID NO: 437498 - DNA, 906 bp, Homo Sapiens
agtgggttcccccattctacaagcttagtaaacccaggagacaggcacccactgtggagaactgcacgcttggtcgaaggcttcttgtaagttcttgaagtgggtttatcagacgatccaattaaagcgctcgaaaactgcctcagcttggcttcaatgcttctgtgcctcatgcacatcctggtgagagcagatccaatcttcctggtcccaccacgtgtgttggtggccatgtcggccactttctgaaaggcgtccaagaaggcagctgctgctactactgttgtccgaagctgggactgcagctttcctgctttgtttatgaaatcttcccatacctggatagctccccttcatgtcgctgatgatggtctggaagaggcctccgagcgcgctgcattccttcgtcaatcacagcctccattgttcccggctccggcagggcgagggcacacacgcggggccgctggactgcgcgcggggccggggctcgctcaccccagaaggaatttcaccttccgagagacccacctcggactcgcagcctcttctgcagcgaggacggggtgcaccagaccgactgttctctgcccaaaataataacagtaatttaaaaagccaagccgctctgtagggtattcgcctacaagcagcgactcggctccatggccttaaaaatgccgggagaagactgacaatcaggccaccactggtgcccactactggaaacggcaaagcccatcttgatgcagagaaaatcgcccgctgacccggggccagcgccattgaaaaacgcaagattttccaatttaataaatttttcgtgcaattaaaaatacatcgcccaacagcagagcgggtcagctcgcggcgtccggcgacggcgtgggtcgacatatcccggta

SEQ ID NO: 437499 - DNA, 851 bp, Homo Sapiens
ggcatttcaacacagcatttttattgcttttgaaggtttccctagagcagacatcattctattgcacagatgtgtcattttggcattatagaaagttgcagttaaaaacgctttctccaaaataaaaagacaaatgaaatacccagcatatacagttgaaggcaaaggagggcaggctttagagggatggggtccattgcttttgctgtgcatcacccttgattagcagttacattttggtagtacttcttacccccaatttctagaaatccttttcaaatccagatcagtggggccccatctatcaggagaatcaacccttcaggagcctgagcaagaagactgaaccttactggctgaattaggatagctgcagagagctggaagctgacacaaaactagttggagcagccctgtttgtcttaaagcaaggcgggtggaattccaaatgctggagaggggcatacagtgggttcccccattctacaagcttagtaaacccaggagacaggcacccactgtggagaactgcacgcttggtcgaaggcttcttgtaatttcttaagggtttcatcaacaccattattgaccagtgagaggtcaaagtagtgagcgtactggctgcggatggcctcagagtccttctgcagctgctgcagggcttctgtctgagtgccctggtcagtaggtgcaatgaacacaatgaaaggcgaaagttctgctgtccgaacgattttcagggtctggggctcaatgtcaaggatggcaatcttgttgtgtttatggatatggtgcactgtttcacatttaggtgccgaacatgtggcctcggtagcttcctaacatcgcaa

SEQ ID NO: 437500 - DNA, 252 bp, Homo Sapiens
aaaaatgggaaaatacgagtcagctcagctctgataacttaagctgcatcttcttgtgcagccacccaaggggaagagtccacgtgcagaatgcagttaacactgggagtcagcctccatctgcttaccacgtgtgttgatggccatgtcagccactttctgaaaggcgtccaagaaggcagctgctgctactactgttgtccgaagctgggactgcagctttcctgctttgtttatgaaatctaccgtgtg

SEQ ID NO: 437501 - DNA, 435 bp, Homo Sapiens
ttttttttggcatttcaacacagcatttttattgcttttgaaggtttccctagagcagacatcattctattgcacagatgtgtcattttggcattatagaaagttgcagttaaaaacgctttctccaaaataaaaagacaaatgaaatacccagcatatacagttgaaggcaaaggagggcaggctttagagggatggggtccattgcttttgctgtgcatcacccttgattagcagttacattttggtagtacttcttacccccaatttctagaaatccttttcaaatccagatcagtggggccccatctatcaggagaatcaacccttcaggagcctgaggcaagaaggacttgaaccttactgggctgatattagggataggctgcagaggagcttgggaagcttgaccacaaaactagttgggagcaggcc

SEQ ID NO: 437502 - DNA, 285 bp, Homo Sapiens
aatcactatcattctcaaaatgtttgtttaaaatggaagtgtatatgtagctattgccttatatttagtgctcatccacattaaggtctaaagtagtatactttgaacttgaggtataagtttaggctaattgtatggaatgtgagactattttgaaaggggggcagtaactttactgttgggatcagctgagtgatcccaaagtacaattttaaaattgtttagtaacagaacagattctttctagaccagaaataaatgctattactggcatcccaaggcaac

SEQ ID NO: 437503 - DNA, 681 bp, Homo Sapiens
  misc_feature (33)..(33): n is a, c, g, or t
ggacccaaaaagccctagcaccgatccccttcnagttaagaccctaactgtaggggactttaattcccaaaatggcaaacaccttttaaaaaaatcctgtcaacgcaaatcccacccttcccctctcatcttctctctttcttggcctttgtttaattgacgagggaaacaaagaatcaggtctatttaatgagcacagccattggtactgactttcatccagttcatttgactttgaatatgaacctaaaaaaaaggggctcaggtttcttggctggagtcagtgtctcccttacaaactgattttaatgcgcacggtcatggttgaatgagaatacagtctggtgcttaatccacactcctgcattgcctttaacacagaaacagagttaacatgcagaggtcaccgaagataagagctacattctcccgcttccggtgatttattaaaatgtggcattggataggaatctgtagattagctagtgcctcttgtgactaagcttccatagggcacatgcccaaagttcaaacatttgacatgagagagtatcaaacataaggccccaagccagggacttgacccacaatcagttggatgagccaagaatctagtcgttcaagagtttcctgttcccagaagccccatagttcaccttttcagaaatggagggtgagaaa

SEQ ID NO: 437504 - DNA, 337 bp, Homo Sapiens
  misc_feature (318)..(318): n is a, c, g, or t
acttgagggaacagatatgcgatcatcactttgggtctggcaaaacccaactgggggacatcagctgccctgaaggcagtggctggggagagtccaagtattaaggtcagggttgttaattcccaggagtgttcaggaggggctacgaatgaacagttacttatctgatttcccaacccaaaatcagtcacgaaaagcaaccaactgtgagtgcagggagaccaatgaggccagggcccaaagggggcgagcagtgcagacaggaggcgggcagagcgcggccacgtgcacgtcagcaccgggcacagccacaaagtnactcacgcgaaggctgagg

SEQ ID NO: 437505 - DNA, 906 bp, Homo Sapiens
ctggtaccgtgtcccggaagttttcgggcatatcgtcgacccacgcgtccgtgccgggggcgggcccggaaccgccacggctagaagaagtcttcacttcccaggagagccaaagcgtgtctggccctaggtgggaaaagaactggctgtgacctttgccctgacctggaagggcccagcttgggctgaatggcagcacccacgcccgcccgtccggtgctgacccacctgctggtggctctcttcggcatgggctcctgggctgcggtcaatgggatctgggtggagctacctgtggtggtcaaagagcttccagagggttggagcctcccctcttacgtctctgtgcttgtggctctggggaacctgggtctgctggtggtgaccctctggaggaggctggccccaggaaaggacgagcaggtccccatccgggtggtgcaggtgctgggcatggtgggcacagccctgctggcctctctgtggcaccatgtggccccagtggcaggacagttgcattctgtggccttcttagcactggcctttgtgctggcactggcatgctgtgcctcgaatgtcactttcctgcccttcttgagccacctgccacctcgcttcttacggtcattcttcctgggtcaaggcctgagtgcccgtgctgccctgcgtgctggccctagtgcagggtgtgggccgctcggagttgccggcagaccccaatcaaccggcacccctggccccccgctcgaatgtccttgaggcgtaatcccgccagcaccttcttctgggcactgactgccctttctggtcgcttcagactgatgccttccagggtcttctggttgctgtggccggcaacaccagtctgtaccacaaggggagttaaggatcagggcccaggttgga

SEQ ID NO: 437506 - DNA, 2728 bp, Homo Sapiens
  misc_feature (120)..(120): n is a, c, g, or t
  misc_feature (162)..(294): n is a, c, g, or t
  misc_feature (301)..(309): n is a, c, g, or t
  misc_feature (348)..(420): n is a, c, g, or t
  misc_feature (467)..(505): n is a, c, g, or t
  misc_feature (514)..(533): n is a, c, g, or t
ttgcccaattggacaggcagccccctgggtaaccagggatttagcagaagccgaggttatgtagggcggttgctaccagaagttcttggaagtggttggccctaacttaccggttacccntaagaagacccagtatttggtatctgccgctctgcctggagnnnnnnnnnnnnnnnnnnnnnnnnnnnnnnnnnnnnnnnnnnnnnnnnnnnnnnnnnnnnnnnnnnnnnnnnnnnnnnnnnnnnnnnnnnnnnnnnnnnnnnnnnnnnnnnnnnnnnnnnnnnnnnnnnnnnngatcacnnnnnnnnngcccgctcattaggcgggtaaatttcccgggtactgcannnnnnnnnnnnnnnnnnnnnnnnnnnnnnnnnnnnnnnnnnnnnnnnnnnnnnnnnnnnnnnnnnnnnnnnnaccactttgtacaagaaagctgggtcaggaaacagctatgaccatgnnnnnnnnnnnnnnnnnnnnnnnnnnnnnnnnnnnnnnngcctcgagnnnnnnnnnnnnnnnnnnnnaaatacaaatgttttattacgcaaaccacatgtaggtcccaggctcaggggcttaccctacagcccccactggtccctggctccaagcctgctccttgcccttgcccaccctggaaagccaggatctcctatggagtgtgtaggtgtccacgagtgtaccggtgtgcgggcctcctgggctgcaggcactcaggcatggtggcagcattgagggaaagacaggtgttggggagcggggtccccacctgcccaggctcaggagtcacaggggtctgcacagtcctttctgctgtggaacacgtgatagatgctggtcggggggaacatagcaacagcgccgagcagagagcccacctggatggccacgccggctgccagcaatgccggccggcccccgccatgcagcagggagctggctgccaccttcacgtaggagaacacgccaagacacagcacccacgacagcaccacgaggaccacccccgccgaggtgcccaccaggggcgggcaggggctcaggactgccagcgccatcaggtagcccccacagaacacgcccagcagagagaggccgcccagccctgccaaggacctgcacagcacacccatggccaggaagcaggccaggggattggcagcactgcccagcaccacagccaggtggtaggccagacgcccgtagggtaagcaggaaaagctctgcacggcaggcagcacgccattggtcagcgcgttggtggcggccaacaggcccagcaggcaggcactgcgggctgatagaagctgataggccttagggtctggaccaggggtggtgcctgctgcctggcttggtggctcttgcagtggtgaggactcttccacctcttcctctgctcctggggctcccacctggaggcctgatcctaactcccctgtgggtacagatggtggtggcggcaacagcagcagaagaccctggaaggcagcagctgaagcgaccagaagggcagtcagtgcccagaagaaggtgctggcgggaaaacgctcaaggaagtcgagcggggggccaggggtgccgttgatgggggctggcgggcactcgaggcggcccacaccctgcactagggccagcacgcagggcagcagggcactcaggccttgacccaggaagaatgaccgtaagaagcgaggtggcaggtggctcaagaagggcaggaaagtgacattcgaggcacagcatgccagtgccagcacaaaggccagtgctaagaaggccacagaatgcaactgtcctgccactggggccacatggtgccacagagaggccagcagggctgtgcccaccatgcccagcacctgcaccacccggatggggacctgctcgtcctttcctggggccagcctcctccagagggtcaccaccagcagacccaggttccccagagccacaagcacagagacgtaagaggggaggctccaaccctctggaagctctttgaccaccacaggtagctccacccagatcccattgaccgcagcccaggagcccatgccgaagagagccaccagcaggtgggtcagcaccggacgggcgggcgtgggtgctgccattcagcccaaggctgggcccttccaggtcagggcaaaggtcacagccagttcttttcccacctagggccagacacgctttggctctcctgggaagtgaagacttcttctagccagcgggaccgccggcaggcagggaagcaggaagccggcccgagtcgctgcggccccaggggaggaggccgaaggagcgagtggagccctcctctccagggagaggcggggctggagtcaacgccaccaccaccccaagccggacgccgggaaagggcgcctaccaggaggagccacgcacaccccagggcttcacggtgcccgcgaccgcaagagccaagtcagatcccaggggagtggccgggacggctctgctcggaggggcgccgccctctcggtaccgtcaggtgggcgactcgggagccgtccggtccctgcgcctcccggtcccgcgcccagtgcgctcccgctccagtgccggcttcccgccacgccgggacaccgccgtccggcccagggacgccacctcagtccggagcgcgcaggacccggcagcagccacgacccgactcacccgtggcggttccgggcatcccgggaattccggaccg

SEQ ID NO: 437507 - DNA, 1528 bp, Homo Sapiens
  misc_feature (1326)..(1326): n is a, c, g, or t
  misc_feature (1391)..(1391): n is a, c, g, or t
  misc_feature (1417)..(1417): n is a, c, g, or t
  misc_feature (1423)..(1423): n is a, c, g, or t
  misc_feature (1432)..(1432): n is a, c, g, or t
tattatatcagtattctatttagtctactcccttaaaaataaagaccacgggaatggtaccgggtccggaattcccgggatgtcacccgctgagggtgtggaacttggattcccgacaactggggtctaggggcgggagtggggactccaggagcttgcccgtgggaactgggagctgaggaattgcctaggaatcagcactgtggagaatgaggaaacgtggatatcaggattcctgtttgagtggtacccggaccttgggtcatgggaccaccactaattgtgaggaaagggagtaaatttaagtctggactctgagctatatgtgttagactcagaccacgtactatgtaaggacaattacttatctaggacaattgcttgacttccttgtatcttattcgaccaacctccattttattgagcaaatttacctcgtgctaggcattgtgctaggtgctggtatgcagtggtgagcttacagacaagatcgctgctttcctggagcctctgggtttgcctaccctcattttccctagtcgcaaaaatagacatcatagcatctcttgatgtggtgagggttttatgaagcgatcctggaaaagtggataccacagagcctgtcttccccgaaagggctaaactggtgggttctcaattggggccgttccctcccacccccacatttgggataggtctgggagcacatttttttgcgttggccacaaactgcccggagtggcgggggcttactgcaccttcttatgggggtcagagggcccaaggggaattggctgtgctcgaaacctttcgcttacctcatcgcggctgtggagggcgcaaccgtaccctgttcccctgggcccacctttagagaggtatcacgctaccatcaaaactccctcccatcgcttctcataaaaaatttgcgccttcacatatcaaaatctcgggccccgccgcgggggtcattttggtactaacaaacaagaaccttcgtcctttgtgggggaaaattttgtgcacaactgagccacaaaaagaaaataatgggcgtgacacatcacatacttaccctttcgagaccagtcttgtcttttcggggggacctcacctcccgaccgaggccgttttttgccccaacaagtggtagacctttggggagacgccgtgcgggcgttcatatccccggagcctctcggggggccgcaatccctgggccataccgacccgccatcgcagtgacatttctctaacacatgctggtggaaaaccgctccaaacacaaacataaaatctttgcccccccgccgttctctcaaaccnccccttacaccgcccccaaaacccccaacaaaatgcgaccgaggggcgatacgggcggggcagcncagttccccgccccaaacgttggggnccagangggacgcantttgttccgacgcccggcgcacccccccgcacctcgtaaacccccggtcctcaccactaccacccctactgtccgcacggctgtcctctatcccaa

SEQ ID NO: 437508 - DNA, 2120 bp, Homo Sapiens
ctggcattaaactctatttatttagtatttgaaacatggtgtacatgtatgtatttgtataaacatttgttacatctaaaatccacaacaggtaaacaatctgtgctttcttttgtgtacaagtttggggtttacatctggatattttggtgttgtggagactcagtctgtgaagctaatcagattgcctcatattaccataataactgtgacagaagtgatttgctccttaaaggggctgttccttgcccagaaaaggtgtcacacttttgaactaataaaccgggtgtcacggaatcaagagaaacacagctgacacgatggagaaggtatgtgcaggggactcctggagatccaagtcaatgcgtagcaggcaacacaagccatggggtgacgctgggaattgagctctcccttttcaaactgttggatgtgaatatcaagtctccccaaccccacctggaggggtttcatccagcaagagcttgccttctgctcagcacactcctgggagtaacctatgagtgtcacagctgcaactccgaggtgccaaccaagcccagggctctggcttcttctggggtcaggccgctcttcagggttcttcgcaaagatttccggttggcccgggatcgtttcctctccctcggcaccactcgctgactgggcacttgggtggctgacttgacgatgcggtccatgatctcatcagctgcatcatctgtgacattgggcgagtcatcagttcccatagtccaggaactagtggatcctcggcttgctcggctgcgtgtgcggacgcccagcgcgggggtggcgtcctccacggagggggacgaggttttcagcacagccttcatgttctcgtgctcagccgcgtcctccgcatagctcagaccctgcggctggcttgggggcgccggagaactgccggagaacttgccagaatcggtgatcatcttccctctggtcttatttctctctctgtggttggcccgtttctgtttctgctgcaaaaccctttccctggttgtgcgatactctaggtgcaatttcactaaataatcctgcagaatttgtttatgttcacttcccgaattgcataaggtggatggcccataaagagtaaaaaggagtggaatctgttgattatccttctatggacaatctttaaaattataattcgctctgcacagtctttcaggaactctgacatccgttgttttaaaactggtttcatttcatgttttgcaattgccttgaggtgatcccatgaagctttgcatcttctctccatctgacataaattatcctgaagttgatcaaagtcaaccttggctgacctggtgatggccccgatctccgagtacagatcggagctgtctgggaagttttctaccaccatggtgcacacatggtggagaagcgactgcttgtgcactgtgtctttgacttctggaaccttctcgaggtagcttaactcaaacgctttggcattagttccatttagaaagttcccaatggctaagagagtagacaggataaagcccaaggttttattgttctccaactggtctattccttccttcaggtccaggagtggttctgctacttccttttctgtagtttcataatccattttgaatgcccagaggtgaagtcgtgcagagagctcgctgatggaggacagggtgaggaggaactgctctgcactgcccagggggatttcagggttggccagctgagcttcctggattttctgcttctcctcatcggtgggaatcatcgttagaattttctcgattccttctttgtttaaggcatactcatcaaaattcaaaatggcgatcttaatcgtccttggagggggcagcaccgtcagaccaatattgatggcattactcctcttggaatccagaacaatgatctcttgcctttttccatctgcagcagttttctttgagacagacagttccttggatttagactcaaacaggtgctccagtctggaagtgtccaccttaatgggttccagttttgaccacaggaattctctgcagccgtcggttgtttttacatggccagtcaaaaggccgaacttcattccagaacaaacggat

SEQ ID NO: 437509 - DNA, 626 bp, Homo Sapiens; identical to SEQ ID NO: 312914

SEQ ID NO: 437510 - DNA, 448 bp, Homo Sapiens
ttggaggctaagggttgaatctctgaaacttcatctttaaaagactcacctgattaggtctggcccacctaagatcatcctcctttggatgaactcaaagtcagctgagcaaatgtgcttaacaaagcaagtgtgaccataatcacatttgcaaaattccttccccttggccaaatcacaagctctgcacacactcaagaagagatgatacagggagcagatataagggagtggttctcttgggggctgtactagaattctgcccattacaacttcctttctcgaggaacagcaggcctggggagagatgatcatggatgagagcagcccacaggttgtgagtgccaggtgttggcgtaggatgcaggaggctgctaagcaagtatgaaaagccttctgtgggctgggtggagtagctcacacctgtaatcccgacacttgcataaca

SEQ ID NO: 437511 - DNA, 1064 bp, Homo Sapiens
aatggccaggttaaaaaacttgtgtaaagggaaataaggccaccccaagccctttggggccagaaaagggaggagcccaggttggttgaaaaaatggaaggcccctctggattcccgggcctggggaagcggcaggagaaaccatcctttccaaaccaggttttattttagaaccaagtaaagtgggagggaggcccaggggaatgaaggggacttggggaagaagttgaaagagttttagcttccagtaaatgcctctggttaagatccccatggggggcctgtgggctgcccccatctgtgcgtgtggtctggctaaccaggtggggagagagcagggccactctggattcagggtatccagagctttctgtacacttggattgtcaaagttgatacctgtggaagacacaggcctctggctagtcatgttgctagcaggtgccaggcgactggaaggctggccaaaaagcccttgggaaggagccccaggtctggggcccatgttctgagcagatcctccctgtcccaaaatgcttggaggctgattgccagaagcctgtgatctttgttgaggctggctgtttgctgctgtggaaaaattctggtttggggtgtttccggcagcaaccgagggggatgcagagctgctattggccgtcactgtgccactattgaagaggctgaggattttggcctgaagctcttgctgggaggtggggggtgcagatggagtgggtgtagcagaggggagcacttggccgctctggagcggttgggagcttggctgtgtcttcagcgaggcacccgaggtcgccccgagtggttggcgggaaatcgggcctcggccctgccacgtagctcaccaggcagagagtcggtgctgctcctcatcagccgctccttccgctctcgcaggtagttgatgatcttgtcagtctcttcagcagtgaggtacctgttgtctgccagcaggttgatgaggctctggatggctggagggtggcccccacgcactccctcctcagggcctcctctccctcgtgccgaattcgccacccagg

SEQ ID NO: 437512 - DNA, 983 bp, Homo Sapiens
ctttgtaaggaataagcaacacagccttgggcagaagagagagcaggtggtagaaattgatgacactcgatgccgggcctgggagcgcagagaacatcctccaaacagctttatttagaacaagtaagtgggaggaggccaggggatgaggggactggggagagttgaaagatttagcttcagtaatgcttctggtaagatcccatgggggcctgtggctgccccatctgtgctgtggtctggctaaccaggtgggagagagcagggccactctggatcagggtatccagagccttctgtacacttggattgtcaaagttgatacctgtggaagacacaggcctctggctagtcatgttgctagcaggtgccaggcgactggaaggctggccaaaaagcccttgggaaggagccccaggtctggggcccatgttctgagcagatcctccctgtcccaaaatgcttggaggctgattgccagaagcctgtgatctttgttgaggctggctgtttgctgctgtggaaaaattctggtttggggtgtttccggcagcaaccgagggggatgcagagctgctattggccgtcacggtgccactattgaagaggctgaggattttggcctgaagctcttgctgggaggtggggggtgcagatggagtgggtgtagcagaggggagcacttggccgctctggagcggttgggagcttggctgtgtcttcagcgaggcacccgaggtcgccccgagtggttggcgggaaatcgggcctcggccctgccacgtagctcaccaggcagagagtcggtgctgctcctcatcagccgctccttccgctctcgcaggtagttgatgatcttgtcagtctcttcagcagtgaggtacctgttgtctgccagcaggttgatgaggctctggatggctggagggtggcccccacgcactccctcctcagggcctcctctccctcgtgccgaattcgcc

SEQ ID NO: 437513 - DNA, 962 bp, Homo Sapiens
  misc_feature (11)..(11): n is a, c, g, or t
  misc_feature (40)..(40): n is a, c, g, or t
  misc_feature (68)..(68): n is a, c, g, or t
  misc_feature (77)..(77): n is a, c, g, or t
cttttactatnatatagtatacataaatccatctcaacantttagaataaactgcccaccaactgtgngctctaganatccagtgctattcagtagatcttcaacaatttatcaaatgattttccacatcagttgtgctcattactgtcccacaaaggtcagaaagaagcttagatgtcatctctctatgactagccttcccctccaatgctaaggatactgccaacactggtactccacttttcatttcaccaagatttaaatctcttaacatttccgcaacttcattagtatctccatgctcaaaatattcctgtatgattggtgttaaagtcttctcaaatgccctttcatccaaaggcaaaactacagtttcataaacacagttctcctggtcatcatcatagttaggatctttcacatccacctcctccacatcatacacctgtccaggtgtaccccagacacctttgcctcctgcaccacctttctttggtagtccccttccgtgttcccagatctggatcgcctatccagcaaccttccctttggactggttggcacagttaatccacttctaagggcgtcactcccactgtcgctgaccgaatcgcctctgccagagtcccgggatgagtttttccttagtcgcctttttgccttggcattaattctagcttcgttaatggaggatgctgaaatccaatttccatttatttcattctttacttcctcagtcccagcattttcttcatcaccggaaaagagagagtcacttaagttatcaggatctgcagggtttacattcagtatctgctcattttctacatccattttcccttaatttcgcttgcactgattaaacaaattacctaatggaaatcttccttcagaatccctcgggcccccgccgctgctcgcccaggttcctggtcagccggccccgaccccgctcttctatc

SEQ ID NO: 437514 - DNA, 1162 bp, Homo Sapiens
  misc_feature (4)..(4): n is a, c, g, or t
  misc_feature (12)..(12): n is a, c, g, or t
  misc_feature (18)..(18): n is a, c, g, or t
  misc_feature (29)..(29): n is a, c, g, or t
  misc_feature (32)..(32): n is a, c, g, or t
  misc_feature (43)..(43): n is a, c, g, or t
  misc_feature (51)..(51): n is a, c, g, or t
  misc_feature (60)..(61): n is a, c, g, or t
  misc_feature (68)..(68): n is a, c, g, or t
  misc_feature (74)..(75): n is a, c, g, or t
  misc_feature (79)..(79): n is a, c, g, or t
  misc_feature (89)..(89): n is a, c, g, or t
  misc_feature (94)..(94): n is a, c, g, or t
tttnaaaggggntgaagntgcgccccccnagnccccacaaatnttttacgnttccccttnnaaaactnagagcnngtancttatccagngcagntctagccgcacacaatctacagtcctttgtaactatccaatataggtattacataaaattccatctccaacagctctagcaataaactggcccaccaactgtggtgctctaggagtatccagtgctaattcaggtagatctttcaacaatttatcaaatgatttttccacatcagttgtgctcattactgtcccacaaaggtcagaaagaagcttagatgtcatctctctatgactagccttcccctccaatgctaaggatactgccaacactggtactccacttttcatttcaccaagatttaaatctcttaacatttccgcaacttcattagtatctccatgctcaaaatattcctgtatgattggtgttaaagtcttctcaaatgccctttcatccaaaggcaaaactacagtttcataaacacagttctcctggtcatcatcatagttaggatctttcacatccacctcctccacatcatacacctgtccaggtgtaccccagacacctttgcctcctgcaccacctttctttggtagtccccttcctttcccagatctggatcgcctatccagcaaccttccctttggactggttggcacagttaatccacttctaagggcgtcactcccactgtcgctgaccgaatcgcctctgccagagtcccgggatgagtttttccttagtcgcctttttgccttggcattaattctagcttcgttaatggaggatgctgaaatccaatttccatttatttcattctttacttcctcagtcccagcattttcttcatcaccggaaaagagagagtcacttaagttatcaggatctgcagggtttacattcagtatctgctcattttctacatccattttcccttaatttcgcttgcactgattaaacaaattacctaatggaaatcttccttcagaatccctctggcccccgccgctgctcgcccaggttcctggtcagccggccccgaccccgctcttctgtctctgccgccgcctcggagagtcactccgctctcgacgaattcgagctcggccgatttggcctgat

SEQ ID NO: 437515 - DNA, 718 bp, Homo Sapiens
  misc_feature (13)..(13): n is a, c, g, or t
  misc_feature (37)..(37): n is a, c, g, or t
  misc_feature (77)..(77): n is a, c, g, or t
  misc_feature (102)..(102): n is a, c, g, or t
  misc_feature (107)..(107): n is a, c, g, or t
  misc_feature (124)..(124): n is a, c, g, or t
  misc_feature (162)..(162): n is a, c, g, or t
acgacatggctgnccttggagaatatgttcacatttnttttccatgtgacactgctcttttcaaaattcttctatgntttagtatacaactacatgagtatnccccnttttttcccatcttctntgccatgcttccgtgttgtgggtctgtggaaatctatnccatatgcacacatatatagaccacaaatctggtggaagcaatactggtgattgaactgcaacaatactgcccatcatgcacataatcgtttttgaaccagttagtaacttcgctggcttcttcaggcaaatgtggctttaattcattaaaagctcctggaatgccatcagctggaatgaatgccaatactgaagtttttgtcattgctgtatcacgtgaccagtccactcatctgaagtttctgcgtgtcctgcatgtggtagtgaggggctttctcatcaattcttagggctctgagaagggagctgtgggtgggctgggtgccttccccaggactccaggagacataaaacttgaaacgggagacttcgtgcaaatcctgctccggacgctgctgaagctcagatttctcccactgcctgcacagggtgctgcctgctggcgaatgtgactctcctcctgttcacccacaaggctgatttttccgtgttcctcctctggaaagagcattgctttctctcttccagcactttgtgagttagatgtgtgtttgtg

SEQ ID NO: 437516 - DNA, 581 bp, Homo Sapiens
  misc_feature (539)..(539): n is a, c, g, or t
  misc_feature (546)..(546): n is a, c, g, or t
gggtagtctttcctctgtttactctttacttcatttgatcaattccaatttttttcataatgccattattattgagggaaggggagtaacttcaaggtaatccagagagaagcaaatgcaatacagttctgactgagatgcagattcctttttgttaaatgctgactgtgtccttggtttcccattcacctgggaagtagaagaataaaaatcattccatagttccatccaaggagggcagctgcaacagtgtgctcttgagcaggctgtctgggtcatcaggaaaagccattccagttactcacgcattctctgagaaaccttgtcatctctgccatctgtctctgtgtaggaactgccaaagtccttcggttccccatctcaaataagcagtgcatgggttacttccctcattctaatccttcagtccctccttgtgtccgtttggatcttccaggaagcagctttcaagatggagttagaagtacgagtaatgaggggtgattaccgtgaaagataaaggggagaggctgtagggnggaaggnctcagaccaccatgcaggctgactttgaaggaaag

SEQ ID NO: 437517 - DNA, 620 bp, Homo Sapiens
  misc_feature (369)..(369): n is a, c, g, or t
ttacgttttttaaaatgtcttttattggttgtacattttcttatgagatcaacacaccattttctttcaagaacactttgctcctgaatacttaatgttacttgtcccagctatgaaagccatagcaagcactttgacggaaaaaggtggttgggtgttttttttgccattatcactgtcttctctatcgttaaactgttgtttgagtcagtttgtagattgacacaacattgaacacaacacacacggtgtgaagttttacacgcatatacacacatctggagaccagttacagtgtctgcagcttgttcctttctcctcaggcagtatgaaactgaagaatatcctgaggataggaagtcaacgtgnaaagttcctcattaaaagagggaggtcaaggcttgatttaatctcccaatttcattttctttttgaggtggtcagaggggacccagaacggtagccagatgaaccgtggaacaaccacatggtttaatatctcagctgtttccttggtcaaaaacacagattcacagaaatatttcatggcatatcagaaacctaccttttaaaaatatgatcttggattagaaaggagggcaatgaaaaggtggtttttt

SEQ ID NO: 437518 - DNA, 1492 bp, Homo Sapiens
agcggggaagctatggtggtgtatctgtcatgaactacacacaagggaatgcttaaacaccagctgagtcatatcaggtgccttgtacacacacataaagagtctggtgaattctgacagtgttctgtttgccactagagcaaatttaatagctggggtttcacagcaactgttttagaaaactatatgtgccaaaaatttacattgggcagcagtttatagtgttcttggccaatctgcataaaagccacttgaggaggtttgattaagaaaattgtgtttatctcctgtattacctctgtgtttgatttattctttaagtctcaaatttattttctgagtggactgattttctatatgaactgaaatgatgttttaatagaataataggtatttttagaggaaaagtattttttgtgtaatttgcttacacaactaggacatacttcctatgatactgaatcatcgaattgagtcatttaaagctgaaagaggtgttaggaatgtagtttcagattatttaaatacatgaacagttttctatatattttgtgaaaatcttgatgagacactagaatttctttatggaattgaactttacaagaatttttaataaaagaggtggatttcttcagctttctttgtgcttcagtttcatagctgaaaatgctgcttccgtttattaatatggactttgtaaggaaacacaacaacacgttttcttaccttctgtaaattttgtgatagacacatgttatttgtatatatgattgattgtttgcctgttgcaccctaaagttattttcaaaccatgtttattgcaaagagagcctttgggcaagtggaaaatgccctgatgctagaatgaggtagttccataagctagttaggagcttgctacctcttcttggtacctgaaatattctgaaaggatatcggagaggtcctatgcacccctgtctttcaaaacccacctccagcacttcaaagtagtgtctctggagagtttaaaataaaagaatgaatgctattcagtggattccctcattgaggctcccatctttcctgccaggtgcagctttttctggttggaatcatctcttctttacggattgccgcattgtctctttgtgaatgaggcaggctgaactgtagagcatgaaactcattagaagtttataaagtaaagacctgtaaagcatgtgggtggaatgtttccatgctcttgaggtgaatattaaatttaaattctggcctttgggaactctttgcttgtgagctgaagaaggaaagaaggagtagggggtgtatatctaactgtgtttttctatatggaaatatatgagcatcaagtgataacttcaataaggcctcaggatgtatttaaaaatacctgtttgtgggacagcattcctttgttttctttgcctgttggcttggtggctccaaacatttcattttaggctagctttcctgtcacccaggttgtgtg

SEQ ID NO: 437519 - DNA, 904 bp, Homo Sapiens
ctgtgtgttaaccccattgctgcccagtaaactcagctgaaaactgaccttcccttggcagttcatttccattccttagcagttagttgcatgaaggaaatggggtcatcaggctgtactgtcacattcctcttttcagattctttcttttgggataatttctcttcttctagtttagcagataacatgtgagaaagggactgtctgcattccttattgaaaatgtcattcattaaaggtgaacattcagacaagaccttgaggcacagggaaattcgatccacatcatcatcagtaattggcttcttaggaagagaggattttcccaaatgcaggatagtagccatgagcaacatagcctcagcaacaaaagaattttgctttttcttctcctgaaccaaagctacatagcgcaatgcaatcttggtcagagttgtggcaagggaggcagcaacaaagaaatctccatccagaaggaatcctctcaagggaggtctgtcttcctctttcttggtgggtctagaactgctaagggcactctgagttgcataggtacccatttcagtaaccaatttctgaactggccctacagttatttcttcttcaggttttaattcaccagcttctttctttatttctgactctacaattgggatctctccaagggacctgcggatctcagtcatcacactctgaatgtcttccttggtactacagtattctcccaggatccataatgctcctcggtaaatcttgacagatttaatagcatgaaagacttcaagcatcttctcaacaataagcattctcaggttatcaaagcgctgaatggcttcacgaaccaactccaagacatcagcagctgctgcttcgttgttgtcactgagaaattccattaacaccc

SEQ ID NO: 437520 - DNA, 386 bp, Homo Sapiens
  misc_feature (27)..(27): n is a, c, g, or t
  misc_feature (38)..(38): n is a, c, g, or t
  misc_feature (50)..(50): n is a, c, g, or t
  misc_feature (96)..(96): n is a, c, g, or t
  misc_feature (254)..(254): n is a, c, g, or t
attttggatctcatcaacatcagtaanccaggcccggnccttagcaagancctccttgagagcctggatgttgggcaggtgaacagggatgttttncgcttcacggattatggcctcaagtgtggctggtggatgcttctgcctggcctccaggcagaggtgggctttctcctcccagcgttcagcaatggtcagcagttcctgcagctcggcctgggctttatccacagcagggctaggggctacactggcanccgcgaccaacagtcctcgcatgacagccaaggtgccccttcgggctgagggggccagtgtgcgtttcacctcatccagccatcgcgcctgttccacctgccgctggagctgctgggccattcaacgccccg

SEQ ID NO: 437521 - DNA, 359 bp, Homo Sapiens
ggaatagttacaaatttaataaaatttgccttataaattacagcagcagccccagggctcagttcgctgccccaagaagcaacagttgggcaaagctgggcagctattgctggagagagttgtctcaagagttcagggctgtagaggtggccagggaccagcatcacctcctccaggacggccacaggacagcagcaggggccaggcagaggctcatgggccagtgggtgcacaaggagcaggagtgggggctgaggccaggccctgtgggctgccgagcgcccctgcccactgctttcctcagtccagactggccatgagcaggtgcagctcgcggaaggtactgccatggcggccgc

SEQ ID NO: 437522 - DNA, 1057 bp, Homo Sapiens
  misc_feature (530)..(543): n is a, c, g, or t
  misc_feature (914)..(914): n is a, c, g, or t
  misc_feature (951)..(951): n is a, c, g, or t
  misc_feature (964)..(964): n is a, c, g, or t
  misc_feature (993)..(993): n is a, c, g, or t
  misc_feature (999)..(1009): n is a, c, g, or t
  misc_feature (1047)..(1047): n is a, c, g, or t
gaagagaacattttactcatagtagaggctaaagactatgataaaataagcatttacagagaatggagactcatcctgtgaggccttaatttttctctatgttcaaggcagttaattgctcagagtatgggtttggaggatctgtaccacaaacttaaaagtaccaagctaacaaatcactcattttgaaagtctactacaaattcataggccatctacccaaatggattttctcctatcaactctagctgcagagcaacatggtgattcagaataggtgcctggataggaagaggcataccgtgaatctaaggactgtattgaatagtaaggctaacaagagtcaggcatctgcaggtgctgatgaactagagacaggaagggaccgagttaacatttcaggtggccaaggctctccttggaagctgtaaaccaagactgaaggctaatttactctttctgtcctgcaaatctgctttgatatggagcaatacccatggatgcttaagtagctagctactatatcggcnnnnnnnnnnnnnngtccctcaattaaatgccttaagacctgacattccaagagaaaacaaaacccatactttggtttctaaggatgtatgactgggtcctggccttcagaggatggcagacagatgggaacacaagtataagtagactagagtatcccataattgtcaactctggcaaggtaaagatgaagctgcttatgtggacaactcgtggggtacctaagtaaatctgggagccaggtacgtgcaaagtggtcagtggtagaagccctcatgaaggcaggaatgctgcaaacctccacttactgccttccaggaccacttaagtcatagtggtaagagctgctagaagtagtcgttaccaacttgattaccagcaatacncaatgatgtcaagaagacattccacatccttctgtgntcactagctctcntttcaaccactccccataggtaacagctntagacnnnnnnnnnnnaaagacatgaaacaaaaatggctgttcaagttagaaanctatgggggc

SEQ ID NO: 437523 - DNA, 222 bp, Homo Sapiens
atttgagctttgctaggtagttggcttttgtgtttgactgaagattttttccaaagaaagcaaatagctattaggaaaagaaagagtcagcaaatttctgtatgctttcatggaagagatttcccaattagaaagcttttgtaggcttaaccttttgccctaaagtaacccaacatttcattatgtattcccattggaggtttttggagctcgggcacccag

SEQ ID NO: 437524 - DNA, 1069 bp, Homo Sapiens
  misc_feature (1050)..(1050): n is a, c, g, or t
  misc_feature (1057)..(1057): n is a, c, g, or t
  misc_feature (1059)..(1059): n is a, c, g, or t
catttttacttaaatctatttattgaaaaggtcacaataaatagaatgccactaccacttgtcctaaacaataaagtagccaataaaaatataccattaaaacaaaaacagtgctaaaaaagtctggaattttttccacctgccctaagcccaagtcctgctccctaggcagaggagacgtcggcatgtcttccacaggcatcggaacatgttggcatccagctgagatcttctcggcataaaaggattgagagaattgggaagggcatcgctttcttgctctgattttgtgccacttaatgcaggccccataccacctaaaagtatctcgggaaccaacggacccacccacactttggaaatgctggactaacgtctccctctgcctcacgcttaacacaaaggggaaacacacacctgtggtcccctctctgatcataccttcaaggcaccaccagatcccctccaaatatgcctgctctcacaccaaggcccagcaagtccctctcaacaaacccacccctatcagccctcagaggtcaccgctgactcaggtgggacaccaggtagacaaggccaaccaggaggaggccacgaacaccaagcatcatgagcaggaagaggagcaggatggaggtcaccggctccacagcatggttgccgagatgccactgcggaaagcccatgtttcaccagctgccggtttgaggtcattgaagggggactgagcagcacccagcctggcacctgcctgctgctggcgggggccaggaccccctgggggagcaccatggcccctattgaagaagctctgtcgaggaatgctacctcttggtggctgggtagtggtcctcactcggggggtcgtcgtcctgcacgatttccccattggccaagatccgcaccatcctcccaggcgctgtgggtccctgatgggctgcaccagaaattgagggaggcttgcagtcagtgatgttcacagaggtgacccacgctgagtagatgctgtgtctgcaggcgcgactcgggcctggcggggtccactccggnggctcangngggttcatcc

SEQ ID NO: 437525 - DNA, 393 bp, Homo Sapiens
aactcaaaatccagaatataacggaaacgctacattgacagaccatcttacactatcagcccaacataacccactcttcctgttttgtttgatgggggaagttataatgtaatgccagaggtatattttatgtgtgtgtattaggctgtggaagattggttgactggcttttggtcactgagtttcagatattcagttctagaataatttgggaataaaattgctatcctatagtagttttgagctattaagaactatttggttgaaggtctgatatcttattccatttttaactgctactcaacacaagattttccttttgaagtaggtcttggtagaggttgaagcatttccacgatataatttcgaattattgcctctcatagtccacct

SEQ ID NO: 437526 - DNA, 1330 bp, Homo Sapiens
  misc_feature (263)..(271): n is a, c, g, or t
  misc_feature (1287)..(1287): n is a, c, g, or t
ggtgtaacaggcctttaaggaagcccggaaccagacaatacaggggtcccatggggggagggcgtctgtcctccctaaggcaaaaacgtggctttaaagggacaggtctattccttcaacgcaaaaggggggcaaggcccccagcctttcattctaggaaaggggatgaggcgaatgatttttgaatccacaaaagtggcattatcaaaggctcaccactttagtgttcatttactaaaagttagcagagatctagaatttgnnnnnnnnncagtttagcaatgagaaataactccacttagcaaattcaattaatgaaactagttcatagttttaaataatttcttaatttatatgaaataaagacaaccccatattagtagacttacaaatattctatttcgcgttatattcaagactaaacatcttccaaaccatattcatgaaatggtttgatgatatgtgctttggcagttttcaagaaatatcaatcaaaccgtaattaaatttcaacgtatcggctaaacatccactgagcacctcctcttgcagttagcattagactaagtgcttaaggacaagtagtttgatgcaataaattaagaaatacatatttaagacttatattattcacagaattcttggcatagttatttaagttcctcctgttgagaaacttgaggtttgtgttttctttctttcagtcccaaaagctccgttttgagttctccacgctttggtggaatttcaggtattgtcaggtccggtcggtagtacctgtgcaccacttctgcccctgcgcacatggccaggagactggctgcgaacattttcaggtaggtggacatgggcacgcccgcgggcatggtcggcaggctcttggaggagaggaactgtggacttcactcctctctgcctctatacacgcgctctactagagactgtaccgcgaactgcagggatgctgggcaacgggtctcagggcggcgggggtgcaggaggacccctgggttctcgcccaaccccacgcctcggtttcctcctttacgagctgagggcactgagaggacgaacgccctccaggccgaggcccagccccaatcgtttatcagtgaggggcgccggcctgcgtgcggcattaaagggagctcttgatcagcaagcggaaaaccgataccaggtcgtttccccgcgccccttctacctcttggaggagaggaactgtggacttcactcctctctgcctctatacacgcgctctactagagactgtaccgcgaactgcanggatgctgggcaacaggtctaagggcggacggagcggacggcg

SEQ ID NO: 437527 - DNA, 1756 bp, Homo Sapiens
gtttcacatgaagcatgggaagcgcaccctgtcgttcagtgacgtcattcttctccaggctggcccgccccctctgactaggcacccaaagtgagcatctgggcattgggcattcatgcttatcttcccccaccttctacatggtattagtcccagcaggcatccctggggcagacgtgctttggctcaagatggccttcatttacgtttagttttttttaaaaccgtggaggttgcccacgggcctcggcacctggccctggcagcacagctctcaggcccagccctgggcgacctccttggccaagtctgcctttcaccctggggtgagcatcagtcctggctctgctggtccagatcttgcgctcagcacactctagggaataattccactccagagatggggctgcttcaaggtcttttctagctgattgtggcccctccattttccccattttcttatctccctgaccaaaattgctttgacttctaaatgtttctgcttcccagaatgcacctgacttatgaaatggggataatactcccaggaaatagcgcaggacatcacaaggaccaaaaaggcaattcttatttaaatgttactatttggccagctgctgctgtgttttatggcagtgttcagagcttgatcacgttatttcttccttttattaagaaggaagccaattgtccaagtcaggagaatggtgtgatcacctgtcacagacactttgtcccctctccccgccccttcctggagctggcagagctaacgccctgcaggaggaccccggcctctcgagggctggatcagcagccgcctgccctgaggctgccccggtgaatgttattggaattcatccctcgtgcacatcctgttgtgtttaagtcaccagatattttgttcccatcagtttagcccagagatagacagtagaatgcaaatacctccctcccctaaactgactggacggctgccaaggaggccccaaacccaggccccatgcaaaggcacgtggtttccttttctcctctctctgcatctgcgctttccagatgagcccaaagacagcaacttctccactcatgacaaatcaactgtgaccctcgctccttccatttctgtccattagaaaccagccttttcagcatctcacccattagcagccccatcacccagtgatcagtcgcctcagtaaagcagatctgtggatggggagcctacgggtggtaagaagtggtgttttgtgtttcatctccagcttggtgttccatggcccctaggcgaggtgatcagggagtggggccaatgggcccccggccctggctttgggaccttgtgctgagggatgatttgctcctgaccttgattaacttaacagttcccagctggaagggacactttcaggacccagtccactgtatggcatttgtgatgcagaattatgcactgacatgaccctgggtgacaggaaagcctttcgagaggcccaaggtggcctcgccagccctgcagtattgatgtgcagtattgcaccacagctctgcggaccttggccattgccgcagtcgcagcttccttttttctgtttgcactgtttgtttgtatgatgttagctaattccactgtgtatataaattgtattttttttaatttgtaaaatgctatttttatttgaacctttggaacttgggagttgtcattgtcaccctaacatgtgagaataaaatgtcttctgtctcctctgtctccttt

SEQ ID NO: 437528 - DNA, 1547 bp, Homo Sapiens
  misc_feature (1537)..(1537): n is a, c, g, or t
taagggatcgggagtgggcgccgaccagccccccatggaggtcttcagcattgactccatgtccgggcggatgtacgtcacaaggcccatggaccgggaggagcacgcctcttaccacctccgagcccacgctgtggacatgaatggcaacaaggtggagaaccccatcgacctgtacatctacgtcatcgacatgaatgacaaccgccctgagttcatcaaccaggtctacaacggctccgtggacgagggctccaagccaggcacctacgtgatgaccgtcacggccaacgatgctgacgacagcaccacggccaacgggatggtgcggtaccggatcgtgacccagaccccacagagcccgtcccagaatatgttcaccatcaacagcgagactggagatatcgtcacagtggcggctggcctggaccgagagaaagttcagcagtacacagtcatcgttcaggccacagatatggacaggaaatctcaactatggcctctcaaacacagccacagccatcatcacggtgacagatgtgaatgacaacccgccagaatttaccgccagcacgtttgcaggggaggtccccgaaaaccgcgtggagaccgtggtcgcaaacctcacggtgatggaccgagatcagccccactctccaaactggaatgccgtttaccgcatcatcagtggggatccatccgggcacttcagcgtccgcacagatcccgtaaccaacgagggcatggtcaccgtggtgaacggcagtcgactacgagctcaacagagcttttcactgttgacggtgatggtgtccaaccaaggcgcccttggccagcggaatccagatgtccttccggtccaccggcacggggtgaccatctccatcatggacatcaacgaggctccctacttcccctcaaaccacaagctgatccgcctggaggagggcgtgccccccggcaccgtgctgaccacgttttcagctgtggaccctgaccggttcatgcagcaggctgtgagatactcaaagctgtcagacccagcgagctggctgcacatcaatgccaccaacggccagatcaccacggcggcagtgctggaccgtgagtccctctacaccaaaaacaacgtctacgaggccaccttcctggcagctgacaatgggatacccccggccagcggcaccgggaccctccagatctatctcattgacatcaacgacaacgcccctgagctgctgcccaaggaggcgcagatctgcgagaggcccaacctgaacgccatcaacatcacggcggccgacgctgacgtcgaccccaacatcggcccctacgtcttcgagctgccctttgtcccggcggccgtgcggaagaactggaccatcacccgcctgaacggtgactatgcccaactcagcttgcgcatcctgtacctggaggccgggatgtatgacgtccccatcatcgtcacagactctgggaaccctcccctgtccaacacgtccatcatcaaagtcaaggtgtgcccatgtgatgnaccacggggc

SEQ ID NO: 437529 - DNA, 1203 bp, Homo Sapiens
  misc_feature (125)..(125): n is a, c, g, or t
cgggctggcggcgggcggacaaggactcccaggccggcaacgggtgacctacccatgcccatcccccgtaccgcgaggacttcaaggcaggcaacagctccggactgcagccagtaggagggtgncacaagagcgggttgctgagccggggccaaagggtctcggagccgcagggtactccaggcaccggtagccccagccagacactgcaggctggccccggggtggccagtaggttgcctgcggcattgagactctgcaagttctcacaggtggccagtggctccaggcccgtcagccgattgttggagacattgagcacagctagctggcgcaaggaggccagcgggcccaggtgggtgagcgcgttgcctgataggtccagccactccaggcccaggcactctcccaggcagcccaggtcagccagtcccaagccacgcagcttcagtagcaggatggactccagggagaactcgcctgtgcgtgacttcagcagctggggtgtgatctgcagtccgccagcctctcccggcttctccgctggagggtccatgagatggaagtcggttgggatggcctgggccctggcaggactgtcacagggttccactgggggtcagctggtgctcgccctggctctacccaggccagtgccaggaggcctggttccgatgccctgctcgaagccagccagtcccttaggctattgcttcacaatcttcaaccctcgcaggcccgtcaggtagatctgggattttgtgtcatcactggtacaacagtgacaccaccatgttctcttccacagaagtactttaggatgacagtgcagctggcactgttgagagccaaccttgaatccaaatgaatctgaggggtggagccggcagcctgcggagccactggccaagctgggaagtccggcgcaactccgcaccgcagagccggcgcctcctcggcaggtaagagccgcagccccgccgcccgccgcctggcggcccctgacccctgggccgcgtgcccaccacccaacttgttggccagcgtgcttctcccagcgccgcaggcctgagctcccggaacgcgcccagggggcctggccaaaggccgtagtgggcgctctggattccgggatgcgtcaggggttacttccggaagcgcagcctgcgggggtcttcgcgcgcaccccccgcctcgcagttg

SEQ ID NO: 437530 - DNA, 3040 bp, Homo Sapiens
  misc_feature (2910)..(2969): n is a, c, g, or t
taccttttcctttaaggtggaaaaaggccacaggagcggtagaaaaaatgctcaattttttaaatagatgttaaatatttttagtttcctgatttaaaataatatttggggtatttgccttttgctctgggcacactatagaatgtttctgggagttacaatcccaacccaaccaggccaattagagcatcccagggttcaaatcacaatttgggatacaacgctatttattctggatgatgctcaattccatacatagtttagggaagaaacatccataagaacatccaaaaacattatgttaccaaatgctaacatgtgattgtgctccgttgaatagtaccattcacatctacaaagtacacaggcagacgattttaggtgtggagaccaatttgcttttgctgctacagtaattcacaaccatcatcttcgagatttccatgctgttctagaatatggagtagtcctttttttatctggtggcttaaagtaggaataaacaggcgctgctggatactctgcatcaggattttccgccatcattttcagttttgcttcaatggcttttatctttgcagtgacacttaggttagactgagtaggctcagtgcttgaggatggctcgagactgattggaagaatcttatcattcttgttatgatcatatctctttacttgagcatgtgcccatcgcaccaccagcttcttggacagggccaacttgccattgagacactggatggcttgctctgcttcctgcttagtttcaaagttaacaaaacagtagcctcgaggctgtccctccaaagcacctgacttgtggaagaggaagtcaaactgctttaccttgccaaacttctggaggagcttgaggaggtggtattcggtaattttggggtccaggttgccaatccataatcggtgtccttcctgcagagagccctctgaaaggatggatgcattctccaggggaagagttttggtttctgcttccatcaatgtctatgaaatactcgtggcctcggcgtggtgctctcagctcatgcccggaaaccaggtcccgacgccgcggtcagacggacctctagacgcgtccgcctcaatgccgccagctgccaggccgcccgtgacgcgttacgcctgcgccgcctcctggcttcgtgacgtcacgacgtccgcgcagctgcggtcgccgccgtcgcacgagtctttccttagtaacctgggcgatagctgtggatgtttccaaggattgtcttcagtcatggccttgggattaaagtgcttccgcatggtccaccctacctttcgcaattatcttgcagcctctatcagacccgtttcagaagttacactgaagacagtgcatgaaagacaacatggccataggcaatacatggcctattcagctgtaccagtccgccattttgctaccaagaaagccaaagccaaagggaaaggacagtcccaaaccagagtgaatattaatgctgccttggttgaggatataatcaacttggaagaggtgaatgaagaaatgaagtctgtgatagaagctctcaaggataatttcaataagactctcaatataaggacctcaccaggatcccttgacaagattgctgtggtaactgctgacgggaagcttgctttaaaccagattagccagatctccatgaagtcgccacagctgattttggtgaatatggccagcttcccagagtgtacagctgcagctatcaaggctataagagaaagtggaatgaatctgaacccagaagtggaagggacgctaattcgggtacccattccccaagtaaccagagagcacagagaaatgctggtgaaactggccaaacagaacaccaacaaggccaaagactctttacggaaggttcgcaccaactcaatgaacaagctgaagaaatccaaggatacagtctcagaggacaccattaggctaatagagaaacagatcagccaaatggccgatgacacagtggcagaactggacaggcatctggcagtgaagaccaaagaactccttggatgaaagtccactggggccagcaatactccagagcccagtttctgctggatcccatgggtggcacattgggacttctctccctcccccatctacacagaagactgtcaccatgctgacagaagcctgtccttgtaaggcccagccttccaggggaacactcagacatgttcattctcttcctgcttctgctctgggccggtgggtggctctcagaaaatacttgctgctggcaaaaggcctgtactcaggcatttgctttgacttgatgttgccaagggactgaggccattggcaggcttagtaccacctgctcctcatcttaggagtctccttttcaaataattaggctctgttcccattttaaaactctgatattggccttcacctgtgactggacactttactagaggcccattttcactaaacaataaaatctaaataaattggaaggaataacaaccacaaaggaaagaatagagttggtctggattgatgatcactgaggatctgtatgtgaggcacccataacagtagttttgcctgtgagtcgtcttcacacatgctgttttctctgcctggctctctcttcccctccttacctggccagtcctgtttatcatcaggccttgtcttggatatcacgtcctctgggaagtcttcttttcccctctaacctaggaccctcattaccggctctcatagcacagtctactgctttgtacgaattctaagtattcttgttgcacttaattagcctgtatatcctcagaactttgtgtaatgcctggagcatagtaggcagtcatatgttgtatcgtgaataaattgcacatagtagctacccagcaaaaaaaaannnnnnnnnnnnnnnnnnnnnnnnnnnnnnnnnnnnnnnnnnnnnnnnnnnnnnnnnnnntcgctttggagacatcccctttggccagttgcgtatatcggcccgaccaacgcctttccgtgggcgctggg

SEQ ID NO: 437531 - DNA, 942 bp, Homo Sapiens
gcttgttggaaataatcgtagtattcagtaacactgattaccaggcctacattgtgcctggcaatgatcagcaggagctgggcagaaggcattccactcaccacaagggacaggctctccagctcacccgagcctgtttcacgctggccaagcacccatcactgcatctccagtattgtttttcttagatgggacccttttgggtattcaaacacttacctagcctctgtagcatctgagtttaacagaaaaggaatctggcaacaggaaaagagctttgccttatccttgaagttctctttattatgtcttctctcttgtttcatcctaagctgaaggaacaacttcctcctgatatgacccagtctccgtccattccagaaagagaccacggagagagattttagcaaggccatcttacctctgggaagctggccatattcaccaaaatcagctgtggcgacttcatggagatctggctaatctggtttaaagcaagcttcccgtcagcagttaccacagcaatcttgtcaagggatcctggtgaggtccttatattgagagtcttattgaaattatccttgagagcttctatcacagacttcatttcttcattcacctcttccaagttgattatatcctcaaccaaggcagcattaatattcactctggtttgggactgtcctttccctttggctttggctttcttggtagcaaaatggcggactggtacagctgaataggccatgtattgcctatggccatgttgtctttcatgcactgtcttcagtgtaacttctgaaacgggtctgatagaggctgcaagataattgcgaaaggtagggtggaccatgcggaagcactttaatcccaggccatgactgaagacaatccttggaaacatccacagctatcgcccaggttactaaggaaagactcgtg

SEQ ID NO: 437532 - DNA, 991 bp, Homo Sapiens
  misc_feature (56)..(56): n is a, c, g, or t
  misc_feature (136)..(136): n is a, c, g, or t
tttactttggggaaatgggggtaccccgaaattagcccggtccccttcccactttntggggtttcagatttcattcccactttcttttaattagccttgatagctgccagctgtacactctgggaagcctggccantattcaccaaaatcaagctgtggcgacttcatggagatctggctaatctggttaaagcaagcttcccgtcagcagttaccacagcaatcttgtcaagggatcctggtgaggtccttatattgagagtctttttgaaattatcccttgagagcttctatcacagacttcatttcttcattcacttctttccaagttgattatatcctcacccaaggcagcattaatattcactctggtttgggactgtcctttccctttggctttggctttcttggtagcaaaatggcggactggtacagctgaataggccatgtattgcctatggccatgttgtctttcatgcactgtcttcagtgtaacttctgaaacgggtctgatagaggctgcaagataattgcgaaaggtagggtggaccatgcggaagcactttaatcccaaggccatgactgaagacaatccttggaaacatccacttatcactccctgccatctgccatttagattcataatcacacgtattcaaaaagcatttgcggcagctctaccactgacttgtgacttgtaccaagtgatttctcctacgtagattttgtttcaaccataaaatgaaggggtcagatcaggttttcattctttccaactataaagctttccaaaatggggggaaatgcaacagtgtggtttaaaacaaaataaaggcactaaacttagagaaaactccgagtcttggttccagcacttcctaggcacgtgaccttaaatcggtcaaactctcaggacttccgtctcatcagctatcgcccaggttactaaggaaagactcgtgcgacggcggcgaccgcaatcccgagaatt

SEQ ID NO: 437533 - DNA, 434 bp, Homo Sapiens
acattccgtacatagtaatattttattttcttcccaatgtggtaactaaaatacatttaaacgaaggctagaatttaaaacaaaattcttttactgataagcacacttgcaaagtaatgaaaatgttacatgcattgctttgcatataaacgtccaagaagtatttgttgaccaaatgtctgaaaatgaagtatttttatctgttccgaaacgccataatattgcaaagaagcatttcaaattattgttgtgtgaaatgttcaaatttagcattcaaatttagcgttttcccacattttacccttcaatttacacaatttggaagaagagtagatgagttggtcattgttacttaaaacaatgcgtcaccttgttagggaaagaaattaacataatggtcaaggagtgataattaaacagaacatgacatttgc

SEQ ID NO: 437534 - DNA, 472 bp, Homo Sapiens
  misc_feature (442)..(442): n is a, c, g, or t
tttttttaagggagaaaagccttttactctcaaccgaggatgcagggcttaaagtgccacttgcgtgggagccaggctcactgttcaccaggctctgtcacagggaggctggcaacgccatggcctggggctgccagagccacagggccctgcggagaaggggcaggacggagggccccagccagaagacacgctgggcagcgttcagccatcacccgggttcaggcttcctgtcctcaccaggggccagcgagagagcagcagtgttcgctcctatggctgccgaggcgagcagcttcccgggctccatgaggtgaagtcaccgctttctgtgggagaggagcctggatcccactcctagtgaaggcttcttggcccagcagtgacaaggtgcgggctgcagtggcatcgtcacaggagagcgcagtcaagggtgtcctgngaggaacgctggtggcgaccagggctgtgt

SEQ ID NO: 437535 - DNA, 1165 bp, Homo Sapiens
  misc_feature (98)..(160): n is a, c, g, or t
  misc_feature (613)..(635): n is a, c, g, or t
ctgtctgctgtgtcgcttgctccgcctctgtcacttctgctttgttctcttctcattcttctgtgtgctttccctgctgtcgttttcgttcggtgtcnnnnnnnnnnnnnnnnnnnnnnnnnnnnnnnnnnnnnnnnnnnnnnnnnnnnnnnnnnnnnnncttgtgtacttcgttgcccgctttttgtttggacgaagccggatcccccggcgggctaaaaagaagagttcgcccagcaaaatgcataactcgccgggttatcccaaagcttcttccaagccggccagtgcactaatcaccagccttaggggttgaacaccctctagtaccacccgtgaaagttgttatagtttatccctaggatctttaaaatcctcttagaggtaagtttggtccccaatatggtcaccccccacacgaagttagggttccctcacacaagagttccccagactagaccagtttttccccgtcacgacgcgttggttaaaacgcgcgcccggttcctagtcttatatatacgactccctatagggacccccttggaacaaaaaaaccgggtaacgcgtaaacttgggcccctcgagggaaaactttaagacggcccccccnnnnnnnnnnnnnnnnnnnnnnncgctgccggagtcagttttattagggaagaggggctccctgccccacccctccccacaccctccttccgggaggtctgtcagccccaactgtagaagtagattttctgccaggtgggcaagtaatccatgagcggccttgtgaccaggccaacgccagggacgtggtcggccagcaactggagcaggaagaggatcctggccctcggagaagcggtcgtagaaaggagagcgcagcaggtagtagagcagcaggatggtccggcgccgcagctcccgccgctccctccgggtcaggccctttctgtcactcaggaggctcaggctggtcacgtccacaacaccagccaagagccagtgtttccacgacctctgaccccacaggcccaggctgagcaagtgcagcagcggccgggcaatgtacaaaaactctgcgatggtctcctgcagccccaggggggtgggggtcgcactcagctcctcgtgatgctgctgctgccgtccctcccgctgctgggggcgtccgtagcgg

SEQ ID NO: 437536 - DNA, 888 bp, Homo Sapiens
aatgtggaagcgacttaggctaggtacgaggctgtgttgtcgaattcggcacgaggcggtccttctgtgggtctgtcggtgccgagggcaggatggagaagctgcggctcctgggcctccgctaccaggagtacgtgactcgtcacccggccgccacggcccagctggagacagcagtgcggggcttcagttacctgctggcaggtcgattcgccgattcgcacgagctgtcagagctggtgtactctgcctctaacctgcttgtgctgctcaatgacgggatcctacggaaggagcttcggaaaaagttgcctgtgtcgctgtcccagcagaagctgctgacatggctgagcgtgctggagtgcgtggaggtgttcatggagatgggagctgccaaggtgtggggtgaagtgggccgctggcttgtcatcgccctcatccagctggccaaggctgtactgcggatgctcctgctgctctggttcaaggctggcctccagacttcaccccctatcgttccactggacagagagacccaggcacagcccccggatggtgaccacagccctggcaaccatgagcagtcctacgtggggaagcggtcaaaccgggtggtgcgaaccctccagaacacgccgtccctgcactccaggcactggggagctccccagcagcgggagggacggcagcagcagcatcacgaggagctgagtgcgaccccaaccccctggggctgcaggagaccatcgcagagtttttgtacattgcccggccgctgctgcacttgctcagcctgggcctgtggggtcagaggtcgtggaaaccctggctctgggctggtgttgtgggacgtgaccaggctgagcctcctgaggtgacagaaggggc

SEQ ID NO: 437537 - DNA, 892 bp, Homo Sapiens
tccccagtgccttgagtgcagggacggcgtgttctggagggttcgcaccacccggtttgaccgcttccccacgtaggactgctcatggttgccaggcctgtggtcaccatcccgggcctgttgcctgggtctctctgtccagtggcacgataggggctgaagtctggagcacagcccttgaaccagagcagcaggagcatccgcagtacagccttggccagctggatgagggcgatgacaagccagcggcccacttcaccccacaccttggcagctcccatgcgtccatgaacaccgtccacgcactccagcacgctcagccatgtcagcagcttctgctgggacagcgacacaggcaactttttccgaagctccttccgtaggatcccgtcattgagcagcacaagcaggttagaggcagagtacaccagctctgacagctcgtgcgaatcggcgaatcgacctgccagcaggtaactgaagccccgcactgctgtctccagctgggccgtggcggccgggtgacgagtcacgtactcctggtagcggaggcccaggagccgcagcttctccatcctgccctcggcaccgacagacccacagaaggaccgtacgacaggctgcggcgccctgcttcctgcgccctccttcctgcttccggtcttaggcccgcctcttggttgcttaacttccgcgggccagaaggctgaggacttgaagaaccggtgaaccacccttcaccccatctcttgaaccgcttcccactcgggtagcccttagcaactgagggcccaaacccggccccctactccctcaagtcattggttagcacgctctccgcacctgacccgcccagcgccgtcagcacccagctcttccgtttaccgggttg

SEQ ID NO: 437538 - DNA, 550 bp, Homo Sapiens
aaagatttcataacaactgaagtatgtacaaagtcttacagcatttacaccataaaaagtttcctattagctcatgaagtctaaggtagtgctgctgagaacttcagatgtggcaaaggcaatgaggcaaaccacttgtaggtttccctctctgctgccacatcatggtgtcagctgagtgacagctaactgtaccacctggaagacaggttattgggaaaaaaggggacaagttgataggcagcactagagaccatggggtggaaaagctacatagcattgtatttctacagtttcctagagctgtaacaaagatccacagcctgagagaataacatatgcaagacaacagaatcacgctgctcagatatggttcagctaccaagtgtgttcacttttgaatggaaggctctactgatatggctggtatttgacttctgttcatgtcttcagatagctcaaatctgcacaagcctcactcccttcccccaaatcaaataacaacaaagggagagagaaagaaatagcatgaaattagtagttctcgacc

SEQ ID NO: 437539 - DNA, 1045 bp, Homo Sapiens
  misc_feature (279)..(287): n is a, c, g, or t
  misc_feature (1012)..(1012): n is a, c, g, or t
  misc_feature (1020)..(1020): n is a, c, g, or t
  misc_feature (1022)..(1022): n is a, c, g, or t
aacatcagtcaacactcctattttaaaataataacaatgaatggcggtaccttagaacaaaggaattatagatctttctcttgtcttagtgcagacattttgtctataaaatgttattcacagatgaactcatgagaacattactgtgaattttaaatccatatacaagtgtatgctcattcatgaatatttcaataaaataaaactaatagcaaaaaagaattccagagttgaagcagtttcaggaaaaaggagttggcagtatgaagtaaaatagcnnnnnnnnnttttttttaaaatgggtatatttgtgtctacaacttttttttaattatagcattagacaatgtgtatatagatacgtatataaagcaatggaagtggcattgttttcatactagtctagaatattaaaatatatgtaatatgtgatcagcacaaataatggccccccccaaagatgtccacagattcctagaaccttacatgaaaatggtacatcatgcatgtgattcaggtaaagaccttgacatgaggagactaccctggtgctatggaatgaacgttgtgttccgtcaatgttcatgtgttaaaatcctaaccctcaaggtgatgtattaggaggttaagccttacatgagactctgccctcatgactgggattagcaccttattaaaggcacaagggagcttgtttgttcctctccccatgtgaagacacagcaagaaggaagcctctatgagaaagcaggccttcaccagacacccaagactgccggcaccttggatcttgcacttctcagcctccaggactgtgagaaacaaagttctgttgtttataagctacctggtctaatgcatttccttgtagcagcctgtatggattaggacagtgggctcatgtggatgatgacggtgtctccattcaggactaagtaagcacatgagtccttaacagtggaagagaagggggaaggaaagagccacagagacatgtggccatagaagaaanacccatcncntgcaaggttgctaatggtgagag

SEQ ID NO: 437540 - DNA, 1532 bp, Homo Sapiens
  misc_feature (47)..(47): n is a, c, g, or t
  misc_feature (523)..(523): n is a, c, g, or t
  misc_feature (1081)..(1116): n is a, c, g, or t
  misc_feature (1123)..(1123): n is a, c, g, or t
agaaaacaactgaaaaaccacatttttctacatacagctggggaggnagctgagaacttggcactgcgcacacatactaggttgaaagagagttgaggaaaccagaaggccaagtggatctgctggcaaaccctgaacctgtctcctgcgcttgctctacagttctgaagttgaaaatccttttcatgcctagcatctgcttgagttataaaccccaaggcagccatgtcatagactagtgtttactcttgttttgactttgttttaatgcttcctaagacccaagtgcctcctgctgtttcctcctttgtggtagcctctggccatctggacctcaatccccagctttcccactttcagcagtcctttgctctctttgcttctacctcaaatagccccaggagtgggctttagtctccaatatggagcatctcaagcttctcctgggggatggggattgggatgggcagaatctgttttggatctccgggttatttccagtgggtgtaaaagcagagctggngcctttccctctcttatccctgagggtgggtaagaaggactgtatctacacctgttcttccctaccttctcttttgttagggaggcctcattctaagttcctcaagagagtccttggcttaaagctgtagcaagggtgtgctaggtgggggatttggagcaaaaccgtcgagtaggcatgatactggtatggagtgggcctgcaaaatcagacagaaatggcttgagaagccgcagggggagcatgcctgtctctcagtgatagagtatgggagggacctccctagcttggaaaatgagaattgaaggggttatgaacaaataggatgcctagttgaggatgttcccaaagttttgtccaatcttatcattagtagattttataagccacagagacaaaccagaaacggaataatgttactttggatgctttatttttttgttctaggtgtggctttgtacatgcagaagaatgctatatgctgcacattttgcctttaaagtcttacgactttccccattttagtctaatgggaagatacagatgtgcaagtctgcnnnnnnnnnnnnnnnnnnnnnnnnnnnnnnnnnnnngctctgngttatggacattttcagacatgcacagaagtggagaggatggtccttggaccccatgtgtccatcacctagctgcatcacttatcagctatggtcaacctggtttcatctgtatctctctcttttcacctgtattgtttattgaaaatccaagacactatgccaatgcaaccgtgactactttgggagattggtagtctcttttgatggtgatagtgatggggtgcactatcataatcacatcagggctgctttttgctcttaatgttaactaacgatgtcccattgatgggccttacatttgtgttcttagatttgacagggtgctttacccagaatcgtcgaggctgcttccttttgcttttcctctccaggcatgttttagctttttgtgtttttatacattcttt

SEQ ID NO: 437541 - DNA, 1156 bp, Homo Sapiens
  misc_feature (385)..(386): n is a, c, g, or t
  misc_feature (395)..(408): n is a, c, g, or t
  misc_feature (410)..(435): n is a, c, g, or t
gttgggagcccccggcgcgggtggtaaacaattgtagaaaaaacgaccccagaaagagaaaaatctttttagggagcgagagttattcgcggttgttttacccccgtttatcccgtaaaaaattttatattcgccgttggggctgttaaaaatttcggagggggggtgtgcccgaattttggccccccccacaagagggaaggttcctttccaaaaggttccccagagttagcagttttcccaggcccgggagttgtaaaaaagggggggccaaggcctaagttaaaaaagggcctccctttatggggcccctttgttcacaaaaaactggggttccgtaaagtcttggccccctcgagggggatattaaagcggcccccttttnngtttttttnnnnnnnnnnnnnngnnnnnnnnnnnnnnnnnnnnnnnnnnaaacagagatacaggtttttatttttccatcatgcatgcaaacttacaactatttatactgtttaagaacacagaaataattgcgttattaacagggtgtcaaattaccaagtagaacaaccagttactaattattttggggaggttattttcacagaacacagcaacaatttccaaattattcttccaaaaccagagttatgagaccagtacaagctgataacaatgctaatggtcacacaagtttccatgttacacagaaaaaaagattgacattctggtgaagggtctcaagtaccttaccatatcagaatttttgaaagagttttacaacagaacagtctctctcttgttttgtagatgcaagggaaaggaagcatccctctcatttctttttgagactccttgttaattcttaaaacacatttctaaggcccatctctggaacttcattagtttacattaaaagcaaaaagcagacctgatgtgattatgatagtgcaccccatcactatcaccatcaaaagagactaccaatctcccaaagtagtcacggttgcattggcatagtgtcttggattttcaataaacaatacaggtgaaaagagagagatacagatgaaaccaggttgaccatagctgataagtgatgcagctaggtgatggacacatggggtccaaggaccatcctctccacttctgatcccgagaattccggacc

SEQ ID NO: 437542 - DNA, 250 bp, Homo Sapiens
  misc_feature (189)..(189): n is a, c, g, or t
  misc_feature (194)..(194): n is a, c, g, or t
atttaatacaggaaacttggtgctgctgaaatcatggggcgtgtgggtggtaggagtggcggtctgggtttgagactcttgagttcgagtttgcagcccccgaatgagctcctagctagagttcagcgggatgccactctggcttccggcagtgcctggactcatttggtcactcctgggaagctactnacttnatgctggtatgaggggtgtggccgcctcacacacaggtgatctactttcctggcca

SEQ ID NO: 437543 - DNA, 1630 bp, Homo Sapiens
  misc_feature (1046)..(1340): n is a, c, g, or t
ggagtccaggttgctctcccctctcccacaatatttcaaacatcctcaagtgtcattctcaaacaccttgcgatgtcaccctgcaaatccaccacgtcccgaacgacccccgaaacaagtggctcctccgggcccggtgtgggaaaaaggcagaacgcgggcagaataacacctttcgcatgctgcgcgggagcgaccagaggaaggggcactgcggagccggcgctggccaggtggatgcccacacggtgaggagagcatggcgggaacgtggagtgctggcagctgcctcgtgctcacaaggtcctgatgctttccaaggcacctgtcctcatcacaccactccacagctgttttccagaggacgcaggcccgaggtcacacaaggtcccgtggtgtggcactggtcaaatcgtggggtgaggagctagacaggccccggcatgaacaccacagtgagctccattctcaagtctgcacaggtggcacaaggggacagggacagtgcggacaaagggaggcaaggcagcctcaataccggaggcacccctgggacctgtggtatgtggccgtgggagggaggtggggcgaggccgcccctttcctgggatgctgagtgtgctgagggcacctgcaccctgacctgagagctggctgcagggttcacagccaagtctcacacacttgctgccaatcaccgccacgctcagagctgcccacggcgccgcagcgttactggacagtgcgttcctcttttgtacaaccccttccctgaatggggaaacatggggggaaagcctgaacaccccctcagtgcctcctgctccaaaaagccggctccactgctgggatcccaggcagcagggccccgcgcttccttctccgaagtctgcctggttaccatcaggagctctcaggtgcctaccactccccggctgcctgctgagtacccgctaaggtagcagctctctctccctaagtcttcacagttgggttttcacagttggattattactgaaaacactgcacaaagcagactgctttgnnnnnnnnnnnnnnnnnnnnnnnnnnnnnnnnnnnnnnnnnnnnnnnnnnnnnnnnnnnnnnnnnnnnnnnnnnnnnnnnnnnnnnnnnnnnnnnnnnnnnnnnnnnnnnnnnnnnnnnnnnnnnnnnnnnnnnnnnnnnnnnnnnnnnnnnnnnnnnnnnnnnnnnnnnnnnnnnnnnnnnnnnnnnnnnnnnnnnnnnnnnnnnnnnnnnnnnnnnnnnnnnnnnnnnnnnnnnnnnnnnnnnnnnnnnnnnnnnnnnnnnnnnnnnnnnnnnnnnnnnnnnnnnnnnnnnnngaagtagactgttttccatacttttcattaacttacagcatggttttctatacttctcataacttacagcagggtttttctatacttttcattaacttacagcagggttctgtttgcttggggatgaggaaaacaggtggatttcacgtcaccgttctccagggtttccggcaaaggcaagggttggccccttggtgcccacattgcagagccgtgagtagtggggaagcagaccacgctccatgctgcctcttgagtttggactaacggggatggggcaagataagcag

SEQ ID NO: 437544 - DNA, 902 bp, Homo Sapiens
  misc_feature (138)..(138): n is a, c, g, or t
  misc_feature (218)..(230): n is a, c, g, or t
gaaaaaattttgggggatagggcatattctgtgttggaaggattaaaaacccaaaaatttcccaacccctccccataccaaaaaatttgggggagagaaatttggcataccggactttttggaaaaacccattttaangggggattaaaattggaaaaattggaaattccccacttttttgttaggaatgtaattgtttccctccaggtgggatcccnnnnnnnnnnnnntgccaatgtaggactcaaagctttaaatactattaacctttttataatttttacctaattgattaccatttttcttgagaattaaacattcaaaatagggaaaaagtatactcatgatggtacatatcttgctattatttgcaaggctctgtgatatgtgtcaaaatttgcaggaagattatcatcttcatcatcagaatctgaaacatctacatcgccttccttaatgatcactcggggaggcacaaaatgggaagcaatcatgctgagacacggtctgaggaaaacagtctatgctgatacaagattaccaagaaaagccaaatactcttccactactgtttgacttctattcaaccaaggcaatctcaatataatactgataagttgctcaaagtcttttgtcaagtacatgacagaagaacggaattctagcagccagttgatgatctggtcatcctttatgtctggatctaacagcctggttcttcaacaactcaaagtcatttgtttcaccctttttgtacttcagcaagacttctgtcacagttccaccaaaccgaacagtttttcttgggggagaattgaaaaaatcattctctaatgcacgcatatttgaaatctgttcactctattggaaatactcttttcccaaatctctacgtggctgga

SEQ ID NO: 437545 - DNA, 1889 bp, Homo Sapiens
  misc_feature (362)..(383): n is a, c, g, or t
  misc_feature (1681)..(1728): n is a, c, g, or t
  misc_feature (1806)..(1806): n is a, c, g, or t
tcagaggcaggacagcagccaagatggggagagaaacggggagagaaagaaacaattctaactgactcctatatgcagccagttggaatcatgcctaaagctttgggtctgaaggggcccccaacacaccacctgccttgggaaacagcgaggatggtgcagagctttattgagactccagtggcccatccagttcatctccaggcacccccaaaacagcaaattacacaagaccccccccaaaaaatgaacaccattttccacacatacacacacacataaagtttgtttcctgtggcatttaaattaatctggttggtccatagaaaataagtatgtatatttggtttttcctatgtacnnnnnnnnnnnnnnnnnnnnnnaaaagccgcgccccccacccccaaggtgggaagagctggggaaagtagaagaggtggaaaaaagggcccagaaaaagtggaaggagtggagaggcttggctggaagaagggagagggtccctggcctcaagttaaggggggcacgggagcgccgttgacagtcatcttgcgccccctgctggtggaggatggtgtctgcaggcagttcaagctacccccgttggcagctgtggtggccccactggctgtcgaagggggagtgggggaggtagggtgggtggctggaggcccatgggaactgggagagccatgggatggggtggctgggctgggcagggaggaggaggtggctggcagggtggcagggctgggagccttgtcgctgactgactcacactcggacgccccgctggtgttggtgccctcggagggggtgggcaccgtggctagggtgagccgcttgcaggctggctggacacggtacttgagggggagaggcccgttccgccgccaggggtagatgtaggcgatgtccatgagggtgtagtattccttcagtggctcgtcctcgtacagaacctccaccttgtacttgctgggcacatccatcttgttgcggagaaacttggcaagatgcatgacggtcatggctgctgggcatcgcaggaagcgcacccctgttttctctttgtccccatccccattctccagggggcccttcttctcgtcccggtccctggcaccttcgtagaattcgatggagaggctgacaatctcatcatcactcagagcccccttctcctgctccaagacctcgccgcggtcctcattggagccgttggggacctccgtcagggggtacgctgcatagaaatcccgccgccgtttcatctcatctttaaaaagcccagggaccaatttgtagacaatgtcttgaagtgttttgtcagacctgatgctcagcagcggccgggttttatggacctgcacgtcacacatggggcagtatttgttggtctccaggtagcgcacgatgcaggttttgcagaaggaatgcaggcactccacgatagtggtggcgtcgatgaagtaccccccgcagagggcacacatgaggtgggggttcagctctgtgattttgatccgtgtagtccgatgcatgattccggggtcgggggtggggggactggggagcgttgccctcggaacagggtctgcccgggggctgctgcacaaagaggtggtggtcgagggagacgccaaatcgttaagacggggagcccgtttcggccatcttnnnnnnnnnnnnnnnnnnnnnnnnnnnnnnnnnnnnnnnnnnnnnnnnggacggggcaagctgggctagggactgacggggcgcggggggtgcgaaggcaggatcggctcagagcctccccctccnatcggggcttgcgaagaacggccggcccccatcccaatccccagagggttacaggccaggagagggaaaggcagggggagtcc

SEQ ID NO: 437546 - DNA, 1571 bp, Homo Sapiens
  misc_feature (1035)..(1057): n is a, c, g, or t
ccccgctgcttggcgcgtctgggggcgtcccggccccgcacacagtgacgctcagtcctactctcgccgcaaccataagacgctatcccgccacgagcgcgcttgtgaaaggaatacgggcggccgggccgcgcgctcatgtgggcgcctcatccaggccccgtccccggcgccggggccccagcaaaatatcggtagggcttctagcagcaactcgtccagttcggtgcgctggccccacacacccccggaggctactccaccgcgtctccacgaagtgggcgggcgccagacaccccctaattttatttctgtgcgccggcacgcgccgggggcgatcgactccacaggcgcggctcgggtcgcggggtgacaccctacagccggccgcggggggtgggcaaataaagttacgtcgacgcgcgtcgggcccccacacccccattagtgcggggcgggggtgttctctcgcgcgggccggacgcgcccctctagacctcgccacagcctccccccctgtcgccccagagggagataaggggggcgcgcgcgcccaccacaagggcccggtcttcccacctcccgccgaaagcgcatcgcctcccccacccaggcgggcttccgcccccgtcggtcgcgcggccagccccgctttacattcgcggcacctactgcgggcggcggccgctggtggtggggataccccggcgggggggtgacagctgctccggtggcgcatttcgcgtctgagagggcctccccctttgaggaggtcctccgatgcggcacccgcccctggggttcggtcccggggaccactctccatgttcgccgtcccagcgcccacccttatgcgcccgaacccccgggcgcgctgggggaaaagccgacccccccctggcaggcggcccacgggggggtcccaggccgcccggcggccccggaccccctctgagggggggagaagcctgccacaggccggtcgccggccgcccacgttttttcccctgtctccccccccgcctcctttcgtcnnnnnnnnnnnnnnnnnnnnnnncggcggcgaaagtatgcagcatttattacaaagccaagagatacagatgtcccagggcaaaggagggtacagtcacaggacctcagacacaggacaaggtgcaaacacagacaagcccatcagggggctcccaaccccacacacctacgctatgatggaatctcgagtctcgactcccgactcctctcagatctatgcacacttgaggaaatctcggtgggcagcgacctgccagggtctgtccctaaggaggtggtccgctgacctctcaaggggtgggggtggggtcagagcttacaggtttctgtcttcttgtgcttttagatgcagttgctctgtcctgaccaggtgaccgggcctcagactgggacgccccgctggtgttggtgccatcggaggaggtgggcgcacggactacgtgaagccgatcgcatgctcactggacaaggaactagaggaggagagactccgtacgtacccaaggatataatgaggcaatgtgcatgaaggaata

SEQ ID NO: 437547 - DNA, 1388 bp, Homo Sapiens
  misc_feature (619)..(619): n is a, c, g, or t
  misc_feature (645)..(645): n is a, c, g, or t
  misc_feature (647)..(649): n is a, c, g, or t
  misc_feature (652)..(654): n is a, c, g, or t
  misc_feature (656)..(663): n is a, c, g, or t
  misc_feature (665)..(665): n is a, c, g, or t
  misc_feature (668)..(669): n is a, c, g, or t
  misc_feature (679)..(679): n is a, c, g, or t
  misc_feature (682)..(682): n is a, c, g, or t
  misc_feature (687)..(689): n is a, c, g, or t
  misc_feature (1173)..(1223): n is a, c, g, or t
caaaaaaggccccaagggggggattcccggatttgttcccccaggggccaaaaggggagggggttccagttccccaaggaccctccaggacccaggggccaaggttgcaaaccccagaccaagccccctccaggggggcttcccaaaccccacacacttagggtatgatggaatctcgagtctcgactccccgactcctctcagatctatgcacacttgaggaaatctcggtgggcagcgacctgccagggtctgttcctaaggaggtggtcggctgacctctcaaggggtgggggtggggtcagagcttacaggtttctgtcttcttgtgcttttagatgcagttgctctgtcctgaccaggtgatcgggcctcatctgggggtggaggggcaattggaaggctgttttcctctggcaaagtctgggatctgtgcttgtgtgaggttaacccacccccacttccactctaggccccaggtgagactccaccaccagtcctggtagtgagggttccccggtgagggtaaggtttgtgggggttcagcgctttacaatgctaaagccttagccctcctccaagagctgagacctctcagggcctgaatcttcttttccanaagataaatgatgcaaaggccacacncnnnggnnntnnnnnnnngnggnngttttttttnttntttgnnnaaagtttccactgcaagaggaggaggtgatgcaggtgccacttccaccttgcacttgctcctcagaaccagggataaactgcatttgtaaaaggcactgttcttagcaatttctggacattcaacaacgtggggggcggccactggtcagaggcaggacagcagccaagatggggagagaaacggggagagaaagaaacaattctaactgactcctatatgcagccagttggaatcatgcctaaagctttgggtctgaaggggcccccaacacaccacctgccttgggaaacagcgaggatggtgcagagctttattgagactccagtggcccatccagttcatctccaggcacccccaaaaacagcaaattacacaagaccccccccaaaaaaaatgaacaccattttccacacatacacacacacataaagtttgtttcctgtggcatttaaattaatctggttggtccatagaaaataagnnnnnnnnnnnnnnnnnnnnnnnnnnnnnnnnnnnnnnnnnnnnnnnnnnnaacccgccccccacccccaaggtgggaagagctggggaaagtagaagaggtggaaaaaagggcccagaaaaagtggaaggagtggagaggcttggctggaagaagggagagggtacctggcctcaagttaaggggggcacgggagcgccgttgacagtcatcttg

SEQ ID NO: 437548 - DNA, 431 bp, Homo Sapiens
  misc_feature (143)..(143): n is a, c, g, or t
ttattcctctgctgtgagtgtgtgcattaactcctagtttccttgaggtagagattattacaaaagtgttttctcctaatattttcttccctgccccccagagctagctatttttagagtgggaaattaggtaattatctggnaccaggtcccctgtaattctcataaaaaggcaagcaaataaaatgagtttcgagggccttggcttggcttcaggcaggatattggcagtggagacaccatgtcctgagatacacaaggagtgagtctctaagaatacagtgtgaatcaaaggcctttatatttatgaatcatgatttttatttgagcctcaagaatcttggtacctaagaatccatagggagaagagccaggcaactgtcatagtctcagaatcttctgacagggttatgcccttgaactatgggcta

SEQ ID NO: 437549 - DNA, 827 bp, Homo Sapiens
  misc_feature (162)..(308): n is a, c, g, or t
  misc_feature (655)..(655): n is a, c, g, or t
  misc_feature (661)..(747): n is a, c, g, or t
ttttctcatagtccctattccagtcaatttctggcacagcccagcttgaaactgctcttgagcctccgattttgagcttactcctggtttgcccgactattttctcataatccctgttccggtcagtttccggcacagcccagctgggattacaggcacatnnnnnnnnnnnnnnnnnnnnnnnnnnnnnnnnnnnnnnnnnnnnnnnnnnnnnnnnnnnnnnnnnnnnnnnnnnnnnnnnnnnnnnnnnnnnnnnnnnnnnnnnnnnnnnnnnnnnnnnnnnnnnnnnnnnnnnnnnnnnnnnnnnnctgcctataaccattctttttttagggaggtgtggtatatggtgctaccctggatctgtagtcaggatttgaagaagggagaaggtatttgcttgtgaagaaggcaccatgcattgtgctctgtagtggtgactggagagagagctgggaggggcacaggcagcaaggtccctgcttaaagacagttatctagtttggagaaacttagctggatagtcagttcttacatgcatttggcaagcacttatcatacactgtaaagaggcaatatgtctagcttgttagagggtgggctctggagtcagacttctggctttgaaccccaacttccctgccattttcaaatngtcacnnnnnnnnnnnnnnnnnnnnnnnnnnnnnnnnnnnnnnnnnnnnnnnnnnnnnnnnnnnnnnnnnnnnnnnnnnnnnnnnnnnnnnnaaattcaatgtgttgatatatgcagaacatcttagaacagcaactagcttagagtaaatcttcagtaattgtaaacttgt

SEQ ID NO: 437550 - DNA, 328 bp, Homo Sapiens
tcttttgtacatgccattgctgtttaacagtgttgggttcataacaggtgattagacagtcttgttgatagtttggagaaccatcttaatcatgacctagaatcattcttatttcacagcaacctgtgtcttgactaatgttaaactgactaatttgttttgaagctgagaatgagaaattggaggtccttctcatagatctgagattcctttttattcctgagttggataaattagggtaaacaaaatcaaatacttgtaaaaatactgtacaaaggaatgacatatgtatgctggttccctagcagggtaattccatcagcgcttt

SEQ ID NO: 437551 - DNA, 809 bp, Homo Sapiens
gggcgggcctccaatctcggcggcggcggcggcaacaggggagcctgggtctcgcggcctgcgagtccgtcgcgtgctgagggagacgcaggaggtggagccggccgggtgctcgagggaaggagactggaagctggttccgagtctgaaaaaggggagcgcggagaggaggctggaagaggaagatgcctagcacagaccttctgatgttgaaggcctttgagccctacttagagattttggaagtatactccacaaaagccaagaattatgtaaatggacattgcaccaagtatgagccctggcagctaattgcatggagtgtcgtgtggaccctgctgatagtctggggatatgagtttgtcttccagccagagagtttatggtcaaggtttaaaaagaaatgttttaagctcaccaggaagatgcccattattggtcgtaagattcaagacaagttgaacaagaccaaggatgatattagcaagaacatgtcattcctgaaagtggacaaagagtatgtgaaagctttaccctcccagggtctgagctcatctgctgttttggagaaacttaaggagtacagctctatggacgccttctggcaagaagggagagcctctggaacagtgtacagtggggaggagaagctcactgagctccttgtgaaagcttatggagattttgcatggagtaaccccctgcatccagatatcttccccagactacgcaagatagaggcagaaattgtgaggatagcttggtcccctgttcaaggggggaccaaattcgggtggatggggggcctt

SEQ ID NO: 437552 - DNA, 1690 bp, Homo Sapiens
  misc_feature (482)..(511): n is a, c, g, or t
ttttttttaagtttaacatgtacttttattaacaacttaatacaagactgtacactgtaggtgctgaaatcaacccactcctgaaaactgaaaaaccagcatttctataccactttgggctttggttataagtgccatcttctacagcaaaatcacgtcttaagaacaggaaaaacgttccacgggaatggagagattatctatgcataaacagctggggatcatttctagctttacgtgattcactacacgctctggaatgttcagttcccttttctacagtcctaccacgagacatacagcaactaagaacttggccacaggtcctgcctagacacacatcaatatgaaacaaaaaaaatttatataaataagtcaattaaacttcacaaaaactaaagaaacacaagacaaaaatccaacaagcaataaaaactgtacaatattggtcagtcttttatatctgaaaaatgtgtaacttnnnnnnnnnnnnnnnnnnnnnnnnnnnnnngtcttttacatctgtgttagctggagtgaaaacttgaagactcagactcagtggaaacagatgaatgtccacctcgctttcctttggagaggatcttgaggctggaccctctgctcacagaggtgagtgcgtgctgggcagaggttttaaatttggctccaaggaaagcatagaggatggggttcagacaacagtggaagaaagctagggcctcggtgatggaaatccacttgtgcacagtgttctcaaactcacacccttgcttgatgatttccaggaggatgaaggagtcgatgctgatcccaatgtagtaaggcagccaacaggcgaagaaagccaggatgaggatgactgtggtcttgagggccttgcgcttctggtggcccttggagtgtgacagcttggagatgataatgcaatagcaggacaggatgacaataccaggcaggataaggccaaccatgatgtgctgaaactggaacacaaccacccacaagtcattggggtagaagcggtcacagatatatctgtcatctgcctcactgacgttggcaaagatgaagtcgggaatagtcagcaggagggcagggatccagacgccaacatagaccaccttttcagccaacagcttccttggcctctgactgttggtggcgtggacgatggccaggtagcggtccagactgatgaaggccaggatgaggacactgctgtagaggttgactgtgtagatgacatggactgccttgcataggaagttcccaaagtaccagtttgccacggcatcaactgcccagaagggaagcgtgatgacaaagaggaggtcggccactgacaggtgcagcctgtacttgtccgtcatgcttctcagtttcttctggtaacccatgaccaggatgaccaatccattgcccacaatgccagttaagaagatgatggagtagatggtgggcaggaagattttattgaaattagcattttcttcacggaaacagggttccttcatggagtcatagtcccctgagcccatttcctcggtgtagttatctgaagtgtatatactgatcccctccatggtaaccgctggttctccagatgcggtggctactggagcactcaggccctcggcgtcactttgctacctgctgccgcagccaacaaactgaagttcctccgctt

SEQ ID NO: 437553 - DNA, 797 bp, Homo Sapiens
  misc_feature (52)..(52): n is a, c, g, or t
ggaaatgcaaattaaccctctgtaattaagaagacaaaagaccctatcaacnagcttgaaccttaaaatggtccccatttagagaataagcccttttcagcccaggttcccaggacgttttcatagtttagcgctccacggagggggtccttaatctccaacggccccaacgtctgagtcctggtcattgagcctgtgcctgctttcagttcagcatagctcgtgttgaggctaaaacagctcaaggcagacagtagcaggtttcagcttagagtcagggccaggcaattaggatctgagaatttgagattctcaacaagcagctgcttttcttcagcagcagtgaaggcatgctgcatggccagacagctgtggtccaagtgacatgcaaggctgcctttttatcttgttggtcttagagtccaattgacccactcaaaaaaaattgcatattagactagacaatcatcagcctctaaggggagacatttgattttgacaagggttcattagcaatttaactgtattttcattttccaaacagattgcttctctttacatgttgtctccctctttcccgaggctccagtaagcacgaatcacagcaaaaataatcagttacagcctgttctggttccaatatccgaagaatttaaattccaacctatccactagtggcaaaaaactagaaagctgtatcccactaacacctttcatattttatttttgagtagctttatttgattagggtgatccctctagcatttatgaaattaacaagcataaaactttttttt

SEQ ID NO: 437554 - DNA, 813 bp, Homo Sapiens
ctgaattaagaatacatttattgggaaattattagtatagttagacagtatccagcaaaaaaggttattttatacctctacttttccaaaacgaaaaaacccttccccccaatcccatcaacacacagtcatgctggaaggcattctgtcttactctgttggtttcatgtaaatgtttggggtgactcattccgcctcttcttttctcaagttccaggcttcttgggtagaccaaaactaatacacaatgttagagcacacaagagacccattctaacaggcttttattaccttttcttcggagtcccctggttgacaggtaattactccatctcttgatccccctgcaaatgttgccttacaatttgcaagccaagagagtgtggcctctttcctgttgttgtaggtatccaaatattcttgcagttctaacacactgaacttgagcttgtccagaagtccacatgaaaggagagtctcggcatccacaaaaagtgtaggacattcagagcaggaggtgagcatctgggaagagctgacaaatttggatccgattccccggaggttatctccaaggtaactggctgcatcacaggttaggaagcagaaccttttctgaatattcttaaacaaggaggagaacacatgaaatgtataccacagcacaggagccatctgagtcacacataagctggttgatgtggctgcgccaggcctcctcggcatcgtcacagactgcgggctgaaagccggtaaggatggctgaatagaagggcgagggagtggttagagacttccctgacaccttctcca

SEQ ID NO: 437555 - DNA, 462 bp, Homo Sapiens
  misc_feature (109)..(146): n is a, c, g, or t
gtaccttcctttctagaaacaattttagattggcaaaagtgcaatgttttcttcactcaaaaaattttatattctcaaacatgtatattctttccctgtcttgttccannnnnnnnnnnnnnnnnnnnnnnnnnnnnnnnnnnnnncgtgggctgagaaaggggcaggcaaaatgaagctggccactgaaaactgtaagatggtcaaaagctgacagcctgtgtatgtgaaaagggaattgtaaatggactgcaatgtaatgtacactgtaatttgaatacaattactgtatctaaaaggagctgctatgaagtacctttcttatgttgctaggctactgtttctgcaagtcctgcatctctttgccaccataactgatccagatagcactctctttaaggatcacgtctgctcttactatgaagctgcttttgatgcatatttatacactggcatggaaat

SEQ ID NO: 437556 - DNA, 1691 bp, Homo Sapiens
aatctgaattaagaataaatttattaggaaattattagtatagttagacagtatccagcaaaaaaggttattttatacctctacttttccaaaacgaagaaacctccccacaaatcccatcaacacacagtcatgctggaaggcattctgtcttactctgttggtttcatgtaaatgtttggggtgactcattccgcctcttcttttctcaagttccaggcttcttgggtagaccaaaactaatacacaatgttagagcacacaagagacccattctaacaggcttttattaccttttcttcggagtcccctggttgacaggtaattactccatctcttgatccccctgcaaatgttgccttacaatttgcaagccaagagagtgtggcctctttcctgttgttgtaggtatccaaatattcttgcagttctaacacactgaacttgagcttgtccagcagagcaggaggtgagcatctgggaagagctgacaaatttggatccgattccccggaggttatctccaaggtaactggctgcatcacaggttaggaagcagaaccttttctgaatattcttaaacaaggaggagaacacatgaaatgtatacacagcacaggagccatctgagtcacacataagctggttgaatgtgctgcgccaggcctcctcggcatcgtcacaggctgcgggctgaaaggcggcaaggatggctgagaagaagggcgagggagggggagagactcccctgtcaccttctccaaagctcgccagggtaaactggtccagtgcccgattgcctttttcttccccctcagtcatgtccaggctaaagctgtcgctgcattcaaaagctgctgggagttcattgatggaactagaaagatcatcctcatgcacggtggtgtcctcctcctcacgaacagcttcagcctttgaaccctcagaaatctgcagattattcatatcaggcaaggaagcatcaaagctggacattctggtgttaaaggaatgaggttctgcaggggtcgagtcacaggctgtggtgagcagctccatgggattcgtctcttcagagggggagagagtcatgattaggtctgagtgctccaggatctggctggctgtgaggtcctcctcctcggatgattcatcggagtcctcatggtgcattttattcaggctaggagtgcttcctgacagttggcgctcctccagaatctgcatatcacacttatccaggctgtccagagaacgtctgcgcactccccagttgaaattgtccatactctcaccctctccatcctccagctccacatctaggaagtcgaagtctctgaagactctaaactgctgctcgctgtttgtgtcatccatgttctcctgctctcgggcaccgtcctcagaagataccaagcttgtctggtgctcaagcagatccagatccccacacgatgaaaaaatcactgatggatttttgctcaatcctacttcttggccacacagagaaaggacatgtaccaacttctcttttgttctcttctgagaatactggggccttttccagctcactggaacaaggacgttggagttggagcctgaggaagtggaagatgtgctccgggtgacggccatggccctgggcttcccatcacgcccagaagaattctgcagctcatcataccgcctcc

SEQ ID NO: 437557 - DNA, 1848 bp, Homo Sapiens
  misc_feature (14)..(14): n is a, c, g, or t
  misc_feature (1113)..(1151): n is a, c, g, or t
  misc_feature (1374)..(1374): n is a, c, g, or t
gccacactctcttngcttgcaaattgtaaggcaacatttgcagggggatcaagagatggagtaattacctgtcaaccaggggactccgaagaaaagcaaatggaatctcttgcacaattggaactgtgtcagagattatataagctacacttccagctgctattgctttttcagtcctactgtaagctcatcggccaggtgcacgaagttagctccatgccagagctgctgaatatgtccagggaactgagtgacctaaagaaacacctgaaggaagccagtgcagtcattgcagctgaccctctctattcagacggcgcgtggtccgagcccaccttcacgtccactgaagcagccatccagtccatgctggagtgcctgaagaacaacgaactcggcaaagctttgcggcagatcagggagtgcagaagtctgtggcccaatgacatctttggaagcagttctgatgatgaggtccagacactactgaatatttatttccgtcaccaaactctgggacagacgggtacttatgccctggtggggtctaaccagagcctgaccgagatctgcaccaagctgatggagctgaacatggagatccgggacatgatccgcagggcccagagttaccgagtcctcactacttttcttccagactccagtgtttctggcactagtctctgacaggagcctcctgtccccactgggttccaaactggcagtgctgccatgctggggcaacgtcattcagtgtcttctcggccttcaaaaggcttggacagactgttctccctcttgttacctgtagggctttttctaaagaggatggcagaacttccaacgtgtagcaatactataagaaccaaggtagcttagaacgtcctggacagactccactcatcatgctgtgtggcacaaatgtgttacatttgaccgagcatatgcaactcgctactgaagaagtgacttccgttgcataccaaagccgactacactgaacagtaccttcctttctagaaacaattttagattggcaaaagtgcaatgttttcttcactcaaaaaattttatattctcaaacatgtatattctttccctgtcttgttccannnnnnnnnnnnnnnnnnnnnnnnnnnnnnnnnnnnnnngtgggctgagaaaggggcaggcaaaatgaagctggccactgaaaactgtaagatggtcaaaagctgacagcctgtgtatgtgaaaagggaattgtaaatggcctgcaatgtaatgtacactgtaatttgaatacaattactgtatctaaaaggagctgctatgaagtacctttcttatgttgctaggctactgtttctgaaagccctggatctctttgcaccncaaatggtccagatagactctttttaaggatcttggctgctttttactagaaggttgcttttatgagcatatttatactgctgaaggatgagtgttaattttaattaactttgccgttttgtagagaaaactattcacaagataaattccaagtcttttcacctgtcaggcatgcatattttaatatctgtttggatagtcagaagtagaatcataaaggtaaaatatgagttgttactttgtttcttcgatgtcatattttatgtgtaatatatatgtaaagggccattcttaagttctctccttaaacttaatgctgtcaagtgttagatgtgtgcatgtgaacttgttgcactgcagaaacatattcagagtttatctatgtaacttattcactctgtaaatacatttaaagtttttgtgatgtaagcttaattgatattctgttcagaactttctttagactaaaaaaaa

SEQ ID NO: 437558 - DNA, 474 bp, Homo Sapiens
  misc_feature (19)..(19): n is a, c, g, or t
  misc_feature (29)..(29): n is a, c, g, or t
  misc_feature (68)..(68): n is a, c, g, or t
  misc_feature (140)..(140): n is a, c, g, or t
  misc_feature (278)..(278): n is a, c, g, or t
aaacatggaatctggaaanaaaaataatnaggaactcggtaatctggggcctgcggaaccatgtcccngggatctcccatgtttcagctcccatcaagccttggtgcaagatctcggtcaaggctctggttaagaccccnacccagggcaataaagtacccgtctgtccccagagtttggtgacggaaataaatattcaagtagtgtctggacctcatcatcagaactgcttcccaaagatgtcattgggccacagacttctgcactccctgatctgncgcaaagctttgccgagttcgttgttcttcaggcactccagcatggactggatggctgcttcagtggacgtgaaggtgggctcggaccacgcgccgtctgaatagagagggtcagctgcaatgactgcactggcttccttcaggtgtttctttagggtcactcagttccctggacatattcagcagctctggcatg

SEQ ID NO: 437559 - DNA, 1200 bp, Homo Sapiens
ggggcaggatgtggcaggagggaaagagtacattatagaaaaccagtggacctccggttctgagagcagggatacttggatgaccctaaaggcagagtctctcctggggaaggtttggagaagatggtcaggatcctaccagtgaggcctgctggggaaaggagctcctctgggtgcgagaggagctgcagagttgagggaggggctgccgaggaagagagcccagggctggcattagggtgtgtaagcagggggtggctggaactggttgatgacctcatattccgccgggtagggctcgttctcttccatctctgagagcagctccagcgcctgctcctcttcctctgtggggtagtggcgcaggaggttggctgccgtggccaggattgaggctccaccagctcctgccaccaggtagaagctaacggcgaaggtgacatagacctgggatccatggtacttcttatgctgctgctgctgggccaagatgagttcagaagcccaataagaaaagccaatgacggtggcacactgcagaaccgttaggatatgggcgaaggcatagcgacgagtgatcttcagagcaggatgcttcggcccaaagacatccagaaggaaagcggagagactacacaggatgcccaggaaacagaaggcggcgatgacccgcaggagcagcactgtctggggattcatgcagaaatctttcagcaggtccgggtgcacatagcccaacacgtcgtagacccccagctcctggcgcgtacaggtgcctccgtggatgtgcaaccaggcgggctcggcgagggcagtgcacagcgccgtgatagacagggcgccaggcagggccgaggccaggctacgctccggctgcttgggcagagcgctgcctcccggggtcctcccgcgggcgcccgcggggcaggcctgcgcctccgggggcgtacatgcccggggccgcccgccgtcgctccgcagtcgctgctggtcgccgccgacctccgcggggcgcgcagagcctgacagtccggtggaggatagcaacgctccgggttcgcagtcagcaggccccagggctgggatggtgctgctcagcccagtcacgggcttctcggctgccgggggccgagcgttcccaggccccaatcccgcaacgcccggacagacccggggccgatatcccgagaattccggacc

SEQ ID NO: 437560 - DNA, 414 bp, Homo Sapiens
  misc_feature (353)..(353): n is a, c, g, or t
atctacagaaagtcatcctagcccacggcacccgctgccagagcaccggttccgtcttcgcactggccccgtgtgccctgcatcccagtctagaggcctcagatttccagcttcccagcctccaccgtggcccctttaccacatctttgctcatccttgacgatgaagatcatgtcgaagcgcgacaagatggtgggcatgaagtcaatgttgtcctcccccttcgtctcatcccagcggccgaacactgagttggcagcagccaggacggagcagcgggagttcagggtggtggtgatcccagccttggcgatagagatggtctgctgctccatggcttcgtggattgccanacggtcatcttctcgcatcttgtcaaactcgtcaatacagacgaccccaccatcggccagg

SEQ ID NO: 437561 - DNA, 674 bp, Homo Sapiens
gggccatgggaaaacaactgtaatcgggcatgcctggcccaaaccctgggggcattctcctttaaacaaatgctttcccctagttgtgaagctgtgttgtgtgccaaagttgtgaactgcttctgccatgtgggtgaagaatccagaggcagaggcttttgctacctagaatagccccgccttctagggtatcctagatggagcctgaaacctacctgtgaatctgcaggcaggtgtgagaacaggcctggggagtggcctgctctttcccagcccttctgctcctgatgaattgccccagaactagaatgtaatattggcacaggggctgagtactagcatgacattgcttctcagacacacccagctgtcctgcctcagacaggctcggatggagatgaggtccgttggccattcctgcccctcccacaggaggcctggcggtgcaggactcacctggcagcaccatgtagctctgccctcttcttcagggtctggagctctgatgtgtggagggccttcgccaccccaaggggctctctgagacctccgtcccagactttgctgctgcagcccccatctctcatctggtcctcacccgtgctggctgggttctggttactccgtgtgcagacgtgcaggaaagggttgtatacacatgggctacaggtcat

SEQ ID NO: 437562 - DNA, 789 bp, Homo Sapiens
gacccagagttcagcgcagaccagcctgacgcctgaggctgaagctggggcaggctgctgacttgcacggaagcccacttcagatatctcctcccctgcatgctccagagatgctcagacctgcgaaagaggctaaaggaatggaactgcagagaacagaccgatctgggtgagccagggacagagatctgcagcctcctggggagggggcactctgccaactgccctgccaggatgccgcaggggagagaaaggcagacagatggagcctgggctgtgctaggataggagctaccttcttgcctctcatctttcacccctctggctctgaggtcgctccctgacagctggtctctgggtcaaatggggctggggaggttgtctgaggcaaggcaaacccttggctggcatttgactgaatctatggctgcttcttcatgtctggaggcctcagagtttcaatccataaaatggaaacaatctgggaggtgatgtgaggtccactgttctagaaggcaggaggacaggatcagtaacaggggcatgggaacactgtatcggcatgctggccatgccctgggggcattctctttaacaagtgctttccctagttgtgagctgtgttgtgtgcaagttgtgactgcttctgcatgtgggtgagaatcagaggcagaggcttttgctacctagaatagccccgccttctagggtatcctagatggagcctgaaacctacctgtgattctgcaggcaggtgtgagaacaggcctggggagtggcctgctcttt

SEQ ID NO: 437563 - DNA, 2083 bp, Homo Sapiens
actaagaagacaagacagaagacaaagaataggtaaaacaggatgtaaagtttatatacaagaatataatgtttatctgaaatatttacagtgttggttaaagcaatatttttacaacttttaaaggtaaactactatgtatattacaggtaagctacaatgggtttaatttgcaaaagttaagtaagaaatgttttaaacaaggcttaaagtactcaagtcaattataaaatttatatcttttgccttttacttgaagaaatcatgctatagaaatggttaatgtgcttctaataaatggaagtattgtagctggaatgtgatacatgtaacagtttaagttcccattgaaggtataaaatgatgaattgttgtaagacttagacactgagtctcagtctggagctgatgaagatgttgagataacagccagctttatctcaacagggtttgtgacccacaagtttgggccacagagaaaattgaagcaatttgcatgttatgacaacctcagtgggaagtgaaaatcagctgactcaaaacaacaaacaacaaccaaccagacccaagtcacagttgcacctattcaaaactagctttaaagtgagctatttttaaacttcataaaaatattcatgattttattagtttgaatatttctacaagattcgggtgggcttttcctttaggtgaaaacagctatccactcctgtggccttataactcaggaaatgctggggatgcaaacgtgcaaaaggcagggggaagctgcccaggctgagactggagcagctaggagtgtgcttggggaacgggagctgagatcccggagcagaaatggtcagccgtgctctggagcaggcctgtcggagccatcaggatgccgggactagcactgcagcttgcggatgctgcgggagatgcgcttgaactctctctgccccttctgccaccgcttcaccgaggtgatcaccagctccccaccctgtttctgtcccatgaccagatagggcgcgttgatgtcgttcatctcctcacaggtgcactgcaagctgtctttgagccacagcaccgatttcttcaggtccctttcggacacaccgttcagcttgtaaatggtcttgctcttggtctccaggatgattttggtatctcggttgatgtaggttatctccttcacttttattttcagtgcaaaatcatttttacaaagcgtttccattatgtcgttgtcatcatcatttttatttttgcaggcttcacatacctttggagcttcctcggtggctggcaggaggtggtcgctgctagcgagggggatgcaaaggtcgttgtcctgggggaaacggtcgcactcaagcatgtcgggccaggggaagccgaaggcggacatgaccggggcgcagcggtccttcacctgcacgcagagcgagtggcatggctggatggtctcgtctaggtcatcgaggcagacgggggcgaagagcgagcacaggaacttcttggtgtccgggtggcactgcttcatgaccagcgggatccaagcgccggcctgctccagcacctccttcatggtctcgtggcccagcaggttgggcagccgcatgttctggtattcgatgccgtggcacagctgcaggttggccgggatgggcttgcaattgctgcgcttgtaggagaagtcgggctggccaaagaggaagagcccgcgcgccgagcccaggcagcagtgcgaggcgaggaagagcagcagcagcgagccagggccctgcagcatcgtgggcgcgcgaccccgagggggcagagggagcggagccggggaagggcgaggcggccggagttcgagcttgtcccgggcccgctctcttcgctgggtgcgactcggggccccgaaaagctggcagccggcggctggggcgcggagaagcgggacaccgggaggacagcgcgggcgaggcgctgcaagcccgcgcgcagctccggggggctccgacccgggggagcagaatgagccatccggggaattccggacccggagccagctttctactcatttattattcaagggtttatattaaaaaaa

SEQ ID NO: 437564 - DNA, 631 bp, Homo Sapiens
  misc_feature (128)..(128): n is a, c, g, or t
tgccggataggtagggcccttaaataatatggattagtatttagttctttggtgtttcaaggttacagacacagaagagaacccttgcatcaaagcaggatgagattaggtgttgttcctataaaaantccatgtggttgttttttggccccctcttcaatattcggggtgtgctgaacgaagcgagcagcagctctggagccataaaccaccatctcatctcagcccagggcatgctgggagaggccaggaaaagtcacttctcttctttgctttaactgtcttttctgtggcctcaaagtcttcaaaggggagacttggtgttctcagcactgctcagcctccatgaagccctccttctcatggcccgagggctccacctccgcataggtggaatggtcagggtggctgcgaaacttcatggctggccagtggtgaggtctacgctcgatgaagaagagcgcagcattggatgtggggtggccattgatgtaaattccagccaggatgatggccgccacgaggaggactgccagcacgatgcccacgatggtgcccaggtgcacaggagtgccctttgtcttgggggacaggttgttaaaaaggccttctgtggtgaggctgtcgatcc

SEQ ID NO: 437565 - DNA, 1692 bp, Homo Sapiens
  misc_feature (17)..(17): n is a, c, g, or t
  misc_feature (184)..(184): n is a, c, g, or t
  misc_feature (186)..(186): n is a, c, g, or t
caggtaagcccacattnttgccaccgggtggaacacatggcaggggtctgggtttccccaaaactgccagctcaagccccagccccagcccacgttccatggccagtcgcctctgtgagcctcgctcaagggcagggtggctctgactcttgttgtagaagttggagtatctgttcaaagtgcncntcaggtaggagggcaggcaggttctggggttcagtgtgtggcagattgaggcaacaggccaggagtgtcgggacaggacaagcacagacacttctggcattgccccttcatagtagaggtcctcattctcctcctcttcctcctctccctccgccacatccaccactgctgctgcccccagcttcctcttccttctcgctcttgtgctccttgccactggccccaaggcccacctgtattttcttctctgtatcctccagcttcaggagttcctgatccagctgctggagctggtagacgtggaactggcgctgcagctccttagaggtgctcaggctctgcaacatctgctgggggaggcggttggggaagcagggaccgatctgctccagcacggccccctccagccagctcgagaccacgcccaggagacggtccgccatgtagtgctggtaataatgctcaaaagtggtggctatctccaagccggagaaaatcaggacagcttgcaggcattgctgcagctgtgccagcctctccatttcctgggctccaccgatccggctgccctggatctgctggtcaatgtgccgggcgaactgctcactcacgtgggcagctttgagaaaagggagcttcagcaaggctcccgcacagccattttgcagcgccagcaagaaggctgcccgaggcccaaacagttcagagcttgagttctgcagaatattaaagtgctcacagtagcgtggcacaaagtcatcatcccgccaggatgaggtcagaaaattgttcacctgcttctccaccacggcccgccaacagcgcgtcaggtttctcatgatgctgcttggaaggccccgggtagccaaggagctccagtcgtggcttctgtttctgcctttgggccgaagagtggccaccacaggagggggtgcctcacagggctcgacatgcaccagcaggtgagtgagacggcgcacccgcgagaagaaagctgggccgcggctctgggggttgaagacagcttcctgacactccaggtactggtccagcagccaacccagggggctaatgccatcctcatcaggggaggtgatgttctgcaccacggggctgaccagggcctcccagcaggtcttgcccagagcttgggcagcctcgtcatcagggaggaagcggtcagcaaaattctgctcctggcgcagagcaccgttgagtctagaactcaggtgcaggaggctcgtgcggtcctctgccatgtcctggctccaggcctgtgcccgaaccatgtagaagaggcgtgtgtgacgacagagctgctcccggaacactggccagaacgtgggcttggggcctaggatctctaacccccgaatgcgcgtatcaatgccaccctgctggcagcgctttatgcgaatctggatgatgggccagaagcgggtcaggttctccaggaggatcacccggctggcagagggcatcacattcaccgagttgagttccgtg

SEQ ID NO: 437566 - DNA, 423 bp, Homo Sapiens
  misc_feature (77)..(109): n is a, c, g, or t
catgaggcctcttgccagtcacacaggaggagcgctgagtctctgtccagcaggaagaagttatagaaagccatgcnnnnnnnnnnnnnnnnnnnnnnnnnnnnnnnnngtggcaggtgaagacaggggaaggcaaggggagtgctgggagtgatcaggggcagagaggggaaaggacacctgcttcctgaagggctggcatctctggggctagcatcccaggcccccttttggaatgtgggaaactagacaaggaggggaggggaaggggaaagggccagggcctcccgcagcccagaagaccgcaggcggggaaaagagaggcctgtgagcccagccccctccaccacccctgccctgtgctgtctggttggtgtcaagtgcagcgtctcctaaggaccacatctattcctgtcgctattc

SEQ ID NO: 437567 - DNA, 1037 bp, Homo Sapiens
  misc_feature (956)..(956): n is a, c, g, or t
  misc_feature (979)..(979): n is a, c, g, or t
  misc_feature (984)..(984): n is a, c, g, or t
  misc_feature (998)..(998): n is a, c, g, or t
  misc_feature (1000)..(1000): n is a, c, g, or t
  misc_feature (1008)..(1008): n is a, c, g, or t
ttcccgggatgtaaggaagtgcttttgaatgaggtactgagggccaaggtgttggaagttcctaattctttcctcggttaactgtgaaactctgcgtattgggaaggcctggcctcagtcatcaggccaggagaggtactggacgccgcgcacgcactcgtctgccagcgaggcccaaaggggaagcctagcggagctcagtgtggcagctgctggcctctgggccgctacttgtcaataccatgctttcctgtaatatttgtggtgaaacagtaacctcagaaccagacatgaaagctcacctaattgttcacatggaaagtgaaattatatgtccattttgcaagttgtcaggtgtgaattatgatgaaatgtgttttcatatcgaaacagctcattttgagcagaatacacttgaaagaaactttgagaggataaatacagtacaatatggaacttcagataacaagaaagacaacaccctacagtgtggaatggaagttaattcaagtattctttcaggttgtgcatctaatcatccaaaaaattcagctcaaaacctgactaaagatagtactttaaaacatgaaggcttctattcagagaacttaactgaatctagaaaattcctgaaaagtagggaaaaacagtccagcctgaccgaaataaaaggatctgtttatgaaacaacatacagtcctcctgaatgtccattctgtggaaaaatagaggagcacagtgaagatatggaaactcatgtgaaaacaaagcatgccaatcttttagacattccattggaagactgtgatcaaccactctatgattgtcctatgtgtgggctcatatgtacaaattaccatattcttcaggaacatgttgacttgcatttgggagaaacagctttcagcaaggcatggatagagtccagtgttctggtgatctacaattggctcacngcttcagcaagaggagacagaanagggntctgagaatcagananaaatagangattcagagcgcgggacatatggttgata

SEQ ID NO: 437568 - DNA, 320 bp, Homo Sapiens
  misc_feature (227)..(227): n is a, c, g, or t
acagtctttttctctaagaagcccaagggtgcatgatgaataaaatgtaaatttgagaaggcagtgtttttattagtgaaaagggcaatgagccatgtagttggagcagtgacctgcatggtggccaacgctggtgcaggaagcaggagcaggcactacagagtctagttattttacagcacaagaaaaaacaggcacggaaagtttcactggtctcccagcagatnttcacagaagtgtacattgtcttgtgtatgttagaactaaggtcaaatctttgatacggttcagaaattgacaagtctcaaaagtcttgaagg

SEQ ID NO: 437569 - DNA, 489 bp, Homo Sapiens
ccgtgtcatccccttcgtgaggagggcctggagagtggctgacgctggactcccaggtcatcatggcagacagtgagatctgtggcaccaagggccccaccttccagcggcatctcctggacacgcgctttgagctagccttagacattcctgaagaggaggctcgctactgagccaagaagctggagcagctcaatgctatgcgggaccaggatgaatattccttccaagatgagcaagacaagcctctgcctgttcccagcaaccagtgctgcaactgggaattattttgggctggggtgagcagcacaacgatgaccccgacagtgcagtggatgatcgtgacagtgactaccgcagtgaaacgagcaacagcatcccgccgccctattatactacgtcacaacccaacgcctcagtccaccaatattctgttcgcccaccacccctggggctcccgggagtcctacagtgactccatgcacagtt

SEQ ID NO: 437570 - DNA, 1335 bp, Homo Sapiens
ggagggcaggggaaagccagctttattgagtaaacttcccaggacctgggacatcttagatctccccttcccccaggagataggacccctaaacctcccctgggtcctaggaccacctgacccaccacttgtagtctccagtgaggaggggacccttatttggcaagagatgaacatgtaagcagctgtccgccggaggaaaggacgatggctgaaaggaatgaaccaccgcaggcggtgtctctcctgtccagctgtggacaggacctccacggcccggccttcctggcctcgggcacttggctggcctgggcctgccgttggagcacagcttctgttgaaggcttggggatggccaggctgccggtctggggcaagatcactcgatctccaggatgaggtcgtcaccttccagtgtcatgtccttggtcacatgaaccttgcggacagtaccctccatgggtgaggtcaccacagtctccatcttcatggcactgagcacacacaggggctggcccttggccaccttggcccctgccaccactttgatgtctatcaccttcccaggcatgggcgccccgatctggcccttcacgtcctttagggccttggggtggaagtgcatctccttcatggcctgggtgtccttgaccaagatggaccgcagctgcccattgagctcaaagaagacctgcctctggccggcccggttcaggtcgctcacggccagggctttgatgtgcagcgtcttgccccgctccagctccacctcaaactcctctgcgatcttgggtccctgcaggaagaggcgagtattcaggctatccagggggccaaaggtggcagtgaagtccttagagcgaaagggttcggggaaccccccatgggggacaccgatgtagccctgcaggaactccaccacggagcggggaaaggacagctcttccgcctgagcttcggcctctgcccggctcaatccattctgcaccataaactgggccaggtcccccacgatcttggaggagggcgtcaccttgatgagatcgcccagcatctggttggcctccacataggccttcttgacctccttgaacttggagccaagccccatgctgtgggcctggaagtgcaggttggtgtactggccccccggatctcattttcatacacgtccgagttgccagacttcatggtggccgtgcagtcgaaggccgcgtacagtcccctagccccctcccagtactcactgtagtcaaacagcgctccatgggcacctctgtgtccaggggagtccctctctctcgacgaattcgagctcggccgatttggcctgat

SEQ ID NO: 437571 - DNA, 383 bp, Homo Sapiens
  misc_feature (31)..(31): n is a, c, g, or t
gccaaattattcaggctaatcccaggggccnaaaggtggcaagtgaaatccttgaaagtgggcaaaacacatcggggtaacatagctgctgagagcaacatcttccggcgtcacctcctccccatgccggtctaccagctccttctccagtgcctgcagatccaggggagggagggaggctccaggccgcccctccacccttggcaggtccttcagtaccttagagcgaaagggttcggggaaacccccatgggggacaccgatgtagccctgcaggaactccaccacggagcggggaaaggacagctcttccgcctgagcttcggcctctgcccggctcaatccattctgcaccataaagtgggccaggtcccccacgatct

SEQ ID NO: 437572 - DNA, 2099 bp, Homo Sapiens
  misc_feature (198)..(489): n is a, c, g, or t
  misc_feature (524)..(524): n is a, c, g, or t
gaagtttcaaattatttattcattcaacaaacatgtcagagagaaatgaacagtctagtagcaaatatttcatagagaaatggacgtatcattccaactcaccacgccccaaacttcctgtggctcactccatcttttgcccctctagggagcttcggtgatgtggatctgccttggggcaggaaaggggaaggggannnnnnnnnnnnnnnnnnnnnnnnnnnnnnnnnnnnnnnnnnnnnnnnnnnnnnnnnnnnnnnnnnnnnnnnnnnnnnnnnnnnnnnnnnnnnnnnnnnnnnnnnnnnnnnnnnnnnnnnnnnnnnnnnnnnnnnnnnnnnnnnnnnnnnnnnnnnnnnnnnnnnnnnnnnnnnnnnnnnnnnnnnnnnnnnnnnnnnnnnnnnnnnnnnnnnnnnnnnnnnnnnnnnnnnnnnnnnnnnnnnnnnnnnnnnnnnnnnnnnnnnnnnnnnnnnnnnnnnnnnnnnnnnnnnngttgggggggaagaacaaaatgagtggggggtggnggagggaagccctgctgggagcccagcgaagagggggcttgcatcgggccaaagactcatcccttctgggagatgcagaaatggcatcttgctgccccccactcatcacatgtgcccttcaaacatggctgctcttccacctaaatctgtagtctgatgtttatggggagagtggccttgaagtcttgaggggcagtgagacggtaggggggaactgcttgacatccagcttgtccttgtactggagctcaggggtagctaggcgctcacattcctcttggtcttgggggctcaatccactccgaagtatatagcccaaaaccttagctgacccaaactggaaggggcggaaccggcgatcagtgatgtatttggggtcagaagcctcaccccctaccagacaatgtttcgctagggcctctcggcgagcccggagctcggccacagctgtctgcagccggccctggccgtatttctctatccgtgcccagagactgcggttgaagtggacatagagagcccagtccaggttgttccaggctcgggcccgtgcagtcagctgccggtcctccgcagtcagtccactgttgctgacagtgctgaggccctgcttatgtccagcctgggcattgtgcatgaagcccaccacgtcatctagaccccagcacagggcatctgccagcagaaccaatgactcatcgaagtactcagccaccatgaccaggtcaaagacagagtccagccaggccagaccccactggatgaaggatgaagaccccaaatcgaaagaggcagggcttgatatctggctgcgatgatcagtaacagtggaaacaggatggatgagggcattgggattgagggtttgggctcgagggccagcaccagaaggcaagacctgcagctgtggggggttggggtctctggggggatgaatattccctctcttggccctcttctctgggggaaagggcaggccaaagtcaaaccatagtaagttgcgagcgtagtggtccccacgggccccaggcttgtagaagccttcggggattggccaggaaggcagccaaagatggtgactttgcggaaggctgatgaggtggatttatagtaggagaaggcagagcgagccagagccgctgggtctcggacaatggaaaaaaagaagctgtcagaaggcatgacctgaagtacctcctctggaagggccctcccaagagctggagtgcaaagccaatggtcatgaagactcccagagccacccccaggctccgaggtccccagagccgcagcgtcctggcaggagagagagggcccatgtggcacagggaagggtgaggtgacagagagatggagccagggccaggaagaggggcagagacagctggagacagccgtgcagctgcggaaggcactggttggagatcggggggtcattccccaggcctgctcacagtcttggttgagtctgccccctgagttagcagatttttgcctctgtcagcgtcaggccacaaggggagcagcaagggaaatcgggccgggccctcccgcccatcccagccaccgcccgac

SEQ ID NO: 437573 - DNA, 1487 bp, Homo Sapiens
  misc_feature (1384)..(1384): n is a, c, g, or t
tgcggggaatcaggtaggggcctttattggccagcacacatctacctcctggcatctgtcacaagcatttgcaggagtaggcggccccttcctctccatgtccccatccccaacctgagatgcgggagggcctgggggctcagagggaagaactgaggcaagaagcccccggtgatccagtcagaggattgggcagcctgacctcggggtggggagcccagcactggacaacaaggagggaggggcacaggagggctccccgaggtttggtcggggagggggaggaagactgccccctgccctgtcatctctgcatgtgccgagccccagctcctgactccctcagtgcctttgggcctggatgctcagacagcagatgagacgaagccttgtacctctatccctccttgaaggcctgcctccccccacttcacagagggaaactgaggcccaagcctctcctctcagcccttgctcagcctcagacatgtgcatggtgccaggactgagacctgcttacccctaaggcctagatggcagaagggaccctgaggacattaataaatatggacgggcggtccctggaggcagctggccgagtccaggtaggaggggaagcctggcctggtctgcctcaggggccgccaccaccctcagcctctctcgtcccggctcctgggggccacgatccggtagttggttgcatgtccgcccctcttgccccgaaggaggctgggggtgcctgtgccggcagggcccgccccagaccccagctctggttcatagagcccaatcattgtttccaagattaaaaccctctcagctaaaatcttcaaagcctcgcgtagttggtgcaacccctccccccagtggctcttctcaccagggtctcccttagggccaggttccccctgctgcccagcagagccttgggggccaggctccccacgcagtcctctctcgcccttctctcctgggtggccagagattcctttgggtccagtggggcctgggggtcctatgtgaccaggactcccagggacacctgtggggccaggaggcccagggggacccatgggccctggagggcctggaggcccagtgggtccctggggccagtggttgttggtctcagtgaatgtgttggacagcaatgggtctccatgctgggagatccgggcatggggtggcccatcaggggctgggggcccagggggccaggaggccctggtggcccatgaagtcccctttcttcaggggtgcccacagctccgcccgggcagagctctctggggggccctgtggaccggagggcctctaatccctttgggccccgatggccggattctcccttagggccggtggcaccgggaagcccccaacnccgactttgtcccggggcgctccattccgggcgtgcctgggcgggggggacccaagacggcgagtcctctaggtagtcgggtagggtccggctcttcttgaca

SEQ ID NO: 437574 - DNA, 2052 bp, Homo Sapiens
  misc_feature (4)..(4): n is a, c, g, or t
  misc_feature (7)..(7): n is a, c, g, or t
  misc_feature (15)..(16): n is a, c, g, or t
  misc_feature (148)..(148): n is a, c, g, or t
  misc_feature (156)..(156): n is a, c, g, or t
  misc_feature (159)..(160): n is a, c, g, or t
  misc_feature (162)..(163): n is a, c, g, or t
  misc_feature (177)..(177): n is a, c, g, or t
  misc_feature (187)..(187): n is a, c, g, or t
  misc_feature (199)..(199): n is a, c, g, or t
  misc_feature (223)..(223): n is a, c, g, or t
  misc_feature (229)..(229): n is a, c, g, or t
  misc_feature (233)..(233): n is a, c, g, or t
ttcnccngcatttgnnggagtaggcggccccttcctctccatgtcccctatccccaacctgagatgcgggagggcctgggggctcagagggaagaactgaggcaagaagcccccggtgatccagtcagaggattgggcagcctgaccncggttgtnggnntnnagcactggactaanaatgagggangggcacatgagngctccccgaggtttggtcgggganggggangaanacttcccccttccctgtcatctctgcattttccgagccccatctgctgactccctcagtgcctttgggcctggatgctcagacagcagatttagacgaagccttttacctctatcccttctttaaggccttcctccccccacttcacagagggaaactgaggcccaatcctctcctctcagcccttgctcagcctcagacatgtgcatggtgccaggacttatacctgcttacccctaaggcctagatggcagaagggaccctgaggacattaataaatatgggacgggttgtctctggaggcatctgtccgattccaggtatgaggggaagcctggcctggtctgcctcaggggccgccaccaccctcagcctctctcgtcccggctcctgggggccacgatccggtagttggttgcatgtccgcccctcttgccccgaaggaggctgggggtgcctgtgccggcagggcccgccccagaccccagctctggttctggccagatgatggcttccaggagggtgacccgtctggccaggagctccagctgagcctgtttctgcaggagctctgtaagataaaaaccctctcagctaaaatcttcaaagcctcgcgtagctggtgcaacccctccccccagtggctcttctcaccagggtctcccttagggccaggttccccctgctgcccagcagagccttgggggccaggctccccacgcagtcctatgtgaccaggactcccagggacacctgtggggccaggaggcccagggggacccatgggccctggagggcctggaggcccagtgggtccctggggccagtggttgttggtctcagtgaaggtgttggacagcaatgggtctccatgctgggagatccgggcatggggtggcccaacaggggctgggggcccaggggggccaggaggccctggtggcccaggaggtcccctctctccaggggtgcccacagctccagcccggccagggctccctggggggccctgtggacctggtgggcctctcatccccattgggccccgactgccggcatctcccttggggccggtgggcccgggaagcccccaagcaccgacttggtcctggaggcctccatctccggggctgccctgggcaggagggggaccccagagcggggcagggtcctcaggggtagctggtgttggaggtactggctgctctatgacagtcagcatggtcatcttggcctccagcaccttcagccgctctgtcagctctgacactttgctgcagttgagacaacctgagaaggctgtgggccgaagcgccatccgccgcatggtactgcccgaccacatgggctccaaggaggcagaggaacctgcaacttcctcgcagctcactcctgagtgcccagggcagcacctccactcacgggcggtcactatcttgtacatcaccttgtatgtgggtctcaccacagttctgtagctgctccccggacagctcatgggccaggggcagttctgcagcactcgctgaaggtaggtgccattctgcacatggcatgagatggtgcgggtcaccacataggagcaccagttcctgcgtccggagaacggagctgccccgatgctccacgcagcgccgcctcccgggagcaggagcccgaggcagagcagcgcccaagcccgcgggccgcccatgctgcaccaggcgccctccgcgcgcggcccctcgcggtcgccgcccccagcctgtcctccccgcctgcctgcccgcgccggcagccgccccggatgcgcggagtccggtttccagctccgatcccgg

SEQ ID NO: 437575 - DNA, 1389 bp, Homo Sapiens
  misc_feature (1090)..(1153): n is a, c, g, or t
ttattttgtgtcttcttcgttggtatttgttgtggtggttgcttgtttttggacccgctccatgtgtttatttttattctttaaatgcagaagatagccctgtgagatgggtttagcaatctacatgtcacaggggaggagcatgaggttcagagacgctgagtaatgtgcccacagactctcagctggcatagaaagctgggggtttagcctccaggttctgtgttctcaacactgtccgggtgtctcctagcagatacattgacgtcctgatgtttgtatctgcagttgaaaacttgtcttctagatacccatgaactctgggcaatcctcactgcctgccttttgtgtttgatgcaatcggtggcttacggggaagctccttggcagcgagggcctggctgtttatcgccgtgtgtgcccgccccacgtgggtcccatgcttagcccacggcgggtgtttgaaaagcacggaatgtatatggcgggacagggcgcgctgcggatacaccggacgccccctcagccgcgacagtaacggcctccggccaccagggggcagccagggcgcgctgcggatacaccgggacacgccccttcagccgcgacagtaacggcctccggccaccaggggtcggccagggcgcgctgcggatacaccgggacgccccctcagccgcgacagtaacggcctccggccaccagggggcggccagggcgcgctgcggatacaccgggacgccccctcagccgcgacagtaacggcctccggccaccagagggcggccagggcgcgctgcggatacaccgggacgccccctcagccgcgacagtaacggcctccggccaccagtggggcggcacacggcgcctcaaactgtaaacggctccgggcttcggaatccgggcggggagcggagagcggttcgcaaaagccagttggtgcccggatgccggcattgtcacgggatcagcggccaacagggggtagaagacagcgcaacagtcgctcttcttgcaatgaagctatatgcatctagtgtgacggattatcctacctggagactgtctattttcagctcggcatcannnnnnnnnnnnnnnnnnnnnnnnnnnnnnnnnnnnnnnnnnnnnnnnnnnnnnnnnnnnnnnncggccttctctcctccgccgctcctgcctcccttctgcttactcctctcctgggtcaacaggtcagctcggggtcctgcttccaaggctcctccttcctagttgaagccggattctcaggagagaacctgccatccggagctttaccacctcggcaggaattgtaaatcaactcttcatcccgtaccaaggaaagccttttccaagtgttctgattccagaacgacaggtgttgag

SEQ ID NO: 437576 - DNA, 940 bp, Homo Sapiens
gctgcggatacaccgggacgccccctcagccgcgacagtaacggcctccggccaccagtgggcggccagtgcgcgctgcggatacaccgggacgccccctcagccgcgacagtaacggcctccggccaccagagggcggccaggtcgcgctgcggatacaccgggacgccccctcagccgcgacagtaacggcctccggccaccagtgggcggcacacggcgcctcaaactgtaaacggctccgggcttcggaatccgggcggggagcggagagcggttcgcaaaagccagttggtgcccggatgccggcattgtcacgggatcgcggccaaagggggtagaagacagcgcaacagtcgctcttcttgcatgaagctatatgcatctagtgtgacggattatcctacctggagactgtctttttcagctcggcatcacgggggcgggggcggtgacccccatcccggctccccgggggcggtgacccccatcccggctccccggccttctctcctccgcccgctcctgcctcccttctgcttactcctctcctggtcaacaggtcagctcggggtcctgcttccaacctcctcctcctagttgaagccggttctcaggagagaacctgccatccgcagctttacacctcggcaggaatgtaaatcactcttctcccgtcccaggaagcctttccagtgttctgattccagaaagcaggtgtgtgtggccggttcaaggaatttcaagcatcagcaggcagaggaaagtaccagagtggaaggcagccacagggtgtcgaaatcaagccacccagggagcccgcagatcccaccctctccggtgagaagagttggtggggagcaacttcattccaatgcagggaacagcgttactgcgggcttaactcccgggttcaagtgattcacctgccggagctccc

SEQ ID NO: 437577 - DNA, 1395 bp, Homo Sapiens
  misc_feature (763)..(855): n is a, c, g, or t
  misc_feature (1270)..(1331): n is a, c, g, or t
caagtcgagtgggaacggcgatgaagtcacgaaaggcggtataaggagggctggagcgggtagattgtggatataatcgtatttagggctgacgggaaggagtacgcgtaggcgagtgggattgtcgtgggattggagagttgcatcaagaagctgggcgaggcacgtcgcacactagtaactcgggcatggctatagggatggtgagtggtgctagacgcagagtgaggcattgcttaggggcaagggatggctactcgtaggtcggcgacacgctaagccggggtgcacagagattgcgcgggtgagggagcgacaagcgttgcaaaaatgggtattagccggggagccgttgcggagcatcgtgatccgcgttccggggagacccaggggccaaggcgggtgggggcattgattagaggcaaggagggtgatgtcgaaatctagtggggacaggagcggggggtccgcacaacaggggccattgaggtgaggcgcgatgataggtgagtagaaggcccggtctgccacagggttgatccatcttacttcctagccgtttttagttagtaggtctccgtgcttcctgtgtcccaggaaaaggtaaagttctgggaggaaaggagggtgttttcttggcttttggggtcaggccctacagagtaaaagccgggtagagggggggagaacatgtggtaaacagatccagggtttcccggggattggggagagaaaaatagtggaactccatctccagcgtagnnnnnnnnnnnnnnnnnnnnnnnnnnnnnnnnnnnnnnnnnnnnnnnnnnnnnnnnnnnnnnnnnnnnnnnnnnnnnnnnnnnnnnnnnnnnngaaggccgcagtaacgctgttccctgcattggatgaagtgctccccgccaatctctctcaccggagagggtgggatctgcgggctccctgggtggcttgatttcgacaccctgtgggctgccttccactctggtactttcctctgcctggtgatgcttgaaattccttgaaccggccacacacacctgctttctggaatcagaacactggaaaggcttcctgggacgggagaagagtgatttacattcctgccgaggtgtaaagctgcggatggcaggttctctcctgagaaccggcttcaaactaggaggaggaggttggaagcaggaccccgagctgacctgttgaccaggagaggagtaagcagaagggaggcaggagcgggcggaggagagaaggccggggagccgggatnnnnnnnnnnnnnnnnnnnnnnnnnnnnnnnnnnnnnnnnnnnnnnnnnnnnnnnnnnnnnngtcaccgcccccgcccccgtgatgccgagctgaaaaagacagtctccaggtaggataatccgtc

SEQ ID NO: 437578 - DNA, 655 bp, Homo Sapiens
ttaaagtcagaaactttaatttccaaatatattgatcaaaaatatacaacttcaacagcaactctttatcctaaggagagatcccgcagtatatctagggaaagggccataaaagtgagggggtagaggactttggggtatatcccaaacttcccctgcaactaaacagagtttgttctctgcattaacaacacagcgatttcctcatttcctcctacatgtttggagaggctgaaggctctgcagttcttcctggaatgacagcctgggtccattcctctctaggagatgtccaggggaaggaggacatctgcttactactcctacagtgtttctggccagatcctacaccccattttagaggcttcctgataggcatgaagggaagtcatccacatccatggtatctgagaaggaatttatgcctcagtcgtggcttgtgctgaggtgaagaccacactctttcggttttccagcctcttcttccgaatctttctagcaatgaaataaacagccaggagaaggcagagacagccaaccaagattcctacacctagactcagcatttcacctgtggtatacgagggtccttggatgaaagaagcaaagaccatgcgctgattgagaggctgaagggctcggtagttctgtacca

SEQ ID NO: 437579 - DNA, 256 bp, Homo Sapiens
catcaactattaccatccaaagagcaccctctagaaagtagcaggtttttgttttaagaagctgggaatggactttatttaaaatgatctaagaccctaaacagcatatataagtaaatttgttatttatgctaaaagtatgagagcaacttcggatactgcaacagcaaccaagggaaatggctgtaaggagctcacaaatccataaacgttgctgattacactgttaacgaaagctgtctcctctaggaggcca

SEQ ID NO: 437580 - DNA, 253 bp, Homo Sapiens
  misc_feature (115)..(115): n is a, c, g, or t
  misc_feature (183)..(183): n is a, c, g, or t
  misc_feature (216)..(216): n is a, c, g, or t
ccatgctgggggctatatgagaataggaacagggtgagagctgaccccaggagccctcgtccaccctctggcctcacccctgggaacagggaagcctccctgtcctggctgtttngagagagagctccacgcagggcgaagtggtgacctggagccctccgcagatacggcccgctggttctnagcctcttccggccccagacgcaccaacctggngaaggtgcattaatgggtcggagagcgtgggtggacg

SEQ ID NO: 437581 - DNA, 416 bp, Homo Sapiens
  misc_feature (320)..(320): n is a, c, g, or t
  misc_feature (359)..(359): n is a, c, g, or t
  misc_feature (362)..(362): n is a, c, g, or t
  misc_feature (398)..(398): n is a, c, g, or t
caggtccctggtgctccctcccagcctcacccagcaaaagccgccctgggccaggctgggtgttagggccagggcgccacgaggagcggaggtcagcggggattgtcaaaaacagtccctcaagttgagtctcgaactttgaaacagacaaaaccttcgctgcatgacaggagcagccctggagtctcttaaaggcaggtgggcagaggcagtgctgccgaaggggcctgggggctgtaggcatcttggggctggaggcagatcggggacaagctgttggccagctctgccatgctgaacttgggtgccagtaccacacncctccctgggcatgcagcaacctgtcagccttgctgccnccnttgcgcactggtgagggccaggctgctctctgtacncttgcttcctcctcctag

SEQ ID NO: 437582 - DNA, 844 bp, Homo Sapiens
  misc_feature (80)..(80): n is a, c, g, or t
  misc_feature (812)..(812): n is a, c, g, or t
ggttcatttggcccaaggaccttttactgagtttaataatttcagttccataattctttatataacatctaaattagaanaaattgacttactgggttgttgaattaatttgtagtggttggagggtttaagattatatgtaacttgcttttctcttttcttattttggtactcttctttttcattttcgtcagattctgaagagctgctgctactatcataactgctgtcactgctgcagtactttggtcttttcattatctcagtactctcaggcatagaacacagaggctttggtcctcgagtcttggtagtttttcccatcaacttttcatcatcaatttcacattgctccagaagatccaaaatatcttcttccttcatccttttcaaaggattattcaactctcgctggaatgaagctgctcttcctgaaaggaaggtctgaaaggcaacagctaacaaattttcatacttttcaagtaatgctttatcttcaggaggataaattcggtctataattccccatatgtcggattttcatgttcttcgtcgtgagatctgctttcgtacttgagcgagtctctctttcaactcttctttccgcctctccaactggtgtctctgctgttcccagtctgaggagcctggtaagagccttttaattgaattttgaccatagagcctcctttgagcctcagctttttgtttggccaagtttcttcttttgtcactggtccttatgtttagtagcttcaacgcatttagcagcactcccctttttacatcatagtctattttctgatcagttncaaagcttggggctcggttaatctccagacgc

SEQ ID NO: 437583 - DNA, 1043 bp, Homo Sapiens
  misc_feature (228)..(271): n is a, c, g, or t
  misc_feature (486)..(486): n is a, c, g, or t
  misc_feature (733)..(817): n is a, c, g, or t
ggaattcccgggatggaccgctgatggtggctttgccttctccccggcagatctgtatcttcgtcggggagacgctgctgttttctaactgggccatcactgcagacatcctcatgtacgtggtcatccccacgcggcgcgccactgccgtggccttgcagagcttcacctcccacctgctgggggacgccgggagcccctacctcattggctttgtgagtagccccnnnnnnnnnnnnnnnnnnnnnnnnnnnnnnnnnnnnnnnnnnnnctgccccgacatccacccccaaatcctcgcagatctcagacctgatccgccagagcactaaggactccccgctctgggagttcctgagcctgggctacgcgctcatgctctgccctttcgtcgtggtcctgggcggcatgttcttcctcgccactgcgctcttcttcgtcagcgaccgcgccagtgctgagcagcagtgagtggggggggagggngaggccctgctgcaccgccgggaagcagggaccgtgatagccaccgtgagccctgccctggggtggggcggggagggtacatgacctcccatgcactcagtgcacccactggttgctggggtccagccctgatggccccgtgccagggtcagcctggagctgtgggaggccacgggggtgtctggtggatccagacttgggtttgtctctggacttagtggttttcaaggctggggcccctcccctnnnnnnnnnnnnnnnnnnnnnnnnnnnnnnnnnnnnnnnnnnnnnnnnnnnnnnnnnnnnnnnnnnnnnnnnnnnnnnnnnnnnntggggctgacgaggtccctgcccagcacctccggtcagctggcccccacgacacgatgtgccagggcagtgcccgggcccgtgcccgcgtgatagaacaacactgagccccgtaccgtctctcaccccagggtgaagcgagactggcgcatgccgcccgcgatctgtgaaagtctgaggtggtgcattgggacatgaagacccacatcccactcgtatgggaggtg

SEQ ID NO: 437584 - DNA, 1578 bp, Homo Sapiens
  misc_feature (1043)..(1043): n is a, c, g, or t
  misc_feature (1052)..(1052): n is a, c, g, or t
ctggtgagatccacgcggttacacaccgggaagccacagcaggccagtaactaagggccagaagagcatggtccaagctggctcttggggggtcccccatggccacaaggcctcaacccgccaccgccacccccgcaccagaaccacggtggattgcagcaagaagtgcagggatcgggtgacgcagggggctaagctcccccaaagcgggttgggctggtgtgaagttggcagctgcatcctggtgtgtgcatggatgggaggtgggtgatcgaaggcctggcccctggggtcacttggtggaatgccagcagccagtgtttgggtaggggccgcctctcccggggcctcagcctcagctctggggcaggaagctttgtggatagctgcttcctccagcagccggagcctggctactgccccatggattctgggaatggtctcctgggccctgcccctggaaaaggctcagctcagcctcggggaaggagtggggtcctggcttgggggttggtggcagggagagaagccctgcagagttgggctggtgtgcacctgccagagaccttgagcctgggggcacaggtggtgtacagctgcagccagggccttcacccctggtgatgccagcttgtcagaacagtccccatctgggacctccaggctgggagccaacccgagacagtgagacagtgtcctccagggagtacccagagacttgggcgcccagcttcatttgccaggttgcgtccaatatccccaaggtccgaggcccagctgagcagtggtccctgcataccaggccctcgcgtgagcctcaaagccgggactgccggcctgaggccctgggccacctgctctccgtatggtccagggtctgttgagtcttcaaagctgcagatcgtgctttgcccagcaagttgtgtgggaaagtccagccccctggcccttcgttccagggagggcagggacttgcccaagatcacataagctggtggcaggccaggctctccccggacacccacttggggctgtcttcttcnctttgcccncagggccctgcggcccaaacctagggctgggaacctgtccaaccgtgtggctccaacacacacatccttccagggtaactgaggacacagcctcttcttgatgccagggccactcagcaggcctgggccagagagggtgggtgcctagccgtggatcacacagaaagctttggggcagcccagccggtcccggacgctgtaggacacctcccagacgaggtgggagtgtgggttcttcattgtcccaatggcaccacctcagactttcacagatgcgggcggcatcgccagctggttcaccaaagccaatgaggtaggggctcccggcgtcccccagcaggtgggaggtgaagctctgcaaggccacggcagtggcgcgccgcgtggggatgaccacgtacatgaggatgtctgcagtgatggcccagttagaaaacagcagcgtctccccgacgaagatacagatctgccggggagaaggcaaagccaccatcagcggtccctccatccgcagcaaccacccgct

SEQ ID NO: 437585 - DNA, 862 bp, Homo Sapiens
  misc_feature (201)..(201): n is a, c, g, or t
aactgtgttctccgtatggtcccagggtctgttgagtccttcaaactgcagatcgtgcttttgcccaagcaagttgtgtggaaaagtccagcccctggcccttcgttccaggaagggccagggacttgcccaagatcacataagctgttgcagccaggctctccccggacacccacttgggctgtcttcttccttggcccncagggccctgcggcccaacctagggctgggaacctgtccaaccgtgtggctccgacacacacatccttccagggtaagtgaggacacagcctcttcttgatgccagggccactcagcaggcctgggccagagagggtgggtgcctagccgtggatcacacagaaagctttggggcagcccagccggtcccggacgctgtaggacacctcccagacgaggtgggagtgtgggttcttcattgtcccaatggcaccacctcagactttcacagatgcgggcggcatcgccagctggttcacctgctgctcagccctggcgcggtcgctgacgaagaagagcgcagtggcgaggaagaacatgccgcccaggaccacgacgaaagggcagagcatgagcgcgtagcccaggctcaggaactcccagagcggggagtccttagtgctctggcggatcaggtctgagataaagccaatgaggtaggggctcccggcgtcccccagcaggtgggaggtgaagctctgcaaggccacggcagtggcgcgccgcgtggggatgaccacgtacatgaggatgtctgcagtgatggcccagttagaaaacagcagcgtctccccgacgaagatacagatctgccggggagaaggcaaagccaccatcagtg

SEQ ID NO: 437586 - DNA, 1153 bp, Homo Sapiens
  misc_feature (7)..(7): n is a, c, g, or t
  misc_feature (30)..(30): n is a, c, g, or t
  misc_feature (39)..(39): n is a, c, g, or t
  misc_feature (44)..(45): n is a, c, g, or t
  misc_feature (48)..(48): n is a, c, g, or t
  misc_feature (55)..(55): n is a, c, g, or t
  misc_feature (69)..(69): n is a, c, g, or t
  misc_feature (75)..(75): n is a, c, g, or t
  misc_feature (78)..(78): n is a, c, g, or t
  misc_feature (88)..(88): n is a, c, g, or t
  misc_feature (100)..(101): n is a, c, g, or t
  misc_feature (106)..(106): n is a, c, g, or t
  misc_feature (126)..(126): n is a, c, g, or t
  misc_feature (130)..(130): n is a, c, g, or t
  misc_feature (166)..(166): n is a, c, g, or t
  misc_feature (184)..(185): n is a, c, g, or t
aaaaggnacaccccgcagatatataagggnaaaacgttngtttnnctngcttttnggaaatcgcagtanaggaancgntaatcctcgntagatggggttnntgcantatttcccccctttgggaantggnagcgagtaccggaggccgcgggggttcagcaccttngggttggcgggagaagtnnatgtgcagggtgccgtcgtcgctgacggtcacggacactttcttcagggtcttgttcccacagtgtgagcagaacactcggctcatgtcagacgttgtcttgaaacagccatggcagcgcaagatgtagctccgggcctcacgaatcagcatgccgttcaccgccagcacgtgcagccccatctgcagcagaacattctgcatggcgaagtctgtggtcaggcagccaacccgcacgtcctcggggacgtcacactgctccagctcctgctggatctgcttgatgttactgggggttatccagccacccccgtcgtcatcgctgtcatcttttctgtcttcaaacccgttttcttcctcctcctcctcctcacttggaacgtcctcacctctgtcaatcagcagctcctgcagttcatgatcgatgttgggcaaagggtttctccagaacatgaaggaactaaattccaggttctcaggctcacaagctgagtgtcctttttctgtttcttgtgggggtttaggcttgtagggcagatggaaaccagaaatgtgcagaggtgtttctgggtgctgaatcgatgagctcaccttaaccttctgtggttcttgttttaggtgagacaccccaacaaactctgcttccaactggtatgtgagtgcaagcacttggatgtccgtggcagagaggctggggtagtctcctgttttctttgaaaactcagtcaccagccgcacgtattccggtaagggctccttgaaccgcagctcgtagggcaggacagcgagccgcctgcgtgtggccttgtcccgaatctcagtgaccacctcccggatggtgtaaatgttcttcccgatgtcctgcagagccgcatgccgcaggaaagccccagcatccgccacaacgtgctccactggagcctcggtgccgaattcgccacccaggcctcgtaccttagccttaagttt

SEQ ID NO: 437587 - DNA, 1995 bp, Homo Sapiens
  misc_feature (70)..(107): n is a, c, g, or t
  misc_feature (151)..(160): n is a, c, g, or t
  misc_feature (226)..(239): n is a, c, g, or t
  misc_feature (275)..(283): n is a, c, g, or t
  misc_feature (335)..(423): n is a, c, g, or t
aagcccgggggaaaattttttaaaaaacatccccggtggaaaaattttttaaccccaagaaatttgccgnnnnnnnnnnnnnnnnnnnnnnnnnnnnnnnnnnnnnnccccggggggtttaaatttttggggggggttggcccaaaattgnnnnnnnnnnaaagaaggtttttttccaaaaaatcccaaggggcggtttttcccccccccaggttttaaaaaacgnnnnnnnnnnnnnnttttaataaagccccctttaggggccccctttttcnnnnnnnnngggggtgggtaaaatttggcccccccgggggatttttttgggggcccccccnnnnnnnnnnnnnnnnnnnnnnnnnnnnnnnnnnnnnnnnnnnnnnnnnnnnnnnnnnnnnnnnnnnnnnnnnnnnnnnnnnnnnnnnnggtagttcttagttttattataaccttgtattttctggcaaaaatataaatctaaatgcatgatctctgggcacacagctcaagtatcagccttgagatgacctaagcagcaaaaatttggcctatttaattaaatgcacaggaggttgcagccgcatttattagaaaaatattatcctttggaaattcctttcttgaagattggctccagggcgttgttctttctgtttttatgcaattgcacttccttggcaggcagccaggcgctccggtgctcacaggccatgggacagtccagttccctgcagacccagcggggcatgggcggacagagccgcaccgtgaagcccgcctgttatttccatcgggtggtcctggagacgacacggctggggaaatgggtcaccggaactccacggcggccagacgcccatccaatttgcctgcgggaactcgctcttcaccttttcttcacaaacttctttctggaagcgttgggatttaagcgtctccgcccagctcccaaggtgctgtcccggacctgcagggtagctgagcggctggagatgtcattctcgacaaagggtgacaccccggcgatgtagtcaggggcgaacacgttggttttctgcctggccttttgggagagtcgcagctgagggaagcgctgatcctcggtgagatgggggttgatggcgtatttgccccctttgggagtgggaagcgagtaccggaggccgcgggggttcagcaccttggggttgcgggagaagtgcatgtgcagggtgccgtcgtcgctgacggtcacggacactttcttcagggtcttgttcccacagtgtgagcagaacactcggctcatgtcagacgttgtcttgaaacagccatggcagcgcaagatgtagctccgggcctcacgaatcagcatgccgttcaccgccagcacgtgcagccccatctgcagcagaacattctgcatggcgaagtctgtggtcaggcagccaacccgcacgtcctcggggacgtcacactgctccagctcctgctggatctgcttgatgttactgggggttatccagccacccccgtcgtcatcgctgtcatcttttctgtcttcaaacccgttttcttcctcctcctcctcctcacttggaacgtcctcacctctgtcaatcagcagctcctgcagttcatgatcgatgttgggcaaagggtttctccagaacatgaaggaactaaattccaggttctcaggctcacaagctgagtgtcctttttctgtttcttgtgggggtttaggcttgtagggcagatggaaaccagaaatgtgcagaggtgtttctgggtgctgaatcgatgagctcaccttaacccagccgcacgtattcacggtaagggctccttgaaccgcagctcgtagggcaggacagcgagccgcctgcgtgtggccttgtcccgaatctcagtgaccacctcccggatggtgtaaatgttcttcccgatgctcctgcagagccgcactgccgcaggaaagccccagcatccgccacaacgtgctccactggagccatg

SEQ ID NO: 437588 - DNA, 2161 bp, Homo Sapiens
  misc_feature (50)..(50): n is a, c, g, or t
  misc_feature (960)..(962): n is a, c, g, or t
  misc_feature (1086)..(1086): n is a, c, g, or t
cagtgcccctgtctccgggggaaccgcaagggcacaattctccaagggtntccagcagcctccagcttttccctggcggcctatacagagctcccaggtttctcagagtagtgtcactgtgggggctgctcactttgcaggccctgtaccagcctccatactcagcatagggtgtcccaccctcatggtgccggcttttgctcatttcctcccgctcctttgcatgcatccagatgggcttgtggtcatcatccacagacccaaactcctgtacatgggcacgggtcaggatctctttgtatagtgtctcagcctcagcatatttgccctgtttcaggtaacaggaagccaggttgttcttggtccgggctacattagggttgtccgggccccagctgcccctcgtagatggccagtgctcgctggtagtagcgttccacggcctcatacttgccctggttttggcacaagagggccaggttgttcagctgttttgccacatctggatgattcgtgcccaggaccttttctcgaatctccagtgcccgctggcacagaggctctgcctccttgtacttgccccttttgccatagagcacagccaaattgttgagtgtggcagccacagcaggatggtcaggtcccaaggtgctctcccggatgctaagggcatcattcagcaggtgggcagcttccttatacttattctggtcacgatacaccaaagcaaggatgttgagcatggtggcgacatcagggtggccacggcctgatgtgcgctccaggtcctctagtgcctgcttacagagtggcacggccacctcatagcgaccttgggctgcgtactggatcaccaggttgtgcaacgtccgcaaccttgctgggatctcatatccaccctgctgagctgctgtagcaccttgaccacgggacaagccattgctggggtcctcttcctcnnnattaggaaagaggtcatccagggaatccttggtggcatcgccttctttctcctccgaggtatgtccatcctcatcatactgccgcagctgccccaggaactccaggtgcttcttttcctcctcnagctgagccacagcctgttcactgcgctgtagccgctgctgggtgccagccagctcatcccgcagccactggttctcctggcatagccgccgcacctgggcctcactcagcccgagctcaatgttttccatagaacggcgaagctgccgggccttctcatgcaccagcccttcctcatggcctccctgctgcagacattcaatggtctgggacagggtttgcaagcaccggcctggtgttcactgcgtagggcctctagcccttggctgaccagccgtgtgctccccaggatctcctcttggctgagccggtggcctgcaggctcatcccgctgccccaacaccaggcctgacatcctggcctgggggaccttgcccggtctgtgtacagagcagaggccctggctgtggcactcaggccagagcacggaagaaactgttctgcagccagagagtcagaggatctgccctgcccaaagtccagaagtccagcgttcccaccccttctttcaccacttcacagctacccagaggacctggcccagagccccacccaggacatacaccctccctccctccctctgcccacaggtcttcaaagacgcccaattcccgtctccttccccaagccagcctccctcattgcaggcctagggagctactgtctcccaggaagggaatgagagagagagacttaaccagagacctacagcaagaggcgtgtctgggaaaggggagggaggaacacctggtcactccaaacccagtcacttccatggttttgtctctgtcacggtcacctacaaacaggctctgagaggaatcaccgtagggtgcctccacaatgcccgatgatgcaggaaagaatgggaggtctgctgaacggctgccggtcagcaaggaaccgcggcgctggagtgggtctcctaggcctggaaacgcagtagaggagtgcctcgggctgtcgacctgcctggtgcccagggttgggagacgtgagatgggcgggggcggcaggggggaggtgtggatggacgactgaggtccagcagctccagcgagacgtggaggcctaa

SEQ ID NO: 437589 - DNA, 945 bp, Homo Sapiens
  misc_feature (133)..(133): n is a, c, g, or t
ggccatcatttcagcagggtggccagcttccttaaaacttattctggtccacgatcccccaaagcaaaggatgttgagcatggtgggcgacattcaggggtggcccacggcttgatgtgcgctccaggtcctntagtgcctgcttacagagtggcacggccacctcatagcgacctttgggctgcgtactggatccaccaggtttgtgcaacgtccgcaaccttgctgggatctcatatccacccctgctgagctgctgtagcaccttgaccacgggacaagccattgctggggtcctcttcctcctcattaggaaagaggtcatccagggaatccttggtggcatcgccttctttctcctccgaggtatgtccatcctcatcatactgccgcagctgccccaggaactccaggtgcttcttttcctcctccagctgagccacagcctgttcactgcgctgtagccgctgctgggtgccagccagctcatcccgcagccactggttctcctggcatagccgccgcacctgagcccgcagcttctgtttctccgactccactgtgctcaggtggctggctagagccagcatcacctgggcctcactcagcccgagctcaatgttttccatagaacggcgaagctgccgggccttctcatgcaccagcccttcctcatggcctccctgctgcagacactcaatggtctgggacaggctttgcagcacggcctggtgttcactgcgtagggcctctagcccttggctgaccagccgtgtgctccccaggatctcctcttggctgagccggtggcctgcaggctcatcccgctgccccaacaccaggcctgacatcctggcctgggggaccttgcccggtctgcaatctgccggtgtggctgccgctcttgccggcctcgtgccgaattcgccacccaggcctcgttcc

SEQ ID NO: 437590 - DNA, 1026 bp, Homo Sapiens
  misc_feature (112)..(112): n is a, c, g, or t
  misc_feature (164)..(164): n is a, c, g, or t
  misc_feature (960)..(960): n is a, c, g, or t
gttattttcaactgttgttccaacagttgtattataaagggcctagtttatttcatgcctttctaatgttgacataaagtgctgacatggcattggggctggtacagcctcngctcaattatgggttgaagagtacacagagactgccaggctgagggaaggtngcaggagattagaagagatgctcacagagaaccacagaccgcacggctccagagtcaggggcagcatcagccactgtcggctgctcatttgtccagacagagcccacaagcctcagccatgctttgcttctgcaagacgcttcttcaccttttcaataaacctgcctgaattaaagctgatgggagtttatttctccttcatcataaaagaaattcttcaccacaacaatctccaatgaattgtgggcacagaaggcagacccatccctgcttctcttccactatctcccctgtaggttgaaaaggaggaggtactgaattacctccaaatgttcctctggctctgatattctgttattctggtttctttttggctactttgtttttggtagcatgtatcctaaggcgtccagttgaacaacctttgtctactgtgtccaggcattcctggtggtatttcagataagacactcttgggttgctgcactcacaaccactgaaccaattctatgaccatctgtttcatggccacctgtttgctcattttctatgtacataaagggaggggacacaacaaatttgcatattataaactgtatcatcttaaaaaggaaacaaggcaatattttgcaataaaaccttaagatgcattaaatttaagcctaatgcagtaaagaatgcccataaaattattatctaaagaatgtttagaaaattgttgaacaagggacatcatcatttaaagtgatacgaagaaaactcagctaagcatatgggctagattagagagaaaaangaaggacccatctctgccctggaaaaactactggtagcatctttcacaaagctctctgtgtttgag

SEQ ID NO: 437591 - DNA, 495 bp, Homo Sapiens
aggtgcctaagggctttggatgcaagaaactatccctctcagcctcatgctaccctattaaagcagtaaatggctggatgcctactgggctctcctggacacagaggctctcaaagacctaagcctaggaccccaatctccaactgtccattataaacacctgacaagctcagcaaaactaccgatgcctccttaacacaggacagagtcaagcctgggccctctggtgtattctacccacaggagggtggtctcccatgtcctcagtcccttgtgaggtcatcctcccgcagaccccttggtgtcccttagattaactgagtgagcagcagtgggagttcacagagggtacagatggcattgccaaccctcatataaatgatggagcccaagagaatgttgctggctcccatcttttagccagcatgccctgatacgaaacggaacccaaaaaacaacgcatgtggccaaagttaggcagtcgtcttaacgctg

SEQ ID NO: 437592 - DNA, 1280 bp, Homo Sapiens
cttgggctaaacaggctggcagaggcacccctcagggagaccacggcagctccgcagcccatccccggtcaggtccacgtgagccatggccagcaggggactggagaagctccgctgccacagcagatggaacccgtgctgggcctcaggaagccccgactctgggccccggtactttataacacagcagttcctgtccataggtggccaccaggacttctggccgcccatccaaatccacatcggtgaccaggctgcagaggacgctgtcaaactggtcactgccgggcaggagaagctggtcttcaagaccccggttcagcaggtcccgatacaccactgctgggctccaacatgctggccacgagcacgctgtactcatcttgtagtggcctgtccttggtctccttggcggccgagagtctgaacacaatcactcgggagatgggaccggtcctgcaggaccgaccacatctgcagaacctctcgacttccgctggtccacgtgggcgacacggacataaccactctgacagcccagagctgagaggcgccgggacgtgccggggaagttgtggacgtccagccagaggacgctactggtcaggttcgtcagctctgggaagaggttttccacgggctgttcctcaaactgatgcagcccctcgttctccttgtagagatgaatggccgggtcgttcccactcaagagaaacacagtctcaagttgatccccgacctggacctccgcatggcacagctggaacggagtgaactggagctccaggttcaggcagctctgggcaatagagtcaaggttgtactcagagccgggctcgtagtcgcagtaaatgttcaggaaggggctgcccttgtcccctgaatccttgatgaacgtgatccccacaaccagaccccgcttggggggtgacttgttgaaagtgtcgatggagacaatctccgcatccacgggaatgtagttgaactgcagctccttggccactggccggattttctgtcggaggtcttggtagcggaagccgagcaccttgcctttaagggtggcggccagcagctccccgcgcccgccggcgccgcctgccagcccgtacacattgctctgcgacgagaagcgcgtgaagctgtcctcgcgcaacggacaaggccccgcggccacggccgcctcccccatcatgcccctcagttaagcaccctctccgcagcccccgccccaacccgcactacccaacctacgactctctaagcgacctgaaccgccg

SEQ ID NO: 437593 - DNA, 404 bp, Homo Sapiens
  misc_feature (92)..(92): n is a, c, g, or t
cctcgttctcctttgtaaaagatgaatggccgggtcgttcccaactcaaagagaaacacagtctcaaagttgatccccgacctggacctccncatggcacagctggaacggagtgaactggagctcccaggttcaggcagctctgggcaatagagtcaaggttgtactcagagccgggctcgtagtcgcagtaaatgttcaggaaggggctgcccttgtcccctgaatccttgatgaacgtgatccccacaaccaagaccccgcttggggggtgacttgttgaaagtgtcgatggagacaatctccgcatccactgatcccattcttccagcacggtgaccccggctcagacagagcctcagaagccttctcaacaccacgttccaggcccccgccccccagca

SEQ ID NO: 437594 - DNA, 757 bp, Homo Sapiens
  misc_feature (420)..(462): n is a, c, g, or t
  misc_feature (576)..(627): n is a, c, g, or t
agggaaggagagacagaaaataaacagaaatatctgtccccagctgccagaggaggaggaaatgggcttggtgatggtgacattaagttctttgaaagctgggtttgttggcctctgaactctggcctttgtgggatctgttcttttggaaaagatgggagcccctgtgttcctagatcccagcctggccgggtggagtagggtggggaggtggtgtccacctgtgtggccccgttctcactccctaacgcccgtcccttctcccccaggtgaggggccttcccatcccaggagggttttctgcttccaaccgatccaggacttacccataaattccaaccgttctttggacaccagccctttcctcccctcttctccccttgccctgcccctctactggaggccacctggagtggcgannnnnnnnnnnnnnnnnnnnnnnnnnnnnnnnnnnnnnnnnnnaggctcctgaatcgtgggcagaagtgttcacacgccccccctgctttgggaaacgctctcgcttcttccccacaaaacttggtgacttccccaaactaaatcacaccttttccnnnnnnnnnnnnnnnnnnnnnnnnnnnnnnnnnnnnnnnnnnnnnnnnnnnnttagagtacggatcatgggaccaaacttttccgacttccttccatccgagtagagtgaccctgggccggtcactcagcgggggacacaggaagggctgaggtaggcgggaccccgcgcaacacataccag

SEQ ID NO: 437595 - DNA, 1186 bp, Homo Sapiens
  misc_feature (1077)..(1077): n is a, c, g, or t
cctgtttccacccctccccgttattttttcctttggatggttaaaagcattgcaggcacccgggaaggtgagcagagggtaggtgggtgggcttgtcccctccccggtcccccgccctgctcacctctactatgaaggtgcccccaggtcacctgtgctgcccgccatctgcccacgtggcttgcagtgactcaggagagcaggcccacagcgtttgccatcttgcagagctggggaggggcacaggaccctgccctcgtgttccctcccagcccgcagtatttcagggacaggctcttcccctctatccctcaccctgagagcacccctggtggcttggttggggaagggaggggctgcctgtctctggaggtgtcaggcaggcaggtggcaggcagctcacccacccaccccatgggatcccccagcccttcacccgcgcctgccttgtccccatgatagttgacaatcggggcttcctgcaaggcccgtctgtctgtccaggactcctggtggccagattcggcctccgaccttgaccttaaactgcagctgaccccaggggctcgccgctgcccctcccctccacaccaaggcctgagacagcaggagccccgcctggcccgaagccgtttccaccgcagcaggcagaggggctggacaggcactgtcagccaatgtggggggtcctgaagacacccccttggggcacccgagtgccccttctcagggctcagtctgaccgtagccacgtcctgcctcgcgccgcccctcgggcctgacctggaagctccgtcagctccgtccttgtccttagagctgagcccagaccccggggtctggccgaatcctcacccccagggcagtgtttttggtctgccaccttcaggaaaacggctgcggcctcggcctcccttcgggcacccaggaatgcgggggtctgctcagtccccccaccctccatgctcccaacccccgggggctgcggagcctgctgccccctccccgcgggtggggacgttctatgcaatacagggttccactttagaagtgcgcgcgggctaggggtcacgcccngccccttttccgggcagcccccgaactcacagctggggcagcccctctggctttctaattcgcgggcgggaatcctccccccgggttaatttttttaagttttcccttt

SEQ ID NO: 437596 - DNA, 1004 bp, Homo Sapiens
  misc_feature (53)..(53): n is a, c, g, or t
  misc_feature (71)..(71): n is a, c, g, or t
  misc_feature (73)..(73): n is a, c, g, or t
  misc_feature (87)..(87): n is a, c, g, or t
  misc_feature (112)..(112): n is a, c, g, or t
  misc_feature (130)..(130): n is a, c, g, or t
  misc_feature (133)..(133): n is a, c, g, or t
  misc_feature (198)..(198): n is a, c, g, or t
atcctctgattagtccaagacacgactcttccggaagattctatagatctggncctcccagggcatgctgnancctccttttggganaatgtttcttgggcttgtctggatnagctgggtcttggttccnagnaggttctaccttgagggctccattgagttgaaagaggaaaaggagtctaggtgggcaaggtcggnagtttagcttccagtctttgccaactggacaatccttaatggctgttttaaggagcggcaggaccttcgtgtctcagcccatccatggctctgaatactcgatcataagtgatatcaaaggaacaagtgggatggaccagaagcaagatatgacagacagataataggtaaaggagactgaggcactgcagcttctcttgatgcttccagaactcgtgtgcttctgcatgaggtaaagagagtccacctccagcttccccgctctgaagagcccgacaagcccggagaagctgtgaattgtcacagatggaggtgaggagaagatacagaactttgctttcctgactgtagtaggcctgcagaaggctgtagtcctgggagcctgcctcagttcggttaccttccgcgacagctccacttccccgaactgaacccccggctgcagccccagggtcctcggctccaccggcctcacccacggcgccagcctcagttctgattccaggtcctggatccccaggatcttggtggcgaaagagaggaaagacctgtcggtcgcacaccgtattcacaagagagaacttctcggaattcaggcgtagagccgtcttgccgaagattcccacaacgcagatctcatcctcccgccatggaggctccggtccgccagccgcgctccctccgccctcagtaggggaccctccgggactttcagagcccatccaggctgacgctcccattagaaggtctcgcaagctcacgggaccagccatagtgcagagcgttctctagagtccttccccgct

SEQ ID NO: 437597 - DNA, 559 bp, Homo Sapiens
ttttttatctttggaattcatttcattaaggttttcacaaaatacaaagctcaaacgtaatcatctatgtccaccacaaaacagaatcaaataagtggttagcacaacaaacatagtgatcttttccattttaaaaaatataaataacaatgttcaaggttttacagttttcttagtgtgtgtctttttaaggctttatgttgcagacccttcattaatggtacttgtaccctgccatcaggatacactgcccaccagcaaggaaggccactgtggatacattcctgagggggacacacactgatccatgttgcctcagcctgttaaaaactaaatgatcaaacaccctccaatcagttctcagtttcattaactttctttctactacaaagtaataatagaaaggggtacgtgtccagcagcattcgagctctcagaagatcaatcaggaagggcaagaaggaaaaaggcttcctcctggagagaatttttttcctttcatcaggaacaaacaccaataacccagatagttcaaacagtggtttgtactgaaacattt

SEQ ID NO: 437598 - DNA, 288 bp, Homo Sapiens
gcttccatattgaatttttgttcagggagacaaagacacttccagaaggggctgtggaggatataagtggctgggacctatctgagagatggcattgacaggaagaatctggaatctgcagccaggctgagagagaatctgcagctctcaagacaggagccaaagctcaccccacagggcctggctcagaagtcagagttcaggccaggcatggtggctcatgcctgtaatccatgcactttgagaggccaatgcaagagaattgcttgaagccaagagttcgagcct

SEQ ID NO: 437599 - DNA, 1112 bp, Homo Sapiens
  misc_feature (18)..(18): n is a, c, g, or t
  misc_feature (63)..(63): n is a, c, g, or t
  misc_feature (1016)..(1071): n is a, c, g, or t
tggggccagctggctcgnatgtacgtcagcacgcgggaacggtacaagtggctgcgcttcagnaggactgtctgtacctgaacgtgtacgcgccggcgcgcgcgccgggggatccccagctgccagtgatggtctggttcccgggaggcgccttcatcgtgggcgctgcttcttcgtacgagggctctgacttggccgcccgcgagaaagtggtgctggtgtttctgcagcacaggctcggcatcttcggcttcctgagcacggacgacagccacgcgcgcgggaactgggggctgctggaccagatgggcggctctgcgctgggtgcaggagaacatcgcagccttcgggggagacccaggaaatgtgaccctgttcggccagtcggcgggggccatgagcatctcaggactgatgatgtcacccctagcctcgggtctcttccatcgggccatttcccagagtggcaccgcgttattcagacttttcatcactcgtaacccactgaaagtggccaagaaggttgcccacctggctgtgatgcaaccacaacagcacacagatcctggtaaactgcctgagggcacttatcagggaccaaggtgatgcgtgtgtccaacaagatgagattcctccaactgaacttccagagagacccggaagagattatctggtccatgagccctgtggtggatggtgtggtgatcccagatgaccctttggtgctcccgaccccagggaaggtttcatctgggccctaccttctaagtgtcaacaacctggaattccattggctcttgccttatatcctgaagttcccgctaaaccggcaggccgatgagaaaggaaaccttccctaagaagctctggaagtaccccccaccctgctgaaatacccaccaaggaccacggaaccccgttggcggcgtcaccaagcctctttcccaaatgccaaatccacatcccccggcaactggtcacatccaccccgaactgaaggggacatagttttttannnnnnnnnnnnnnnnnnnnnnnnnnnnnnnnnnnnnnnnnnnnnnnnnnnnnnnntgacgcttgccgggacttccccagtcgccacactgtcactg

SEQ ID NO: 437600 - DNA, 908 bp, Homo Sapiens
  misc_feature (454)..(513): n is a, c, g, or t
  misc_feature (516)..(543): n is a, c, g, or t
  misc_feature (565)..(615): n is a, c, g, or t
  misc_feature (690)..(708): n is a, c, g, or t
ttttttttaaccatcgtctctttatttacaggctcaggagcacatgcaacatgacatcatgaaactacaagggcgtggcacttccccctccccctgccgctccccaactttaaaaaggaagtacagcaccctaggaagttgcctaaaagtcagaaaaccctacactgagggtcccaggccgaggtgctccattcattgcctccaaaaataaagaccagttgcagcccaggaggcttgggcctcagagcctgggagtttgtcattgctggtaattagctacgcaaaacaggtctcggatttgccagctcacacctgaatacaaatagcccgaattatccgaatgtccctgaccaccccacatttctgttttccccgtcgtatcctagacctgtgattctcaaatttgatcgtgcccaagaatgacctgtagaacttgcgaaaagccaaatggctnnnnnnnnnnnnnnnnnnnnnnnnnnnnnnnnnnnnnnnnnnnnnnnnnnnnnnnnnnnncannnnnnnnnnnnnnnnnnnnnnnnnnnngagacaaggtctcgctgtatcnnnnnnnnnnnnnnnnnnnnnnnnnnnnnnnnnnnnnnnnnnnnnnnnnnntttgggcttaagcgatccttccaccttagtctggagattatgtgggactacaggtgtgcaccaccttgcccggcnnnnnnnnnnnnnnnnnnngcccagatgagttctcccttagtctgcctaggttttttatgctgcattcttattcactctccctgtttcctgatgctggcctccggcgaccgtaatctttgcagcgcctaccggtctataaccacctctttcctaccctattatttgtcccacctcctagtttcctttcaccacacctgcccctctctgtcttctatccc

SEQ ID NO: 437601 - DNA, 522 bp, Homo Sapiens
  misc_feature (482)..(482): n is a, c, g, or t
tcctaatgcctgtcacttcccaggacgctggcagcagcagcagcccggagcccccgagccctcggcaggtttgcgtgtccttccccgcgatctgattggataaagtgggggctcgacggtggccgacgtgggacagtctggctgtggcaggggtctcggaaaccatgggttattgcagtggcaggtgcacgcttatctttatctgtggcatgcaactggtttgtgtgctggagaggcaaatatttgacttccttggatatcagtgggcacctatcctggcaaattttgtacatattattatcgtcattcttggtttgtttggaactattcaatatagacctcgttacataacaggatatgctgtctggctagtcctctgggttacgtggaatgtgtttgttatctgcttctatttggaggctggggacctctcaaaggaaacagaccttatcctgacttttaatatatcaatgcaccgatcnttggtggatggagaatgggaccagggtgtacggtgacgtc

SEQ ID NO: 437602 - DNA, 789 bp, Homo Sapiens
  misc_feature (172)..(172): n is a, c, g, or t
ccatgggcctgacataccgaagtcatccggacttatcttgacatgtacataggctgtaagctgtaaatgagatgtcttctgaggcccgtgatagccataagagtcaaagccacctgatgaaaatcaaagctgtcctcttcgttcagttatacatttcacgacataacaggcngtagatgaaacctgccagtgcgaggacaatctggagggaactatgagccacttctatgtactggtactccagcaaacaccctgagaccgtgatgtagcgatggtcttctggggcccagtctggggcaggtgtcactgacgtcaccgtacatcctggtccattctccatccaccaagatcggtgcattgatatattaaaagtcaggataaggtctgtttcctttgagaggtccccagcctccaaatagaagcagataacgaacacattccacgtaacccagaggactagccagacagcatatcctgttatgtaacgaggtctatattgaatagttccaaacgaaccaagaatgacgataataatatgtacaaatttgccaggataggtgcccactgatatccaaggaagtcaaatatttgcctctccagcacacaaacggttaagatatttgtgggacaatattataagagtaacctaatgatccccatccatcttcagtaccagttgcatgccacagataaagataagcgtgcacctgccactgcaataacccatggtttccgagacccctgccacagccagactgtcccacgtcggccaccgtcgagccccccgct

SEQ ID NO: 437603 - DNA, 1111 bp, Homo Sapiens
  misc_feature (281)..(281): n is a, c, g, or t
ttttttttcaagactttcagtatttattcttgaggttggcaaatgtttttaaaaggctcttccttttgaagatcaaagccatgagacaacctatgttaattatacagaaggggaaggactatatgggggagcagcatttattaatggaattctaggaaagctagtttcaatattccagactcaaatatttcttctctgttaacatcataaccaaatttgaggttcactgttagtgatttcaagagtcagtgatatcaaggcaggcgacactgtctcaggantaacactctcttcctattgctacccaaagtctgtgataaacaggaccacagaattaacatttacaaaatatactttaaaaatggagacaaagtccactaactttatttttatgagtcaattctaattaagtaaattctgattactagaaagctttgggtataaatgtgatcttttggtttgctatacactgactcttaaaagataacacttatttccctggagcagtttactaactgtcactcttgtaattcaaaagaattaatatttctcaaaaggtgtgtgattccctgcagaggcatgacctcttgtgaagcagaccctttcaaattggctaatataaagtcaagataaatagaaatcagtccctgttggtgattacattggttgaagttattgctccctcatttcgtgtaataaaataacacactactacattatggaaaacccacacataaatctaaaagacaaatattcttattaacaccatttgtatcctagaaataaattagcttccttaaaaaatcttttcaattattcacaaaatccatccttattttctgaatgaacaaggctgaattttagaagtgcaaatgaaaagttcttgaggttcccctgcagtgtagacaggccttcttagtggattccgaggcgcagcttcttgtcctggtgctgctcttccttctgtgggacaggtctcaacacaccattttctctactttcaggctcattttgttcaagaccataagctcctgatggattcagctgccacgtaaatttgctaacaccttcaagctccccgaacctcatgtaagagatgtctgccttcttt

SEQ ID NO: 437604 - DNA, 1147 bp, Homo Sapiens
gtaataaaaagctatttaatgtttgatagacaaattgaagtccataaatctccttgaataaagatgctaaaaatgttattcttgttttttaaatagtttcgtttttacaaagttctgtacataaaaataaatatacagaaacaaaccccatcaactgtccacatcagtaatcctcactggtgggctcaccattgataaggaagacatcattcaacgcaacctgtcacagagactgtcctagcagcaaggatttctaacctcaaaagaacattactaggcctcttttatcaagattgctaatcatctagaggcctttacctaccaactagcaattaaccatgaaatcaatgaatgcaatcactgtctccaagtagaatgtgaccaatgacctcatgcctagaggcaacatctataccttttgctgactggagccctgacatatgcaggtgtagttaggaacagaaatcaaccccaacctccccttggctagtcactgtgaaaagcgtgcgtaaggcaattgaatcgagggttaagggttcatcttgctaatgtcaaaagtgacactaacaagattcttagcctcatccgccagatgacgggcctctgcgtccaggtctccaggagcaagctccgcctccttcaccagacaacgggttataacctcctccccgcaaaggctttctgtccgatttccgtttcaggacagatgaagtggaaggcccaggactgtcttcctcctggggcttctttgcatttcctttgtaactttttccttcttgcatgctgtcccacatttcaatcttctgtctccttttttcttcttcaagttgtttcagtttttccttatgcttttcaacttgcgcatttagttcttcttgcattttcagtcgagcagctgctaaagcttcttgtcgtttaacaacaacatcaggttccacagcagccgcagctcggtccagctgcctctgcctcaaggctcttagccgggcggaaagcttctgaaagaccacgtagagaaggatgcagctgaagacgatgtaccagccataggtggccagcagggagcccaccgtggtgtgcaggaagcgcagcccctcggtctccagggccggccgcgcggacagagactcctcttggcgttccatga

SEQ ID NO: 437605 - DNA, 1287 bp, Homo Sapiens
  misc_feature (251)..(251): n is a, c, g, or t
  misc_feature (521)..(521): n is a, c, g, or t
  misc_feature (527)..(562): n is a, c, g, or t
cagcatctggtcttgtttccaggagcatagaagccacatcgttgagacatcaggaaggtaaaaacccagcggcttagtcaagccctaagcctgtccccagaccaaccctgggacctatacagaacagagggccagagctagggctgctgcttctgctccagcccctttgcctctgtcctcccatcccctcaacaccctgcttctcccggggacgcttttgagtgggccctgcccggggagctgcagagcanagacacctttctctgagaagaggtccttggttgggtcaaggacagggctgagcgtggaagggggaggagtcaggggctctgtgttaggatgcggctttctctgcctctgggcagcctgctttggcctttccttgtatgtgggtgtttattacaagtggctttgtgtcagacacgctcggctccccacctggacacacactcaccagtggcctttcagtgtagcgggaggaagccggtgtccctggatgtgaagctcacactgatgggctngtggcnnnnnnnnnnnnnnnnnnnnnnnnnnnnnnnnnnnnacagagctgaggatttcctggagtgccctgcaggcacagaggaggtcagcaaaggtcttgaatagattttctctggaaataaagaatccttagatgcctaaaaattcccttcctgttccctcctggtcctggacacctcccaggggactgttccttatttctctctcctggtgtgggtaaagggacagttacaaaccaggtcaccatcctcagaggctgagccctgtacccaccccagcacagccacctccggcagaccccgtggctctgggagagccagctttgctattcccattgtgacagcgatggcaggcctgacccacggggcagttagagcagcctcgtggagctcggccgtccccttcaggcattgaccaagctattccctgacatccttgaggccaggtgggccacacgaggccttgcagaagattacctcatcatccaaccacgatagcaccctaggccggtcacttgatcgacaagcatcggggggccatgaataatctagtggccgcaaactggacttattgtcgcgaggaatggagtcgacagatggacatgaaaggccaggtagataacatggctcggttatggtgaagacgagtggtcatcagcatggtgatgctcaagtttgagagtcaaccaacacagagccattctttgtggacgatatcaccccagagattggtggcgagtgacacaatattggcactcagccagtg

SEQ ID NO: 437606 - DNA, 314 bp, Homo Sapiens
  misc_feature (252)..(252): n is a, c, g, or t
ctcctgtcccgtccttccaaaaacaagcatcactgcacaaggctctctgaagacacagagcttcttcactgtaaaaagctaaatagcacgaaaacttaatttaaacaagaccctctcaagaatttgtttggcttaaagctactaaaatgccattctgttggctcatattttcatttatgtaagatgagtgtcatgccaaagtggattttatttgccatagaagtcaggcaaatatagagaaaatacattttngaaaataaagtgacatgtggcacatttgaatcctatgttctgcatttagaaatgtactcatg

SEQ ID NO: 437607 - DNA, 797 bp, Homo Sapiens
  misc_feature (48)..(48): n is a, c, g, or t
  misc_feature (93)..(93): n is a, c, g, or t
ccggcccaaaacagcctccccttccctgggttatctcaaagatccccngttgtcggcgtggtcccaagccactggaaacacgtggcccaagantctgcttgccccttgctgtgtctttacacatctcccggcccttactgatgtgtggaccgcatgtggaggagacatgagtggcgacagcaagcagcaggccgggtggaaagccggaaggggagaaggtcaaccccttttctgccctgtgaattctagcaactgtcggttggaagtcacttcattgtctcacccaggccggagaccacaatttccctggaaggacacagcccatggcaaagacatgcttcgagaagggatgagttggacaatgccagtaagaagccaggctgtccagaaaagctggtgcccaagttgctacaaagtggtgcctgcccttgccaaggaggctgtctcttagtcgccttgggtgtcctacaagtttcctccgaaaatgccaagaggaaacctccactttctggggtgaaacgaggaacacgaagagacccatggaggtcgaggcaggggcagcgttgagctttggtgagttattgctttctttcaatttgtcttgatgccttcgagaggctggaggtcatttggactcacctatgaggaatctccgctccctgcccgaagccccgcctctgtgctatgcgagtgactgcaagcaggaagctggcccaggaaggcaggcgtgagggggcccagctcctgcgggtgctccctggagtgatgtctgaggtgacggccatccaagctggtga

SEQ ID NO: 437608 - DNA, 630 bp, Homo Sapiens
attgctttcttcttttattcggaagcagacacagggtgggaggcagtgcgacacctcctggtgagaaccaggataacagcagtcagagtcagggacaccaccacagccaggcctacgcccagcagcaccactgaggtgtcagaaggcaaagcccactgctctacttcatggtcacccctcctgtccaggaagatcagtggccccacggtgacatctgcttcttctgtcacatgcctgcggttacagggaagcagacgtggaccactggctcacgacacgaggctgcctcctggaatggcttggagtgccacagtcacctttgttacagcattgacagatgtcagccaggccttccactgggaaccagctgttggaaggcttgctgaaggaacaggccttgttgagttcatctgggtcctgctcagctagggtgaccttcaggtggcaggtgatgtatatcatgtttctggagtcattagcaaagtggaagacatccactgtgaactggagtgtatctggcccgggtcgaggaactttgaatgcagaagaggcatcagtgagaccgtcgacaagacagccatggaagtccacgatggtgtgataaggggaggcattctggtctggtgtcgg

SEQ ID NO: 437609 - DNA, 814 bp, Homo Sapiens
taaccctattctattcatcacctattcttttcccacagatgactttattatacatcccttgtcttccatgttgggccttacttgtcattcattttccacatatttcccaagcatcttctttgtctcaggtctctgtgcccagtgtccaggtctatagttttacatggagtcttgggcccagctctcctggcatctgtgtgatgtgttctgcttttctctgtgacttttttggtctggtacgttccatgggctgagtctcataggagtggtctcggtggcaggcccagggcactcagccctccttccctagactggccccgccaccccacttatgattccctggggccatgtcaaggctcatgttgcactatgctgccctggtggccagtgcctctcctctaatcagattagatgtgtattcaaacaaattgatgatccgttccattagatgcttttcaaacacgcttctctgagcaagaaatccattcaggaacagctgcggaggccacggcgtaattgatgattgcaccatcccaggctcccaacgtcagaaggtgcctggttcctgaaggtcactggcgaggattagacgaaggagggcaagagtcttctttcccggctaatgaagcgcttggcatgcaggcagcaccggggccagagctgggccaggcatctgcagtagttctcaaagatcgctcaggcgccagtctgctgcacagaattctgttgtttggagggacaatcgtttctttaagcagtgccctcttgataggcattcaggccatcccataatctcccggggcggtaccagcca

SEQ ID NO: 437610 - DNA, 1345 bp, Homo Sapiens
  misc_feature (12)..(12): n is a, c, g, or t
  misc_feature (67)..(67): n is a, c, g, or t
  misc_feature (161)..(251): n is a, c, g, or t
  misc_feature (630)..(630): n is a, c, g, or t
  misc_feature (677)..(677): n is a, c, g, or t
  misc_feature (909)..(959): n is a, c, g, or t
  misc_feature (1003)..(1003): n is a, c, g, or t
  misc_feature (1006)..(1006): n is a, c, g, or t
  misc_feature (1051)..(1051): n is a, c, g, or t
  misc_feature (1057)..(1057): n is a, c, g, or t
  misc_feature (1068)..(1068): n is a, c, g, or t
  misc_feature (1076)..(1076): n is a, c, g, or t
  misc_feature (1142)..(1143): n is a, c, g, or t
  misc_feature (1153)..(1153): n is a, c, g, or t
  misc_feature (1167)..(1167): n is a, c, g, or t
  misc_feature (1171)..(1171): n is a, c, g, or t
  misc_feature (1187)..(1187): n is a, c, g, or t
  misc_feature (1198)..(1198): n is a, c, g, or t
  misc_feature (1201)..(1202): n is a, c, g, or t
  misc_feature (1204)..(1204): n is a, c, g, or t
  misc_feature (1225)..(1225): n is a, c, g, or t
  misc_feature (1242)..(1242): n is a, c, g, or t
  misc_feature (1250)..(1250): n is a, c, g, or t
  misc_feature (1254)..(1254): n is a, c, g, or t
  misc_feature (1279)..(1279): n is a, c, g, or t
  misc_feature (1310)..(1310): n is a, c, g, or t
ggcagaggaagnaagatcttcagagaacccatcactgtgagggataacgcaaaattatgcatctttntacagccattctcgccacccgttcacgtttccgattgtgacccactcccgccaccccatacccctctctcttagctcaggctgtcaactggctnnnnnnnnnnnnnnnnnnnnnnnnnnnnnnnnnnnnnnnnnnnnnnnnnnnnnnnnnnnnnnnnnnnnnnnnnnnnnnnnnnnnnnnnnnnaagggactcagccgtcctcccgcccccaaaacccccatgtccactgtccccaaccctattgcctctcacctctggctggaggtaggtatgaggctctgcagtggaagctgtgaagagaggcttaccaggctccctgcttcccccaatatatgcacgcacactaccccttccccctgtcgaaagggcaactcctggcaggttgggagtggggaggggcatcgcactcacctgtcaagctgtcattcagcctttgtgagtaagtgggggacctccatctaggctctgggcttccctgctgtcaaccaccagcttcctgtagccagaggccccatcgctggctcagtggcctgagaccttcccacttttcctgtccctccancaccctggattttctggccccctcctgggccaatgggtgcttccatnccaactgtcagactggtggcaggagtcacctgtctgtttcagtgctttgccctacccttgccaccactccccttggccttgatttccccacctgcggcaccagccagctgcccttggggcctttgcagctggcccacaggtgtgagcttgctggtctatcacttcctggcctctccaccaactgtacctcccaaaggctacctgaccgccctcacagacactcagacgcacnnnnnnnnnnnnnnnnnnnnnnnnnnnnnnnnnnnnnnnnnnnnnnnnnnncagcgactgtgaccagcaatagccccctggctccagctgtccgntanctggtgactagctgtatttccccctgcgtacccatctgctgtcangaaggnaccctgagagnccgcagcntcagctctgactgtaggaacactccaccctggtaacaccacaccacacaaagtgggggacagaganncaacacacanacaacacaaaaccnaaanaaagaaaaccatgtcnccaactcctantcnnangagaccctctttataaacacncaccccaaaccacaccncccagagnctgntggcagaaaaggagagggcaaggcncagtgactgtacctcagatcggggtcatggnccccatcccacattgtcttccattccacaagatcc

SEQ ID NO: 437611 - DNA, 319 bp, Homo Sapiens
  misc_feature (25)..(25): n is a, c, g, or t
  misc_feature (37)..(37): n is a, c, g, or t
  misc_feature (209)..(237): n is a, c, g, or t
attctggggctggttgcccaccagntgcccatagaancggccgcacatggggcaggcctttttcacctgcagagcccgggtgatgcagccctcgcagaatgaatgccggcacttctccaatgtcttggcattctggatctcccccagacagatggggcaggtgctctcctgctcttctgcctcctcccgaaggcgaggaggaagaggtnnnnnnnnnnnnnnnnnnnnnnnnnnnnncccccgagctcctgggggcagaagtggggctgctcggagagggggtgggcctgcgcggtgcatctcagggtgctcccctcca

SEQ ID NO: 437612 - DNA, 816 bp, Homo Sapiens
  misc_feature (144)..(170): n is a, c, g, or t
acctgcagagcccgggtgatgcagccctcgcagaatgaatgccggcacttctccaatgtcttggcattctggatctcccccagacagatggggcaggtgctctcctgctcttctgcctcctcccgaagcgaggaggaagaggtnnnnnnnnnnnnnnnnnnnnnnnnnnnagccccgaggctcctgggggcagaagtggggctgctcggagagggggtgggcctgcgcggtgcatctcagggtgctcccctccaccccccagagccaggcagcccatcagctccccctgcctctgagctttcttcagctctttctctgcctcttttagcagccccttgagagccttccgggctaggtagagcccatttggaggggccgggggaggaccctgtggggaaaagctggagaacatagatgtcagaagtcttcgccatctatgaggatggacacacggtgctcctcccgaagccgggccagccgggttggggtctctttgttcaggaagtcccacacgggcttggacacagtcactttgtttttgcaggtgccttcacaggttgccatttttgatcctgaagagcttagaattggcatgcaggctcactcttctttccctgctccctacttgtaggtcgtgtgacctggaaagcccatggaagatgatggcagcagaaatccttctatttccactcagctgacccaggaacaagggctcagctggaggggcctgatgttttccctgagtctggtcgcattgggctacggggctgtctccacaacacttccaaatgcagctctcgtcagcgccgccattgc

SEQ ID NO: 437613 - DNA, 942 bp, Homo Sapiens
  misc_feature (130)..(191): n is a, c, g, or t
  misc_feature (840)..(876): n is a, c, g, or t
acctgcagagcccgggtgatgcagccctcgcagaatgaatgccggcacttctccaatgtcttggcattctggatctcccccagacagatggggcaggtgctctcctgctcttctgcctcctcccgaaggnnnnnnnnnnnnnnnnnnnnnnnnnnnnnnnnnnnnnnnnnnnnnnnnnnnnnnnnnnnnnncagaagtggggctgttcggagaggggttgggccctgcgcgtgcatctcagggtgctcccctccaccccccagagccaggcagcccatcagctccccctgcctctgagctttcttcagctctttctctgcctcttttagcagccccttgagagccttccgggctaggtagagcccatttggaggggccgggggaggaaccctgtggggaaagctggagaacatagatgtcagaagtctcgccatctatgaggatggacacacggtgctcctcccgaagccgggccagccgggctggggtctctttgctcaggaagtcccacacgggcttggacacagtcactttgttcttgcaggtgcctccacaggctgccattctggacaggacgaacgacatttgatcctgaagagcttagaattggcatgcaggctcactcttctttccctgctccctacttgtaggtcgtgtgacctggaaagcccatggaagatgatggcagcagaaatccttctatttccactcagctgaccaggacttcctcctttcttccccagctctgaggcccccaagaaagcctctcgtcagcgccgccattgccggtcacattactccgctctcgacgaattcgagctcggccgatttggcctgatnnnnnnnnnnnnnnnnnnnnnnnnnnnnnnnnnnnnncggccgccaccgcgttgagctccagttcgccctataggagtctatacatcaccacagagccccctt

SEQ ID NO: 437614 - DNA, 1265 bp, Homo Sapiens
  misc_feature (15)..(15): n is a, c, g, or t
  misc_feature (35)..(35): n is a, c, g, or t
  misc_feature (1042)..(1148): n is a, c, g, or t
gttgctcccttctcnaaaaccggggccaaccgggnctggggtctctttgctcaggaagtcccaacacgggcttggaacaaagtcactttgttcttgcaggtgcctccaacaggctgccattctggacaggacgaacgacatttgatcctgaagagcttagaattggcatgcaggctcactcttctttccctgctccctacttgtaggtcgtgtgacctggaaagcccatggaagatgatggcagcagaaatccttctatttccactcagctgaccaggacttttaaacccagcacaggcagtgctgtctgtcagctcccaagtctggcatttagggaggggcggggctcacacaagggctcagctggaggggcctgatgttttccctgagtctggtcgcattgggctacggggctgtctccacaacacttccaaatgcagctcaaacagaaagaaagggccctttagtgtgaccttccctttattggctgatccaagaaggagcagctgtcccttcatgcctccatcatcgtcccccaaggccagatgcacctcgagattcataagtgaaaatggaaccctagagtctcagcccatacagtctatccgcgatgcaacacttctctccccatcacgggggacccaggacctaggtgtcctaggtccaagtcctgctggcacagaaaagggaggcggggccccagtttaggcgtgggtctgtgattcctctgtggcaacccaggccggacaaggaaccagtctctccctccagacagaggccagagggaggcacagcccggatgggcaagggtccctgggggcatccactgaagcagctcccgccctccccccacggcctcctccaagacccgacccggaaccaactccccacatccctcagtagccaaagcccccggatccccaccgccgggtgggggtgcatgtcggcccgatcgcagccctcagaacccccgaatggaggccaaggctggagggtgctagaaagatgatcggccgggcacggagcggggagcccggagccnnnnnnnnnnnnnnnnnnnnnnnnnnnnnnnnnnnnnnnnnnnnnnnnnnnnnnnnnnnnnnnnnnnnnnnnnnnnnnnnnnnnnnnnnnnnnnnnnnnnnnnnnnntcacctacctctcgtcagcgccgccattgccggtcacatgactgaggctgttgctgggatgacggtccggaccttagcaacaaggagggggatcccgaaaattccggaccggtccac

SEQ ID NO: 437615 - DNA, 961 bp, Homo Sapiens
  misc_feature (878)..(878): n is a, c, g, or t
  misc_feature (917)..(917): n is a, c, g, or t
caagacgcaggcgcaaccacggctgctgcggggatccttgtggcccttccggtcgatggaaccaatccgtgcacagagaagcggggcgaactgaggcgagtgaagtggactctgagggctaccgctaccgccactgctgcggcaggggcgtggagggcagagggccgcggaggccgcagttgcaaacatggctcagagcagagacggcggaaacccgttcgccgagcccagcgagcttgacaacccctttcagccaccaccagcctatgagcctccagcccctgccccattgcctccaccctcagctccctccttgcagccctcgagaaagctcagccccacagaacctaagaactatggctcatacagcactcaggcctcagctgcagcagccacagctgagctgctgaagaaacaggaggagctcaaccggaaggcagaggagttggaccgaagggagcgagagctgcagcatgctgccctggggggcacagctactcgacagaacaattggccccctctaccttctttttgtccagttcagccctgctttttccaggacatctccatggagatcccccaagaatttcagaagactgtatccaccatgtactacctctggatgtgcagcacgctggctcttctcctgaacttcctcgcctgcctggccagcttctgtgtggaaaccaacaatggcgcaggctttgggctttctatcctctgggtcctccttttcactccctgctcctttgtctgctggtaccgccccatgtataagggctttccggaagtgacacgttcattcactttctttcgttttcttcttcattttcttcgtcccggatgtgctctttgtcctccaggccattggtatcccnaggttgggggattcagtgggctggatctcctgctctggntggtgcccgaaagggcaacacaggccagttcccgggcctcatgt

SEQ ID NO: 437616 - DNA, 840 bp, Homo Sapiens
gggaattggaaaaaaggaaggaaccccaggaggattagaaaggccccaaaggcctggggcccattggtcggtttcgcacaccagaagctggcccaaggcaggcgaggaagttcaggagaagagccagcgtgctgcacatccagaggtagtacatggtggatacagtcttctgaaattcttggggaatctcccatgggagatgtcctgggaaaaagcaggggctgaactggacaaaaagaaggtagagggggcccatttgttctgtcgagtagctgtgccccccagggcagcatgctgcagctctcgctcccttcggtccaactcctctgccttccggttgagctcctcctgtttcttcagcagctcagctgtggctgctgcagctgaggcctgagtgctgtatgagccatagttcttaggttctgtggggctgagctttctcgagggctgcaaggagggagctgagggtggaggcaatggggcaggggctggaggctcataggctggtggtggctcccgggtctcaaaagggttgtagacgtcaagcgtggcatactgccggctgggtcggtgctggatcacagctgggtcctgaaaggggttgtcaagctcgctgggctcggcgaacgggtttccgccgtctctgctctgagccatgtttgcaactgcggcctccgcggccctctgccctccacgcccctgccgcagcagtggcggtagcggtagccctcagagtccacttcactcgcctcagttcgccccgcttctctgtgcacggattggttccaccgaccggaagggccacaaggatccccgcagcagccagtgggttgcgcctgc

SEQ ID NO: 437617 - DNA, 1563 bp, Homo Sapiens
ttttttcagttccagttccactttctttttatttaaataaccgaagcaacagccgtggcacagcagagggaagctgggttggggcgtgtgagaggtggcagcagtgtggcctgatggggggactaggtcacagtgaactccccacacgcctgtcaggttcagcagtcatggccataggattgggagcactacggaggagccatcagttagtgatgtctctccaagtcccagagaccttagggacgggagctaagtcagctccctcaagtagcagggccagggcatcccagtcaggggtcacggggcccggaaggcattttcagcagccccagcggctgcattggcagctgcggttcgcaccgcagggttggagaagacaccagcagcaaattcttgctgggccttctgaaagctggcacctgtgcggcggtataaggagtggatccgtttcagcatgacaattcctagcacagcaatgccagtgaagagcagggcgaccagcagcatgagcacggatactgctgtgttgcccttcggcaccaccagagcagagatccagccactgaatccccaacctgggataccaatggcctggaggacaaagagcacatcctggacgaagaaaatgaagaagaaaacgaagaaattgaatgaactgtcactccggaaagccttatacatggggcggtaccagcagacaaaggagcagggagtgaaaaggaggacccagaggatagaaagcccaaagcctgcgccattgttggtttccacacagaagctggccaggcaggcgaggaagttcaggagaagagccagcgtgctgcacatccagaggtagtacatggtggatacagtcttctgaaattcttgggggatctccatggagatgtcctggaaaaagcagggctgaactggacaaaaagaaggtagagggggccaattgttctgtcgagtagctgtgcctcccagggcagcatgctgcagctctcgctcccttcggtccaactcctctgccttccggttgagctcctcctgtttcttcagcagctcagctgtggctgctgcagctgaggcctgagtgctgtatgagccatagttcttaggttctgtggggctgagctttctcgagggctgcaaggagggagctgagggtggaggcaatggggcaggggctggaggctcataggctggtggtggctcccgggtctcaaaagggttgtagacgtcaagcgtggcatactgccggctgggtcggtgctggatcacagctgggtcctgaaaggggttgtcaagctcgctgggctcggcgaacgggtttccgccgtctctgctctgagccatgtttgcaactgcggcctccgcggccctctgccctccacgcccctgccgcagcagtggcggtagcggtagccctcagagtccacttcactcgcctcagttcgccccgcttctctgtgcacggattggttccatcgaccggaagggccacaaggatccccgcagcagccgtgggttgcgcctgcgtcttgtccaaaagctaagacgaaagtgcccccacgtgat

SEQ ID NO: 437618 - DNA, 1067 bp, Homo Sapiens
  misc_feature (103)..(141): n is a, c, g, or t
gggccccgcgccggagggcaaagagttccagagccgggagaattccccacaagcggggggaattcccaattggccctggaagggaccaagggggcccattccnnnnnnnnnnnnnnnnnnnnnnnnnnnnnnnnnnnnnnnttcggatgaggctgtcccttccgggaaagcccttataccatgggggcggtcccagccaggtcaagggggccgggaggggaaaagggaggaccccgagggatagaaaagccccaaaagcctgcaccattgtgggtttcccacacaggaagctggcccagggcaggcgaggaagttcaggaggaagagccagcgtggtgcacatccagaggtagtgcatgggtggatacagtcttctgaaaattcgggggggatctcccatggagatgtcctggaaaaagcagggctgaactggacaaaaaagaaggtagagggggccaattgttctgtcgagtagctgtgcctcccagggcagcatgctgcagctctcgctcctttcggtgcaactcctatgccttccggttgagctcctcctgtttcttcagcagctcagctgtggctgctgcagctgaggcctgagtgctgtatgagccatagttcttaggttctgtggggctgagctttctcgagggctgcaaggagggagctgagggtggaggcaatggggcaggggctggaggctcataggctggtggtggctgaaaggggttgtcaagctcgctgggctcggcgaacgggtttccgccgtctctgctgtgagccatgtttgcaactgcggcctccgcggccctctgccctccacgcccctgccgcatcagtggcggtagcggtagccctcagagtccacttcactcgcctcagttcgccccgcttctctgtgcacggattggttccatcgaccggaagggccacaaggatccccgcagcagccgtgggttgcgcctgcgtcttgtccaaaagctaagacgaaagtgcccccacgtgatcctctaacccagtgcccacaaccaactaccgcccctcttccatggacttccatcccgggaatt

SEQ ID NO: 437619 - DNA, 3340 bp, Homo Sapiens
  misc_feature (806)..(815): n is a, c, g, or t
  misc_feature (1569)..(1569): n is a, c, g, or t
gtctcagatatgctgcagggactagtcttgtttttagtgagtctctatttattaaaaaaatagatgaagtaagggtgaggtcttttttgtcttttagcagtttttcttttgggccaagtccatgataaaaaaccaccatgcaaacagcaaataattctttctaaactggccccatttctgaattaaaaggcttcattcctctttaacccaacagatcttgccattttctccaagctgtacagttccactggccaccagctgaagggctgcaggaaatattttatgttctgctaattttactctttcagaaagagttgcgacagtatcacccctcttcacgggaacagcttcttgcaaaataatctgtccagcatccacatcttcagctacaaagtgtacagtgcacccagtaactgtgactccggtttccagggcttgctcatgggcatttgaacccttaaaagaagggagcaaggatgggtggatattgagcatttttccattccacttttggacaaaggggccagaaagaattctcatgaatcctgcaagacagactatgtctatggagaactcttcaaggactaggtcaattgcactgtcaaattctacacgatttttatacagtttatgattaattactctagtgggaataccagctctttccgctttatctaacccagctactgcggctttgttggagataacaatatcaatttgtgcagagctatttggttcccgagtactgtctataagtgcttgcaggttcgatcctgttccagatattaagacagccactctggccnnnnnnnnnncaaaagagaaatgatttgtcagggagccattcttcaacactgacccatttatttgcatgctttcaatcagattcttgactttcacacgtggggaaccttcagctcgtgcaaccacactgccaatcacccaggcttcttccttgtgctgctggatacccctcagaatctgctctgtctgctcctttgataccacaaggacagcgccaaccccacagttaaatgttctggccatctcttcctcagagaggtgtccttcctgctgcaaccatgagaagaccctggggatcctccaggtctgggcatctaaatctaccccaagtttctcagggaggactctggggatgttctctagtaatcctccaccagtaatatgggcaaaggctttgacatgtcctgaacgtaggacaggtaacagtgaatggctgtagattctggtaggcgtgagaagtaagtcccctaaagtctggtcaccacaaccatcaggtgctggagaggagtactggagggaagattttgccacgattttcctcacaaggctaaatccattgctatgaagaccagatgaagctattccaacaacaacatcaccctcagtgattctttccaggtgagggagtttctgatctcgctccatggcaccaacggcaaacccagctaggtcatactcttcagggggatacatgtcaggcatttctgctgtttcaccttcaaggagagcacatccagcttttccacaagctttagcaattccagncaacaacagcttcagttaacactgaggtccaagttttccacaggaaaagtaatcaaggaaagcaagaggggctctgctccttgtgccagaatatcattaacacacattgctaccaaatcttgaccaatggtatcatgtttattgcatagctgggcaatctttagtttagttccaacgccatctgttccagaggccagaaggggatctttgaaaccagctgcttttaaatcaaaaagaccagcaaaacctccaagatcaactttacagcctgatctggaagtggcttttgctaaaggctgaattttcttgaccagcatatttccagctgcgatatctactccagattccttgtaagtcaaactccctgggctgctggaggaaagctatggccacgaaagccgaatgtctttcctataaattgctccctcaaactttaatagcagctagtcctttcttggcttcctcaagggctgatatgagattttcccggatggctgtgactgcaagaactctacccccatgagttactactttgccatttttgaagggcagtgcctgcatggaacacctccagtcctagagcttgagcctcaggaaaccctgttatctctacacccttggtgtagtctccaggataacctttacttgccatgacaacagttagggcggtgtggttttctagccaaacaggcagagatgtgcagagcagtccatctaaggtggactgaatcacttcataaagatcacttttaagaagtgggaggattacttggcactctggatcaccaaaacggcaattaaactctagaacttttgggccattcttggtcagcattattccagcatagagaatacctgtatatggagtaccctcttgctgcatgccatccactgtcctctgaagaacagtatctttaatttttagtaatagatcattagaaacctgaggggctggacaataggctcccattccccctgtgttagggccaccatctccctccagtaatcgcttatggtcctgtgctgggggcatgggggccacagtcttgccatcagtgaaacacagacacgacacctcttctccgtcaagaagttcttcaatgacaattgtttctccagctgccccaaaggctttctcctgcatgatctcttgtacagctttgcaggcctcttctttgctctttgcaacaatcacccctttttccagctgcaagaccactggccttcacaaccaaagcagggaagtctgcactcaaaatgaagctgcaggcttcttcaggtttggtgaaagccttccattgtgcggttgggattccatgtctgtccataaactctttggcaaaccttttgctggactctaactgagccgcttctgctgttgggccaaagcattgcactcctgcagacctcaggttcccaacaatcccagcagccagaggtgcttctggtccaacaactacaaattcaattttcttctctttgcagaattgagcaagggcagtgtggtcactgattgagatggcggtatttgaaatcttttcagagcaggcagtgcctgcgtttcctggggcaaccaacacttgtttgacatgatgagactgtgcaagtttccaggccagcgtatgttcccttcctccactgccaattataagtactcgggctgccattgttctgtctgtaaagcagaaattccaaaggaaaatgaaaccgacaccgggtggccacctggttcccgcttgcccgctcgccggaagtcggcccaccgggaccg

SEQ ID NO: 437620 - DNA, 988 bp, Homo Sapiens
gctgtaattataaaatatattggcttttgttttcaatgtgaaagatacattaaatggacacatatcttgcaaaattttgttgtatagaacagtttttaggcagcctttactaaagttatgcaaacacacagttccccatttactacattaatgcccttgacagggagtagctgcttggttttataggtattagggctcatgaaggccggggaacaactctaatccttttggggcaggagggagggtttttttagggttgcggggagggaactgcaagtgcctgaggaccagagtggcctctagccccgaattgaacacttttaaacctaaagagccttattattattagctcgagaaataccacatgccagtcttcccaggaaggtgacctgcctgaccatgaagcaacaaaagagcataggcagacttaaagttggatagacctgggttcaaatcatagttcagctttcaataactgtatgtatgattttggctaaaggatttgactttctctcaactgcagttttcttaatctttgaaatgcaaataatgtttatctcagaagactatttctaggattaactgagagattaaaggaacagcagcacttaggctcaaaatcgcccctacaaagcagtagttgtttcttaattgctaagtaatctgtttgcactctaggaaaagtaaatggagaggtaaaagaaaggcattggggacaaatgaaagagatgatgtagatttttcggatgggtgggtatattttattttcccagtttattttcatatttctttactgtgttatttctggaaactttaatgttttaaacctcttttataaaattcaatgacgactactagaattctattcttttcaaaagttaacttatctccaaagtggctgaaaatattgtttaccattacatgattatgaaatgactgtgaagaatataaaattaaacttagtgacttaattagtcactgccttgct

SEQ ID NO: 437621 - DNA, 1073 bp, Homo Sapiens
ttttttaggaaagacccttttattggggtggacacggagcacgcactagtccatgataaaaataaaatgactcaagagaaagatcccaagggccgacttctccccaacgtgcgtgcacgctgagtgaggtctgggcatgggaaagttccgggcgaagcgtgggacaagaccgagtctcaatggcctggaccggtgttgggggggagaaggccactcggctgtcctggtaggtcaggccaccccgggcctgcccctgtcgcccggccacagtaaagcccccgctagagactctcacagacacactctggttctctggagaactgggggcaggaatcggggaactggcccgatggaaggcgggggtcggggggacaatgttgttttttttaaaaagcatctaccaacatcacactactgggtctgatgtcccctttaaccaacgcttgatacaggttacagcataaataaaaactcaaggaaaataaatacatcggctcctatgaggttggaagtggtgtggacgcagggtgtggatgggccggcagggaggcgggcgggcggggtgcttacacatggcgggcaggcgggtgggcgaccgaggagcagacctggcaggaggcgcctgtggagttgagagtcttaagtgtcctcgtgcatgtctgggctgtcggtccgcgccaccttgcggggaggtgcggagctctcgccttccagctccacttgctcctggtctctcttcttggcagcgttctttttgtcccattgctgatgcaggtagcgcaggaggatgtttgtcttttctgtcacgatgatctgttcagacgggtactcgcgggtaggcaggtagactgagggccgtcggttcgaggctttgcacacggagtccgcgtgaaatcgactaaaattgcttttgttgtagacaggcagtcctttcaaaaaatctgccatcttctgtttcctccgtcgccgcctcggccgccgcctcagcctccaccgccgccaccagagccgccttcttagccgccgcctcacagtaacttccagccaccctcgtgccgaattcgccacccagc

SEQ ID NO: 437622 - DNA, 460 bp, Homo Sapiens
attacaggtctacggtctcgaacttgtggggaatgtaaaagggatataagacataaagcaaggagcccagacgccggctttctgcagccagatcgtagttacatctgacttggtctgattaagctatctgacttttgcagagaacattcacaggaaagacacattcacagggaagacacattccctttcccaggaatgtgccgccgcccgatttttaagttagaagactctaagggaagtccggaccgctgcctactttccgagtggggctcacaagcggaatagagtcgggggcacacgcagagtggagctggctctgccacctaatttttagaggtggaggaagatattagaaacaaggccagggccgccacctgctttctaaggaggaactcggggcacaggttcattcccagggcccccacctgcctcccgccaaggcgcttgaggcgaagcacca

SEQ ID NO: 437623 - DNA, 4353 bp, Homo Sapiens
  misc_feature (193)..(193): n is a, c, g, or t
  misc_feature (243)..(243): n is a, c, g, or t
  misc_feature (322)..(322): n is a, c, g, or t
  misc_feature (342)..(342): n is a, c, g, or t
  misc_feature (385)..(385): n is a, c, g, or t
  misc_feature (419)..(419): n is a, c, g, or t
  misc_feature (477)..(477): n is a, c, g, or t
  misc_feature (482)..(482): n is a, c, g, or t
  misc_feature (492)..(492): n is a, c, g, or t
tctcttttctctttgtgaactgtgattatttgttaccccttccccttctcgttcgttttaaatttcaccttttttctgagtctggcctcctttctgctgtttctactttttatctcacatttctcatttctgcatttcctttctgcctctcttgggctattctctctctcctcccctgcgtgcctcagcatcncttgctgtttgtgattttctatttcagtattaatctctgttggcttgtanttgttctctgcttcttccctttctactcacctttgagtatttcagcctcttcatgaatctatctccctctctttgattncatgtaatctctccttaaanatttctttgcatatgtgggcaagtgtacgtgtgtgtgtgtcangtgtggcagaggggcttcctaacccctgcctganaggtgcagaacgtcggctatcagagcaagcattgtggagcggttccttatgccaggcngccangtgagatganccaagaccaaaacaaggccctagactgcagtaaaacccagaactcaagtagggcagaaggtggaaggctcatatggatagaaggcccaaagtataagacagatggtttgagacttgagacccgaggactaagatggaaagcccatgttccaagatagatagaagcctcaggcctgaaaccaacaaaagcctcaagagccacgaaaacagagggtggcctgaattggaccgaaggtcctgagttggatggaagtctcaaggcttgagttagaagtcttaagacctgggacaggacacatggaaggcctaagaactgagacttgtgacacaaggccaacgacctaagattagcccagggttgtagctggaagacctacaacccaaggatggaaggcccctgtcacaaagcctacctagatggatagaggacccaagcgaaaaaggtatctcaagactaacggccggaatctggaggcccatgacccagaacccaggaaggatagaagcttgaagacctggggaaatcccaagatgagaaccctaaaccctacctcttttctattgtttacacttcttactcttagatatttccagttctcctgtttatctttaagcctgattcttttgagatgtactttttgatgttgccggttacctttagattgacagtattatgcctgggccagtcttgagccagctttaaatcacagcttttacctatttgttaggctatagtgttttgtaaacttctgtttctattcacatcttctccacttgagagagacaccaaaatccagtcagtatctaatctggcttttgttaacttccctcaggagcagacattcatataggtgatactgtatttcagtcctttcttttgaccccagaagccctagactgagaagataaaatggtcaggttgttggggaaaaaaaagtgccaggctctctagagaaaaatgtgaagagatgctccaggccaatgagaagaattagacaagaaatacacagatgtgccagacttctgagaagcacctgccagcaacagcttccttctttgagcttaggtgagcaggattctggggtttgggatttctagtgatggttatggaaagggtgactgtgcctgggacaaagcgaggtcccaaggggacagcctgaactccctgctcatagtagtggccaaataatttggtggactgtgccaacgctactcctgggtttaatacccatctctaggcttaaagatgagagaacctgggactgttgagcatgtttaatactttccttgatttttttcttcctgtttatgtgggaagttgatttaaatgactgataatgtgtatgaaagcactgtaaaacataagagaaaaaccaattagtgtattggcaatcatgcagttaacatttgaaagtgcagtgtaaattgtgaagcattatgtaaatcaggggtccacagtttttctgtaaggggtcaaatcataaatactttagactgtgggccatatggtttctgttacatatttgttttttaaacaacgtttttataaggtcaaaatcattcttagtttttgagccaattggatttggcctgctgttcatagcttaccaccccctgatgtattatttgttattcagagaaaatttctgaatactactagtttccttttctgtgcctgtccctgtgctaggcactaaaaatgcaatgattattgatatctaggtgacctgaaaaaaaatagtgaatgtgctttgtaaactgtaaagcacttgtattctactgtgataagcgttgtggatacaaagaaaggagcaagcataaaaaagtgctctttcaaaaggatatagtactatgcagacacaaggaattgtttgataaatgaataaattatatgtatatttgaggccaatttgtgtttgctgctctggtaattttgagtaaaaatgcagtattccaggtatcagaaacgaaaacacatggaaactgcttttaaactttaaaatatactgaaaacataagggactaagcttgttgtggtcacctataatgtgccagataccatgctgggtgctagagctaccaaagggggaaaagtattctcatagaacaaaaaatttcagaaaggtgcatattaaagtgctttgtaaactaaagcatgatacaaatgtcaatgggctacatatttatgaatgaatgaatggatgaatgaatattaagtgcctcttacataccagctattttgggtactgtaaaatacaagattaattctcctatgtaataagaggaaagtttatcctctatactattcagatgtaaggaatgatatattgcttaattttaaacaatcaagactttactggtgaggttaagttaaattattactgatacatttttccaggtaaccaggaaagagctagtatgaggaaatgaagtaatagatgtgagatccagaccgaaagtcacttaattcagcttgcgaatgtgctttctaaattataaagcacttgtaaatgaaaaatttgatgctttctgtatgaataaaactttctgtaagctaggtattgtctctacaaaattctcattgtatagttaaaccacagtgagaagggttctataagtagttatacaaaccaagggtttaaatacctgttaaatagatcaattttgattgcctactatgtgaactcactgttaaaggcactgaaaatttatcatatttcatttagccacagccaaaaataaggcaatacctatgttagcattttgtgaactctaaggcaccatataaatgtaactgttgattttctcacttggtgctgggtactaggtttataaaattgtatgatagttattatattgtgcaaataaagtaggaaaatttgaataacaatgattatcttttgaatacgcatacgcaagggattggttgtctgaagaatgccactatagtagttatctattgtgtgccaatctcattgctaggcattggggatgcaaagataaaccatctttattgtgtcttgggtagcagaagaaaatatgtgtaaaatcaatttataatttgtaaactgccacccatatataagctatatctgctgaatgatcattgattactcttatccttagagataacaactgggggcacaaacatttattatcattattgaacctacaacagagatctatgtgtagatttacgaagcctacagttctatacagataggaatgaactattggcttactgaatggtgattactttctgtggggctcggaactacatgccctaggatataaaaatgatgttatcattatagagtgctcacagaaggaaatgaagtaatataggtttgagatccagaccaaaagtcatttaacaagtttattcagtgatgaaaacatgggacaaatggactaatataaggcagtgtactaagctgagtagagagataaagtcctgtccagaagatacatgcttcctggcctgattgaggagatggaaaatttttgcaaaaaacaaggtgttgtggtcttccatccagtttcttaagtgctgatgataaaagtgaattagacccaccttgacctggcctacagaagtaaaggagtaaaaataaatgcctcaggcgtgctttttgattcatttgataaacaaagcatcttttatgtggaatataccattctgggtcctgaggataagagagatgagggcattagatcactgacagctgaagatagaagaacatctttggtttgattgtttaaataatatttcaatgcctattctctgcaaggtactatgtttcgtaaattaaataggtctggcccagaagacccactcaattgcctttgagattaaaaaaaa

SEQ ID NO: 437624 - DNA, 862 bp, Homo Sapiens; identical to SEQ ID NO: 155071

SEQ ID NO: 437625 - DNA, 574 bp, Homo Sapiens
gctggcttttctttctctcaaagaaacatgcaccattttcaatgtgcttttgcctctcctctctgttcacatgcttttagcagcaagtcccctccaaatctgtcttggttccccttcagaaggtggcgctgcccccgaaaggcacctcagcctgtgagtgctgaggaaccagctcctctggctgattttccagttggactggccattgctctccagaagtgctctgttagcaaacgtgatgtggaaacgatcacagatggtgttttctcgttgttcgccagaatttatacgggggagacaaattcccggtaattaccaagtctgcactcgggtaccaaagctctgaagctctctgaacagttgccatacttgagttgatgaatgtgttattcatggtgtctcatctcatcaatgcatcttgagagacttaatgaaattttagcaacagtatagaatagctctatcgggtggggagtaatcattaaacagatgaaatcggccccagatttacatgtctctttagaatccacagtgtaagcaaactacagttacaaaggggtgggggttgtaaacc

SEQ ID NO: 437626 - DNA, 574 bp, Homo Sapiens
  misc_feature (344)..(376): n is a, c, g, or t
gcttaaaatgctcgtattaacagcagcagtctgcaatcctatgtcattttaatagcaaccttctgccgtgagcaggcggccggcatggcagctcctccccacaggggccatcccccaaaacatccactcagagtcaggtgggaaagacaggggcttagatccatgaggaaagctgtgctgagccccagagcccccagagagggcctttgaggggccccttgaggctggggtcaggggtaggacatgcagaagcccaagccgggtccttctgtcttctctggccaagaccaaaaggcccagggagggccacagggccattcagcactggccgccgtaaagctgannnnnnnnnnnnnnnnnnnnnnnnnnnnnnnnntgagaggcccccaccctggatccactgtgctcttcctgtatgattcccgagggcggcatggcgctcggaggcagctctggctctgctactgatccagcgacagggcagccactgtgtcctggcgcctcagttttcacatcggtagaatgggggccaccctgtaacatccacactggaaggttgtgagcactgaggcag

SEQ ID NO: 437627 - DNA, 489 bp, Homo Sapiens
cacaagaaaataaatgtaaaatgcaacagtgttaaaggcaaagtaataaactgtgcttccaggcaaaagcctcccaaagaattggcaattatgctgagatctgatgagtcattagtgctagtgaggcaaagaagggaggaaacttgtgtgtgtttgcagcaaaaagaacagcaatttaaaaagtccggggctggaaggtgcaggaattggaagagcagcctagctaaaccaggaattaaggaggagctcaaactgacaggaggcgagagcacaacctttcaggatttggtaagccatgttcattagtctgatttgtattctaggaattagaggatgacagtgaatgattctgttcacattttgaaaatctgatacttgctggaaaggctatattctgttttacattcccctacagtttcaccaacactaaatatcatcttaagaatatggtagttttaacctactggatactaccttttttcatcttta

SEQ ID NO: 437628 - DNA, 1787 bp, Homo Sapiens
  misc_feature (11)..(11): n is a, c, g, or t
gggctaggttncagctggttagtttctggtcgcctctcgtttcaaacacattgaggatgaagtccatcctgtgtatgttttaggcctgtccctctagcaggactttgggatctaagcaccaccatccttctgtctaggagagcagggcctctcaccttgtttttcttcttcaaaagtgctgggatgacaggtgtgagccaccgcgcctggccttgtacatacctttagttgtgttgtttgtcttccagcttttcagaagagctggtagatgaagctctgggtgctgtggctgctgaacttcaggatatgtgcgaagattatgcagaagctgtgttcacctcagaattcttaggaggctgctacataaaggctcttctgagggcgaggccagtttgtgtcacactggagaagggatggcaccaccctttgttttggcccacaggaaattttcatcctcagctgtccatccaggcccagaaggtgctgcccactgaaaggaaggcagtgccggggaggtcatcctcactttgcattttcttttgtcatggcaatggttctggaaatgtatgatgcaatgtatcacacttatcagtgcccaggcaacacaacttgattatggcaatattttcagaatgtgtacttttcctattgaaataccatgttcattcctctggctcagtttggtgatgaaaatgttttgaaagataatcgatacgtatatttcacacaaggattcaggttgctgttgaacccttgctggcattgataccaacacaagtgcggctactagctggtcccatcacggggcccctgttttgcatctttggcgatttcctgtcaggacctctggccctactaggctgtagactcagggagagcacagtctggctgtgctgccaaacctctcctctgctgcagtttattccaaacaggagccccctggctgtcagtgcacaataatagacacacatttcttcaacgttccattcctaggtgattttcacatttttagttcctcagcatattttattgctgtgtgttgacacaatctggtataaaaaactttctctggattcagaggaagtttgaggaatcaggagaggaccaggccttctcctgtgcctgggtgaaggtacagacctcgctgtgtctccgatgaggtcagaagtgtctctatttcataccacaaaggaacccaagtgggagtagggaacagatggatggcgcgaagacctctgtgtctccccagagaaaggaagaaacttaagaaccatcatagcctggtcctccaacatcttacagatcatgttttccaagagaaaagcctgtgttttcagaaactctgaattcagaaaaagaaacggaatgtgcgtaagaatcaggccactgcctggaaagactttctctcaattcgtagcctgaggctcagtgaaggaaacatgcagaaagaatgcctgagacgcccccagggaataagggaactctttataacctgtccagtgctgtcatctgggatttttctctgaagtacaagaatttcaggtgatttaagctgcttgatcacacttatttgtgcaaaattgattttcatttaatgttaatgttttcctgcttaattttatataacttcagaatgtaaagagcttcaaggtaaattacagggtgtttaacctggggagttaaatgtgtacacttgaattaataggagcaccggttgttgctagtataaagtaatttgtgtggcagtttgtactgtgctgagtttttaaaataaacccaatatttta

SEQ ID NO: 437629 - DNA, 433 bp, Homo Sapiens
  misc_feature (352)..(352): n is a, c, g, or t
  misc_feature (379)..(379): n is a, c, g, or t
  misc_feature (387)..(387): n is a, c, g, or t
  misc_feature (396)..(396): n is a, c, g, or t
  misc_feature (404)..(404): n is a, c, g, or t
  misc_feature (423)..(423): n is a, c, g, or t
actttaaaatattgggtttattttaaaaactcagcacagtacaaactgccacacaaattactttatactagcaacaaccggtgctcctattaattcaagtgtacacatttaactccccaggttaaacaccctgtaatttaccttgaagctctttacattctgaagttatataaaattaagcagggaaaacattaacattaaatggaaaatcaattttgcacaaataagtgtgatcaaggcaggcttaaatcacctggaaattcttgtacttcagaggaaaaatcccaggatggacgggcactgggacagggttattaaggagttcccttattcccggggggggcggtcttcngggcatttctttctggcatggtttccnttcactgnggcctcagnttacgggnttgaggaggaaagtctttncgggggagtg

SEQ ID NO: 437630 - DNA, 971 bp, Homo Sapiens
  misc_feature (649)..(675): n is a, c, g, or t
tggtgaactagaaattgcgtttgcccttcctgtcttagggagatagacttgagaggctccaagagaagcagctgacattggctgacgttaacccctcatgccaggcattacctgggcagttgctgaagccacctcagggcgccaggaacctctcaggtcagccttgttcttcaagggcaatcacatcctactctccccccgccctctctattacaaagtgcctccggctcagacttgggccagtggagctgggaagtgggcagtgcaccaaaggtcaagcggaattttctattggaagaaaaggtgagactttggggaagagactgcctaggaagatgatgtgctgagcatgaaagcagaaagaggctgggggaatagagtgcgggaagacatcgcagacactcgtctgacctcagaaactgggcgaggagagtgcctgagaggcaggtagcacttaatagctgtgttagagccggacagtggtcctgggtgtggggtcagccaagcagatggggctgttgccctgcgggatcctggccagaagggtgagggtagagccgagaagccgtcaggcaacgcttcccaagaacaggaggacagatcttccctgggtgctggacttccaagccccagtcctcccctcccgcannnnnnnnnnnnnnnnnnnnnnnnnnnaccaggccaggctctgaggcctgagtccaagagatcttgttgggggaggggctgggcaggtagccctctcagccaaaggcaggccatctgctcccacttgtcctgccaatctgcccagggagggagagcactgtaggagggagagaggtctggagcccaggctctgtcagtttcagcaaacccggtgcaggccccctcaggctccatggcctaggaggtgagcacagagagcatcactagacacagggtggccaacagtagcagcccaggcctccagaaggactggggcaccttcc

SEQ ID NO: 437631 - DNA, 1816 bp, Homo Sapiens
  misc_feature (205)..(205): n is a, c, g, or t
  misc_feature (210)..(210): n is a, c, g, or t
  misc_feature (237)..(238): n is a, c, g, or t
  misc_feature (245)..(245): n is a, c, g, or t
  misc_feature (256)..(256): n is a, c, g, or t
  misc_feature (324)..(325): n is a, c, g, or t
  misc_feature (327)..(327): n is a, c, g, or t
  misc_feature (334)..(334): n is a, c, g, or t
  misc_feature (337)..(337): n is a, c, g, or t
  misc_feature (398)..(398): n is a, c, g, or t
  misc_feature (434)..(434): n is a, c, g, or t
  misc_feature (467)..(467): n is a, c, g, or t
  misc_feature (524)..(524): n is a, c, g, or t
  misc_feature (531)..(531): n is a, c, g, or t
  misc_feature (539)..(539): n is a, c, g, or t
  misc_feature (542)..(542): n is a, c, g, or t
cagaagcttactttcaaaaaaaatttattcaatgaatacacaatataattccatttcgagtgattaaaacctatttgttgtttagaaccaaacaaaactacaagaaaacattttcaaaaccttttttttcaggctgaagaaatcgtttaatccattttaaagaaatctcacatgatgttctgtcgggattaaaaatatacacggnaaaanataaaacaaaatatatacccagaaagnngctcgcncagggtcaggngtgcagcaacgtcacacactcattccttgtgctgtttcctctggacactcaaaatgtgaaagcaaggnngnggggggnggntgggcgggccttttggtccaaggaataaaatttctttaaaaaatttaaaacgtcaaaaccngccagaataagacaatagaagagcgtatcgtcaggngctgggaatggcaccacgacaaggcattaatgnggattcacttgcacagctgctctcataaaagctacacgattcagaggtaaccctaantatccgnaatcccanccnaagtcatgttcatgccgctgtcctagtctggacaatcatctgtcactcatccaacacagttatatacagaatgcgcagtcccagcaacagtgtagattacagcaggcgttctctacctggactcatgattggatttcatttctaaattacatcagagctttcaaagattgaaatacacaaatctgcactacccaagcctccttgcctgtacgggaaacaaatcagaagagcatttattgggaactgacacgtcaggcctcacaggtgctgggcaggaatcacagaggcttgctctgcatcatgtcttccgttaacctgaagctttgggtttattgtgtttggcaaaccactcgtcacttttatctgctgccattgcatcatccaacaatttgcttccctctggatccatcttagaaagttctcgaaatgcttcatccccgacaaagcaaatttcatgtccgtcagggtcggccagaatgaccacctgtactgttgctttccctggggtgtccaggctcaccaggggagtcagaatcttctggttctcccttttcatcaagtcttctaagtctggcaactctttctgggggcaagagaaggcaattcttccaaaagctgctgcatggtccaccccacccttgacgccctgtagctccagcttacactggttatcagcatagcccagcaaagccctttgcttttcttcatctttttcataaattttcattcccagtagattacaccagtagttcaaggacttttgaagatcagacactgctagagttacttttaatacaggatctgactgaggcagactgcgattctgcaaatagaacttatatcctcccggggcctcggtttcaaaaacaccttctgcaacttccgtcagtggccactccagcttcctggcgttgctgacagcctggctagaagcgagcgtgattcccataaagtcattgccaagcttgtagtctccgacgccataattgtaagtcagttctgcgacaaaatgatcatcctcaggcccaaatcccaccattgttttactccatttcccatcataaggcccattacaggcagctttgcagccttcttcaaattcctcatgccgcagaaccttcatccccaggacgtcccgatagaaacgcgccgtctggaagcggtttcccactttgaatacgaagtgcagagctctgcgagcagccatgattcccgccgcacgcagccgtcacgcgcaccgtacagcccagtccacgaagggcgccaacgggccg

SEQ ID NO: 437632 - DNA, 434 bp, Homo Sapiens
ctcgcacagagtcaggcggcagcaacgtcacacactcattcctttctgtttcctctggacactcaaatgggaagcaataaagaggggggtggttaaacccaaaccttttggtccaaggaataaaatttctttaaaaaatttaaaacgtcaaaacctgccagaataagacaatagaagagcgtatcgtcaggcgctgggaatggcaccacgacaaggcattaatgtggattcacttgcacagctgctctcataaaagctacacgattcagaggtaaccctaactatccgcaatcccaaccaaagtcatgttcatgccgctgtcctagtctggacaatcatctgtcactcatccaacacagttatatacagaatgcgcagtcccagcaacagtgtagattacagcaggcgttctctacctggactcatgattggat

SEQ ID NO: 437633 - DNA, 2335 bp, Homo Sapiens
  misc_feature (1178)..(1178): n is a, c, g, or t
  misc_feature (1180)..(1180): n is a, c, g, or t
ttttttttgttgagagaacatttattccactcagtcagctcccgcagagtcagcaacctgtagaaatatccaggctggacgaccacttccgtgcactcctgcagagccggggtgggggtgggggtccctgatgctcccactgccccaaggaggtaagagcctgaggcctccgacatccacttttgacccaggggagccagcccacagcccaagaaaaggcacccttgagttaactcacataccctctccccacgtgcactgcccattaccggccaccgacaagctccagcgcttgaggcaccagtcagccgacaagtgtttcctgagagttaggagcccagtcctgtgctagaccctggtaggactcaagaggaaatgacagtcccttgccctcagggagctaactgtctagttagggactcaagacacacacggaagagactggagcgtccatgggacagcatgcagttcttggtgcaggtgctcacacgggacctgttcgtgagcaggaaccgaggactgttggctcgggtggtttgggacagcctgggccccgctggatcataagggcttagctgggtagaggagacgaaaggggacatgtccgagcagtataggggaaggcacagaggcaggaacaagcacagcacagtgatgggccagagggggacacaaactgcaccattagcacttataggggcgtgtgtggaggtttcctctaggtcggccacggatcagagccgagacttggaagctccttgggctgggcagcaccttctcgttctcggatctccccctgagcattctgctattccagggtgaggcatacagtaggaggtaacaatgtatgatccaacctgcatcgaagacagcaagactccagtgcagggatccacaggctgccctccaaccacgctgacccaaacccatcccagccctggtcagttttgccttttctgatgttcattctggggaggcaggtgagaacttgtagcttccaggctgactggttcaggtgtgaagatgggaggagtcctcgtcctgctgcctgcctgggccctgttccctttcaaactgcactgctgcatactcagagaacacacagaaagatcctccaccgacctctcaccctgcccagagccacaggcaccaggagcgaggccctcatcctcttcctncncccaccactgggctgaacacttggcccagttgggagtaaccgctgactgggcttggttggtggaagcaggattctttctccctggggcagactcagaccagactcaagctcccaccagcgtccacagcagtccagcttcccctgagaccacacagtgaaatcagagcccaggccaggagcaaagggctcctttgtggaagccagcggccagtcaggcagaacaagaaacaaaaccagaagagaaaatctagcccaagggacctctgccaatgtctggggaagggaaatgaaggctccagaaacctgacgcaccattcgttaggtctgggagaagggaatgactaaaaagggctcctcggaattctttattcctgaacaagggaaggaggcttggccagggggagggaggggcactacttgtacagtggccttgactcgacgctcaatgtgtgacaggtaaggaaagggcagcaggtgaagtccccagggctgaggttcttagcctggagtccagggatgggtttcattcagggagtccagtggctcctgaaattgcttggggtttttgagtctacgtcagttatctgttttcctagggaaggtccgtaaccttcatcagattttccaagggcttcgtgtctccaaagagctaagaagcaccgctcagaaggaaaatgaagcctgcaggtttcattcacatctggaagaaggttttgcctctagaaccaggtctgccaccaacttgctgtgttagcttagaccaatcacttcctgtctctgaactctagccaagtggtggaccaggcgggagcagagaagccagctctccacacaggcatcgtcctaccaccagtggcagagagtgggggcctgtggccaggcagccaggatgaggtctgccccagctgtgattcccaccaggcctggagagtttgtccaccagagcttggaatctgcttccaattccaggctccaaccagtcacctccactggtcaccgcagtgcacctcttgaggcaggtcttcttactggatgtgtcctcatgcccgggtgcagtgccagccaggcctccatggaactccattcctggtctccgtgtccagatgggttctgcacctatcgggtcttaagatcctgcccactctgcaaatggcg

SEQ ID NO: 437634 - DNA, 857 bp, Homo Sapiens
  misc_feature (79)..(79): n is a, c, g, or t
  misc_feature (518)..(532): n is a, c, g, or t
  misc_feature (559)..(568): n is a, c, g, or t
  misc_feature (808)..(808): n is a, c, g, or t
accttagaatcagaggttgttggccaaattgtcaagaacctaagcggggcttcaggtcccagctaaattcatccctccnagccctcactggaaggaaaacttaacccctgcaaacacatgcagatgcctaaggccacctatgacttaactcagtctctgcctctgagtggaggactttctctgccacagtccactggctgagtttcctgacaaaagagaacacgtgtttggggggaggaagaagggagtagactgactttcctcaatagtgtcatttttacttaaagactagaatgatggaaactactaaacagactcaatcacttggcaaaaggaaaaaacacatcaaccagtaggtaggagctagatctaagtcatactgacagctacggacacggccagctgccgtgcacaaggggccagcagggcagcagcataggctgttcagaaaagactgcatgaaatgaggcaggaagtagggagctcagagttgcaggttgtcctccatgcacccacannnnnnnnnnnnnnnacacacacaatttgctatctacagaannnnnnnnnncccttttaacctctattagagttcaggaaggaggtggaattgaatgaaaggaaattgagcagcttcccataacacactgctcagctcaacctgaaggaacgcataagccaaaacaccagagccggtggcaaggggagagcccaaactgtctccttaaggaaagggcaattccattctaatgcactttcttagcactgtaaggtgaatttttttctcatctccctagaactattgtttgtnggtttttccaaagatgttcccaagaccagtcctcttttctatctacacg

SEQ ID NO: 437635 - DNA, 1061 bp, Homo Sapiens
  misc_feature (97)..(146): n is a, c, g, or t
  misc_feature (441)..(449): n is a, c, g, or t
  misc_feature (570)..(570): n is a, c, g, or t
  misc_feature (572)..(572): n is a, c, g, or t
  misc_feature (830)..(830): n is a, c, g, or t
  misc_feature (834)..(834): n is a, c, g, or t
tctttgttgtcctcaggtgggctgtgggggaagtagcggagaaatgaagtgacgccaggggccaggcatgggtgttcttttccgtgttgttcacatnnnnnnnnnnnnnnnnnnnnnnnnnnnnnnnnnnnnnnnnnnnnnnnnnngttttgttgcatgacttgtgccggttctcgtgattgttccctgctcgtgtctcacagactgtccccatttagcctgagacttttttcctgagtccccagctgggcagatccctcagggctaaacccaaggaaatgcccagcaacccccaacccaccccagccccgcgtgcgcccctccggtgcccgcagctggtgtgaacagtaagtactttggcggtgcctgggagaccagggcagaaaagccagctgtgctgactgagggcccagcctcgggttctccttgctccaaagtttnnnnnnnnntgaccctctcgcagatgctcatctcagcccatttcaagcctggaaaccatctctgagacgctgcccatgctgccatttcatcactgcaggcctgtgggtctagtgggggcctgggggctgngngctgggggaggcagggcccccagccttctggaaagcaggtgggaatggaggctcctagccactatctcatccaaaggatgggggcaggggcgggggctcacacctttgaccctattcatgggttccccagatttatacagttggccccttcgttggtttctctttcttcaagccacccctctggagttggggagggagaatgccccagtttctgaaagcatcttaaaccatagatagacgaacagcccaggggctggncctngcacagagcaagacttaagcttccccacccaatcattagtccctcctcaaaggttagggttgagagaagcagtaggccctaggggtgtcccgggaatcccccaggagggaaaggtgccaggctatcatccctccagggattccctgatggatgttccttgtcccctgcccaaaaccatcccgaactttgggccctttagtgattgtgagagctgggagcccccaggg

SEQ ID NO: 437636 - DNA, 479 bp, Homo Sapiens
  misc_feature (19)..(19): n is a, c, g, or t
  misc_feature (77)..(77): n is a, c, g, or t
  misc_feature (204)..(212): n is a, c, g, or t
  misc_feature (338)..(338): n is a, c, g, or t
  misc_feature (350)..(350): n is a, c, g, or t
  misc_feature (352)..(352): n is a, c, g, or t
  misc_feature (369)..(369): n is a, c, g, or t
  misc_feature (394)..(394): n is a, c, g, or t
  misc_feature (449)..(449): n is a, c, g, or t
  misc_feature (458)..(458): n is a, c, g, or t
cataagttggatacttgantatctgtttgctttcacctaaagccttgaaagattggtaactctaatacacttatttnttttggtctactgtttcaagagttggattactttccagcataattccttctctttggataaagagttctatgattcatattttgcttcaatatgttcacgtctgtagaagcctgggaagcactacannnnnnnnnaataccacaaaaacagtacttacaataaatagcccatttaatggaggaattgtaatggagattcagaagttatcttgagaattctacaacactatgtgactagtctgctttccttcctaacctgtngcacagcttaananttcaggaaatccctcangggacaacattatctagtatctganttagttctctgtaactccattctcatcttgatgacggctacctcagatccttacngcttaggcngccataaccctgtgttgctgt

SEQ ID NO: 437637 - DNA, 1809 bp, Homo Sapiens
  misc_feature (14)..(14): n is a, c, g, or t
  misc_feature (22)..(22): n is a, c, g, or t
  misc_feature (32)..(32): n is a, c, g, or t
  misc_feature (62)..(62): n is a, c, g, or t
  misc_feature (106)..(106): n is a, c, g, or t
  misc_feature (117)..(117): n is a, c, g, or t
aaaaccctgtaaangtgtggtncgtgaatgtncacgcacgcacgtgtcaagctgaccacctnctgggctggagtagagaatgggaaaggctaagcccatggcctcnctcagcggcanggatctccatgagaggacacaaaattgttttcagaaagtaggaaaataaacattagggctttaatcctcttaaataaaaattttaaattaaacattaacatttaaagtacaccaagcgtgcagtcctattttgagaaagtccattttgccagggaatacaacttgaggtcattagtaactagttgaatatgatttaaatatgtctgcatttagatgaacagaacagggtaaaaggaactttgccaagccaagctcaattcctggccaaataatgggggagaactgtcagtgcccacacccatttctcagtggtcagtttcagccgctgttgactgaagacaaacgaactcactatgttcttcacaaagatcattttttttaagtaagaaaaatgtttcaactctcttgcctttccttcagcgaatgaaatgtgacgggctaaatacgccagtcactcatgcgccgcagggacacatggtgcagactggcgtgcccaggtagccaaacagaattccccaagaccttttatttgtttaaaatactttggtgtcagcagagtctgagcagacacgttactcatgatgctcgggagaccaggcagggccctgctgagctcttctgaaagtatgtggaactattcaacgcgtggcactaaaagggaacagactcccgaattagagttcattaatgcagttgggcaaccggcttttctgtttagccactggttacttaaggtttccaataaggtttgggaaaaggtcacacgtactcatagatgagaaacaatgaaccagccttgagagttacatcaagtgagtttaaaaacacccaccccatcaacagcagctaagcttccttcaccacccccaccagggcgggtctcagagtgcgcccatgcagcttgtaccccactttgctaactagggccactgtgcctggctccttcccctcaaccggtgtgtggaacaaggcctcatgttcataagggtcgaacttggctccgacagggttcaacttgagcaagccatgctttgtgaacaccttctggatctggacttcagtcatgaccagcccctcatagaggttcttcaggtgagggttatcgtctttaatttcttcttttggaacacactgtgttgccttctccagaacgtctgccacctccaacaagtccttgcagaaggcttgaatgccgtataattttgcctcctccaccaatttctggctcctctgccgtaagttctcagtgtctgccaaagctcgtttatatttttccacagtctccttcagctgttcctccaacttgaccttctcttccaggagggtcttctctgtagcaggaggatctgccttctgttcactctgacccatgtcctcttccaggttctggccactgttcttttgtttcgtggctgtgcacaacaaccggggagatggcctgagagacaacgccaaagcaggaagactgcgccgcgccaacctcacgcactgagccgccatgactgccactgcccgtcgcagtcgccgcgcacgcaccaagcgtgcgtgcaggcagctatacccacttttctgccctactacttcgcctcagccaatccgtaatcgcttttcctgttatggacaggcaatagtcaccaataattgtgggtcacggaagagcatctttccccaccccccgatcccggaaattcc

SEQ ID NO: 437638 - DNA, 785 bp, Homo Sapiens
tcgctctagagttatcccctccccgtacgcccaagaggaggacccactgttgccaggacttgggaggggagggaaagggtcgctcacctgtttcctcacatactctaccagcaattcaagatgtcgagggtcttcacatttccggttgaagaaggttctccagagggcagcggccagcccatgatcatctgaaaggatcccctcatcatatcccaagatcgctgcatagaaatgatttgtcatgaggatcatgttcttcttcaggatatagggattaacccccatgactctgccgcgctgctgaacatcctcccacataaaatgaactatgatacgacacatgtacttcccactccggccttcctgcttcattcggactagacacatccagacgtggagtagggttataagaaaccatgaattgaatgtatcaggcatctgacaccccatttactgtatttcaaaggtcccgtgaatcccatggcttctattatctttgtgaaagcaccaaccttctcctcaacaggctgtggggaatctttggtagtagaaagcttacgtgtggtgtgatacttcctattcagctgtatgtctattccaggaatctgttctgatccaccacatgcttgggactggctcatctggggccactgggaagtgcgagacagagccctgtccccctgtccttgggtaggagacacaggtatcaatcggctgcatactggaacccactgagaaatgctagtctggttcctaagactcgcaccagcaacgccatgttcctc

SEQ ID NO: 437639 - DNA, 837 bp, Homo Sapiens
  misc_feature (17)..(17): n is a, c, g, or t
ggatgttcagcagcggncagagtcatgggggttaatccctatatcctgaagaagaacatgatcctcatgacaaatcatttctatgcagcgatcttgggatatgatgaggggatcctttcagatgatcatgggctggccgctgccctctggagaaccttcttcaaccggaaatgtgaagaccctcgacatcttgaattgctggtagagtatgtgaggaaacagatacagtacctggactccatgaacggggaggatctgcttctgacaggggaggtgagctggcgccctctagtggagaagaatcctcagagcatcctgaagccccattctccgacttacaacgacgagggactttgatgggctgggccctccgcacggcccgccagctggcttcgaggaacctccaggagagaagtgcctgttggtccaggaccctgcagaaagtggcctgaactgacctctgaacagcatctgtcaaatacctggccccatttgtgttgagtttcctcttagtgtgcccaggagtctgatctgctggggtacagggctgggagaacccctagctctcccggggtgtcctctcccttaggggaagccccgagtgagagtcccccagcacacactccccaaccccctccagcaactacatgtgactgatagcttttcccaaaggccaaggaagggatggtgtaggttcaaaagggaaaccccccagggcctgctgtggcctaggagcagattgtaatgctgccgagtccggtcggtgaccacgcgttgtccctcggctttcagccatggggttgagttggccattaaaagaaacagagacttcaaaaa

SEQ ID NO: 437640 - DNA, 1000 bp, Homo Sapiens
ctgtggaggtgttctttggaagcccaagttgggggggccggtgggggaggggccccagccccattaaaagtcccttcgtcggttgtaaggtcggagaaatggggctttcaggatgctctgaggatttcttctccattagagggcgccagctcaccttcccctgtcagaagcagatcctcccccgttcatggagtcccaggtactgtatctgtttcctcacatactctaccagcaattcaagatgtcgagggtcttcacatttccggttgaagaaggttctccagagggcagcggccagcccatgatcatctgaaaggatcccctcatcatatcccaagatcgctgcatagaaatgatttgtcatgaggatcatgttcttcttcaggatatagggattaacccccatgactctgccgcgctgctgaacatcctcccacataaaatgaactatgatacgacacatgtacttcccactccggccttcctgcttcattcggactagacacatccagacgtggagtagggttataagaaaccatgaattgaatgtatcaggcatctgacaccttagaaagaattcctcgaagtcagttttctccacacagctagtatacatgcgcagggccgcaatcttaatcttccatttactgtatttcaaaggtcccgtgaatcccatggcttctattatctttgtgaaagcaccaaccttctcctcaacaggctgtggggaatctttggtagtagaaagcttacgtgtggtgtgatacttcctattcagctgtatgtctattccaggaatctgttctgatccaccacatgcttgggactggctcatctggggccactgggaagtgcgagacagagccctgtccccctgtccttgggtaggagacacaggtatcaatcggctgcatactggaacccactgagaaatgctagtctggttcctaaggactcgcaccagcaacgccatgttcctcaataaccatttccgggtccc

SEQ ID NO: 437641 - DNA, 1052 bp, Homo Sapiens
  misc_feature (69)..(123): n is a, c, g, or t
  misc_feature (140)..(151): n is a, c, g, or t
ggcctggaggccaggccgctgttattcccaattactcgggaagctgaggcagggagaatcgcttgaacnnnnnnnnnnnnnnnnnnnnnnnnnnnnnnnnnnnnnnnnnnnnnnnnnnnnnnntgacaaagcgagtctcnnnnnnnnnnnncatcttttactttcccccatccctcattttagtcaaacttctcccacctcatttctgccctggttggggaagtgcaagagtttcagataaggtacctatgtgttttagatgggattcttgattttaagtgagtataaagtaaaagatttaattcttagttcaggtatgttccagtgcctcgaaagttagttatgtgacaaatagtacctgttgacaacctagaaaagatgagacattctaaggtgccctaacaatcttcagtctctaacagctgaacaggaaggccatttcactcaactgtgatgcgatcatcactgactggcatttagaattagatttcaagactccactcctgtgggggccactaaataactgaatacattttaagagcaatctacactgagggaaataacggttctaaggtattctgcaaagaaagagtatcgataatgggaactggcaactgagcatgctaaatcaaattccatgaatacagttttcataagatgtctttactacatgcattttgctaatatttccctaaaatattcaccaactctacagagttatactttgtgttaaggtactattgagttataagggaaatagccgtatcaggtagctagtgacataataccagttgtgaaaattcagacaaaatgagtcgacaaatccccaaaaatggcaaattaagccctgtgacaaaataagttattggatcatacagaaatagcccaaatctggaaattttgaattaaaattgtaatcctgtaaaacaagttttggggtgaatggatttctttaataccaataatatttttaattcccaccacagatggatttgctgaatatgctaatgctgtgaatgagaaaacaattttggggtaggtatacccacaag

SEQ ID NO: 437642 - DNA, 897 bp, Homo Sapiens
  misc_feature (111)..(124): n is a, c, g, or t
  misc_feature (134)..(240): n is a, c, g, or t
  misc_feature (709)..(709): n is a, c, g, or t
  misc_feature (724)..(724): n is a, c, g, or t
ggggggaatcccacccctattcttggcccgggtttctttggaaaacagtttggccccttttctttcccttttggggcccggccccaaaaaaaaggttttaaaaattttttnnnnnnnnnnnnnncccccaaaannnnnnnnnnnnnnnnnnnnnnnnnnnnnnnnnnnnnnnnnnnnnnnnnnnnnnnnnnnnnnnnnnnnnnnnnnnnnnnnnnnnnnnnnnnnnnnnnnnnnnnnnnnggttgtctcaatagataactttatttgaaatgaaatgcattttgaaaatatgaaaaataaatcacatctccccaaaatcatctaagagacatatttacacaagttctgaccatgctaaaaaattcatgaatgtgatggtgtataaagcatttggtacatgatgatacttgctttccagaagctggcatttgcatattataaaacgttaagaagaaggctgacctcggaatgtaacagacaatagttttatgtttcttctcaatatacagtgacctggaaggactccctgttgttaaaacctgcttccccactgctcagcctgccatcagccatccagctgcagagcagtggagagtaggtctcaccagtttttgtgcagatgcttctaacccagagtccttctgcttacttcattggacaatattgccctttctaagaaaacccttttagatcctgtactccacttagnaaatgccctgccagnaaagtcacagatgacttttttacccaatcttaggtaaatctggattatctgcccaaccgtgcaagtcaataagccacccttgaaaactgtgtcaagatttgaggaaacaggtcttaagaacctatccaacacatgattccataaccaatacatcttaggttgttttaggcaaa

SEQ ID NO: 437643 - DNA, 809 bp, Homo Sapiens
tcgtagactactttctaatatttttattttttagcaccaaaaggagaaaacatattgttacaaggctggttatagtgtctcaatggacactgcaaagaactacataaaagaagtctgtctcaagcagttcgtatttgagtcagtggtcagatggggcagttgcgctcagctgcagtccctgactccggaaacactgtgcctctcaaatgatctagagctcatccttggcgtacatgaggggcagttgttgttctagtacccatttagcccatggctcttcaagccaattcacactgggaaaaacacaccctcacaagatgcctatccatttgagttcatacaggttttagtagctagaactaaaaaacatttttaaaattatctaaacaaattggtaccaaagaaaacttgccatacttaaacagtatatatgttcccttttttggctgagagattcaagtttgtgctatatagaacactaacagttactaaagactaggaaaatttgcaggagaaaggctatttttaaacttcacaataattctaaaggaagccaaataataaaacttctaataaatgccataacttaactattacctctatttgtacctttcacaaggatctaggttcaaaataagctcaaaacacagcactcaccacttcaacagcagctcaaagtcaaatggaaaaacttgtggtatattctttggaggatatactaggacctgagaagcaacatgttcctggttggtaggtccacaaaaaatttaaacatgtagaattttatggactgacaaaaacctcgtgcc

SEQ ID NO: 437644 - DNA, 314 bp, Homo Sapiens
  misc_feature (54)..(97): n is a, c, g, or t
  misc_feature (228)..(228): n is a, c, g, or t
  misc_feature (231)..(247): n is a, c, g, or t
ctctaccccctagagtttctgactgaagcttgaagtatttgcattttgataaannnnnnnnnnnnnnnnnnnnnnnnnnnnnnnnnnnnnnnnnnnntgccagacacattcattctgctttaaaatggattagacaggaaccaccattttccattacaaaggtcttgttctctcccatctagaaaagaataacctgtcagtttagtgtgtgtacgtaaaactatgtanaannnnnnnnnnnnnnnnnaaatggtatacttagcaacacaaatatatgtgtgtgtatatgtatatgtatctcatcactcatttca

SEQ ID NO: 437645 - DNA, 542 bp, Homo Sapiens
tgtcatgacagacaaggacactagaggccagaataagggtctgtacacctgaacaagggctgcagggcagtaacagtgggaggaggagaggaagaccaaatcagcccacaattttaaacagagaactgcccaggtgaggaaatggaagtgaagcattttctagtggcacagattttctcactaggaactgctgcagtatgtggtgtctgctgagtaagctcttggctgacagtgctgagcaggaggatgaatgaaaactgaagctagacattgaaagagcattccatatcccacccatattcttgaacccagcaacctacagctgtctatcaagaactgggagggtattggtaaagtcacaaatgaaactatcccaactgaaggctcctggctagaggcctctctggggacacacagggaaagcgccccaaaaggaattttgtttctagaagtcgggaaggggtgctccctttcacacgcacatttacacacgttcacactcacactcttcccaaggttcagcagccccactgagctgcctc

SEQ ID NO: 437646 - DNA, 504 bp, Homo Sapiens
acgctctctctgtgggggagagacggcacggctgaccactcacaaagagaggctggggaggcccagcccggggctcccggatctcagcctcccgtggccactggctgcctaccctgctgaagtggcaggggtgggttatcaccaagaccatccggaagactctgcacgccgggatgaatgtgcagcgctgcccaggacacccgtgggtggggagtggaggcgatgctgtgggcccaggcctgtgtgttttatagattttggctcctcacagtcaggactgggagggatgagcagctccgctcctcgcacagggaacccgagtccaaagccactctgagcagggggctcagagcccgagggccccaggcacacttcctgccagcgccgtctccctgggatgtctcgggagcccctgaccccacacctcctgtccagcacccagtgtcctgtggcctctggggagcccctgaccccacacctcctgtccagctcccagtcccctgt

SEQ ID NO: 437647 - DNA, 1535 bp, Homo Sapiens
  misc_feature (52)..(99): n is a, c, g, or t
aatttttcctaccatcagaaagtgtgctttgctcacagaagaatgggatgtnnnnnnnnnnnnnnnnnnnnnnnnnnnnnnnnnnnnnnnnnnnnnnnnataaattaaattttcagacatatcaaatacagttctgagggtaaggtcatgggggagctcggacccagtggcgttgggtgcggttgagggggacgctgctgtaagaggagagagatgacagtggtcctcctctgagagcctgagctgtctccccgtctcccgcccccaaggagacagagaggatcctacttcttcggggacagtggctgtatggctgtgctgccccacatcagggaccctttccccctgggactatggggcagtttgggagcaaaaccagaaggacaggcccccctctacccgcctaccctgagcaagcgagttgttcctctttgtacaagggcaggtctgcggttactttcaacactgtttattccagcggaagcagccgggtggttttcccacccccgtgtatgtagatatatcgactttgtattaaaggaagatcgtctgactcaaacacaaaacaccaccacaatacaagtccaacaaaccataaacacaaacagtgcacaccactatcacaaaaccccccaccatacgccgcaatatgtgctttcaacgggaagccctcgtgaccgcacatgcgtatttccttgggtacgctggcacaaagagaaaagaggttccgcctgcccccgcctctacccccacaatgtcttcccaaatgcccaccccacaccccgcccgcaccctgtcgtcttatgcgcatccctttcccaccttcctccgcccctcctccacatacttgctcacaacgtacggtggggccggctcccccaccaaacacaaaacccggcacccgggcggcgcaagctacccctcgtttgtcgctgcttcccccccacgacgacgtccctgggtcctccccgcgtagccttgggcccgctgcacccgcgccgccggggagcccccgtctgctttccccctcttgccggcgactatatggctgccactcgcgcccctactacactctagtgctctctcccgcttccgcgcatcccagtccctggcgtgcgctactgccccggcttacgtcggcgagcgctccgctcgcgcgccccgctaacgagcgatagaccccgccgctgctattttctcctccttcacttagtccgactgtagccacatccctgttctatggcgccgctccgggccgcccattacaactcacacacctcggtcgccgcgcggctgattatcggcgacacttaacactaattcattccctcggcgcgccgtggccccccactacgccgtgtcctctcctccctacacctccgtgtctgtattctattgcagtcctccccccctactgccctctacgctcccccctttgtatcccactttctccgctgtctcgggtgggaccctccccctgcctcgtgccttcgatgactattatggccagatatgtttgacactttctcgccctg

SEQ ID NO: 437648 - DNA, 1338 bp, Homo Sapiens
  misc_feature (599)..(599): n is a, c, g, or t
gggccaacccgccccccggggcttttttcagtgggggaattggctgtttttgttccaggggttccaaacccttggaaaagggggctgccccggctgcttgtagtgggaggtattgctggggccactgctttcacttcagcacagttgtcgtcttttcggtcacccttccaccttggacggggagcgggagggggagtctaatttgccgtctatacggggcccgggactggacagtggtgactgtggtgacaatggtgccatcgggcatgatggtccggtcaagctcaatcttcttggtaggtgtgatgctggggcgtggagtggaggaggtgggagtacccaggttccggggagagccctcctcatagtgaagctccactgccatggtggctgctggtcccagggctttccctggccctggggtgagtgggcacaactgtcttcgagacagtggtctggagggggagcccacaggcagtgtggcctggcctaggagttcggtgtctccacagctgctgctcctcagcactttgaagggtcagctcccggctctgggggcccagatccagtgccaggtcttctgtccactccacctcggnatcctgccctcgcgggcttggtccacttctgctgcatggggttgtcgagttcagctacacagcacagttcctcggtgccttccagctcatttcccaagtgagatgcccgaagctgccgtaggaataaccggttaggtctggggatggctggctgagcctggggcatcatgggtggcttctcactgggtaccaggcctcctggggcagagcaagccctgaggttgaccatcatggctggctgggtgctgactatggcatccttgatcagttcctcaattgtggagagctccacttgttcttcacctctctccctggcctgaagcttgggaagcaccgttaggctgagatctgggcgatcagtgaaggcccaggatatgagcagcccctcaccagggatttcctccaggttgacttccaactgtgttggtggcagtgtcagagtgacgtggtaggtctccatggagacggcagcgggggactgctgggtcacagagactgggaaccgcacctcctcagcagagagctggcaacgcagcaccatggtatgctcagattggtctacgcaggtcacatgactgatgctggctctgggtgggagttggggcacctcctcaaaggcgatttggatggagctcccgtttctgcaggcctgctcgttcagcgctcgcacccaagcccgctgccagttctcccggaaagacttgaaggcgaagagtgacgccaggaggccccggactcc

SEQ ID NO: 437649 - DNA, 1447 bp, Homo Sapiens
  misc_feature (55)..(55): n is a, c, g, or t
cctcggccaccgggtgccccccctctcatggtgcttccccgttccaagtatcccnttccaaccgggcccccttgccccaggttggacggggcctcccccgaaacccagagggctttcctgccccaggcactggagatccagggaaggggtatgaaggggaggtggggaatgggctgagagaactcgtgccttttcagagctgggtcctcagaagctgggggctggggttaccatgggccttgggtttggatttgaaggaaaagcgcttgataaggcggcgagaaaagctgccggccttctttcggacactgggcgtggccgttgcgttggagaggtcatcgtgtgattggctcaggccagcttccttctgcctaggcctccggcggaagatgagcttagtgccgctgcgcaggaaactcactttgtgatccttgaggctgcgggtctccagggcaccagtggaccccgtttccgactcaatatcatccacagatggcctctcagaaatatccgaacgggttgtctcgtctgcttcctggacacttgtgggactagagagggcatctagcggtcctggagacatggctggtgggtctgagggaggtgaagaggggcctccgctggtccctgcatcatcctgcactgaggcttccagggatgccgcatagcccagggatagcgccaactcgtcctgagcaatgggcaccttggaaacaccagagatgatgagagtgctgcgcttggtgggtgtcttcttggccacccgcccactgggctctgtcagctggcgaatcgctgtctctgctacagggtccaagccgttggaaaggtggctgtcccggctgctgctatgggaggtattgctggggccactgctctcactcagcacagttgtcgtcttctcggtcacctccaccttggacggggagcgggagggggagtctaatttgccgtctatacggggccgggactggacagtggtgactgtggtgacaatggtgccatcgggcatgatggtccggtcaagctcaatcttcttggtaggtgtgatgctggggcgtggagtggaggaggtgggagtacccaggttccggggagagccctcctcatagtgaagctccactgccatggtggctgctggtcccagggctttccctggccctggggtgagtgggcacaactgtcttcgagacagtggtctggagggggagcccacaggcagtgtggcctggcctaggagttcggtgtctccacagctgctgctcctcagcactttgagggtcagctcccggctctgggggcccagatccagtgccaggtcttctgtccactccacctcggatccagccctcgcgggcttggtccacttctgctgcatggggttgtcgagttcagctacacagcacagttcctccctcgtccgattcaccacccggccccctagcct

SEQ ID NO: 437650 - DNA, 1404 bp, Homo Sapiens
  misc_feature (1129)..(1139): n is a, c, g, or t
ttttgaggttattacacaaagaaaaagattttattgtcttcttagtcaatatccctggtgaaattagaggcatagcttgagactggtgacagtgcaacacagaccttcaggagctgctttgaggactggcctgcccagatgcctgctgttaagccagcagccccctcactccggcccctgccatcttgacagatggagctgccatggtttcagggacactcagcagggcatctgggttggtccctcccacatggaccttgtaaagttgctattcaggggaacctggtatcgtttcaggcaaaacacagaaccatattagcacttctaagccccctgccccggccgcctccctggaacatttgggcttgtcgcacattccaggagggagcaggagcacagctgcagccacagctgccaggaacaggcctgggctcccgccctgtgtggggggagggcagaggctgagggcttcctctgggggccctgagtaagctcaccctcaccccacctctctgacttcatccatccaaggccgcttggccaagagcccaggcagggtgaggggctgtctcccagaccaggcctgggctgcctagcagaggtgggggagggggagcttcaggcctagcccaactctccagaaaccaggggtagcctgcttgagttctgaaatgccagaagtttaagaaaagagggaagggggcaagaggtggtggtggtagtggtactttgctatttaaaggtagaagaatgcaaggaagtaaaactttttttctccatttgttgtttggcgaccccattggagaattccaggaggcatgcaggatgacatcatgttttacaactgagaaatctcagtaattctgtaaaatggagtccctgcctgctccatgttcctgatggaagctgctttatatttatgtgcttaaagctgtattttatgtcacatttaaatgagggtttaataatcttaattatctaccaaaagtagattacgacgcatgaagatcacataaaatgaacttcacttctcagcatcacaaacatttggaatacaaaaagtccagggatggatattagaagtaagaaaagtacaaaagaggtttgcttagaaataacaaaaaatttnnnnnnnnnnncggatcccccctccccccaatccaaataatcgtggtctaggtaaccatcggggtaaatgcttcctttgctcactcctgtaataagaatgagcgcacacagaactgtatgtccaagtgtgtgtgccagagacgctcacatgcatcacacacacaagcacatacacccacagggacagacgcacagccaggttgtggtggttctaggcacttcatatccacgttcttaagtctgccaccttcccattacatttaacaagttatttgg

SEQ ID NO: 437651 - DNA, 983 bp, Homo Sapiens
  misc_feature (896)..(932): n is a, c, g, or t
tggaatcacaaaagtccagggatggaatatttagaggttagaaagttcccaaagagtttgcttagaatgacctaaattttaaaataaacggattccccctgtccccccagtccaataatcgtggtctaggtaaccatcggggtaaatgcttcctttgctcactcctgtaataagaatgagcgcacacagaactgtatgtccaagtgtgtgtgccagagacgctcacatgcatcacacacacaagcacatacacccacagggacagacgcacagccaggttgtggtggttctaggcacttcatatccacgttcttaagtctgccaccttcccattacatttaacaagttacttcttcggcggcaggacgttttcttcgaagaagccctcattgacaacattccccgctgggaagtatctggccaccacaaaggaggacccgtcacttgcggacgccttccccacgcccatcttcttggtgttcttccataccatggccgtgaagtgtccagtccccgaggtgaagccaggctgctggaagttatagttcttgatttcactgtaccatctatcagccacctcctttcctgtctgatcataggatgcccatgcaaggttctccccacactggccacggctggactccgggctgtgcttgaggatcctcgtgctggccagggcctcagaatactgttgagcctcccggttgaggttcttgcagagcttcagtggggggacgccgtgcttctgccggtactcattgtgggccttcaggacctcattatgaaactgtttggaagctgacttgcccatggccggctccgcgcgctcctcgctccccgcggctgcgctgcactccgctctcgacgaattcgagctcggccgatttggcctgatnnnnnnnnnnnnnnnnnnnnnnnnnnnnnnnnnnnnncgccgccaccgcgtgagcgccgggtcgccctatagtgagtcgtatacatcg

SEQ ID NO: 437652 - DNA, 472 bp, Homo Sapiens
cctcacaccgctttattgcaaaatctggaagggggatgagccaatctcacccctctgcccatctatgggcaaaatggagctgaaataaaatgaaaagacactcggtggcgacctgctgggcagcaccctgtaccctagggccccttatcagtgggctcctgatctgctgcccccacagcctcaaccgcggggatggggtggggcaggtcaagcctgagaacagtccactttcaaggacttcccaggcacccataggagacctgaaacctataaagagaagtctagatttaagggggcctaagtcccagagtccaggtttggagggctcgggtctagagccctgatttggggagaggactcagtctgggaacccagactgcaggggagagggtgaattctggagtccaggtgtggggagggggcttgactcatggaggctctgtaagagcccaggattgggggcctgggtcag

SEQ ID NO: 437653 - DNA, 824 bp, Homo Sapiens
  misc_feature (624)..(747): n is a, c, g, or t
aatttcacaaaaacaccacttagaagacccttcattttaaagatgagaaaaccagtactcaagcaatttgcccagtgtcacacagctaggaaatggtggaagtatctgtaaaatctctatgtgcattactctttctattacactagacagccaaagctaaaagaacagttcagatactaaaaggatctattttgttactgtgttaccgacagtttgaaaacattaatgattcttttcaaaggaaagtgttatattcatgaattactactatttaaaaattaatgtataaaatgaggaaaattaagtgacaccttgtgttatacacagaaacatgcccctgattcagtgcctctgcttagctgtaacatgttaatcagaactacctggcatcttcctgaacaagactttcaataggggccagtatgcttcgcttcatccagaagttttctcaagcatcttcaaaggttggtttgttcagcagatatttgagcactatttgccaaatattgcttgggctaggtcagtagcagtgaaaaagacaaaaatccttacccttgtatattcaggtgatggagggaagagttaagtaaaatacaagtaagtaaaatgtttattatatcaggnnnnnnnnnnnnnnnnnnnnnnnnnnnnnnnnnnnnnnnnnnnnnnnnnnnnnnnnnnnnnnnnnnnnnnnnnnnnnnnnnnnnnnnnnnnnnnnnnnnnnnnnnnnnnnnnnnnnnnnnnnnnttagctgggcatggggtcacacgcctatagccccagaaacctggcaggctgacagaggaggatcgcttgagcaaagg

SEQ ID NO: 437654 - DNA, 499 bp, Homo Sapiens
tttaaaacttttaactaaaaagtaaactttaatgtcgaaagtgcaaacttggggaaggcagaaaacatcacacacaaggctgtcacttcacacttggaaggttgcacagcggccgggcagaggcgctcctcacttgccagacggggtggcggccaggcagaggtgctcctcactttccacacggtgtgggggccgggcagaggtgcttctcagttcccagatggtgctgggctgtcggactccattgctggatgtgtgacttgggtttaagcttctcccttctgctctcatctggaaatgctgacagcctgggcatttcctcctttggcactggagactgaagcctggcaaggccctgccctcagcaggaactccccctgggccccactctgtgaccttgagcccaagacaggatttttcctttaccttcttccagccactttgggcctcccggctctctcagagccctgttaggtaggtgacaactctgttcccactg

SEQ ID NO: 437655 - DNA, 1244 bp, Homo Sapiens
  misc_feature (180)..(295): n is a, c, g, or t
cccggaagtagaaaaagggtgtaggctggcatccaaattgtattctacagtgtatttaatatatatatattgttaaaacttttaactaaaaagtaaacctttaatgtggaaaatgcaaacttggggaggcagaaaagatcgcccacaagggtgtcacttcacacgtggaaggttgcacannnnnnnnnnnnnnnnnnnnnnnnnnnnnnnnnnnnnnnnnnnnnnnnnnnnnnnnnnnnnnnnnnnnnnnnnnnnnnnnnnnnnnnnnnnnnnnnnnnnnnnnnnnnnnnnnnnnttttatattttttatacttgaccaggtctcttatgtcctttttctggaaaactacttttaactactaaagtgattataaatgaaaaagtggccaataaagtgactacctatcctcagggctttaaaccagttgggataatgtggtaagagaaaaagttcaaggtggaatgctactcccatacccattattactgtgactatggcttcactaagtctttcagaaataaggaaggcaaaccatgaaaagaaaagaggagctgcactgctagctaaattaaggtagtctggtttggctggactaccttctggtagagcaaaaccccatctgatcccacccaagaaagataggaaactggctccataagccatctgagtaaaagctaatatgggaatataagtttttgtcatcagcatgaccagtggtggagcaacgaaggggattagtcctgccagagttacacataatgctggctttgggctgtcagttaggtaagtgatggtgcttgagggtctggctagaagtgcttgcttctgctgctttttaaagctgcagggggatgtatgatagcactgtgtcttgctcatatacgctggaaatgatgaggaaagccaaggccttggacatggggaaaagttttgctggagagacatcttgagagaaagtatatctgttctgctggttcttagtcccactgggaaagagtacttcagtatctttgaagatgcttgagaaaacttctggatgaagcgaagcatactggcccctattgaaagtcttgttcaggaagatgccaggtagttctgattaacatgttacagctaagcagaggcactgaatcaggggcatgtttctgtggcgactttgagacttgccagcgttgcacggagagaaggaaaacaaccgcaacaacagcccaggtccactggaaaggcacttccggcaagtccc

SEQ ID NO: 437656 - DNA, 2609 bp, Homo Sapiens
  misc_feature (47)..(47): n is a, c, g, or t
  misc_feature (56)..(56): n is a, c, g, or t
  misc_feature (68)..(68): n is a, c, g, or t
  misc_feature (80)..(80): n is a, c, g, or t
  misc_feature (91)..(91): n is a, c, g, or t
  misc_feature (113)..(152): n is a, c, g, or t
  misc_feature (161)..(161): n is a, c, g, or t
  misc_feature (190)..(190): n is a, c, g, or t
  misc_feature (368)..(368): n is a, c, g, or t
  misc_feature (390)..(390): n is a, c, g, or t
  misc_feature (457)..(457): n is a, c, g, or t
  misc_feature (474)..(474): n is a, c, g, or t
  misc_feature (545)..(545): n is a, c, g, or t
  misc_feature (693)..(727): n is a, c, g, or t
  misc_feature (885)..(894): n is a, c, g, or t
  misc_feature (1599)..(1599): n is a, c, g, or t
cccgcacgtgcgttggcgagaggtgtcgggcccccccgccggccccncatacccanggcgaatcatangaggcggccgtntgtgtatttcntattacgtatcatcggctaaannnnnnnnnnnnnnnnnnnnnnnnnnnnnnnnnnnnnnnngttttgtcntccgccacggccctggcgagcgcgcggcncacacaggacaggtaggatgtgttggtgacagagggagaggtgacgaaggagaggaggggggagtgctggctgctcggtgagcggccgagcgcgcgcggggctcagagttgttggggcgagggggtttatgttagttgacctgaacccgcaccacccatttggcgtgccatagctccncgcctctcggtcccacctgcanccgcgcctgggcgggggacagagtgtggggccgagcacaaacacaacagagaggtgtgtcgcccacncccccccaccttttgtntgcgctcgtagtaataaaaaacgaagatagtatagagtaggcgctacgcgggggttgcgcccttttttggntctgtcctaaccaggtgtgcgagggggctcctcctgccttgcgaccaacgtcttcctcgtcttttgttttaaatatttccgcgcgtgagggagggggcgctgtggaaaaaataccccacccatcgggagtgtttgtttttgagagacnnnnnnnnnnnnnnnnnnnnnnnnnnnnnnnnnnnttttcagctcagcgcaaggatttccaaaaccactgaggcggtgtttacccggaggttccccctggggaaaacagtgttgtacggacgccggggggttgcgccagctgggccggccgcgcgccccaaaggagggggttatataaaatttttggagggtnnnnnnnnnncgccggcgagatggtggggttgcgctgtgggtttgggggagtgcgcccttgttgtcttgtggcggggggccgatttggtgtgcgactgggggtgggtggtgggcgtctgtccgttttgggtttttgtgcaatgaagtcaggtttaattttgagattcctgtgccctcactcacgcaaggaggaagtcacctggctccagtgaacacgtgtggaacagaaatcagggccactgaaaagccaccacccacttgagagggcttgttctcaacaaacctgactcagatgggcccactttgggcctttagtcagatttagagaaaacccccggctcatccaatcaatgtgcaatcaatttctacaccatggcagaggtaggaaaagccagtcacatgtccaaatgatgagtgaaaatcaaggcatcgtggagccacctcctccagagggggagccacaatctcaggaccccgaaggagcagacattttcaagtggctcctttacattaagcaaaatgtggtcctcttcattcgggtctgaagcatcatttgtgtgtgagcccggcccactggggacctctggctgccaggtggagagcctcctggtgcagatagcaaggtggagggcagaactgcaaaaatccagggctccagtatggatgtgattcccacagagttcagtcccctttatttacccaagtcccatggtanaaatccctggcctgccaccttgcaaatcccaccgagctcttgattcctgctcccctgatcatggtgttgctctctgcatgattagctgctggttctccagacactgcttcagcttgttcttctgtcagtgtcaaccgttgctccagaatggaagactgtctgagtgaagacatccagctggcccacaatgtgctccagcgtgctagtcagtgtctggggcacactcacggggctccctggggctggctctgcacagactccacactcctgcttctgcctggggggacagggaagtccacttctggcagattccccatggagctggccagtgtggctgggggcctcggcactttcgtgacttctccatgatcaacaatatcaaagttactcttccaaaccatcacttgttcatcagagcctccagaagcaaaatactcccccgttcttgaaaaggcaacagtggtggctggtccctgatgcccgtggagtgtgtagagcagccggccctccatcaggtccaggatcttcagggttgagtcactggaggctgtgatcaggtagtttcccgacgggtggaaagagagcccgttcactgctgcactgtgcaactgataatgctgcagcagccggtgagtccgcacgtcccacaccttcactgtgttgtccatgccggcagcggcaatgcacgtcccactggggtggaagtccacataggtgacaaagccgccatgctcacaatacgagtggacacattcccggctgctcttgtcccacagcttaacagtcttgtcatcactggcagacacgatgagccgcccgtcgggggagaacttggcacagcggacccagttgatatgctggctcagggagaacaggaatttctggcgatgagttgcccacactttgactgtcttgtcgtcagaggctgtcacgaaggactggccatcactgcagaagtggacactcctcactgtggctgtgtgtgcctcgtgccgaattcgccacccagc

SEQ ID NO: 437657 - DNA, 2735 bp, Homo Sapiens
  misc_feature (75)..(92): n is a, c, g, or t
  misc_feature (998)..(1046): n is a, c, g, or t
ctgggtaattatgttttttaatgagaaacatctgagttgtacatatcacaaacagcttcaagtttttgtaccaannnnnnnnnnnnnnnnnngccgtggccaaacagttaaagcccacagcaaagcatcactttggatgtgaaaaagtcttagacaattaacttacaaaaacatccctatcaagtcggtggtttggcatttactttacattagtcagaagctgcaggtgggatctaatttttttaaaaaagaatcgaagtttacattattcatacagattgggcattgttaaaaaatatgcacaaataaccacatccatgcaatataatttctttaaaaatttaaagcaatataaaagagcagagctaggtactgaacagaacattttggtgtataaccggcagctcaaaattgccagctgattggagtaaaactgattctaagcgtattaaatatgattgattgtttccatcagctaagggtgcctatgagtttctgaaccatttctagggtggaatgtgctcgcttgcttctataatatatgtgatggacaccactgctcattgaccatacctacattataataatgctgttttacaaacaaaccagaattcacaaagtgcttggctcttcaggaaactgacatttccagagatccctaaactaatcaactagttctgccaaaatacccggggcacctgccacacaggttccctgctcctggggaggaacacaatctgaaagctgccctgggctccagggagcccgtgctgggtaagcccagaagaagtctgcacaggtcccgggaccttgccaacactaagtcactcagattggtctggggccacgtgctgggcacccttggcaatcaggcaggtggtgtagcactgtggccagctatgccctctatgtggggggtggcccattggtgtacctcagcatggggtaaaaggaccgggcaaagttgttggcctgagtgcagctgtagtcttcttcgnnnnnnnnnnnnnnnnnnnnnnnnnnnnnnnnnnnnnnnnnnnnnnnnngcaggggtagggctgcccggaccacccttgagaggaaggagcgctgtggccgtgtgctgccggggaccctgctctctgtctcctcctcgccttctgtagttctcactgctctgaactgctttgctcggggagctggcacggatgttgcaggaggctggtcccccgagtctacctcgtcgaagctgggcaggggtgaggctgggttctgggttccctgcaaggccattaaatcttgggacacttgctcccgtaaactgtttgagtttcttctcaataacatgcaccgttttcttcagcttcaatacagtcttctccatgtcccttaatgagaaggctgtttgaaatctcctgtaacatgtccacttgaggttgacgttctaccagctccttttccagttgcattagttccctccgacactctaggagagcccgggggtctgcctttggatcggtgacatgagccttctgcctccggttcttggcactcgctaaccacagcagcagatttttgactcaactggtggaagtcctggcactgcatgagcgactgtcgtaagccccctctccagctgtccactgcgccctgtgctgcttcccagagcaggctcagctggcggagtctactttggagctctgtggattcggggctctcggtttgcagaaattccttgctgctcacgttgacagagaccactaatgccttgtaagtgtcaaaggctttcagtatctcctgcagtctcttcactctcagttctatttcctggatatcagagggaggctttgccatctttaacatttccagctctgcttcagtttttttcagccaagtagtgatggcgctgatatcagagttcagctgttgcaaattttgttttattttgagcttattgtgaagctcctgtgcttgaatcatctcccatctgtcgaaggcacctgactgctgctctgtgataccggccagtcccccgtcttcctgctgtgggttgccattcaggactcgcgggccttctttgccaccatccgtgcctggaggtaatagtagctttccatagggtggtttataaggggtgctggacgcagggggaacaggtggaacattcctgtcaccttccatttgcttgtagtgatgctcgggacaggaagggctgtcgggaacatgccacgagtggccatccgaaatggatttaccagaagacgctttcaaagtttttgtggtcattttaagatatgcctcaggattttcagggatttctacatctgacagtgcgctgtagtatgggccctcctcgtcctcttcgtgagaggaggagccccccacgtcgcctgtgtggtcccactccagggggatggagtccacgctgacaggggtctcgcagccagaccgctcgtgccctggggccactagatgacacagggactgaggagatgacggttcctcgctctctccccgtttacgccaagaatcagtctggatttctctggggtcttccatgtctgtttcattctcagaggcctccttttcatcttccaagcccggagtgcaggaggtgagccgccggtggaaccgggagacccttccaaacacctcctggcagtagcggtggagttcctccagctcatcctcaatcagcacagcatccaggggctcgctcttctgaatcagctgctccccaaacacaatgagctgat

SEQ ID NO: 437658 - DNA, 1127 bp, Homo Sapiens
  misc_feature (64)..(76): n is a, c, g, or t
  misc_feature (179)..(229): n is a, c, g, or t
  misc_feature (338)..(633): n is a, c, g, or t
  misc_feature (635)..(900): n is a, c, g, or t
gggctcccccggaggagggaggtgttctttttaacgagagtccccggcgaaataagattttttnnnnnnnnnnnnnaggtggagaaaaaacacggcggacggggtgtgggtttaataatagggtcctctttggggggggccgtttttttaaaaagaaaggaggggtcgcccgtaaaccnnnnnnnnnnnnnnnnnnnnnnnnnnnnnnnnnnnnnnnnnnnnnnnnnnnaggtagctcacaatcagacgaacataggggggctgttagacggggcggggtcggttggtggcgggttaacgtgggcgttgtcctctcctagggagagggggatttttannnnnnnnnnnnnnnnnnnnnnnnnnnnnnnnnnnnnnnnnnnnnnnnnnnnnnnnnnnnnnnnnnnnnnnnnnnnnnnnnnnnnnnnnnnnnnnnnnnnnnnnnnnnnnnnnnnnnnnnnnnnnnnnnnnnnnnnnnnnnnnnnnnnnnnnnnnnnnnnnnnnnnnnnnnnnnnnnnnnnnnnnnnnnnnnnnnnnnnnnnnnnnnnnnnnnnnnnnnnnnnnnnnnnnnnnnnnnnnnnnnnnnnnnnnnnnnnnnnnnnnnnnnnnnnnnnnnnnnnnnnnnnnnnnnnnnnngnnnnnnnnnnnnnnnnnnnnnnnnnnnnnnnnnnnnnnnnnnnnnnnnnnnnnnnnnnnnnnnnnnnnnnnnnnnnnnnnnnnnnnnnnnnnnnnnnnnnnnnnnnnnnnnnnnnnnnnnnnnnnnnnnnnnnnnnnnnnnnnnnnnnnnnnnnnnnnnnnnnnnnnnnnnnnnnnnnnnnnnnnnnnnnnnnnnnnnnnnnnnnnnnnnnnnnnnnnnnnnnnnnnnnnnnnnnnnnnnnnnnnnnnnnnnnnnnnnnnnnnnnncctccagaaaagagaatttgcttgtcttctccctttgtgttccatctgggtccccaaccaagtggatgtgcctgcccacgctgagggcagatcttcactgagtccactgaaaacatcctcacacactcagaaacaatgcttcgccagctgccaagtacagtgtgtgtgccttagtcccagctactcaggaggctaaggtgggagaaacatccggagaattccggacc

SEQ ID NO: 437659 - DNA, 780 bp, Homo Sapiens
  misc_feature (325)..(494): n is a, c, g, or t
  misc_feature (515)..(568): n is a, c, g, or t
  misc_feature (607)..(636): n is a, c, g, or t
agggtccatgtcagtcccaggagacggagcctcccagaggaagtgacatctaaggcatgaaggacaagcaggaattggcagagaagtagggccagggaggaggaccaggaaaacagcacaagttctccaagtaaattaatagatgaaagaatgaactaggggaacggtccggggaacacagggacactgcagctggcgccacagaccacactgagaccatttaactattcaatcttgaatccttcacaacagtgggcaagaagaattaccattctcacctgacagagagggagataaggctctaggccaggtgcagtggctcaannnnnnnnnnnnnnnnnnnnnnnnnnnnnnnnnnnnnnnnnnnnnnnnnnnnnnnnnnnnnnnnnnnnnnnnnnnnnnnnnnnnnnnnnnnnnnnnnnnnnnnnnnnnnnnnnnnnnnnnnnnnnnnnnnnnnnnnnnnnnnnnnnnnnnnnnnnnnnnnnnnnnnnnnncagaggatcccttgagcccannnnnnnnnnnnnnnnnnnnnnnnnnnnnnnnnnnnnnnnnnnnnnnnnnnnnncagagatgctgtgaggaaggaaggaaggacgaacgaatnnnnnnnnnnnnnnnnnnnnnnnnnnnnnnagaagaaaagaaaagtaaaaagaaatcaaagctctaaacacagctgccaagtcaaggactgaagcctagacctgtctattcagaagtcccagctgtttccaccacagccccaacccccgggctggaagagctgagcaacggctg

SEQ ID NO: 437660 - DNA, 357 bp, Homo Sapiens
  misc_feature (319)..(319): n is a, c, g, or t
  misc_feature (338)..(338): n is a, c, g, or t
cttccctgggtggccgtaggacaaagggacgggaagtgcgtggtgtttttctctgtcttccctacagcaccaagcacagaattgggtgcctttccagccgtcggtccttccttgctgagatgttagactggaagatgagaaatggcatcattttaaggcattaaccgttccagccaaggaactctcatttcacaagttcagtgaactcttaactttgggctctgctgcaggggacagcagcgtgatgtttcagaacctgactttggagtcaaacaaagcctgggattttgaaggcccagttcttgccacctgctagctnttggcaaattaatttaacncttccctgtttaagtttcc

SEQ ID NO: 437661 - DNA, 606 bp, Homo Sapiens
  misc_feature (29)..(29): n is a, c, g, or t
  misc_feature (75)..(75): n is a, c, g, or t
  misc_feature (193)..(193): n is a, c, g, or t
ggccactttcaggccaggctaattcccanttccttcagtactcagctgcatttaagggctatcactacaatgaanccccctaatgatgcactggcggacactctctctgggccccagtgatgttgcccatgactgtgctctgtgtctgcagctgcaccacaagtcctggttgcagaaggctccgagaaggcantctgctgggcgtggcttctttccaccctggagtggtctcaccggcaggcacagttgtccacggacatgttggggtacaccttcagaaccacattccgattctcatccaggaagaggaccccaagggagttcatcttatcgggaacacagcagggctctgggatgccagggatgatgcccacagccctgacaatgctctggatggtggcatggttggatggacgaacgatcttaggcatggggaactcacaatgctcccgcgcagtagtaggcatcaaaagatttcggtgagattatccattcattccagccgatgtctgcgaagtccaccttcaggtacctccgggagcacaccctcggctcatcccactgcttcctccgggctttctgcatcgtcttctcgtcaaagtccag

SEQ ID NO: 437662 - DNA, 5082 bp, Homo Sapiens
  misc_feature (75)..(75): n is a, c, g, or t
  misc_feature (197)..(197): n is a, c, g, or t
  misc_feature (242)..(250): n is a, c, g, or t
  misc_feature (342)..(385): n is a, c, g, or t
  misc_feature (388)..(388): n is a, c, g, or t
  misc_feature (420)..(420): n is a, c, g, or t
  misc_feature (453)..(462): n is a, c, g, or t
  misc_feature (487)..(487): n is a, c, g, or t
  misc_feature (565)..(576): n is a, c, g, or t
  misc_feature (591)..(591): n is a, c, g, or t
  misc_feature (629)..(629): n is a, c, g, or t
  misc_feature (683)..(683): n is a, c, g, or t
cgtgtcggcggcgcgatttgtgtctcgcgtggggccacctggggcgggcgcgtaccattgcgcgcacagccgctncggcggcgaggcggggcggcgactatgccccgcggggcactcatccgtgtgcagggggttcaaccacggcgccataagcgcggcgcgtggcttataaaaaccatctcaggcagcccgccgcntgcgcccgggtgtctcccaccagccagccaggacgtgacatcatnnnnnnnnnatactactccacatcgcaccttgagagcacgcggcgctctacgcgagaacatgtagcctacacacggggccgggggaaataatccaaatgannnnnnnnnnnnnnnnnnnnnnnnnnnnnnnnnnnnnnnnnnnnttngaggcggggcggggggtggcgacatatgtggntcgtccgtccatcgggctttctgctcatttgannnnnnnnnncgcacccgattaagttcaaggattnttttatcagagctgcgcgcgcacgctatgccgggggtggggggtcggaaggaaaaatattcatacccgccgagatgcnnnnnnnnnnnncgcgtctgtgcggcncagggcggagaagggggcgatagagccgcgctggattntgccgaagaataatcccatccacgcccctccctcatgcaccccttacggggcgnactttcaacgcttgggtcggtggtcgcggcgggaacaaaggccgtacatacctatgcttcgggtgcctgcgcgtacggcgtcgccaagggtgcgcgggttcaagcatgaattacgcgttcatcccgccgcgcgcgccggagactcgctcgcgcttcgggcggacgcccggccgttcttagggcgggggcgctccggatccgcgcgtaatatggggcgtacacgaggcgctggggtagggcggggtgttgggcgagactttgggggaaaaccgccatgggccggcccgggccagcatttctcggcggccgcgcaggcgggtttggagccggcgggggcgggatggatttaatggggatcgcgggggcgttagttcccctgcggcaaccggcccgccccggggccaatggcggtatgcggaggggctccagcctaggggggttggggtacagtggtatctgttccacccggggagctagaggatgttcccgccattccctcccaaggcctgggtccaagcatcctcccatccttcccccaggccttctggacgcaggctttcagttaggtggtggtggcagcagaaaggaggcagagacagcagtgagggtccaggtttactctttgggaatagggaaggatgaagagaaggggtggatgggatgggggcacccctcagtagtcagctgtgtaatctgtgccatggagaccccggcacagcagtgtgaactccttcaccatctccttcacccgcctcttgttcactcgctcgcgaaggatctgctggctgaaggtatccttctgttcagggctgaggcgggcagaggggaaaccaggtggctgcagggcctccttgatccacatgctcaggaggctgaagcagtgcttgttcagggcgaacaggatatcggcaaagcagtccatgaggctgcgggaggcctggcccccaatggcctccagcactgctatgagcagcatacgaccgtcttcctgtaccacctttcccacagactctacttccccacaccgaggcagcagctctgtaaagaagccacaggaggccttgacagtaggtgcctcagggaacttgagggccagcacagcacactggaacacagctttgacatccaatcgttcacacaggaacaaatctggcttccgcttcagagcctgtgccaggagttgcataaatgaatcaacaatatcaggatgatcctgggcccttgctggaagagagtgagtgtgacggaggtgacgagcaggaagagggcctcaattgggggaaagtgggcaggctcatgagcaaagatgtggaccagctgtcgagtgaggtcaagagcagaggcctgggggatggtgctgtacatccgacccagcatctcacacagctgtggcaccatgggggcaaagtcatccagcagcgtcttaacagacttctcaaagatagcgcacaccgcctccacaacctgggcatcattcaaccatttgctcagcaccttctggataagctggaagacctgctgcagcaccaccaccacggggttgggtccctgtggcactggcagcttccgaagctcagggccttcatgatcatcctcatgatgactgatgtccagtgtggtgaagaggttggagagaagccccaagatgtgaacaatggccagcttgttggagggattgggtatctcctctgccagcttctccagttgctggatatagggtgagataagcgagtgcaggttcttaaggatctcctccacttgaagagctgacagcaggaagcccagcgcctgcatcagccacatgcactggcttgtcttgtggatctgtttcatcagcacatcctgggacacagccacaatgttggcagcatagggaggcaggtcatacttgcactctcggcagatcttcttgagggtggacacagaagagacagacagctcaggatttcctagggcatgcagtaccaagggcagaacactgttgatcatgacggggtggtcagccagccattcagacagagctccaatggtgaacatgacagtgtctgccagctgcacgttgctgatgctgatccgtgggatgaggccaatgagcccaggcaccacatcagaatagttgacgtcaatggttttctgcgatggattggaagcccgtagaggaggcgcctctgtgtgctgccaggagtagggctcctttgaggctggtgagcaaccggcccagcttgtcatagaggttgctgagcagctcggcccccaacatctcatagacatacatgagcgtgtctgagatgtcccaccctgtaaattcggaactgctccttctcgtctgaggaccagaatccatattcctcatcagaagggaactgggccttgtgcagaagcacatccaccagctggaagtagactggccggtacacctgctggtatacagcctgcttctctgcctcaaaggatagaatatcatcctgcagtgtgtaccagaaggtgagggttagggagctggtggtctcattgacaggatagtggccagggatgcctgtgcagaacataatcatgttgacgagtgccaggaaactctgccagtgctctacttggtccagcaaggcccgggagtggttctcgcccagggccacagcgatgcgacagatgccatgggaggtctccatgtccccattctgcactgcctgccgcagttgttcctgcagacccagcaccagcgggatgagtttcaggagtgtgttcacgtacctctgggcatcaggctgtgagatggcattcacaatggcctccacactgctgtcgaagagctccgagtcctgcagagcagcaaaggcagcctgaatgagcgcctcacagtcctgcagcggcacctccagctgcacccagctggagaaacacttgagcaccttctgacgcacacagctgggtgagctgggctgctgtagcagctgctccagcagcgggaagacagccccgcattccaccgccaggctggtccgcaccaggcctttgcggtactggggtaggcgactggtctggaactcctcaggcagcactgtcagcagctctaacagggctaggcagcggccctgcccatcctctggtgagtcctcagcctggaagagtcgtaccatatctgccacagcacatggccaagcatcaggcatcatggttagatccagtgaggccagttccacgacgcacacgagtcagttcaatcttggagccactggcaaagcgggtgatttgggtgaagtgcatgtgcctttaggctttcatactggtcagtggggatgtcactccagtagcgagagatcttgatgtgaagagcacttggccccaaagtactggatctctggtaccttgtcgggctgcagtagctgccagctgaagtgccaggcctgtggggagacctgggcctgcatcagccacttctgagccaggttcttattctcaatgttgggatcatagtagagctggtgcagcgccttctccacgttctccacagtgaagtccaaggctggtgctgctccagcccctgcagcccccggctgctcctcccgccgctccatctttgctccctccctggcagggaggtgggccctgatctgtctcctgccccagccccttggctgctggccccctgctagaccccggcttgggtgcccagggagtggtggggtgagggggggcccagggcgggcatggctgccgaggcctccccacctcgtttgggggtgggaggcttgccagagaccaaaattggtgctcttaggagacccaatgaaggggactccgaggagggagccgtcagtgaggagctctcaggcggggatcctagtggcaggtaacagctctgtccccagaatctgtgtggagggagtcacaggggagggaggcctgcgggggaaaccgagtccctggctcttgaggggtcacagggtcgatggcctgtacccacaacacccccgcctgggtgagctctcggctgctatgaacaggtcatggggctggagggtcacgggagagagagagcccttcgtggttacggaggcgtccaacgaagcgcggagatgcagctccgctagtctagggcgaagagtccgtggagttgaggggctgtggcaggtcccttccgttcggcctggcccgcgctgtgctcaacgcccggctacagccccgctacagccgctgcctccgccccagtgactgacaagacaagccaggccggccgggacggggcagggaacactcggcaaggcgcgggcatgccctcgagcagcacgtgtccaccggcaccatggccaactacagggcccctccactgcgctgccagttcgtggctcgtgacaccggcaccggtacagtaccggcacaggcccagacgaactgcgcggaa

SEQ ID NO: 437663 - DNA, 1256 bp, Homo Sapiens
  misc_feature (42)..(42): n is a, c, g, or t
  misc_feature (97)..(97): n is a, c, g, or t
aagaaaatttgggaaaatattggaagtcccctcaaagttggncttcactgtaggtttaagttctcctttccaagccatttgtcaaggttaatgtgtnagatactgtttcatcgttttctcccttagcaagaccatcttgaattgctgccattggagtcactttctctggtatttttccagcctgattctcagtccagcttgtgggcttattgggatcctcctcataattgttggcttcctttgagattaatttttgtaaaacctctgctacttcatcttccagtgtatgtgcttggctttctgtgataaggccgagattaagtagtttagaaacaatcttgtcaaacacggctctgtcattttcttcataaatcctggcagcgattttatggacaactgtcttcagcggttaaaggagtcccgtctagttgatgaagaccatctggatcatcttgaaatttatgatccaatccactcttagtagagtcataatcatcgatcagttttcgattcttggttgaatcaacatcttccacattcaacttattatcaagtggggagcttcttatagattgtctttctttctcaattttttccttttctgttattgcctttagcaggttcaagttatcaacaaaagaatagttgctctgacctggcttgttttctggaggatatgtttttttaatcttgtcttcttctgcttcagcaatctgttcattcaaaggtctttctgcacttaattctctattatgtagagatttgtcttggcttcctccaggtttggggaaagcttgaatcgggagcactaacaccagaatccaagtgccggtcccgaggaaccccattcttccacgctcggcttgggtcacagcccggcgctgggctcctggagctgtagcttttgttatgaatgaaaaggaggagtaaaaacaggaagagccaggagggtgggtgtggggcgggagaggggccgggactgggcggctgcaggatctctgacactcgacggtcaagggataagcagggttggggcgcgcgggagtcaagtctccaggtagaggggagcgctgtccgccctgtgggtgctgaagttcctgtgacgcggagactgcgcgccagggcgtagctttactctcgctccctcctggagaggaagtgaggaaggaagcgcatgctccatgcacgccagaggcgggaggggatggcgtcggtgactccaacgctactccaatcccccgggaatggaacccgct

SEQ ID NO: 437664 - DNA, 933 bp, Homo Sapiens
  misc_feature (849)..(885): n is a, c, g, or t
ggaaagccgagtaggtaggttagaaaatctgtcaacacggctgggcaatggtcgtcataaatcctggcagcgattctaggggccaggtcttcaacgggttaaaggagtcccgtctagtgtgatgaagaccatggggagccatcctggaactctatggagtccaagccaactcttaggaagagtcataagtcgtgcgatcagatgcatcgattcttgggttgaagtcaacatcttccacattcaacggtagttagtcaagtggggagctttcggatagatttgtctttctttcgtcaagttgtttccttttctgttattgcctttagcaggttcaagttatcaacagaagaatagttgctctgacctggcttgttttctggaggatatgtttttttaatcttgtcttcttctgcttcagcaatctgttcattcaaaggtctttctgcacttaattctctattatgtagagatttgtcttggcttcctccaggtttggggaaagcttgaatcgggagcactaacaccagaatccaagtgccggtccctaggaaccccattcttccacgctcggcttgggtcacagcccggcgctgggctcctggagctgtagcttttgttatgaatgaaaaggaggagtaaaaacaggaagagccaggagggtgggtgtggggcgggagaggggccgggactgggcggctgcaggatctctgacactcgacggtcaagggataagcagggttggggcgcgcgggagtcaagtctccaggtagaggggagcgctgtccgccctgtgtgtgctgaagtacctccgctctcgacgaattcgagctcggccgatttggcctgatnnnnnnnnnnnnnnnnnnnnnnnnnnnnnnnnnnnnncgccgccaccgcgtaagctccagttcgcccatatagtctatactcccg

SEQ ID NO: 437665 - DNA, 1838 bp, Homo Sapiens
tttctcatcactgagtatttattatatataacaaatacatgggaaagaaaaaactatattgtgtgatataaatagtttatttacattacagaaaaaacatcaagacaatgtatactatttcaaatatatccatacataatcaaatatagctgtagtacatgttttcattggtgtagattaccacaaatgcaaggcaacatgtgtagatctcttgtcttattcttttgtctataatactgtattgtgtagtccaagctctcggtagtccagccactgtgaaacatgctccctttagattaacctcgtggacgctcttgttgtattgtctgaactgtagtgccctgtattttgcttctgtctgtgaattctgttgcttctggggcatttccttgtgatgcagaggaccaccacacagatgacagcaatctgaattgttccaatcacagctgcgattaagacatactgaaatcgtacaggaccgggaacaacgtatagaacactgtagtcctttttttcacagtgttgtccagtataaccagcatcacacctgcaagatggctcctgcatattgatagaatgctcacacttcccatgcatgcagaagccattgtaatgttccggacaaggtatgtggtgttctctggcactttcttctaatttgttagcattctctgcataatctgttcttgcataatgcccatcttcagacttagtagttgtagttgtgttatcttgacatcgacccaaagacatgacttcaattttctcctgtttctgacacgatgcttctttgatttggcatgcattatcataagatttcccatcagaagcgcagaggggattgaagttggtttgagaacagtcaatattacacacacaccagacatcctcggcatcttcgtcacattctgcaccaaactggcaaatatcacaggtggatgtctccttttgactagtttctccagagccttcatggactccatctccagatcctgatcctgcatctgtggcacatgatccttctgacaccacaagtatctcactctgctgtttgcatgcagcctgtcgcaggtaacactcattctggtagctctccccattggagccacacacaggcacatagtcattgttgcacttgaactgacagacgcaagtcacagtgtctccaattcttaaacattccccatcaaatttacaggtgttggtgtcacagaggaagagatcattttctctgtcatcataaccagagcaattccagccggtgggcgtttggcagtcacttaaggaggtagggaaagcagcgagcttcaccgggcgggctacgatgagtagcatgacgggcagcagcagcagccagcaaaagccctcgcaaagtgtccagctgctgcactgccgcggggactcccacagcaccatgactagttcgtgcaactctgcagcagcaaacggcttccgaggaacacaggatcgcgggggccgggcagcgggctactgagcatcccgcggacggcggcagcagaggcggcggcggtggcagtggcacccggcggggaagcagcagccaaacccgcgcatgatctcgagagtttcagcaacatccagggactgggctcagccccggagcgagagggtcgtccgctgagaagctgcgccggagacgcgggaagctgctgccataaggagggagctctgggaagccggaggacaggaggagacgggagtccaggggcagacgagtggagcccgaggaggcagggtggagggagagtcaaggcgccccgcagcccggcagccgcctctcgagctctgccgcccgcatccctctggcgttttccgct

SEQ ID NO: 437666 - DNA, 1700 bp, Homo Sapiens
  misc_feature (23)..(23): n is a, c, g, or t
  misc_feature (65)..(65): n is a, c, g, or t
  misc_feature (78)..(78): n is a, c, g, or t
  misc_feature (145)..(145): n is a, c, g, or t
  misc_feature (153)..(154): n is a, c, g, or t
  misc_feature (156)..(156): n is a, c, g, or t
  misc_feature (166)..(166): n is a, c, g, or t
  misc_feature (217)..(217): n is a, c, g, or t
  misc_feature (293)..(293): n is a, c, g, or t
  misc_feature (317)..(319): n is a, c, g, or t
  misc_feature (336)..(336): n is a, c, g, or t
  misc_feature (344)..(344): n is a, c, g, or t
  misc_feature (353)..(353): n is a, c, g, or t
  misc_feature (1523)..(1523): n is a, c, g, or t
attttattatatacaataccaanttaattgaaatgaacagtacaagaatacatgaagtaaatatnataacaataaaanatcgtctcacttaggcaacaagaaatgctgagtagtattattacatattcaaaccagacttaaactncagacacnnanggccagatgngtgacctgtatcacaggatatgacaacacatcacctatctccaaacagggnaaagcatgattattaagtttatctacaccagcttatttattcaaatttgctcttcttattaaacagaaaaaaaatncacattcaattcctaattggtaannncatttcgcaactctganattggggngctaatggnaccactctccactagcatgagagagcaatatatgaatagagtacacagctttccaacctattaacaggttcttattttcagaattgagtgggaaattgtgtgtggggtaaacagcatgagagagaagtcggtcactggttgagctgttcacagtacaaaaaggtgacaaaactatgaaagtgaaaatactatggtaaataacgaaggccccaatgcaatttttgaaaatgatccctgaaaagcaaaaggttagagatactcatgttgcaaactccatcttcatccttcaaaggtcacatgcgccaaccagccgagactcatgacagtaaacttcctcagggttctctattatgatcagggccaatccttcacctcgagggctgtcgtagtaccccgggagcctcacatgactctctcagcccctccctgctctgagtgactgagagaacttccttagctgcagggctgcaggcaggtgcttctgctcctgagctcctaaacacaccaaggggtgcttgaaggtccaggcccgcccctctctagaggaaaaacctactcatttgagactacaaacctcttctagaagctgtaacctgaaatgctagaatgagcttatattaatcatgcttttttataatgtataatgttttcacatcttggggacctcactgactggggagagactgcccttcccagggcaggccaattcttagagatagcaaaggggtcccttgggagtgcacctttgcacactaaccaactcagagtccatctcctcgatttgactcttccactgcagaaggcagtatcccctcaccctgatcacccagggccaggcaccaggcagctggagaccacccctgtagctactgcccaagacattcaaacctgccaatcctacactctgcccccgcccatcttcgcctttgccatggagacacagtggaaagctgctcgcctagttctgcctcctgaccactctggtgcgtcctcctcctgtggccctgcgtggcctggtgcgctccttttctccagaaatgcaagtaacaaacttttctttcaatgacagcagcctctcctttatgaattaaacgtgggtacatttcgataccacgggcacagtgagcagggtgagtccgtgtgtggcacagggcatgcctcgcctcttgntgcgcgtggcttactaactggacccccaccctggggagcatggccgctgctggcatgtttgcactttggctgcaccacgtatgctgtgtctgccagtgtctgtgacagtccagcctaaattataagaggactgagctcattcagtccttggtgctgcagactagggtgatgtgcaat

SEQ ID NO: 437667 - DNA, 447 bp, Homo Sapiens
  misc_feature (354)..(354): n is a, c, g, or t
  misc_feature (425)..(425): n is a, c, g, or t
attacttaggtgtgattatttattaaagaacatttacaacactgtaagttttattcagttcaaatatcacatattagatatacaataccaattaattgaaatgaacagtacaagaatacatgaagtaaatatcataacatttaagtttcgtctcacttaggcaacaagaaatgctgagtagtattattacatattcaaaccagacttaaacttcagaaacagaaggccagatgagtgacctgtatcacaggatatgacaacacatcacctatctccaaacaagaaaaagcatgattattaagtttatctacaccagcttatttattcaaatttgctcttcttattaaacagggnaaaaaatacacattcaattcctaattgggtaaaatcatttcacaacttctaaaattagggtggctaattgncaccactctccacttggcctgg

SEQ ID NO: 437668 - DNA, 882 bp, Homo Sapiens
  misc_feature (587)..(638): n is a, c, g, or t
  misc_feature (649)..(708): n is a, c, g, or t
  misc_feature (711)..(726): n is a, c, g, or t
ttaaagctttaaattttattttaaatgattaaatattactaaatgataatattcaactacataaatccttaaatgaaaataatttagcatttattctaatattgaagataataaaaataaacctaaggcaagacagaaaataattcactatggtactatttacctttcagtacattaaatcagtgtttcattgaacttaaatttgtacataatttacataagtaaatcacaccatcaagaaccataatactacaactttgtatttgccatagtgtataataacatcagtcatgggattggattggcatgctagcaggcattaagcctaatttgaagaatctagtaattaaaagtctagttaccactttgtcaaagtctgtgagttcttaattaagctattcctaaaatattataatatacaaaatatatatttagatcataagctaaaatatgaaacgcaaggggagagaaaacaaaaatataaaagatttagctccttaaagaagtaacagaaaatggcttccaacttcatgttgcaattaaataataactattattatattattgagacagagtcttgctctttnnnnnnnnnnnnnnnnnnnnnnnnnnnnnnnnnnnnnnnnnnnnnnnnnnnngttcaagtagnnnnnnnnnnnnnnnnnnnnnnnnnnnnnnnnnnnnnnnnnnnnnnnnnnnnnnnnnnnnaannnnnnnnnnnnnnnnatcgttttagtagagacagggtcttactatgttggcgaggcttggctcaaacttctgaccttaagtgatctgcccatttgggctcccaaagggctgggattacaggtgttagccattgggcctggcccaactaattttttcttggtagaactcatg

SEQ ID NO: 437669 - DNA, 2809 bp, Homo Sapiens
taagcttataaattttgtaatgaaaaaatccgcttttttccaaggctgatataaggaatttattgtgtaaaaaagaaacatctagagaatgccacagacaggcctagtatggctacagtaccgtatataaaagacaattgctcacaatgatagcactgaagcactgagagatatcaaagtactttctgaatcgaatcaaatgatacttagtgtagttttaatatcctcatatatatcaaagttttactactctgataattttgtaaaccaggtaaccagaacatccagtcatacagcttttggtgatatataacttggcaataacccagtctggtgatacataaaactactcactgtactcatctggtatatacccgcacgaacattttgaaattccaatttcttggtcaagtgatatattgcttgaattcattaaatatatttagatttctgtattatacaaagttaaatgtacaactaaattagtatatgaaaagtgctcactacgtttttacgggaaataatcctgacaaaaatgtttaatgaatgtactctatactaattctgcctttttatacttaattctaaatttctcccctctaatttacaacaaattttgtgatttttataagaatctatgcctccccaattctcagattcttctcttttctcctttatttctttgcttaaattcagtataagctttcttggtattttaggcttcatgcacattcttattcctaaacaccagcagttcttcagagacctaaaatccagtataggaataactgtgttagttcttgaaaaagcattaaagacatttttccctgaaacatacagaacatgtcatgccaaatctcttgtttacataataaactggtaataccggtgaattgcacatacagattttatctccccagatagaataaacttaaatatttaaaacgtacctttaactgactttgtaacagacagcaatattcaatacaaaaatcacaaaacccactaactttaaacgctgcatagtacagcatacaaactcatctcccctatgacctactgaaactatgacaactttttaagctactctagcatttaaaccttaactagaaatttatacgaaacacgattttatgttcaaatatggaaataagtaacataattccaaaacccaaaagcatcccagcattctgtaaaaagaaatacccccagcggctacatccatggtcactagcatcattgtgcagcatttcaggtaccatatcaaccagagcaacatacatgaataagccagcagtaagtgcaaatatccacatagaaacattttcagcataatgaccaatgaaaattcctgttgccattccaagatacgccagcatggctgacaatgcattataaaggacagcctgcttaacggtcatgccagcctttagtagaacagcaaagtcacctaattcatgaggcaactcatgacagaacacagcaacagaagtacttaaaccacttgataagccttcagtaaaagcagcaccaattgctaggccatcgctgaaattgtgcaggccatcacccattatcaccatccaggccaaagtggcgacgccggcatctttcagctcctcccgagagtagcgctggctgtgactgtgaggatggtggttttggtggtggtgatgatggagaatatgatggtagtcatgatggtggtgaatgagatcgtctgactggccgagtgtatcgtggaaatgtgaatggcatttattcttgcaccctctgggtacatattcattgtagacttcctgtggatgagcatgagctatcatgacctcttcttcttccaagactgcaggctgctgagaatcaaagtgggagggctcttgtgagtctgctcgtaaatagccttcagttcgatcatctgtatctactttctcctcatttgttgaaagttgagattcatacttggacaactgcttcttaatctccacatcatcatcattttcaggtttcttctgattctttttcttcttatctttaaattgtttgatcaatgtgaggacatgttcaacaagaaacatgaaatacaggcctcctagagctgttagacccttccacgtggaatcaaaataggcactttcttctatgttttgagaagacagatgactgaaaagtggtcctcttttcatttccattgctggttcttcatggctatgactatggtggtgacttgcatgagaatgtggaagaaggtgtaaaaaagcatcaccactcaaagtcccaacggccagtgccacaaggaaactcaggagaaatttgaaaaacacccgattcatgagaggcattaagataacccccagcagagacaggaaactgatgatggaaatggctataaaaccaccaaccgcaggctatttgtaatgaataggtctttggagggatttcagccttcttttcacttgtatgaatcagacaagatctagcatcaatttggttgatgatggctggacagagatagttgaactctgttgcattcagcggaacctggatgcccatgccatgagatgtcagtagctttgatgcattgaaacactcctgaggattttcatttgtgtttctggaatacataaagccttttcggggctcactcacagattcatttgttttcctaccagccagccggctcacccggctctttgatgtgacactgggtggagtggagctgcttacatctttggggaagagttttccaggtcttggagtctctattgtctctagaaagtgagttccttcagagacagtgtgtacacagtga

SEQ ID NO: 437670 - DNA, 616 bp, Homo Sapiens
ttttccacctgccaatgaaatgataccatttctcacgtattcccctttccgttcactacgatttcctttttctaatgcaggatcactaaccagtctctttgccaggatgaacaaactcctgaggattggaaaacagtagccctgtgacttcatgcttcaccacggcagcattcccggggatgttcctggccaataccggtacttctaaatccattgcctccaaaattgcagctgacatgccttcagagacagagctattcaccaccgcgaagcaattcttcaccaccgcgtgcagatcttcttgaggcatctctccaatcaatcgtaccccagcggctacatccatggtcactagcatcattgtgcagcatttcaggtacctttaaaaaaaagtaagggaaaataagagtgacatttaagtttttagaactacagattagtttttagaaaaatttataggacagtatactagctttatttgtagctagatatactgtgagttaattccttaaaacatgattacatacatactgactctagctaacaatgtcacacagcatttcctagcagtttaacaatgattactcatgatgttgaggcaagaagaagtttgtag

SEQ ID NO: 437671 - DNA, 584 bp, Homo Sapiens
gttttctataagatatcaacgaggtacttcttggttttattagatatgagaattatcaattcaagtcagaagtgccacaaccactgccatattagaaagattagtacccgagagcccagactgtcacccggctggaggcctctcgccgatggctcccagggaccactgacctaatcaagggcctcctccttcacacgccaccctccaccccaacccctttatgccttcttaaagtccttcagggaggggacccaccatcaagattgtcctttctggcacctaactcttctgtctgctagaagacagcaatgagactgtccctacaacgatgatgcttatggtggccacatctcaaagaagctgagagggatctcagccccgtattgtcacttgggaggcagaacccaaatcttagtaaatgaagactttctctcttgaaccattcacaggaatactgaaggtaatgaaaaaataatgtgtaaaccatcctttggagcagaggctacaaactcacatgcccgcctggaccagcaccgggcagacgtcttacatgagtgaagtgcagtgggggatgggaagggcgg

SEQ ID NO: 437672 - DNA, 1324 bp, Homo Sapiens
tttcaaaggacacaattcagctttatttttacttaattataacaatttttaaaaactccatgactttgtgctatttctaatatttaaataaaaaacatttcaaattttgcacaaataatttaggccaatacataactagatttgaataaagtcagatgaagcaataattcctcctctgtgtttgaaaggaatgagtgtggttacaaagtcacaggatgagtccctgggatctggggtgggagaaggggtggatcaagaatgacttgggcttgtcactccctagcaggctgagggcgtgacacagcagctcggtggcggagaggtctattctagtttctaacactccaatgctaactttttggatgtatttccttctagcatgtagaaagggcttttcttggctgccaggaagtagggagcagggatgtggcatggtgatgatctgaggacagccaggcatatgctcagacactttggaaaactggcggagggggagcagggagacagaatcttcatcttcttccttttgtgaactggggaggagggtgcttggtgacattttcctgagtataaagaaggaatacaggtttgaaaggtttgtaattgtatatgaaaacaggtattgaaaaccaatactgggggaaaaaaggcattgtaaacacttctatttaaaatgaagatttctggaacaactatactatatagtggtatcacaagtctttagctggcaagatctagcactgaaacaactcttaatttttaacttgtgagggttctttttaaagcaccacttaagacctatatattaaaaaaattaaatatagaaagattgttctatctaataaatgagtttgagaatgcacaggaaacaacaaaacccataacctctggtaactgaagtggagcattaaattcaaagccactttgaggatttcctacattgttcacctaagggaaaacaaatgcagagctatcaaagagcttctcgataaattcccagaccttggagggctacagcttttcataaatatggtcactggactgatgatttctaaattttaaatgtaatacccccaaaaagtaaaatataggatttataagtattttatttttctgagaaatgaccaaaaaattggaaccagttttaacaatctctgaaaactttaaattctagacatgtttattttgaaacacacttccaaacaagataaacaacaatatgtaagtctactacactgcagaagtagcttaaacttgccaagacatcctggtgccgaattcctgcagcccgggggatccaggagttctagaccgaaagccacct

SEQ ID NO: 437673 - DNA, 1309 bp, Homo Sapiens
ggcggtaaagatctagcacctgaaacaaactcttaatttttaaacttgggagggttcttttttaagccaccacttaagacctttattttaaaaaatttaaatatagaaagtttgttctatctaataaatgagtttgagaatgcacaggaaacaacaaaacccatttttaacctctggtaactgaagtggagcattaaattcaaagccactttgaggatttcctacattgttcacctaagggaaaacaaatgcagagctatcaaagagcttctcgataaattcccagaccttggagggctacagcttttcataaatatgggtcactggactgatgatttctaaattttaaatgtaatacccccaaaaagtaaaatataggatttataagtattttatttttctgagaaatgaccaaaaaattggaaccagttttaacaatctctgaaaactttaaattctagacatgtttattttgaaacacacttccaaacaagataaacaacaatatgtaagtctactacactgcagaagtagcttaaacttgccaagacatcctcctttgcacttgtttcctcaagagttgctaggtcattttttttgcctgtggccagcagcctctttaaaaacaacaaaggacctaatgtcaaagtcactctcaggtgtttgccctgccagctcaggccttctccgcacaccgcaccccgaaggagcacggaggcccgcagggctggctggccctggttccagcctcaccgccggttggaccgcttttcgtacttgtcctggctgctccgctttcgtggcggggagtaactggcggaacctcgagcgcggaagctgtgcttgtaaggatggcttctgtgtttctttgggttttcttctttctgggcctggctcttggctggttccttatcgccctctttttgttcatggtcttgctctttatgagagggcaatgtgtttttaattgtgttaattagaaatcttttattggtgctagcaagaggacacttcatccaacccatgggtcccattgtttcagctctagttttcccacgttttgcctccttaagcagttcttctattgctttcctctccagctcctgatcctcttccatcgctggggcggtttctggatcctcaggtggtgctggcggatcgggggctctgtcccatagcgcgaggcgcggaggcgaagcaggaagcaaggaccgaccgacggaaggcgcggaggacggaaggagggaggaggagccgcagcggcgcggcagggcccagccgcggggcggggcatgaggctccaccccca

SEQ ID NO: 437674 - DNA, 1450 bp, Homo Sapiens; identical to SEQ ID NO: 122994
  misc_feature (14)..(14): n is a, c, g, or t

SEQ ID NO: 437675 - DNA, 2735 bp, Homo Sapiens
  misc_feature (418)..(418): n is a, c, g, or t
  misc_feature (1693)..(1693): n is a, c, g, or t
gaaattgattggactggatatcccacactttgctgcagatcttccactgaatcgatgtaaaaaccgttacacaaacatcctaccatatgacttcagccgtgtgagattagtctccatgaatgaagaggaaggtgcagactacatcaatgccaactatattcctggatacaactcaccccaggagtatattgccacccaggggccactgcctgaaaccagaaatgacttctggaagatggtcctgcaacaaaagtctcagattattgtcatgctcactcagtgtaatgagaaaaggagggtgaaatgtgaccattactggccattcacggaagaacctatagcctatggagacatcactgtgggagatgatttcagaggaagagcagggacgactggggcctgttaggacacttccggnttcaactatggctgacgaggtggcaggatgttgatggcttttaactacactgcatggcctgattctggtgttgcccacagcaaatgctgcagaaagtattctgcagtttgtacacttggtccgaccgcaaggtaccaagagcaaaggtcccatgatcattcactgcagtgctggcgtgggacggacaggaacattcattgccctggacaggctcttgcagcacattcgggatcatgagtttgttgacatcttagggctggtgtcagaaatgaggtcataccggatgtctatggtacagacagaggagcagtacatttttatccatcagtgtgtgcaactgatgtggatgaagaagaagcagcagttctgcatcagtgatgtcatatacgagaatgttagcaagtcctagttcagaatccggagcagtaagtggagaagagctctccacgagtgttcagtcttagaactattagagggggatgtgatggatgggacaaaagacagcagtagccatttgtattgactctgacttcacatgagtatttcttcccagctcctggcctcacatgggtggtcacagggagaaacaagtactgtagcagatctttgagtttcaatgcaccttggttggtgttggcaacaaacaggagcttctgcacatcatgatgactttacctccattccctctacccagaaccctaaattattctgttattggatctgtgcctgtaatatcaggatactaccatccaaatctatctagatatcttgtgcaaatattttattgattacaagggctgtatacggggttacaaaaagacatgagctggattggacactcctaaaaccaaaaacaacagtgacaatagagtctcaggatagcagagtctgaaaataccttggtctcccccattatgtgagcccttatttgagagcttcatgaagacacttgtaacatattcaacgtcctgtactccagttttgactacgagatcagattttggaggtgagaggacatgatgtgcgcccatcctcccttgcttccagattgttttagtgggccctgatggtcatttttctaaacagaggccctgctttgtaatatgtggccaaggagataatttatctcacagaagcaccgggaagacttagccttaaagagcctacagtgtccttttggactctttcacttcgggacatttaataatggaccaaattcaacagaacaccaggaaggtcaagacgctctccaaagggcaggaagtacagcacttncgaagagtttagttggccctttgctggttgggctgagttttttatctttaggtgtttgtttttcagtgcaataatttttgtgtggtgtgtgattcttatcagaaagttgaattgttttttgtctacaccgttcattagccccataacccaggaagggacaggcattgttagcatcagattattccttattattaaaaggaggcatggccacacatgaagaaatggtcattctacttcaaagaaattgagccagcactatctgtactccaacattaccggatctggattggggaggttggtcagggaagagaggggttctacccacagatcaactgtgtaatcttttactattcaagctataattcagcttcaaagtagagtagaaaaaagattgtgttaactgttctagttcttgatggttttgttccttattaacagttggtgtttcttccttggcccttttggactaatgttactgtccaagttctttctcaagaaaccacatctggttcagaagagtgtcaagttggactctttgaactctgttgctgtctgagcaatcgtggtgcctagactttgcattccttgttctgttgacctgcatacatgtgagagctatttctttaagaactatataggctgtgaaaacgcactttctttcccccaaagagctgggaatttatgaagttatggcaatgaactgcagcatgctgggacaattatttgactactttttttgtaatattgtcaaatgtctctatggattctgacagagatttctttttgttttgttattcttttggttgtcagtttcattttaacgagtgtaactagtaacattttattctttggattttgtataattacagtacatgattgtgtattgtgacatgaatgctgtcaaaatgacattgatggcattgtgaagcctgttactttgtgtcacttcctgataaataagaggtgatgacatggatatacaacagaaaacactttgagttgaaagtaaacacaagctggctgcttccctgtggcaactgtg

SEQ ID NO: 437676 - DNA, 1039 bp, Homo Sapiens
  misc_feature (1003)..(1003): n is a, c, g, or t
  misc_feature (1017)..(1017): n is a, c, g, or t
  misc_feature (1024)..(1024): n is a, c, g, or t
gggtctcttgaattttgaggccctagagatagtcattttgcaagtaaagagcaacgggaccctttctaaaaacgttggttgaaggacctaaatacctggccataccatagatttgggatgatgtagtctgtgctaaatattttgctgaagaagcagtttctcagacacaacatctcagaattttaatttttagaaattcatgggaaattggatttttgtaataatcttttgatgttttaaacattggttccctagtcaccatagttaccacttgtattttaagtcatttaaacaagccacggtggggctttttttctcctcagtttgaggagaaaaatcttgatgtcattactcctgaattattacattttggagaataagagggcattttattttattagttactaattcaagctgtgactattgtatatctttccaagagttgaaatgctggcttcagaatcataccagattgtcagtgaagctgatgcctaggaacttttaaagggatcctttcaaaaggatcacttagcaaacacatgttgacttttaactgatgtatgaatattaatactctaaaaatagaaagaccagtaatatataagtcactttacagtgctacttcacacttaaaagtgcatggtatttttcatggtattttgcatgcagccagttaactctcgtagatagagaagtcaggtgatagatgatattaaaaattagcaaacaaaagtgacttgctcagggtcatgcagctgggtgatgatagaagagtgggctttaactggcaggcctgtatgtttacagactaccatactgtaaatatgagctttatggtgtcattctcagaaacttatacatttctgctctcctttctcctaagtttcatgcagatgaatataaggtaatatactattatataattcatttgtgatatccacaataatatgactggcaagaattggtggaaatttgtaattaaaataattattaaacctagtcntgtgttgccactcngcattanggtgggatgtaagta

SEQ ID NO: 437677 - DNA, 1246 bp, Homo Sapiens
  misc_feature (153)..(162): n is a, c, g, or t
aggggggaaaattccgttcccggtttttcgaaaaaagtaaaaaggtgggggaggtttttcacaaacaagagtttgacccttgccaagattccggaggggggtcatgggagttttgcccccaaaatgccggtcaacttctcccacagccccaannnnnnnnnnaaatttcccttccctttcccattcccttttgtagcagaaaccccaggaagtggcctcggctcaccacctttctcgctggatcaattcatgccacctgctttgtctgccctctgaaggcggggtttgctcctcgtcaagactgcccaggcgagaaccgcagactcagaccccagccaaaaggaccggcagaaggaaagaggggagaagggaggggaaagagtgaggtttttctgaaagctcctctcccttcgctgaaaagttctttgaaataaacaacgtgggtgttgtatggtgagcccagagccttcaggtcacttgctttagaaagcccagatctgcaaactctgaggacctggagggggtgggggagctcaaagtggagcgttttagtaagacacgctcgttaacaaaaactgaaattaaatagataaccatcacggttatatatttgggtgaagtgatatcagttacttcctgtctaacccaccggggaatctatgtgccccccaccacaagccataaatggcttttgcaggcatcagcagcacccaaagttgcctgcccctgccaaccaccactcatctctgctcagagcagttattcctttgtgagatgcttgggacatggctctagttttgcaacagggtgagattccaaaaaaatgttggggagggggcagaggaattccagagttcaaaactaaaaggcgcaggaatcaaagtcatttcattctattctctttctctgtcctctagccctcaggagtctgcagatccctgcaaaggctcagagaaggctgagcaggctgagcaagagggtgcctcatccctcccaggggtggggttgcccaggctggactggggatggaatgggagaggtggaggagatacacgcagtcccctccttcttccctgggatgcccggccaggaacagctttcagaaaagggaaagggctgagaacagcctcctccaactccagcacccaaggcacgggcagcagccttgctccaaagactgcaggctgggagcacgaccatcccccatgcagaccaaagggctgcttagcacagcgtgaaaatgcag

SEQ ID NO: 437678 - DNA, 699 bp, Homo Sapiens
  misc_feature (305)..(318): n is a, c, g, or t
ttttttttcgtttatgccaacaactttattgagcaccaattagggcaagggactaccaccttcacagttctcttgggcttattaacgtcgtggcccactcatttatttcacaaatgaggaaaccgaggaccctgctgggagagtttggggcccaaccagggctcccactgagtctggggcaccctcagctcctgcaccacaaagcttcggttgacttgtttcaatgtaaagaacgttacttaaacaggtctgagtgctaggcaaactcacaagacctagctcaaagtttgagcacattggtatgnnnnnnnnnnnnnnggagaatcagcaccttgtgatatttaagcaggggcatttggcattagccaaccaagcccagaaagtcggcaaaattcttagcctgaggcatccccagaacacctgagactagctcctgcagctgagggttaaaactcgtgcacctgcacttgcaccacatcctgtctgagctcttgctgacagcccgtctgtggtttgtgaagctcctggcaagggtggggggactccagagcagacaagcaggatccacagcacagaagggcagtgcctcttcccaaacccaagggagcctggctgaactgtcactgacttgtatactcactctcctcccagagatgacagcaatgctaccattggcccccaactctgctcaagactttg

SEQ ID NO: 437679 - DNA, 573 bp, Homo Sapiens
  misc_feature (104)..(120): n is a, c, g, or t
cacagcttactttctttaattacatcataaaacaaaattagaacatacaagaaacaataatagttacataacaatttactttatatatttatatataaaaaacnnnnnnnnnnnnnnnnnagtccaaagatttttaaagcaaaaggaatcctctactgccacctcggattttatttattttaaataatccccctccccccatcctcaagcgccaaaagtactgggtggaaacagtcacttggagagctaatggaacctggtgctaagtcaccccgtaggcaactgtgtcggctccagagattggctaagcatttggagcaggcctagtggagaaacaagcaagcagcagctctcacacactgcagcactccagggtaggccctaaggcttgggaaggagggaatcagacccttcaggtcaaccacctctgcattttaccccctcaggggagtgagtgggggtgcggggtgcagggatgaaacagagcctggtatgaagataaaaatgtctccaacagcaccatttacccatccatctctgtccctgagcagagtctgacaggcatgggtagtc

SEQ ID NO: 437680 - DNA, 826 bp, Homo Sapiens
aaatgaatacaacttaattttattaggacaaggctggtgggcactggagtggcaacttccagggccaggagaggcactggggaggggtcacagggatgccacccgggcagctagaagccacagctgccctccacagagcggcactgcacgatgcgcaggaatgtctcgaccttgtccatgtccttcctgaagcagtagagcagcccgtagttcttgagtagtgcgtcatcgttgtgtgagtttgtgtcgaacttgctgtaggtctgcttgaggatctgcccagtccgggggctgccgtcttccagcctccccatcagcgtttggatgccttcctctaggtcctttaggaggtcatagacgttgctgtcagaggcgccgtacaccaggctgttggcgaagacactcctgaggaactgcacgggctccagccacgactggatgagcagcagggagatgcggagcagctctaggttggatttctgttgtgtttcctccctgttggagggtgtcggaatagagtctgagaagcagaaggaggtctgggagtcatgcaggaatgaatacttctggtcctttgggatataggtttcttcaaactcctggtaggtgtcaatggccagctggtgcgcgcgatgggcttggagcatagcgtggtcaaaaagcctggataacggaacggtttggacggcaccagcctcttgaagccagggcaggcagagcagggcaaaagccaggagcagggacgtccgggagcctggagccattgccactaggtgagctgtccacaggaccctgagtggttcggcgagtagggccttgtgatcct

SEQ ID NO: 437681 - DNA, 1508 bp, Homo Sapiens
  misc_feature (155)..(155): n is a, c, g, or t
  misc_feature (347)..(347): n is a, c, g, or t
  misc_feature (508)..(508): n is a, c, g, or t
  misc_feature (736)..(744): n is a, c, g, or t
  misc_feature (830)..(838): n is a, c, g, or t
caatcgtttgatttctcagggccaatgcgtgtaaaatcggtatcgcacgtgtagaggtcgcacgggatttttgttgtgtgtgtggagtacaccatatcacagtgcgtgttagagggcgaacgcggtaactgtgagacgagataaagtgtgggcgngcatgatacatgcgtgtactatgtgactgatgtgtagatgagaaaatattcattgtgatagaacgcgaaagaagtgggtatacatgtgtggtacggggaggtacatattactagaggtgggcaaacgtcctctatttttatagcatagcggttcaccacacaacagtcagagagtcggggcggagcccttcnagaagagacattttcatttaatacggaggtatgtgtatatgtatcatttgtgtaaaaaccatgaagtatatcgagaaacaacaaaatactcaccagagtatatacgctctcactctcctatcaatagacaccctacattttcaataggatataccaacttntttcatgtatacacacatatataaactttattagagggaaattaatccctacagttatataattcagcgtgagaacataaacaggtgagttcaataaaagagacaccgtttcgtgaatatataaaacaacattggattacgaatcgtgtattttgtttttgacctcgccctgtgtatgagacgtaaatttataaaaaaagagtgttgtcataatatacttaccctgannnnnnnnncgtgttaaaacattatataaggtcaagagcagagctaactagcccaaaaaataggtggccgaagccctcctgtggaatataaaggnnnnnnnnnatgtaaaatatacccaaaagttatgccagttttttaccacggcagaggggggtggttaaattaggggcaaggtacccttgaatactaatattatttgcatattgggaccatttttatcaaaaaaggtgggttcggtgaagcttaggcccctagaggggatattgaacacaggccccccttttattataagaatatagtgtgtatatatattttatttgtgatacatataagggtttaaatattagtgtttgatgcaacttaattttattaggacaaggctggtgggcactggagtggcaacttccagggccaggagaggcactggggaggggtcacagggatgccacccgggcagctagaagccacagctgccctccacagagcggcactgcacgatgcgcaggaatgtctcgaccttgtccatgtccttcctgaagcagtagagcagcccgtagttcttgagtagtgcgtcatcgttgtgtgagtttgtgtcgaacttgctgtaggtctgcttgaagatctgcccagtccgggggctgccatcttccagcctccccatcagcgtttggatgccttcctctaggtcctttaggaggtcatagacgttgctgtcagaggcgccgtacaccaggctgttggcgaatccggagaattccggaccggtccagcc

SEQ ID NO: 437682 - DNA, 159 bp, Homo Sapiens
agcagtagagcagcccgtagttcttgagcagtgcgtcatggttgtgcgagtttgtgtcaaacttgctgtaggtctgcttgaggatctgcccacttccgcggctgccgtcttccagcctccccatcagagagagctgcagggatcctctagaccacttca

SEQ ID NO: 437683 - DNA, 1092 bp, Homo Sapiens
  misc_feature (556)..(578): n is a, c, g, or t
  misc_feature (613)..(651): n is a, c, g, or t
gtgggaaaaactggaacgtccccccctttggttttgttctgaaactgcccttggagggtggcaaattgtccctctgggaaactgagggaaggggaacgtccaggcctgggtgaaccctggagggcacccctgaaagcctagagaggactctactccccaaaaagccttgtgtcaggcctgatctgggagatgtagctgcctctctgctttctgggaagccagtgggatcatattctatagagatctgaggatggctggacactcgggaagggcctggtcaccagtgaagtcaaatcccaaaggtgacacactgaggggaggctcagccccggggcccccatccccttcaccccactgcctctgcccccagggaggtgagggagggctgggacccacggaggaaacaaccaaggccctactttttcacgatcctttattaatcagaacaggccttgccacaaaaagcagggcccattcccacaaaaatatgattttgcaaagaggaaatcttgctggcttagagggtatgtgtggtggaaaaattttgtatggttcnnnnnnnnnnnnnnnnnnnnnnncttcagtttttcttcatttctcttcgctgcaaaannnnnnnnnnnnnnnnnnnnnnnnnnnnnnnnnnnnnnnataaaacacttgcactcaagaacatacaaacagtggccaccaatccccacccctggggctccggggagcccccctggcttgtttgtggctgttttcctctgtcccttccctggcatctggtgccagagggcaggtgcgggggtcctggggcgggtggaatttgtacagcactttcatggggagatggtcacaagaaaggaaaccaggacaagataaggactaagtctagggcacccacaaagatggcagacgaagcccatgaaagggcctgcgacagagtgaagagacggatgggcctgcgttggcctcagctagctctggaggctctgtgggggaggggcaggtgggccttgcagtcaggattcggtaattacactttgctcacgggtagcaccttcggagtcctcctgccttgacccccaggtcaggtgatggtggcct

SEQ ID NO: 437684 - DNA, 351 bp, Homo Sapiens
  misc_feature (148)..(148): n is a, c, g, or t
taaagaatgaaactagaagagggctgagagaagccgcaggtccagccaacagacacagagctcattgtctttccttttcccacctcagggaccaggaaggaggtgctggcctgaaactacagtggccccatggatggtggtgggaaanctggagcgtccccctttggtttgtctgagctgccttggagggtggcaagtgtcctctgggaactgagggaggggacgtcaggctgggtgaccctggagggcacccctgaagcctagagaggactctactcccaaaaagccttgtgtcaggcctgatctgggagatgtagctgcctctctgctttctgggaagccagtgggatc

SEQ ID NO: 437685 - DNA, 325 bp, Homo Sapiens
  misc_feature (168)..(168): n is a, c, g, or t
gaattgccttatgctttctaccccataaggtataattctagaccagatcggttatgagaggctctattccagtctgcacctgctaagaatttgaatctattttagtaccaatcttggagttcttgtttggctctactcttagccaaccccacagagtctaaaattggntctgaatccagtatttgccagccagtgacagacataaactaggttctttataaatgtttcatgaattgacctgcatccctgcattgattcaggatcttattgtccattggggaagggaagatttactttagctaggagtaacaatttcccaaatttg

SEQ ID NO: 437686 - DNA, 1018 bp, Homo Sapiens
  misc_feature (183)..(183): n is a, c, g, or t
gctctggtcataaatatacagagaaaaagagggagagaaaaatgaacaagtcatccaaagtatggagataaaacagtattcctaaggcacgtggcagtctttgaaaatacagaagctctagccaacttaaattatttgttgtttttcctcgctcagtccacaaaactgtacagtgacacaaantgttgtgttgcaggtagatcttccaagttgttcctcggtccacaccgctgcattagccgggcgcacacttcttttttttacctctgtttccaggcgagatcctaaaatgtggttagttagttgctcaaagcctctattttaaaatacacttggaattcaactaaagataatttcttttttaaagaaattgtggggtgaggggttgcgagtcattagaaaaggttggtaagagtcgtttgtgaggggctgtgaggctcatggccctccaggttgccaggcacagaagttaagacggacgtcacagttggcagggtggggctagtcaagtctgtcagggtggtgggcgtgctggaggggctgagcgaggcgttggagagctccgaggccgggcccgatggcgtccctgtctgcagcgccgcgtctgtcgacttgtccacgcccgtgttttcctgccgtaagaggttgcgcctgaacttggctcgggcgttctggaaccagacctggaggacccgtttggtgaggcccgtcttttgcgcgagctgcttcaagtccttggcgtcggggttgtggttaatggcaaagtaagacttcatggtccgaagctggtggtgcttgaaggacgtgcgcatgcgcttggtgttgtggctgctggggtatggctggtcacggtccaggtgttttgcgtcgttttcgttgcagcttagcgcagcgttgtagtccgccagatccgcaccggggcccgggctcttacgtttcctcggccgccccttctgcacagtgcccacgccattgtagtagggaagacccagagggttggcccctgatgcgcccagcc

SEQ ID NO: 437687 - DNA, 702 bp, Homo Sapiens
  misc_feature (43)..(43): n is a, c, g, or t
  misc_feature (158)..(158): n is a, c, g, or t
agcctttgccaaagcccagttttactcatcattaaatttaccntggaatccagttttcttggggtggatctagcttagaatagaatagaataagccggacctttaactacagtccttaaatgaggaaatttccaccttgggccagctgtgccaggaantcccgacgagatggaactccgctgtggtttataggcagggcttattttcaggggggagtgcacccatttggactccctgctgttcccatcaatctattccagccctggtacccctggaccaccctactgtccagcaactaaaggattaacaggagccacctccaggagcctccgggacccttcagaaggtgtctgatttgatggatcagaggctaggccactgccagctctctgcacatattttacatatcacccatttgcaggtgttgaagaccggtaagtgcccaggagctggcaggtgttgcaaacatgtcagtgtacctggtgggggcgctcctgcccagctgataggagacagcttctacccagcccacccctttggtggctacaccagcttggcacagtctctcattgctgaagagcatccccccgccaactccgcccaatccccacctccagtcttgactacttttcattggtttgtttgtttaaattgacatctcctgattttcaaaaccttgctgattaacaaagcaaaaagagc

SEQ ID NO: 437688 - DNA, 637 bp, Homo Sapiens
  misc_feature (45)..(45): n is a, c, g, or t
  misc_feature (563)..(563): n is a, c, g, or t
ttatatgctacagctacagtaatttcttctccaagcacagagganctttcccaggatcagggggatcgcgcgtcacttgatgctgctgacagtggtcgtgggagctggacgtcatgctcaagtggctcccatgataatatacagacgatccagcaccagagaagctgggagactcttccattcgggcatactcactttgattattcaggggatcctgcaggtttatgggcatcaagcagccatatggaccaaatgtatgttttctgatcatagcacaaagtataacaggcaaaatcaaagtagagagagccttgaacaagcccagtcccgagcaagctgggcgtcttccacaggttactggggagaagactcagaaggtgacacaggcacaataaagcggaggggtggaaaggatgtttccattgaagccgaaagcagtagcctaacgtctgtgactacggaagaaaccaagcctgtccccatgcctgcccacatagctgtggcatcaagtactacaaaggggctcattgcacgaaaggagggcaggtttcgagagcccccgnccacccctcccggctacattggaattcccatttacttgactttccagaagggcactcccattcagccagggaaa

SEQ ID NO: 437689 - DNA, 692 bp, Homo Sapiens
  misc_feature (65)..(108): n is a, c, g, or t
  misc_feature (436)..(436): n is a, c, g, or t
  misc_feature (518)..(518): n is a, c, g, or t
gggagccacgaggagctttatttatacatgaacgaagggagatttcccttacatattacaaaatnnnnnnnnnnnnnnnnnnnnnnnnnnnnnnnnnnnnnnnnnnnntttgcatttaaaaagttcctcaaaggtaaaactactcctgggctggggcgggcgcacacaggggtgaccactgggcttggggtccaggctgctcactctcctcaggtgccagcagatggagaggaaattttgaaagaagaaaccgggagacatcctggaggtcaggagtcaggagcggggaactggaagccgctagaggcttttgcaccatgtggagcggatgtgaggcacgaagcctaatttttcctcactgcttcccttggaggcgcctggggctgcgccagtccccagcccccactgtggccatgccaagccccttaaagtgcancaatggctttagcagccacctggcggcccaggggcaggctgaggtccgtgatggccaaaaccaccttggggctagacatggntgacaccttcaccagttccgacacggtggtgaagggcatgaactgcaggacgctgccacggccaccctggtccaggcagtccacacactcctccattgaccactgcacgaactgggtgtgggggccagcggtgcgagaccccaagatggaagagatgagcacgaacaggtttgg

SEQ ID NO: 437690 - DNA, 690 bp, Homo Sapiens
  misc_feature (68)..(111): n is a, c, g, or t
  misc_feature (569)..(569): n is a, c, g, or t
  misc_feature (583)..(583): n is a, c, g, or t
  misc_feature (593)..(593): n is a, c, g, or t
  misc_feature (613)..(613): n is a, c, g, or t
ttttggagccacgaggagctttatttatacatgaacgaaggtagatttccctcacatattacaaaatnnnnnnnnnnnnnnnnnnnnnnnnnnnnnnnnnnnnnnnnnnnntttgcatctagaaagttcctcagaggtaagactactcctgggctggggcgggcgcacacaggggtgaccactgggcttgtggtccaggttgctcacactcctcaggtgccagcagatggagaggaaattttgaaagaagaaaccgggagacatcctggaggtcaggagtcaggagcggggaactggaagccgctagaggctcttgcaccatgtggagcggatgtgaggcacgatgcctcatctttcctcactgcttcccttggaggcgcctggggctgcgccagtccccagcccccactgcggccatgccaagcccctcagagtgcagcaatggctttagcagccacctggcggcccaggggcaggctgaggtccgtgatggccagaaccaccttggggcttgacatggctgacaccttcaccagttccgacacggtggtgaagggcatgaactgcangacgctgccacggncaccctgctncagcagtccacacacttctncatgaaaccactgcacgaacctggtgtggggcccagcgtgcgagaccccaggatgggaggaatgagcaggaacaggt

SEQ ID NO: 437691 - DNA, 538 bp, Homo Sapiens
atattgtaataaactgtttattcaacattttaccaactagtatactttaacagaaaagccctggaggtttattagactatttctgaagaaaaagaaaattaagacatctcagatacagcagcaacaacaactaacatttgtgtagcactttacaattcacaaagtgctttcaacatacattagctcattgaatcctcacaacaaccctgtgaggtaggtatttttgccaatttacaagtgaggtaactgaggctcaaaggttccaggacctttaaagagatccacagcaaatgattggtaaagatggaccataaaaccagatcttttgactccaagtcccatttaatgccaagtgtttatttttcaatgtagaattatatcatacaatactaaagatgaaaggtcttacaactgatccaacttttcaaaaatggtacgcttttataaggcattcgctcactgtgtccattttattttttattgcacttgttctttctttaaattttagcgtaaatctattctaccttgtctgtttatc

SEQ ID NO: 437692 - DNA, 2226 bp, Homo Sapiens
  misc_feature (1268)..(1291): n is a, c, g, or t
gaggtaacttgaggctcaaaggttccaggaccctttaaagagattccacagcaaatgattggtaaagatggaccataaaaccagatcttttgactccaagttcccatttaatgccaagtgtttatttttcaatgtagaattatatcatacaatactaaagatgaaaggtcttacaactgatccaacttttcaaaaatggaagcttttataaggaaaaagttctttgatttatatgaaaattcatgacttgttcagttttaaaattaatttggccaatactaccatgactttagtctctatctttaggaagtaccaataaattatatagctttcccttcattgtaggatcacagaaaatcctctactgaagagcacatacgtaggatctgtgactctgaacactaattcaaagtccatccctccttgacctaccagccaaatgcactaagaaaaaaaagtctgccctcctctataggagatagcatcagaacataggtttgaagcagtcacactgtgccagaaattagtttcttcataactcaaagaagaaagggaaggcatcatactaaacctctactgagcctcgggtgccccaaactaacagacatattgcattttacatgaatggattcattaccactatcatgaccaaagagcagttacaaggcatcctcctggggtaccagtacaaaacaaacagagaatatgcccctaccctagggcagcttgctgaagactcttctaaggtctggccagttctaaatcactgctcatcacaaaacaacgacatggagcttgacacaagtaaagaaaacaaaggaaaacaggctaccaattaactaccatataaccagctaaaatagaataattacaaagtgaatagggacacagaagaggaagaatataaacagtgtcctgatttagtgcccacagggtgacatggctagagcactaagaaacaactaaagctaacaaaccagtctggcacggaactaagagggaggggtgttctttctcagttaagctttatactggtggtgcagctaagagtagcatcacatcagcaatagctcgtaataaaaaataatcatgggatgaacttgatgtatactcagcatcagaagaaccaacaatctttgcccattagcagtttagccacatgtacacatatattatatcacatacatatacttagtctaagtcatatataccaagctaacagaaaaagaatagcaatttcaaacattttgctagcacataacttggcnnnnnnnnnnnnnnnnnnnnnnnngaaccatgcaattttacatttgtggtgcttgttttcaagctgctaccaaatttagaaaatcacttccctttataacaaagggctttcagaagctaaatatcaaatgaaatacctctagcatttaaagagtttattagacacatacaattacattcaatgaagttatgagtgagctacaaaatggaaaattaagaactcacattgataaaacctcaaacaacatctcagaataaattcaagctttttagcttaacatctatatctttatcaactttttaatgcagaaggacccattaaacacttatgtaataaaattcaatgttctatgctaaatgcagagaattttatagtccacagcatgatttatagttacattatcacctttcttccacaatgcttacattacttcacaattataataattattaggctattaatacaaagcagaacacttcttcaaattaaggtaccttttgctgtacgtagcaaagactgccttcctgcaccaagtaaagaagtgactcttgaaatactgggtggaatttctttatccaacataggaccgatgcgctcgcagatttgcaaaagatgatcaggagccacatgcttattggacaagaccaactcctcgtagctcctgttgtgctcgttgccctcccagtccaatctcttcggcaacaactggtactgctccagctcctgcaccagcacctgggccgctctccgacacgggcccgccgataggtaccgggcgataaggaagtacagctccgactcgatgagaggcaccgggcgtcgggcggacgacggctccgccatggccgggcgcggggcgggaggcgggagcgagcgagcgagcggagcgtgtaggccgcgccgaggcctgaccgggctggcgtcccctcttctcaggcgcgcgccgccgccgccccgct

SEQ ID NO: 437693 - DNA, 423 bp, Homo Sapiens
  misc_feature (332)..(332): n is a, c, g, or t
  misc_feature (341)..(341): n is a, c, g, or t
  misc_feature (399)..(399): n is a, c, g, or t
attgtaataaactgtttattcaacattttaccaactagtatactttaacagaaaagccctggaggtttattagactatttctgaagaaaaagaaaattaagacatctcagatacagcagcaacaacaactaacatttgtgtagcactttacaattcacaaagtgctttcaacatacattagactcattgaatcctcacaacaaccctgtgaggtaggtatttttgccaatttacaagtgagggtaacttgaggctcaaaggttccaggggccttgtaaagaggatcccacaggcaagtgattggggtaaagatggggcccattaaacccagntctttttgncttcccaggccccattttaattgcccaggtgttttatttttttccatgtaggggtttnttattccattcccattctttaagg

SEQ ID NO: 437694 - DNA, 866 bp, Homo Sapiens
  misc_feature (82)..(82): n is a, c, g, or t
  misc_feature (755)..(755): n is a, c, g, or t
cttaattagacatagggtatatataaactcaattttatctgcatttttttaaaaattgaaataatctgattgcatgtatganggactcctgcctcattacccaattacataaatacaattatctataggaaggtgaaattgttgatctattatttcaaagacttgtagactagcaaagattcattctgattagaaataaggtctatagctaaagatatttttattttaaaaaattacagcccttgtaacaaaaatcatttgtaacattggatatgaaggcattattagtatttaaaattattgtagtcatttgatcataaatgaagtagcttgcaaaatagacttggtctttgaccctttaaggtgtaactgactgactgttgtgtttttcaagactgattttaggcagttttatgtatcgtgtaccaatgatatgtaaaataaagcaccttttctactataaacaattacaggtgttatttattttgaaggatatgaaagaaaagttagtgatggcagagtaaatctgtagaaatgttgattttatatttaaaataacattatgtaaacatattaaacatatattaacatgtttaataattaatatttaataattaacaagtttaataattgttaaacatatatttaaaaggctgcctgtattgtttgaaataatataggcagcctttaaattaagaatggattgtgttcaaaaacttgcttttaagttttcacgatggcaagttgccagccgnccccttacagaacagtaaatccttatcaagcaacccttcgcacacccgaattagtatccttgtacggtcaaatgcacatggttctcagtaattctctcacattgctgtcac

SEQ ID NO: 437695 - DNA, 932 bp, Homo Sapiens
  misc_feature (127)..(127): n is a, c, g, or t
  misc_feature (286)..(346): n is a, c, g, or t
  misc_feature (413)..(507): n is a, c, g, or t
cagtgtgtccggggcggtagggaggcggccggatgcgcgagaaagagggaggagaagcggcgcttgggggcgcgcgccaccgttgtgcggccgtcgataagggggtcagcggggatgaagcaactanttagtaagggtccctagaggtataagctaggccggggcgcccggcgggcgcgattataataagggggggcggaagacaaacaggcgggaaaatggtaggcacgcatacacgtcgaggggcggggaagcagcacggcggggtggtgcggttggccccgcnnnnnnnnnnnnnnnnnnnnnnnnnnnnnnnnnnnnnnnnnnnnnnnnnnnnnnnnnnnnntcgcgcgcaggggcgcgaaaaaaaatgggcgcgccgcgggacggcgcccgcggcggcgggcccaccnnnnnnnnnnnnnnnnnnnnnnnnnnnnnnnnnnnnnnnnnnnnnnnnnnnnnnnnnnnnnnnnnnnnnnnnnnnnnnnnnnnnnnnnnnnnnnnggttttggctcatttctccatttattagaataaccacatttggagaggcatgaagcacttaagttttacatgactacaaagttatcacaaatctcaaactttttagccacagatatttcacctctgtttaaagaaaaagctttcaaaacatctgagttagcttaatacacagagaccctgaaatatatgggaactacatattttaaatgcttgtacttcctgctctaataatgtcttctttaaacggaatccagcataaaagggattgaaatgtataaggtcatgatgcaaatgctttggagatagtgaaactgatctgcacaacatggaaaaagatgtcatgtgcacagaagttctgcaaggattcactgagccatctgggcttccatggcttgtgctgtccattctggtgctgtttgactaat

SEQ ID NO: 437696 - DNA, 1628 bp, Homo Sapiens
aagtctctttatttggctatttctcctttattagaaaacccatttggagaggcatgaagcacttaagttttacatgactacaaagttatcacaaatctcaaactttttagccacagatatttcacctctgtttaaagaaaaagctttcaaaacatctgagttagcttaatacacagagaccctgaaatatatgggaactacatattttaaatgcttgtacttcctgctctaataatgtcttctttaaacggaatccagcataaaagggattgaaatgtataaggtcatgatgcaaatgctttggagatagtgaaactgatctgcacaacatggaaaaagatgtcatgtgcacagaagttctgcaaggattcactgagccatctgggcttccatggcttgtgctgtccattctggtgctgtttgactaattttctccaaaaggttattcacttggaaacaaagtgattggatctgcttatcccacgttggcagggcttctcgtgtttcaaaatgaactattccatcaatctggtcaataaatccattcatacgtccttcggttatcatttgagatgctatcttttccgccttagctgcagggatctctaaaagagctccaagttcttcgaaggtaatattattatataatttgcttgcagacaacaaattgtgttcaataacagctctgtccaagatgctggaaccatcagctgtagttgctttttggtgaggcatcagcatggcagcaaattcttgaagttgatttcctctgatgatcctatctagatacattttctctaggatcccataggcagcaagttgctggcacctttcatccttaaaaagagtagctagcatccgagaacgctgctgccctgctgatgctaagatcgtacagtgcaaagcatgttttaaggcctctagtctttcactttcgtggactattgtcttgtaagagagctcattgtacctttgtgcagcttcaatgaattttcttctataatcaagaacacgtgcatagcataccttataatgtatctgtaattgttcattggttgattcattctgaagcaacgatgctcgatttatgtaagcctctgcctggactggatcatcatcctccagatatagcctagcaatcttcaagtaagtctccagtttataatctacattgtactgtttttgtcctgtttccaaaggaattcccaccaacacttgggctgcatttctccaatcttcttctttctcatatatagatgcaagatgctgtcttatggaagcaacctgctcctcaaatgaaatgactctaggctggatcttttccaaggtgaagtgatagatttctttggctgtgctatcaggcaagttaggaagatgtgtgcaaaaatcagtcagcaactgccgcgagatcacgagactgacattctcatttaccattgcttccacaaaagctttcaaagcttctagttgttctgctccagataactgaatggctttttccaggatctgacgatacttgccagccagatctttatgagagccgctcgaattcatgagctgggccaaatcctgtcgcacggctgccgccatctttccctcgtgccgaattcgccacccaggcctcgctc

SEQ ID NO: 437697 - DNA, 437 bp, Homo Sapiens
  misc_feature (406)..(406): n is a, c, g, or t
caacaagcacaagccaccacacctggctaatttttaaaatattttgtagcgatgggggcctccctgtgtttcccaggctgatctcgacctccgaggctcaatcgatcccccgacctcggtctcccaaagtgttgggattacaggcttgacgactgtgcccggcctgggctttttggaatgagtcttcctggtcccgacagttctcctgcatgtccttgtggtggccagtctctgttctttgatgacgaatttgctttctgagtagagtctggtcacctggagctggtttggtggaataaaggacaatggggttctaggatgtagctgggagatacaagctgtgagtactctaataatgagataagttttcttatgcaggccccagttggtcctgaagtccttcctnaaagaggcgatcctgaaacctacaccaagtg

SEQ ID NO: 437698 - DNA, 466 bp, Homo Sapiens
caaccctccagggttgtggtttgtatttttgcctttaagcattatttcctttccaccaagaagcctacttaggtttaacacatgaaagcagtgtctaaaaattagatcggtcctaaattggaatgggatgtcttccttgcatgtcccataccagggaatttttttaacacacagtgtagagcctttgccagagatgttgaaagggagattaaaggcttgagggatgaatttgatcatcattcttaaagtcccttccaatcctgtgattctctgattccctgagtctcgtttattattggacatgcctagcccatcaccagtgacgtgcccgcatattgctggcttcccttggataacggaggagcctatcaccacatgcctttggttgtcttcccatcataatcaagtgagttgctttcctgggactttttcccacctaggagccctggctagggtttgggttttt

SEQ ID NO: 437699 - DNA, 1118 bp, Homo Sapiens
  misc_feature (608)..(608): n is a, c, g, or t
  misc_feature (616)..(616): n is a, c, g, or t
  misc_feature (679)..(679): n is a, c, g, or t
  misc_feature (980)..(980): n is a, c, g, or t
  misc_feature (1017)..(1017): n is a, c, g, or t
  misc_feature (1042)..(1042): n is a, c, g, or t
  misc_feature (1044)..(1044): n is a, c, g, or t
  misc_feature (1056)..(1058): n is a, c, g, or t
  misc_feature (1062)..(1062): n is a, c, g, or t
  misc_feature (1065)..(1065): n is a, c, g, or t
  misc_feature (1067)..(1067): n is a, c, g, or t
  misc_feature (1082)..(1082): n is a, c, g, or t
  misc_feature (1089)..(1089): n is a, c, g, or t
  misc_feature (1093)..(1093): n is a, c, g, or t
  misc_feature (1099)..(1101): n is a, c, g, or t
  misc_feature (1103)..(1103): n is a, c, g, or t
tttttttgacaattgtttatacaaattcaacaaaggtaaaatcgcatcagggaaggtctaggaaacaccaccttacaacaatggcacttataaatgcagaactttacaactaggaaatagccatgttacaaacctaaatgagaactcaactcacacttcagaggagagaagcaaaagcaaaagaaaggctatgtgggagcatttattctacgtcttgactcactgtataaattagatctatgtaagtacaagagctcatgctggagcagaacctcctgagtgcaaaggctgaagtcgaaattttaaaatttgagaaaagtgaattctctacagaggaaacttggcagagtatcttactttgactataatttacatttatccacaacatgctcatgtaactcttgaggtacaaagcagactctcaacttccagttaaacatgcttttaagtggaaggtcttagcctactttgttagatctgggcacatttgtagatgggttgtgtcgatgaagtacacgttaaattctctcctaccttaaggaaatcaggaaaattggcaatctcaaaacaattaaaacactggtatgcattcaaaccttgcataaatnacttttanacaatttgtacaaaaatagttctgcataatgtaagatgtaacaaaaccaaccaaacaaaaaanagtgtcaagacggcagcagatgtggtgtgtggtccactttatgtcaacacccaaaacctcggtgttgcaaggaatgaagtgtccaaaacaccactaccactaacagaaactcctaagctcatgcttcagtatgagaatttctccgaagtccaccctcctctccgacaggaatgtcttcttgtaaaggccgccttagaaatggtccagaaagcagtgcagttaccgattcagaaagaccaaaggaaagtgtcggctcactcatcccccaaacgggtggttgaacagcttctcccttggaaanacttgcaaaatggaattgcgttgtggtctgttgtccncgttccaaatgggaaataaaagccncntttttgtaagtnnncccnccngngcccgcccgtatttnatacttncctngactannngnttttgaggggttttt

SEQ ID NO: 437700 - DNA, 779 bp, Homo Sapiens
  misc_feature (732)..(732): n is a, c, g, or t
atgggagagagattaaggtgggtcctgaccagcagcagtggggatgagtaaacgcagtccgagtgtagaatgtgaatcaaagcagcgtttagttgcgagcaagtaggccaaggaagggtggaagagcagcgcgctgcattaccgcagtctatgagaacgaatgggataaaattagtaatgtgggtccagccacacaggtggaatagttacactagccatgaaaatggatacaagcagctttattcacagatagccaagagtgtgtagacagccctcatacccatctatagatgaatggagaaatataatgtggtccagccacatcagtggaatattatacagccatgaaaaggcacaagcagctttattcacaatagccaagaggtggagacagccctcgtacctatctatagatgaatggagaaatataatgtggtccagacacacagtggaatattatacagccatgaaaaggaacaagcagctttattcacaatagccaagaggtggagacagccctcatacccccatctatagatgaagggagaaatataatgtccatccacacagtggaatattacacagccatgaaaaggaacaagcagctttattcacaatagccaagaggtggagacagccctcatacccatctatagatgaatggaaaaatataatgtccatccacacagtggaatattacacagccatgaaaaggaacaagcagctttattnacaatagccaagaggtggagacagccctcataccccatctatagatg

SEQ ID NO: 437701 - DNA, 1154 bp, Homo Sapiens
  misc_feature (716)..(716): n is a, c, g, or t
  misc_feature (917)..(917): n is a, c, g, or t
  misc_feature (938)..(938): n is a, c, g, or t
  misc_feature (972)..(972): n is a, c, g, or t
  misc_feature (976)..(976): n is a, c, g, or t
  misc_feature (980)..(980): n is a, c, g, or t
  misc_feature (1041)..(1042): n is a, c, g, or t
  misc_feature (1044)..(1044): n is a, c, g, or t
  misc_feature (1062)..(1063): n is a, c, g, or t
  misc_feature (1071)..(1071): n is a, c, g, or t
  misc_feature (1081)..(1081): n is a, c, g, or t
  misc_feature (1086)..(1086): n is a, c, g, or t
  misc_feature (1089)..(1089): n is a, c, g, or t
  misc_feature (1091)..(1091): n is a, c, g, or t
  misc_feature (1105)..(1106): n is a, c, g, or t
  misc_feature (1116)..(1116): n is a, c, g, or t
  misc_feature (1120)..(1120): n is a, c, g, or t
  misc_feature (1128)..(1128): n is a, c, g, or t
  misc_feature (1139)..(1139): n is a, c, g, or t
  misc_feature (1141)..(1141): n is a, c, g, or t
  misc_feature (1146)..(1146): n is a, c, g, or t
tgaggatgggtagaaaagaattttattgagcaaaagaacagctctcagtggagaggggatgcagggagtggtccccaacccccacagcagggtgatttctctcctcactgcagctgagtctgggtcttttatgggctcagaataggggaatacacgttgactgatttgtaagtatgcaaaggcaccactcaaaaggtgggcacagcagtgtaaaaaccaattaggaaagggcaggtatacgtaaaataggtgaagggttgggatcaatcggaggaaagcacaccaaatgggaagacaggttctcaattcagtatgaggatttagccgggactgtcttcagctttaaggttgggtttcaccaggtacccacccctatctgcctgggcatttgactgcctcctgccactatcattacctgaccgggtttccacaacccaccatccacagtgaggaagggcagggctcctgaaaatgagccagcaattctccttcaggtggatggagatacaagtcttaccagtacagtctcatgcataatcacacacagaatgtttccactttggtatctagcaatggctgaaaaagccacagcactgtgtgtgtcctctggtgtctgatgaagtatgactcctggctaaaggctgttccacattccctatacacataaagtttctatcctgagtgtgtcctctgatgtctgataaggttgtgacttncgactaaagccccgtccacactttctgcaaatataaggcttctctcctgaatgtgtcctctggtgtctaatgaggtgtgactgccggctaaagccttgcccacactccctgcacacatgaggcttcccccctgcgtgtgctctctggtgtttaatgagagttaacttagcacaaaagccttgcccacactccctgcacaanaaaggcacctgagtgtgcccncttgtgcctaaacaggttaggcttctgccgaaancttntgcnacactccctgcacataaaaggcttttccctgaatgtgtcctctggtgtgaaatgagggggnntntcattaaagctcgtccanntcagcaanaaaatggttntcccngangngtctctgggggtgnnagggtgattncggnaaactcgncccactcgtantnaaatngatttccc

SEQ ID NO: 437702 - DNA, 878 bp, Homo Sapiens
  misc_feature (694)..(694): n is a, c, g, or t
  misc_feature (713)..(713): n is a, c, g, or t
ggtggtggcagtgtcaaaagaatttatttcaaatctgcttaagactgtggtaaaactcaggttttccaaaaggtaatacagaaagttcaactaacccccaaagaccagaaaacacagtgtttgcaattcaaaaaatacaaacgcttgtggataccaatacaaaaattagaaaaaagttgctttccttaccactccccgctaccccccgtgttttcagtggaacatccacagcaataggaccaagagctgccaccaaataccaacaacgagtgaccgaaagtggatgtgatgggggaaggggagggaggagaaatggggataaagaaaggcaagaaaattggacttctgtcgacggtcaaaacaaggacgcgaagctttttgtttcttgttaaatccctttgccaacgttaaacaaacacctctcatgcttaatacaacagcttagtgccaacgcagcaatcctacatcatgcattgaatgttttctgctttgcccgctccccacttcttctgggtgccgagaaagcctggggctctgggtgtctggtttccagggctaggaggagttggagaggcttccccggctgggtctcacccagtaagcacctgacatgttcctgctactgcagttgcaagcagtcaccttcccgaacctgaagcctgggttttgggctctcctcagagctttacccganggcctggcctggtctgcangtgcccgcatcaccggcccacacggtccctacggcctttcccaggactgtgctccttgagagaagagcgatggatccggacgagacttccctggaggtctcaactcccagctcctgactgatgtcaacgtcaatcattgaaaaagccagggcctcccccaacctg

SEQ ID NO: 437703 - DNA, 943 bp, Homo Sapiens
cctcagctcagtcaggtgttgctcagggtcctgagatgtggctgcggctgctgctgccgtcgtaactttaatggtttttttaaggttggcaacctcactctcaatctgctgcttcaggcccagctgctgctccttgtgttggttggcacggctcacctgctcctcaatgcctgacagcacgacctcacagcccacacaccattcctgcagggttcgggcaatggcactgaggtcctggcgctggatgtcccgcccgatgctgtagtcaacctcgagccgctggttgcgctggtccagggagccacgaagcacgtcagcatacacagcctcaatcacaaggtcttccagctgccgcacattacgcagggcaagagcctccagcaacactgcatatgggatacactttactttagcagccagggtgacaactgagaggtgtcgaagcttattcttctgagcctctgttagtggaggaagattccgggcttcagctaagtagtcagcgtatgtcccataagcaaacactgtgagcagccggaaggtagaggcaaagtcactctcagccagctctctaacattgggcatgtccagcagttctccaaacacgtagacaccaggggcctccagcacctgatggatgagtgtggccagcgctgcccccttggccgacttggctaggagcagaaattgctcctggttctgccctgtcaccttcacttccgcactcatcactgcactgagtgtgggggacttgggctcaggatgtccagagacgtggctccgccccctcccttaaagacaccgcccagcgaccgtgggctcccgccgactgcttcgtcgtaccctgggtcaggctctgcgggccgctacctggaagcttcgacctccagcgcatcccgggaattccggaccggtaccagcctgctttttttacaaacttttc

SEQ ID NO: 437704 - DNA, 1846 bp, Homo Sapiens
  misc_feature (77)..(87): n is a, c, g, or t
tcagggtaggtggtagatagatttctcatagatttatttctgcgtcatattatatatagatatatgcatatataccnnnnnnnnnnnaatacaatctatatacccttcccttccccaccaaactcacaaaaggagattaaacccttccaggattgccatcaagcttcccgagatggccagggccaagaaagaatcatctctcaacatgttaagaaacggctgccattcttaggctctggggttgaagcagcagcattcccaggacccaagggccagagagaggaaaagaaatgactgtagtgtgacaggattctaggatgaacatgtccagtgactcctggcatggcagactggctcccagaattctcagggtgtgagtaaaggtgggggccctatggctcttcagaggctgctcaataggtcaggggtagggtataggaactggggatcaggcatgcagggatggggtggcagaaaaaacgcctgtgggttatgctccagacagagcgacccccatcagggctacccacctactcaatgacatgtaatgaacagggacagatgctgagctcttaaggaaacaagggagagagcatggcagcggggagcaatggaacacatgaagtcacaaaaaacagaaagtaccaacaaaaacatgacctacatttgactcctccctagagaaggtgtgatctatgtttggggttaggggaggtgaagggtcatgaacctaggattatcagctggccaggggcacagaaggctctctgaggactcctaagaggcaggcaggcagctgggaccccacatccccagggaggaaacgacagtcctttcaattcgacttggaccaaatcttggcgctccctcggagccccttgccctttgaggctttcttgctgggctggcgctggttggtgccaggagctggttccctcagctcagtcaggtgttgctcagggtcctgagatgtggctgcggctgctgctgccgtcgtaactttaatggtttttttaaggttggcaacctcactctcaatctgctgcttcaggcccagctgctgctccttgtgttggttggcacggctcacctgctcctcaatgcctgacagcacgacctcacagcccacacaccattcctgcagggttcgggcaatggcactgaggtcctggcgctggatgtcccgcccgatgctgtagtcaacctcgagccgctggttgcgctggtccagggagccacgaagcacgtcagcatacacagcctcaatcacaaggtcttccagctgccgcacattacgcagggcaagagcctccagcaacactgcatatgggatacactttactttagcagccagggtgacaactgagaggtgtcgaagcttattcttctgagcctctgttagtggaggaagattccgggcttcagctaagtagtcagcgtatgtcccataagcaaacactgtgagcagccggaaggtagaggcaaagtcactctcagccagctctctaacattgggcatgtccagcagttctccaaacacgtagacaccaggggcctccagcacctgatggatgagtgtggccagcgctgcccccttggccgacttggctaggagcagaaattgctcctggttctgccctgtcaccttcacttccgcactcatcactgcactgagtgtgggggacttgggctcaggatgtccagagcctgggtcaggctctgcgggccgctacctggaagcttcgacctccagcgcaccgggcggggccgccgctccgtcacctccggcagctgttccaagcctttcctgccacctccgtgatcccgggaattccggaccggtacc

SEQ ID NO: 437705 - DNA, 1209 bp, Homo Sapiens
  misc_feature (355)..(355): n is a, c, g, or t
  misc_feature (388)..(400): n is a, c, g, or t
cggggggaaataaaagcccgcacttttgcccgtgagaaaaaggggcagaactggggaaaacccagcatattgtttttggaggggttacctctctggggggaaggcccgccctttgggcccttttgaagaggggtttttctctcgcgagcgaggcactagaacgcccagaaataggttagcccagagacaagctgggtgtttcccctccaagcgtcggaggtcaacagggggtgagttcaaggggttccctgggggaaaggaaaatgatcggggaactgagttggcccgttggtaaaacttccgaaatgcattttgttttgaggttaaagcgaaccctcgcttttacaattcaggntgggttccagaaccccacaaggggtagcatctnnnnnnnnnnnnnagaaacggaggtgcaacatacttccctcaaatgccgggtcaggcagggcccttactagcccccgcaacccccattcctgcagggtttgggggcaaaggccactgagatgcctgggcggcggggaatgtcccggccgggatgctttagtcaacctgcgaggccgctggttgcgcgggtccaagggagccacgaagcgcgtcagcatacgcagcctcgatccacaaggtgttccagctgccgcacattacgcagggcaagagcctccagcatcactgcatatgggatacactgtactggagcagccagggtgacaactgagaggtgtcgaaggttattcttctgagcctctgttagtggaggaagattccgggattcagctaagtagtcagcgtatgtcccataagcaagcactgtgagcagccggaaggtagaggcaaagtcactctcagccagctctgtaacattgggcatgtccagcagttctccaaacgcgtagacaccaggggcctccagcacctgatggatgagtgtggccagcgctgcccccttggccgacttggctaggagcagaaattgctcctggttctgccctgtcaccttcacttccgcactcatcactgcactgagtgtgggggacttgggctcaggatgtccagagctggaagcttcgacctccagcgcaccgggcggggccgccgctccgtcacctccggcagctgttccaagcctttcctgccacctcccatcccgggaattccggaccgggccggcgggaggaggagaaggtggagagtgaaaacgaaggggaa

SEQ ID NO: 437706 - DNA, 1054 bp, Homo Sapiens
cagtcttcaattcgactggaccaaatctggcgctccctcggagccccttgcccttgagggctttcttgctgggctggcgctggttggtgccaggagctggttccctcagctcagtcaggtgttgctcagggtcctgagatgtggctgcggctgctgctgccgtcgtaactttaatggtttttttaaggttggcaacctcactctcaatctgctgcttcaggcccagctgctgctccttgtgttggttggcacggctcacctgctcctcaatgcctgacagcacgacctcacagcccacacaccattcctgcagggttcgggcaatggcactgaggtcctggcgctggatgtcccgcccgatgctgtagtcaacctcgagccgctggttgcgctggtccagggagccacgaagcacgtcagcatacacagcctcaatcacaaggtcttccagctgccgcacattacgcagggcaagagcctccagcaacactgcatatgggatacactttactttagcagccagggtgacaactgagaggtgtcgaagcttattcttctgagcctctgttagtggaggaagattccgggcttcagctaagtagtcagcgtatgtcccataagcaaacactgtgagcagccggaaggtagaggcaaagtcactctcagccagctctctaacattgggcatgtccagcagttctccaaacacgtagacaccaggggcctccagcacctgatggatgagtgtggccagcgctgcccccttggccgacttggctaggagcagaaattgctcctggttctgccctgtcaccttcacttccgcactcatcactgcactgagtgtgggggacttgggctcaggatgtccagagctggaagcttcgacctccagcgcaccgggcggggccgccgctccgtcacctccggcagctgttccaagcctttcctgccacctccctgaagagtcgctctggctggcaagaattccggaccggtaccagcaagaggttgccggggggagtacatggtagttttaatcttttacactttt

SEQ ID NO: 437707 - DNA, 947 bp, Homo Sapiens
  misc_feature (318)..(318): n is a, c, g, or t
  misc_feature (366)..(366): n is a, c, g, or t
  misc_feature (925)..(926): n is a, c, g, or t
ctaagagggcaggcaggcaggtgggacccccacatcccccagggagggaaacgccagttcttttcatttgacttggaccaaatcttgggcgctccctcgggagccccttgccctttgaggcttctttgctgggctggcgctggttgtgccaggagctgttccctcagctcagtcaggtgttgctcagggtcctgagatgtggctgcggctgctgctgccgtcgtaactttaatggtttttttaaggttggcaacctcactctcaatctgctgcttcaggcccagctgctgctccttgtgttggttggcacggctcacntgctcctcaatgcctgacagcacgacctcacagcccacacaccattcntgcagggttcgggcaatggcactgaggtcctggcgctggatgtcccgcccgatgctgtagtcaacctcgagccgctggttgcgctggtccagggagccacgaagcacgtcagcatatacagcctcaatcacaaggtcttccagctgccgcacattacgcagggcaagagcctccagcaacactgcatatgggatacactttactttagcagccagggtgacaactgagaggtgtcgaagcttattcttctgagcctctgttagtggaggaagattccgggcttcagctctctaacattgggcatgtccagcagttctccaaacacgtagacaccaggggcctccagcacctgatggatgagtgtggccagcgctgcccccttggccgacttggctaggagcagaaattgctcctggttctgccctgtcaccttcacttccgcactcatcactgcactgagtgtgggggacttgggctcaggatgtccagagcctgggtcaggctctgcgggccgctacctggaagcttcgacctccagcgcaccgggcggggccgccgnnccgtcactccggcagctgttc

SEQ ID NO: 437708 - DNA, 1312 bp, Homo Sapiens
  misc_feature (151)..(151): n is a, c, g, or t
tttttttgtcacaattcatttttattaatagaaaataaacacttattccagtttcaaagttgttatacttgaagttgctaatttaaaaaaacgaattttaaataatcacttaataatcctgctttgactaagacaatgaaatgtggctttnaaaaaaaagtattcagcaccatttgctcataggtctttcagagtttgttcttaaagtttctggaactttcctgtctgtaaagtaacaggaattactgagctacattggaaagcctctctgggacaggcagtggggagttaagcagtcatcataaaggaatcagtgtacattcagcatggtgacttgactacacaacaatcccttcccctctactgtagctcaagagagacatgcttctaaccactgaggtatgaggagtctcagactgttatttgctgttagaattggtcttcccagctaataacagtacatctctggcacagatgctattggtccttaatgtcctgtgattttaggaaatagtttggatttagttcaatttattcagaaaccaaacgtgtttaattagcttcactactctggcagagtaagggtatgctggtttagtatctttataaaatatatataatgtataggtaaatcatagtcttaaatcatacctaaaatactgtatcatttaaaccaatatctattttaacaaaatgtttataactaaaaacagctgatgaaacactaaatccaaaggtatgacaaagaggactcagctctgtgttgcttaaagaacttttaaaaggcatgtgcccataacgtcattcgaggagagggaaggagcccccttctcctcctccttactatagaattcctgttgggggtgggccagaaattagcacttctaaatatttcagagaagtccaaagtgttaaaaaaagtcttttatgcaaaagaacgtctttctgcatcagtgaatagtaatgctcatcagaatttcctaatagcacaaaaaacaaagccaagtctatacatttgatcagatatcaaagtaatgggaggtggactattatgtcaaccttagtcagagctcctgctggcttcttcctatacactgttcaccaatttgagtaaagtagactttgtgagagaattatgtttgatggccaggacctcttttgggcatttcttcctaagtggaatacacaacagataagggagtaggggaggtaatacagggaagctactctttccagctcagaaggagttgatgaagcccatatatgcattcaagaagcccatgggatcctctagctgtggatatatacatgt

SEQ ID NO: 437709 - DNA, 1032 bp, Homo Sapiens
cggttcataggtgacgaaggcacagtttctggtcgttccatggagaggtcaatgatgtttccaaaaggagagaggccccacggagaaaggttggtgtcatgtcttctccatatacatagagagtattccctttcctaggggctcgccgttcagggaatgaatccgacctgcggaaaggaccctctcggtctcggtctcgatcccgctcccgatctcggtctctgtcccggttcctctcatggctgcggtcccggctgcggcttcggggaggggaggctgaggagtgggcaccactgcgttcttcatagccccagtcaaagcttcgagggggaccatcaccagcccctgggccctctgcctcttctccatctggtcctagttctcgaagtcgatcactagaagacacaaaagctctcatacagagatttcctctggggacgtctggatgactcttgcaggtcatcatcagcagatatgctcctctggaacggctggaaagtggggactggtcccttctcggggtcctttaacttcccctcaagggttcgagaacgcttgaagcctgagttcttggtctcagccttgatggcactgatggctcctgacttcaccagctgctttgcctgctctgttgctgtggctgtgtccatgacaggctgctctgatagtgagcgtttgacaccaccttggctggttgtgctgctgctactttgcttcttcagagccagcaatgcctttttctttttcttgagcttgttgaatttcttctgcagagcctcctcttcctcgctcagtccggggggtatcaccaacatggtggctcccgagggggcggcaaccgggggccccacggtctccggccgcgcccgcgctggccgctgatagcgggctcacaacgatgacgtagcgaggagcggaaaacgcggtaaccaaggcggccccaggcgcgcacttccgcccggccttccaccggtccaggtctgccccatccgcagcgatagttcacgctctcggcggggccggacgcgtggg

SEQ ID NO: 437710 - DNA, 1427 bp, Homo Sapiens
gtgttccagatccttttggggcaagggagtggggaacaggcactggccatgttgttacactgagatcaaacctgacagccgtttttaaaggtttaaccccaatcccaagtgctgaaaaaccagaggctgagggagatgtgtaagcttccacctcagtgttttactgagaccagcattggggcatatgaggcacaaggaatccagctctgttccctagaagccatccacaaggttttccttgtagacgtcatcactgtagacaatctgggtcctcttgtcccggtggcaacccttagggctgttctggacagcgagggagccccagacagacttgccagtagcggcatccagcatgggctgttttcgggctatgttgactttgagctgtacagactccacctgggtcccgttgagctcagcaacggcctgatctgctgactccatcttttcataggtgacgaaggcacagtttctgggtgggtccatggagaggtcaatgatgtttccaaaaggagagaaggccccacggagaagggtgggtgtcatgtcttctccatatacatagagagtattccctttcctaggggctcgccgttcagggaatgaatccgacctgcggaaaggaccctctcggtctcggtctcgatcccgctcccgatccctgtcccgttcccggtctcgatctcgatcccgatcccgatccctgtcccgctctctgtctctgtctcgatcccggtctcgatcccgctcccgatctcggtctctgtcccggttcctctcatggctgcggtcccggctgcggcttcggggaggggaggctgaggagtgggcaccactgcgttcttcatagccccagtcaaagcttcgagggggaccatcaccagcccctgggccctctgcctcttctccatctggtcctagttctcgaagtcgatcactagaagacacaaagctctcatacagagatttcctctggggacgtctggatgactcttgcaggtcatcatcagcagatatgctcctctggaacggctggaaagtggggactggtcccttctcggggtcctttaacttcccctcaagggttcgagaacgcttgaagcctgagttcttggtctcagccttgatggcactgatggctcctgacttcaccagctgctttgcctgctctgttgctgtggctgtgtccatgacaggctgctctgatagtgagcgtttgacaccaccttggctggttgtgctgctgctactttgcttcttcagagccagcaatgcctttttctttttcttgagcttgttgaatttcttctgcagagcctcctcttcctcgctcagtccggggggtatcaccaacatggtggctcccgagggggcggcaaccgggggccccacggtctccggccgcgcccgcgctgccgctgatagcg

SEQ ID NO: 437711 - DNA, 510 bp, Homo Sapiens
ataaattggtaagtgaaatgaacgtaaaggtaatggtgtacgttttagacatgaccaatgaaaatttaaaatgtagcttccatacttgtgcataattccgaaagtattttattttttatcaatccagtgttaaatagcttttttgtacaggcttcaatccatttttcgaagtgtgctgttttttaatgaaagtaactataatcttttcacatcccatggaactgccgtttacacattgcaactttttaaacttaaccatatttttcaaaattaacgtttttggagggagaaaaatccccgcttgctaaatgatactaaaccgttgtttgggctcttataattaggtcctgagattttataaaaatttagtctgtagctttttaggttcttcactagagttggttgtacataaaaataataaagaatataaagtatcccaaaattcttttaaagtctggatttttccgctaatatgtaccttagaggataatttggttcaggcatacttcc

SEQ ID NO: 437712 - DNA, 976 bp, Homo Sapiens
  misc_feature (853)..(853): n is a, c, g, or t
  misc_feature (952)..(952): n is a, c, g, or t
gtctctatatgaacatatgaatgataatttaattaagcagttctttcttcctcatttatttctctataccaagtagtatgcatcctccacagtatggtcattcagcgaaagaagtaccaagtatttctttctgttaatgagtcagaggtattaatatatgtatgtgagtcccccatttaccctgtgcaagataagttcttttaaatgcaattagaatatcctaagataaattacaaactccctcttatgtatccttttctctgaggtgaaatgagacactgcacagatgagaggtactattctattcatcaacaatcaacctttcactcaattttaatattatttaattctatggaaaaaacaaattttattacattcctttttaaaacgggggaaaaactgtacaagtaagcatgatcaaacctctgttatagctggttaatactgatcttttattattgcctcgaagtctctctagtagtgtccaagaaattatgtttaaggtccatctgaaggaaaatagcactggagaggcaagaaagggcttgggtaaaagcttcagaggattcgtagggagatggaaaacttgctgtttaaaaaattacgttgggctctgcagcatctccatttcttaacataccatccaaacccatcaatgggattagttttacccatgttttaaaggctcatattatatgcagtttgggggcttttataaattctgcaagtaaaggaatataaagagtggacagtattgaaggcttaagagtagggctataagagactcaatactactaaataagtccccaaacaaaaacatccaacccacccccaatcccaaatcctatatgtnaaaagaggaaatgcgtagccaggcgaattcaaaaaaagcatgtagccttgaataaactgtacactgaacaggctagaaacaaaaggaaaaaaacaaacnacgtacatatacacaaaaaggcct

SEQ ID NO: 437713 - DNA, 316 bp, Homo Sapiens
ccggattgggttcagagtcactgcttcattcacataggaataccattcggacatggattccacaccctcttggacacacactgtttacactcacatccacactctctcgctcacttctcccctgttgaggctgtgcagacccactggcacagcaggggtagcaaacttgagccgatggttccttggcctgtgttcacccacctgtgtgctgagataatgcttgtggaagctctgatgtgcgtcatcacataagaggttgcacagagcggtggtaaagctggccctgtggatttctgttaacgaggatccagaattc

SEQ ID NO: 437714 - DNA, 308 bp, Homo Sapiens
  misc_feature (62)..(62): n is a, c, g, or t
  misc_feature (72)..(72): n is a, c, g, or t
  misc_feature (149)..(149): n is a, c, g, or t
  misc_feature (159)..(159): n is a, c, g, or t
  misc_feature (161)..(161): n is a, c, g, or t
  misc_feature (182)..(182): n is a, c, g, or t
  misc_feature (249)..(249): n is a, c, g, or t
  misc_feature (285)..(285): n is a, c, g, or t
gtcattggctcgtcatatccagatagaaataccattcgaagcgtagatccacaccctctctngacacacagngctttacactcacatccacactctctcgctcatttctcccatgtagaggctgtgcagacccactggcacggcagggntagcagactngngcggatggtccctaggcctgngttcacccaccagtgaggtgagataatgcttgtggaagctgtgatgtgcgtcatcacataagaggtngcacagagcgcgtggttaagcgtggtcctcgtggtnccccccccgaggatccagaattc

SEQ ID NO: 437715 - DNA, 283 bp, Homo Sapiens
  misc_feature (33)..(33): n is a, c, g, or t
  misc_feature (37)..(37): n is a, c, g, or t
  misc_feature (66)..(66): n is a, c, g, or t
gttcaggcatggacaggtaagtgcatttcagcnttcntgagcgaaacatgacgttgctaattagantttgtgtttatccagacatatgtttatagattatgtgaaagtttgcagtaaattactgtgtaggctagtcaacaccatcccattattgatgaggtgtgtgcctagagtctggcatttaatagataatgtttgtttcataaatatgaaccaggtaaatatacatgtcttctatgacacaaatttttaagtactaatggaccccgaggatccagaattc

SEQ ID NO: 437716 - DNA, 393 bp, Homo Sapiens
  misc_feature (31)..(32): n is a, c, g, or t
ataatactaacttgaggaattttggatcctnngccggaggtgatttgtggaaacgttcaataactcaacttggacccaggaaaccctacacaatcatggaaatcaaggaggtttaaatcttcaacgttcaactttacaaacacttgtgacattacccaggccatcgaggttgcatatatggaaaagccaccaggtaactgaaagatgtcactttacagaaatggtatcattctgatgttacaatggtagagtcggtaggtgtgcccaggccaaacagtggggctggacacaggtgaacttttgctgcacgtgcttaaaaatggtgaaagtcacgctgaacttaagggtttccatgtagattctctggccattgagcatgaggatccagaattc

SEQ ID NO: 437717 - DNA, 472 bp, Homo Sapiens
caccctctcccatatcacggttcaatacttgtcattgctctcttcttgcccctttttgggtctaggcatggtaaagcttcaaagctctctgccagctcttgttggtttctcttaatcctgaccacacctttgtaaatagtgtcttccttcagctttctccaattatccctcttaggtacatttctgccaggaccctgaccaaggtagtccctttgtacaccagagagataaccccagcattgttctcagtactctactcgattataagacgtctcccccaccacctcatctctcctcccttacgactgtcttcactgataacctggtgctctccaataatcatgcacatgctgtacttgatcactcaatgcttgtgtcttttgtcacaagcatttctttgaaatggttttctctcccaaagggcagggctgtgctaaaatcacccccgaaccccagttgttaatcgcaaacc

SEQ ID NO: 437718 - DNA, 226 bp, Homo Sapiens
  misc_feature (201)..(201): n is a, c, g, or t
cctcgggggtttactttgtagctgaggtaagtcacttaacctcaccgcatctttctagtgtgtgcaacttgacttatcgtcattgaaagctttttattctatctgacattttacacttgtcagtctagggttgccttcatgttggctgggcaaggtttaatgttttcctcccgttaggaacgactttccatggctgtgatnataaaatgacaaggtgtgaggctga

SEQ ID NO: 437719 - DNA, 407 bp, Homo Sapiens
  misc_feature (26)..(26): n is a, c, g, or t
tccagggttgggtcaaggcctgggantacctgggctcacttttttaccaagattttgatctgtgccaccacaccattttgcaagaaactccccaagccttagtcatattgatgtcccagtatgctgggctacacacagaggaagcagagagtacatgtctttggaaagaatgacctagccagaaagttgtcccctactccccaaatgaggcacctggcagccgtcacacccattacaatgtttcaagcacaattactggacatatcttcaaaatctggaagccttatcaccacatgccttgcggaatcgctaatgacagacacagagcaactagtgtttcatcaagaagatggaacaggtgaattgcatcaaagcaccttagtttgaattctgtactttccgaggat

SEQ ID NO: 437720 - DNA, 236 bp, Homo Sapiens
ccctcgcgaatcgaacgtgggaactcaacaaagtagggcatgcctagttagaagaattgtgggtatctgacggaggcgtctctgttttaggagaggactcctagaaagcatgaggccaagaaatatgagctgccatttcaggcatgctcctgcatagttgctctgggcagatggattttcagctcccttcacattattccatacagttaaccaaccatgaggatccagaattctcg

SEQ ID NO: 437721 - DNA, 320 bp, Homo Sapiens
agctgctctctgacagctgacagtgccccttgcaatttccgggcataggatgtgccttcaagggacagtgtggtacatgcttaaggccgctgacatgttcacaaggaagagagatgtgctgtatactgtggagcttctctagagacgtgtgccaccttgtcttcgtgctgtggtgtagaactgcttgtagaaacatttaatgatgttttggaggcacacgttgggctccagagtgacagtatgacttgggtgataggatgagcaagttcctcggtgggcctcatgccttaattacatccacaatacctggggacgaggat

SEQ ID NO: 437722 - DNA, 272 bp, Homo Sapiens
tcctggaaggcccaacagtaaggactctgctggcatgtcttgctgcacttctgcttaggtgcttccccatgtggttctgcatgctcctcctccaggaaactgtgagtaacaaactctcttttcaatggcagttgtcttctgatctgttggctttaccacacataaataataataatgcttccattttataacagatatatgaaaatctacccaaatcctcctattttgagtctcagatgtctaatatttcccccaacgaggatccagaattc

SEQ ID NO: 437723 - DNA, 561 bp, Homo Sapiens
  misc_feature (375)..(375): n is a, c, g, or t
  misc_feature (381)..(381): n is a, c, g, or t
  misc_feature (497)..(497): n is a, c, g, or t
tactagtagtactactcgagaatttctggatcctcggaggatgagggcagtccaggccaggggactgtatgtggagccacgcggaggtggaaatgagcccaactcgggcaggctacagagagggggtggaccgagccaaagcagggatctgtgcagagtgagctgggacagttgcagctaggggtgagactcctgcagtctgggaatactagaacagagtgcactttttccaagcagcagtagggagccatagcgggttgtggagtgatctacatggtttgggtggtattgctgttgcagatttgtgtgtatgatgactggatgaagggagattggaggtatggacaccacatagactgttagagttcttctgtnatgganggaaaatggcttcagccaagatcgtggagtagggatagaaaggtaagaacccaagagagattttgaaggggaaattgagaattgaaaattagaataagagaggagagttagagtgncctgggttccaggggactggctaaagggcaagtggaaatggcactgacgtgaggaaatgggggg

SEQ ID NO: 437724 - DNA, 303 bp, Homo Sapiens
gatacggggcctcccaattttggttggtgttacagtaggctgactgtgcacagcgtggtgggatgggtgaccagcctgcagccactttttttcaatcagggcctcaaaaccacgaatggtcctgcttcttggctctaagatgatctgggccaaggaggtcacctggagtgtggaatcagttcctttctgttccgtgaatcaatattgatgctccttccctgtcgatgctctgatccgctaggcaggcagttgtcagaatctctttgatgtgagtcagccagttagaggcctccaatttactga

SEQ ID NO: 437725 - DNA, 341 bp, Homo Sapiens
  misc_feature (50)..(50): n is a, c, g, or t
  misc_feature (56)..(56): n is a, c, g, or t
  misc_feature (61)..(61): n is a, c, g, or t
gggggccattacgacccagttggaggtcaaggaagtggagaacttcctgngggctngattngaccaagtgtagatcttagtctcccagtaggacagaagggtttccgtgttatccagggacggggtggatcaactttgatcatttggacctggttttggtcatttcttggtacccattgcatggctgggtgatggcagtccatgaatgtgtggagaatgatgtcaaacagggtgctggatgacaagttcgggtctccagagcacttatgtggtctgtgaacataaatcattccattcagtcaaacctccacccttgccccctccctcattgagatgtacac

SEQ ID NO: 437726 - DNA, 713 bp, Homo Sapiens
  misc_feature (17)..(17): n is a, c, g, or t
agaaaaacaaagccagntgagtagagttcctgacggaggatttttcgccctaccctttagtaaccattatcccgtgcccttcgttactttttcttcacctgtggggaggccactgacctatggaaagagatggtccataagagaggcagaagggtggggaccacagattggaggggtcctggggcagtcagggttgccctggtgttgatgagtggttctctgaattcatctggggagactggatcacgctacaaccttagccatgcccttgccttgttttggtctccatattaccacctatgatgtgaagatctggaaaatcttttttaaccccagaagatgccacctttacaaacacagagcccatagaacgccaaatgatgaacagagaggtgagttctcccagcccaaaccctcatcatagtagttttccccccgaggttcaggggccggtattagcaacccaattaatcaatgaagatgtgatcaaatgaaagcatttaagagcggtatggagagagaagttgacgacagacttggccttctttacaattctgccaggcctaagcctaaggagattctatcaggacgtggcattgcagttggccacattaaaggacacagacccgacctgtctcctacatgccttcaggccttgcctgggcctctgatacatgtcttcactgataattttggagctcttatcatcttcc

SEQ ID NO: 437727 - DNA, 233 bp, Homo Sapiens
  misc_feature (38)..(38): n is a, c, g, or t
  misc_feature (171)..(171): n is a, c, g, or t
  misc_feature (203)..(203): n is a, c, g, or t
acacacagtcacaggtgaaacccccaacagcaatgaantgtgtcctgcaaggaggggacccgacattgaacccctgaccccgagtgggctcctgccctgcctcagggcagctgtgatgatgctactgcaaaagcttctggaaggcctgcatctaaccagtatcccttgacntaaaggctctcgttcccactgtgtcaaaaganatatgctacaatgtacaggcccacacttgt

SEQ ID NO: 437728 - DNA, 250 bp, Homo Sapiens
cctcaccttttgccttgagaggccagggtctcagtggctacgactggtgtggactgttgggcagcatcctaggagtaatcatcattgtgggacctggactgtggacgctacaggaggggatcacgggtgtttacaccgccctgggctatgggcaggcttttcgtgggaggactggcgctgtccctggggctttctggtgtatcgttgtctgcactttccctcctgcctccctacagtggccgaggatcca

SEQ ID NO: 437729 - DNA, 453 bp, Homo Sapiens
aacaaaactaagatggacatttcacacaacgcagagctacgagaacatctcttatgctccttgccatgggattttaatgccccaaggttcataactacagcaaagaaagtaagtcaaaaataaactgagcttaaagaaggtggcaggccaattttcccaaaaagactgtggactgtgggctgctgtgtagcctttgctacaaggctgaggaagcagaagaaagatgaattgggcaattggtgatgaaaagtatttgccattttcaaaggcttctcagtgtggccatagattttgctagtcaatttttaaaaaattatatttttagctcaacacacagctctaaagcagggttcagtgtagtgtgttctctaccgaaatggttatatacagatggtatggaaatggttttaaagattactcataaactatccttttaaagaaaaactagactcg

SEQ ID NO: 437730 - DNA, 250 bp, Homo Sapiens
  misc_feature (210)..(210): n is a, c, g, or t
ctcagtgttatgtaacttttaagtaacctataatcttcccttcctcaggttcattaagcactgaaccaatagcgcacaggctgagaaacttacctcacccagatgttttgggcctgaattctaacccctctgaaagccacccaccaccagcttctgcaccaggcacccagtcttggctgggacgcagggtacatctctcatggccagcanacctctgttgggccatgttctgatgcatttctgatctgtc

SEQ ID NO: 437731 - DNA, 317 bp, Homo Sapiens
  misc_feature (21)..(21): n is a, c, g, or t
  misc_feature (26)..(26): n is a, c, g, or t
  misc_feature (39)..(39): n is a, c, g, or t
  misc_feature (42)..(42): n is a, c, g, or t
  misc_feature (46)..(46): n is a, c, g, or t
  misc_feature (48)..(48): n is a, c, g, or t
  misc_feature (63)..(63): n is a, c, g, or t
  misc_feature (69)..(69): n is a, c, g, or t
  misc_feature (95)..(95): n is a, c, g, or t
  misc_feature (99)..(99): n is a, c, g, or t
  misc_feature (247)..(247): n is a, c, g, or t
  misc_feature (283)..(283): n is a, c, g, or t
  misc_feature (289)..(289): n is a, c, g, or t
  misc_feature (291)..(291): n is a, c, g, or t
gtaagagaaagaagaaccagnagccncagagatttgtgnagncatncnaagaaagctggcccntagccngggtggagaagaaacccgtgatcccntccngtagagtccagagtccagatcccacattgaagattagtcgtaggatgatgcccaacagtccacaccagttgtagccagtgagaccctggttttcaaggcagagggtgaggacggcggagcagacggtggaagaacctttgcggacagnggcagcgttgccagcgggcaccacctgaaccgcacngtaggnanatccaatgctgaggacgttgagcagg

SEQ ID NO: 437732 - DNA, 276 bp, Homo Sapiens
  misc_feature (74)..(74): n is a, c, g, or t
  misc_feature (122)..(122): n is a, c, g, or t
  misc_feature (252)..(252): n is a, c, g, or t
  misc_feature (264)..(264): n is a, c, g, or t
gggttggctaaatgaattcagagacactcttgactcaggaaaagagcaggtaaaagaatccatgagagctccangggaggtgtggtccgggctgcagagatcagattgccgggcttcaccgnagcccacaggacaggctgtatggactccgctggacttgtttcaggtaaatgtttgtccaaaaatgtgttcgtctggcagaatttgctcttaggctgctttcattccaacttgataatgaggctggcttcnccttcctccaanttttcagtggct

SEQ ID NO: 437733 - DNA, 295 bp, Homo Sapiens
  misc_feature (101)..(109): n is a, c, g, or t
  misc_feature (147)..(147): n is a, c, g, or t
  misc_feature (271)..(271): n is a, c, g, or t
gaattctggatcctcgtcacccagtttgaaagctgttgtattggaagatggttaaggcccttctaggtcttaaatgccttgacgtccccatgacctatgtnnnnnnnnnaccaccatgtcaacccttcagaggggtgccgatggtanagaagccaagcttgctatttctggtgattgaggtttacaataaacaaaaccagctgttttctcattacctatactttttcttcaggcaatgggtccattccctgaactaatctgtcttgcatanctgcttggatgtgggtgtggggaa

SEQ ID NO: 437734 - DNA, 519 bp, Homo Sapiens
  misc_feature (15)..(15): n is a, c, g, or t
  misc_feature (450)..(450): n is a, c, g, or t
ccgcaacaagacagnaatgtttgcgaaggtgagagttgtatttttccttacataaaagatctgttttacaaggttattttatctggttaccagtctaatgcataaaagacagtggtatcctgtctcatgtacaaagagcaatgctgccctgggacgcctcccgcatgtgcggcggcaccactctgatgatgctcttccatctctccactcggtcccaatattagagtttcttcaggctgcttcatttttccacgatgcgcctctcagcgaggctgtattttgtaggaaagttccagtgaacgatgtaacaggtggagaatcccagatccgaaaacagagattggaaacacgcaaagggacccgtgtgttgaaacacatttctaatcagataatcgggtgcatctgttctgttaaatgtccactacacttataaacaaattaaccaaattnagaaataaccatacaattgtaaaatctgtaaggaataaggaaggaattatctgtgaatcttgaccattt

SEQ ID NO: 437735 - DNA, 444 bp, Homo Sapiens
  misc_feature (22)..(22): n is a, c, g, or t
  misc_feature (43)..(43): n is a, c, g, or t
  misc_feature (316)..(316): n is a, c, g, or t
atatgtcttttgacttatctanatggaccccataatgcaaaanaacgagtcttggccatttgcatactgacacttggggtagcaggccaggaggttttacaataggcctggcctcaaatatatttcacttgtaataaggaccatatggggtcctgccttggagctgagtcatacaagagtgcctagagtgccttttaaaggcttacagccatccaactcttagggaagggagtccgcattggacttgggtgctctgggaagtggtctggttcctggatcaattgttgatgaggtatatatttcaatccatgttttncccacggactgtggggaaggcggtgagggtggctggagacaggattggttggggagaaggggctgctgttggttgaacattagttacacagagctgcgtgctataaattctggctcactgaatcctca

SEQ ID NO: 437736 - DNA, 256 bp, Homo Sapiens
  misc_feature (18)..(18): n is a, c, g, or t
  misc_feature (34)..(34): n is a, c, g, or t
  misc_feature (37)..(37): n is a, c, g, or t
  misc_feature (67)..(67): n is a, c, g, or t
  misc_feature (78)..(78): n is a, c, g, or t
  misc_feature (126)..(126): n is a, c, g, or t
  misc_feature (199)..(199): n is a, c, g, or t
gacagagctgctccattntagttgtggttttgcntcntggcaggccctgcacctttgtggatgtggnttaaccattgngagccttggttttcacatttatccaatagagacgtcacccgcccaggntgactcaaagtcagcaatcaatcaagacagccccagtcccactgtttgcttgaccagctcacgaggccagtcntgaggaaagctttttcctccaaagcacgtggacagcactttagagtttacaaatcga

SEQ ID NO: 437737 - DNA, 416 bp, Homo Sapiens
  misc_feature (26)..(26): n is a, c, g, or t
  misc_feature (39)..(39): n is a, c, g, or t
  misc_feature (76)..(77): n is a, c, g, or t
  misc_feature (119)..(119): n is a, c, g, or t
  misc_feature (188)..(188): n is a, c, g, or t
  misc_feature (257)..(257): n is a, c, g, or t
  misc_feature (356)..(356): n is a, c, g, or t
aacccaaccattttatgcacagtttnttcacctgcaaantgggtgattagtgcctggcacatgggacttaagtctnnacatcttatattattctcagttgtattatcataattattctntaatcagccgtggtgacatggggaaaattggaatagaagtcacaagaagtagcttaaaccatcattccnacacagagtttaatacctttttgactgtggtcccgggtgtcctacttttttagatgggaataaaatatntctgtgacaaaacaaagattaaatgaggtcatctgtgggaaagtatttgggaagcgtaaggctctccatacacaaacacgaggtttctattgttattgntattaacctttcgtgtttccgtacaaggatgccgcccccattaggactcaactctaggag

SEQ ID NO: 437738 - DNA, 210 bp, Homo Sapiens
ctccagaaatccctccttttaatgtgcaatacgattccatgataaggattttgctcagccatccattcttcagtcgggagtgcccattagcaagcttgttcgttcctggcttgctgactcatcccaagaccatacactgataagcagcagcctttggagtttacagaatgctgcacatatctgtcctttcccatttggaatcagctcacc

SEQ ID NO: 437739 - DNA, 234 bp, Homo Sapiens
agttctatgtctggtcacagccatttacattcatcagaattcacagaaccatccatcttgaagtggtgaatttggtgaatagaaattatacctcaaagaccagatgttcaaaaatgcctttgtgttttgtaagcttcaaccctcgcccagtgggaaccacaaaagcgttgcccaatttgttgaaagcattgctgttataagttcagggtgtggggagaagttatgttttcatac

SEQ ID NO: 437740 - DNA, 329 bp, Homo Sapiens
  misc_feature (69)..(69): n is a, c, g, or t
  misc_feature (266)..(266): n is a, c, g, or t
cccctgccctgctacttccactgaccacagctggactcttccgctcaagcttcagagacagcgccaganatgaggcccaggaagccatgtccttcctaccagtcccatcttttctggcttttgccacccctccaaccccatcagcatctcccaaggcctcctaaatggcattccctttgctgatctggaatccatgagctcctgtagcagcccagtatcattccccatgcagggtgacacacaccaacccatactcccgtgaccanatccactgcctttgttcgtcactccctttccacacattggcatggaaggaacatgcctctgtt

SEQ ID NO: 437741 - DNA, 1325 bp, Homo Sapiens
  misc_feature (727)..(727): n is a, c, g, or t
gcatagcattgtaacacagggaaagcacaaaatacttgggcaatatctttttacatttggcttgtctagactccatcctccatcccctcatgcactggtgtggtgcagaccagaatatcacccacctagactgcagattggatttgggtggcatcttggctttctgcacaagacttgcctgttccccaccacatccccctggttctcagggtccaggattccaggaagcagggatgttggcaggcagggtaggtggcccacccagttcactcccacgctggggacctgcagagctggctgtccgagacagggtgtttggaccaacatctgggtttctggatttccatttgagcacagctggactacacaggctgaagctctctctgccgagatatagatatttccctggtgatgatctttcaagctgacatgaagacatggccacccactggaacgtcgtgtgtctgccgtggcgctcttgtaatttgtgagggaggctcctgaggaatgcagtgcgtaagtgggaaatggtggggaagttctcgcatccccccccgggccgaaagtgctgcctgcacaggttggtgtatggtcctttgagcaggaagaagacatgaagcacattcctgttagctacgacagagaggggcagggcacacactggacatttcaagcccctccagaaaagcaagtcttactgtgctgggagtacttgtggagtgcgggnctgtgttgccctgggctttaattatttcaggaaacatttaaccacagggttggcaggcccggatcttgatacgtgtttcttagttggaaagactttggaccatagggaaatgtcttctcaattcttttaatttcagtaaggttgtcatttttcttcttgtggcctctggaatgtgacacagaactcaagggacaggaaggagatgatttggaggctgggacaggggtccctgccagggatgctggtgactcacatgacggtgttgatgtgtggagtccggtgcctggtttggggaatgttcatgggatatgttccaaaggactgacggacctatcaggtactggaggtgaatggtcaagtctgatctcagggctgacagtgtcaggcaaggacaggaagttgacgttggactcattggctgaggttgcttgggacccagggagcaacgtgtgccaggacagatgggtctggggctaggaaggcaggtttgggctggagacttgggcttgggacgcatcccaggtagacagtggttgaggctgtggaaatgaccatgattgcctgggatgagagtggagacggacaagattccatctca

SEQ ID NO: 437742 - DNA, 297 bp, Homo Sapiens
  misc_feature (223)..(223): n is a, c, g, or t
tgaaaggtttgcaaaacctatttgcaaaagggagccattggaagttttaaagtagggtcttggcacattcacattattgtttaaaaagctactcacagacctgtggtagatggtttctggaagctgggacgccagctggggccttgttgggttaccggcagaggcgaggtggcccttcccaggtacagatgagtgccggttgcagtgagagtcgaaatcaggngacaaatgtaagggacacagagagcagaatgtcagcagggcccggtgctgtctggatgtggcacgagtgggagg

SEQ ID NO: 437743 - DNA, 237 bp, Homo Sapiens
  misc_feature (84)..(84): n is a, c, g, or t
  misc_feature (112)..(112): n is a, c, g, or t
  misc_feature (121)..(121): n is a, c, g, or t
  misc_feature (143)..(143): n is a, c, g, or t
  misc_feature (178)..(178): n is a, c, g, or t
ggctgccacgtgtccaaattagattttgtgctgtatgaccccaaaaggttaaaggagaagccacagatgaaaagtaatggatanaaagattgcagcaccactactcaacagnaataacttncccaaagacagccacaggtcanccagcctgggaaaaaagcgcgatcactactgttgnaaaatcaagacatttgaacccagatcctgccaaggggataaaggatcaggaggatccac

SEQ ID NO: 437744 - DNA, 603 bp, Homo Sapiens
  misc_feature (100)..(100): n is a, c, g, or t
  misc_feature (104)..(104): n is a, c, g, or t
  misc_feature (149)..(149): n is a, c, g, or t
  misc_feature (151)..(151): n is a, c, g, or t
  misc_feature (230)..(230): n is a, c, g, or t
  misc_feature (267)..(267): n is a, c, g, or t
  misc_feature (346)..(346): n is a, c, g, or t
  misc_feature (355)..(355): n is a, c, g, or t
  misc_feature (365)..(365): n is a, c, g, or t
  misc_feature (381)..(383): n is a, c, g, or t
  misc_feature (386)..(386): n is a, c, g, or t
  misc_feature (393)..(393): n is a, c, g, or t
  misc_feature (404)..(404): n is a, c, g, or t
  misc_feature (409)..(409): n is a, c, g, or t
  misc_feature (431)..(431): n is a, c, g, or t
  misc_feature (438)..(438): n is a, c, g, or t
  misc_feature (441)..(442): n is a, c, g, or t
  misc_feature (446)..(446): n is a, c, g, or t
  misc_feature (467)..(467): n is a, c, g, or t
  misc_feature (479)..(479): n is a, c, g, or t
  misc_feature (491)..(492): n is a, c, g, or t
  misc_feature (495)..(495): n is a, c, g, or t
  misc_feature (499)..(499): n is a, c, g, or t
  misc_feature (521)..(521): n is a, c, g, or t
  misc_feature (528)..(528): n is a, c, g, or t
  misc_feature (532)..(532): n is a, c, g, or t
  misc_feature (568)..(568): n is a, c, g, or t
tgtagatagcactttttctttagatagcacctttattgaaaccagctgacaccaatgaattacctctcaaagagatatccattttaaaatctttcacctntatntgtactgcacagggatacatcccagtcacgcctctctcaacattntntaatttaccacccatcactgaacaaaacaatccagaaagagtctgaccagttccaagaagccaaggctcttatttcatntatatacgcctgtgacccagtgaaatgagcactaaantaagtcacattccaatccctgctgccttatgcattacctgtgtgctcttgatcatggtactaatctccctgatcttcantttccttcnatgaaaaatncagactctagaaaccnnnccnttgcggnctcttctttanggtcnaataaaacaatgtttaaaaacntgcctcnacnntggnaaaactttgtatttacttganggatccctatanctatataattgnngtnttancataatggttttcaagtttcanggcttanctgnaaaggggcagggcaggcaccaccaagctctaagctncttatacctcccaatcacaatcccattgcccattt

SEQ ID NO: 437745 - DNA, 349 bp, Homo Sapiens
  misc_feature (50)..(50): n is a, c, g, or t
  misc_feature (64)..(64): n is a, c, g, or t
  misc_feature (300)..(300): n is a, c, g, or t
  misc_feature (339)..(339): n is a, c, g, or t
ccctgcacctaccacagcatgtggcacaaagtaggtgttccattaatttncttcaatgaatgantaggtgaattaactcagtcgctctctctgaaatactcagtcattttgtttcgtatatcctggtctcctttgcaaccttttgttttttgttctgtggaaatccctggcgtgccttacagagcacacacagacactacctccatatgcaggagaactgagaacccccactgtcacgtagatgcaactgaagatcagaaagggaaggaatgctaggcacagttccattccatgcaaggnccacacagaaacgagagctactgaggaccaggactgagnccatgaggaa

SEQ ID NO: 437746 - DNA, 306 bp, Homo Sapiens
  misc_feature (82)..(82): n is a, c, g, or t
  misc_feature (90)..(90): n is a, c, g, or t
ttctggatccatccgtgtgcatgcattcctgggccaggaagggtggaggggcaaggatgctcagtttctgacctcagaaggnttccagcnacagccctgtgggttctttttcatgcagaggagccaggagagggccatgttggaggagccgtgagcacagcctgcagacccctgagtcaagacaggccgggctgggaaagggactcctggcctgtggaagtgggctcttgctccagctcagagatgctgctgagattcacctcctcctggaatcttcctcgtaccccccccgaggatccagaattc

SEQ ID NO: 437747 - DNA, 300 bp, Homo Sapiens
ggacccgtcccgggaatccccgggtggagtatatataatcgaggaatttggatcctcaggtttgagaaccgctggtttaggcctggcatggttgcacctcagaaggatcccaggtcagttttttcagcccagggtggaaggtgaatttgatgcccttgaggaattctagagtttgggaggttgaaggccgttttttggtttcccaggggaccaggtggcccatacctgctgggtgtgagacaggaatgatgtggactcggcccgggccgaggatccagaattctcgagttagtagtagta

SEQ ID NO: 437748 - DNA, 351 bp, Homo Sapiens
  misc_feature (253)..(305): n is a, c, g, or t
ctcgagaattctggatcctctgggacatgaatcggagacaaagaaaagaagaaggaatggagccctgagcattaaagaaagtgaggctgaagctatggtttggaaacgacttagggactttttgggaacagaactatatacacttgagctattgcactgttgtcatagaaaaccccgttttcccacacccacagcaagggcctccatacctacaacgctaagtgtaagtacgcctgtatcttggtctgtcacnnnnnnnnnnnnnnnnnnnnnnnnnnnnnnnnnnnnnnnnnnnnnnnnnnnnntggaagatccaaattcctccaatttataattattatccaaccccgg

SEQ ID NO: 437749 - DNA, 248 bp, Homo Sapiens
gaatagagctgcgtgcagtgaaccatgggaagtgctgtggggaagcacaggaatgaaattcaagggtccaagtatgtgcaaaggccccatgacatatataagcacaggagatgtgtctgtacctctgtatctgctttataacctccctgagggtatgttacaggcctgatccatctctcccctctttaaagactgtcagggggtctctgtttcccccaccatagagtccatactcgagcctagtaccc

SEQ ID NO: 437750 - DNA, 883 bp, Homo Sapiens
ggcctgggtggcgaattcggcacgagggcggattctgaggcggctttctcctactgccctccgcttgccaacgcgggacccggagcccaacggcagcggcggtccttgggcctgtggagaggggttctctgtggccgagtcctaggcctggtgaaccgcgcggtgcgggagaggcgcttgggcctcgtccagccccagcccctgtctccccgcggccggtgccggcggctgtaggcctcgccgcgcccacccagcctggggcgggcccagcctcaccgcccggtccgccccgccccacgggccagccccgcgccgggtgtttccgctacttccctgcggcggggtaaccgcctcgcacctaccgggctcggttccctggctccggccgcggggggagcatggagtttgcggagctgattaagaccccgcgggtggacaatgtggtgctgcaccggcctttctacccggctgtcgagggcaccctgtgcctgacgggccaccacttgatcctgtcctcccggcaggacaatacggaggagctgtggctcctccattcaaacatcgacgccatggacaagcgatttgtaggatcactgggtaccatcaccataaaatgtaaagattttcgaattattcagttggatattcctggaatggaggaatgcttgaatatagccagttccattgaggcattgtgtactctgggctccatcactctgatgtaccctttcttttaccgtcctatgtttgaagtgatagaagatggctggcattccttccttcctgagcaagaatttgaactctattcttcagctaccagtgaatggaggctaagctatgtcaataaggaatttgctgtctgtccctcttacccaccgaggat

SEQ ID NO: 437751 - DNA, 1584 bp, Homo Sapiens
  misc_feature (1265)..(1328): n is a, c, g, or t
acaagtctataaagtggtttattttaagaagggtacattttaagaaggacaaaatcaaaagcatggacaagtgttggatgagctgatgaggttgtggcaatttactttgtgaatactgtgagagtttgtccaactcgctgtgcttaggtactagatgttgaggatttaaaaggtccatgaagtcacagcagaccagcactcagacatatttctcttctatttcctacttttgaataaaaatgtcagaagtgggcggtgggaaaggaacaagccaaggagtaattatttgaataaatttttggcgaaacgtgggtgtctgacggggaggctgtgcggtggtgaccaacgcacccatgcgctgggtttcacagatgcagactgaagtccaggctctgctgcagattaacggggtggccgccagcaagtcaagtgacttgctcttctgtgcactgcatgtacttgggttcctctcacaggtattcctgtttttcctctttcttgctccaggttacacctcgtggcgcggcgctctcggagagcctgtggagtggccctgtgtccctccctgacccctggaggattccgtaaggtcacagtcaccgcctccatcccctacttgccatgtcttcagggctaatgcataacaattatcacaatttacagcagccccacgctctgaagagcttctggaggggatactactcaagcggaggaaggcaagacagggacctcctccctcttcccggacctcttctgataaggaatatttgtaggtggttaagaaaggcagcgggagggcgtgaaggcaaagacaagctttttttctcgtaggaacacacatcttctggtctggctgtgtttccggaggcatttccagaggacctagcgaggaccaacttccggctgcgacttccgcgtcttccgagtttcgagacctgctggccttccgcccggagtttgttgtgggctccagcagcgagtagccacttccgctaaggagtccctagcggccagggcgtggaagcggattctgaggcggctttctccttactgccctccgcttgccaacgcgggacccggagcccaacggcagcggcggtccttgggcctgtggagaggggttctctgtgggccgagtcctaggccatggtgaaccgcgcggtgcgggagaggcgcttgggccatcgtccagccccagcccctgtctccccgcggccaggtgccaggcggctgtaggcctcgccagcgcccacccagcctggggnnnnnnnnnnnnnnnnnnnnnnnnnnnnnnnnnnnnnnnnnnnnnnnnnnnnnnnnnnnnnnnngtgtttccgctacttccctgcggcggggtaaccgcctcagcacctaccgggctcaggttccactggctccaggccgcggggggagcatggagtttgcggagctgattaagaccccgcgggtggacaatgtggtgctgcaccggcctttctacccggctgtcgagggcaacactgtgcctgacagggccaccaccttgatcctgtcctcccggcaggacaatacggaggagctgtggctcctccattcaaacatcaa

SEQ ID NO: 437752 - DNA, 297 bp, Homo Sapiens
  misc_feature (58)..(58): n is a, c, g, or t
  misc_feature (90)..(90): n is a, c, g, or t
  misc_feature (170)..(170): n is a, c, g, or t
  misc_feature (173)..(173): n is a, c, g, or t
  misc_feature (181)..(181): n is a, c, g, or t
  misc_feature (186)..(187): n is a, c, g, or t
  misc_feature (191)..(191): n is a, c, g, or t
  misc_feature (249)..(250): n is a, c, g, or t
aatggggtgctacgtcatcgttgtcatcgtcatcatcatcatccgagcagccaccagntagcttgcatccacgctgggctgggcgcgagnctggctgtttgtcatagtttgtctttcgacctcatggcagccctttaaggtaagtatcatcatccccattttacagatgnggnaaccgaanctcannaagnatcagtgactggcccaggggtcacactactactaaatgtgtacgcatatgaaatgcannatctccagggcactggctggcagtctggcagtcccacatccctcacc

SEQ ID NO: 437753 - DNA, 244 bp, Homo Sapiens
  misc_feature (173)..(173): n is a, c, g, or t
  misc_feature (185)..(186): n is a, c, g, or t
  misc_feature (233)..(233): n is a, c, g, or t
ggtgaaatgggaactctttttctttctgtgtttggctctgcattccccgtcctccccatataatcagtgaatttccactttcgaagcctcaatggatgggctgaattctccataaactggcattcttctttttaggaatccctctattatgaactacactacattgataaagntgctctgtgaanntttcaaagtgttacagtttaattcagcagattttttccacccgaggngcctcatacgt

SEQ ID NO: 437754 - DNA, 2853 bp, Homo Sapiens
  misc_feature (2240)..(2240): n is a, c, g, or t
  misc_feature (2247)..(2249): n is a, c, g, or t
  misc_feature (2255)..(2255): n is a, c, g, or t
  misc_feature (2260)..(2260): n is a, c, g, or t
  misc_feature (2264)..(2264): n is a, c, g, or t
  misc_feature (2268)..(2268): n is a, c, g, or t
  misc_feature (2270)..(2270): n is a, c, g, or t
  misc_feature (2274)..(2278): n is a, c, g, or t
  misc_feature (2283)..(2283): n is a, c, g, or t
  misc_feature (2286)..(2286): n is a, c, g, or t
  misc_feature (2289)..(2289): n is a, c, g, or t
  misc_feature (2301)..(2302): n is a, c, g, or t
  misc_feature (2330)..(2332): n is a, c, g, or t
  misc_feature (2374)..(2374): n is a, c, g, or t
cttcttacaaactgattaaaacgcgacagattaaaatgcaacagacctgaagcaatgcactcggtgcccatgggattcacggatcttcccataggtcctaccagccagaagcagcatgcctgattgatagaacagtggaatggcccaatgaaggttatgcaactgagcctgttgagatctcatgacatgtgaggatggagtgctcttttacaaagtactgtgtctattatgaagcacattcaataggagctgattcttgtatggccagaatacttgggtttgggaaccaagggataagagtgggactggcttcatttactattgcacgtagtatccacacccaataaagttctgcttcttaccactgcaactttgagctctggaagtttagagaccttagttcccaagggaagaatgtctctaccagggaatacgatggtttattgcatggagagttgagactgccacctggacatttggagttcattacaccactaagccaataggcaaaggggaaggttagtgtcctggctgagaagactgacccctaatatcaaagaacagagatttgctccacacatggggacaaggaggaatatgtctgaaatccattacatcctttgaagatgctctttctatttcattgtccaaagggagaaatcagtggaaaactatagcaacgccatacaggaaaaaccatcaagcgctcagaaatgaatggtcaccccaacaaataaagaacaacgatcagctgaggttcaaattggaagaaggccaactgtggcctcaggatcagttgcagacttgagaacaattgcagcggcctggtttttcatgatgttttatgtatttgtatataccaatttctgttttttccttcttttccccaagtgttcacattggttacatttattactgatctttaggatataagattgtggtggccatggaggtgtaccacccagatctacttcaaaagaacctgctgtgggaagcatagttgatgacggccttcagctactgctcctccagatccatcatagctgtcacactaacactgcatttctacggagtatacccagccaatggctgagagtggcagggttcaacttttcttgaaccattactgctcaacctggcaccctttgctcaggaattctcatcaacctggtccagacttactcagacttgcaatggggtctgaagatgctctgcctcctcctgttcccaagatcctttatccttgccaggcatttccaccaataaatctctttcatgtataagtcagtcttggcatcggctcttggaggacccaaactgacggggatgtgaagctgagattgtgattaaacaatctcactcaaagatggatatgatgattttatgagacttttcagagaggaacagagtgttctgtttgcatagagaatagtcacattgtgttaggagcatgctgttactattcttgttttctataaattttaataaggttgtatgcatacagtgagcagccaaagtggtaggcttcctagatcgtgtctcaataggcactgaaatccaattcccctaaatcctaattccatttttctgtgtcatgttgcagctgcctcactctagtattctggatgtgatttggggtccaatgagatgcacttactaatatctgcagtgtacaatgcaggcagcagcagcgccagctaaagctgagctctggtagagttggattggatgtttacagtgacctacctcttcagtgtgatatttcctcacggtcatcagctacaggctgtgagacagcctgggggagacaggatagccatgtttcccactacctcccaaccactggctggtgcaccagcctcctggccttaggtcgcagccacagtgacgtgacctcctacaatccctggcaagctggaggagcagccctgcaaccaagcctgctctaagataaggctttctgtttactaacctggagctgctctattctttcacccttgttcccctttcagctgtctcgcgcaagtactaattttgccattaaatacgcattttgttttgcaaaatgagaagagcttataaatacttcaaattttctccgtctgtttcactcctttccatttctttctaaaattacagtaaaatattaactatacaaaatattgttgtatttatacaaaacaacaataccataaaataaaacactacatagttgaagccctctgaggatctctccatancaaccannnaaaacnaaaanccanaacnanacgnnnnnttgcnctnggnggtgggttaatnnttctacatctgaatatatccttacacgnnnttaaaatttatagaaatatcacactgaatacatttttctgtnacttgcctttgcactgcattgtgagattcagctatgttgatctgtttaactccagctgatgtatgtaatgatccctgatgattattctgtcgtttgactataccaaaatttattcaggtcctctgaataatgagcatttagattggtttgttttcccatttatgaatttagcaattatgtgtttcctaattttttgttattataaactatggtgctacgaatattcctgtatatgccaccttcaaaattgtaaaatttcaactgttttaaaatacagtcatgtcaggatacattctgagaaatgtatcattgggcaatttcattgctaggcacacatcaatgtatgcaaatctagatgcatagcctactacacacctagaccacatggcgtggtgtgttgctctgaccaccatcatatatgtagttcgtcattgaccaaaatggcattctccgacacgtctgtattaaaattatttagt

SEQ ID NO: 437755 - DNA, 287 bp, Homo Sapiens
  misc_feature (26)..(26): n is a, c, g, or t
  misc_feature (83)..(83): n is a, c, g, or t
  misc_feature (141)..(141): n is a, c, g, or t
  misc_feature (158)..(158): n is a, c, g, or t
  misc_feature (203)..(203): n is a, c, g, or t
  misc_feature (249)..(249): n is a, c, g, or t
  misc_feature (266)..(266): n is a, c, g, or t
gtcccatttatctgtgtacctttcantagtctactacagcattgactgcattaaaattaggatacaaattatgtgcacagcanaagccagaaggctgggatgtgactccatgcatgcttagctctaaggcttctgtgtgtnctctgagtgggtttctntgtctctgccataactatccccgcacttctagtggttggatgaancaggaagggaaatggctgggcctgtgtgggtgacaatgtatgtctngtgcattggagtgcgtntcctttctggtgccaggcttc

SEQ ID NO: 437756 - DNA, 304 bp, Homo Sapiens
  misc_feature (21)..(21): n is a, c, g, or t
  misc_feature (44)..(44): n is a, c, g, or t
  misc_feature (52)..(52): n is a, c, g, or t
  misc_feature (137)..(137): n is a, c, g, or t
  misc_feature (144)..(144): n is a, c, g, or t
  misc_feature (178)..(178): n is a, c, g, or t
  misc_feature (182)..(182): n is a, c, g, or t
agacaagtggtttaaaaaatnacccgggttttgaacccattttnccgttttnttagtttaaatgaggaagcaatttctgttttatcttggtcactgatttagagcatggactgtgctcatcattcgtttctaggaanaaattanagtatccatttcacagagagctacatattgtttnctcnccaccctcttggaagaaaggtaggttgataattacggtttgcccggccacatgctttcactcatgggtaggtgagctaaaacatccatatcaccatgatgctcctttccttccgtctaaata

SEQ ID NO: 437757 - DNA, 292 bp, Homo Sapiens
  misc_feature (66)..(66): n is a, c, g, or t
  misc_feature (70)..(70): n is a, c, g, or t
  misc_feature (78)..(78): n is a, c, g, or t
  misc_feature (132)..(132): n is a, c, g, or t
  misc_feature (165)..(165): n is a, c, g, or t
  misc_feature (172)..(172): n is a, c, g, or t
  misc_feature (178)..(178): n is a, c, g, or t
  misc_feature (187)..(187): n is a, c, g, or t
  misc_feature (191)..(191): n is a, c, g, or t
  misc_feature (197)..(197): n is a, c, g, or t
  misc_feature (211)..(211): n is a, c, g, or t
  misc_feature (241)..(241): n is a, c, g, or t
  misc_feature (243)..(243): n is a, c, g, or t
  misc_feature (253)..(253): n is a, c, g, or t
  misc_feature (275)..(275): n is a, c, g, or t
ctccccccttcctggaagcctcctgtttgctgccggggtttcccctccctgctgcacacccttgtnaganctcggcantctcttctgaaggacattgatgctgtgccacaatgtcatatgctggctgtttcntgcctggttctgcttgaacctcgtctccacgcntaccccngcctgngccatatgntggnacccancgctcgccttcctngtgcttctggaactcatcacttactccgtntntttgtcggtntctgtgtgtcccacccttgggnatgcctgcttcctatca

SEQ ID NO: 437758 - DNA, 427 bp, Homo Sapiens
  misc_feature (63)..(63): n is a, c, g, or t
  misc_feature (73)..(73): n is a, c, g, or t
  misc_feature (79)..(79): n is a, c, g, or t
  misc_feature (112)..(112): n is a, c, g, or t
  misc_feature (388)..(388): n is a, c, g, or t
ttactttttgagggaggttcctggttgaatttgttggcccttgagttaatttgctggaatttncttttgattnagtttnctacttctcctattaaacctctttggatacttnccaaaattctcttccaactggcataagttagaatcgaagtggacttcagtgggccacaaagtcttttgctcccttgaactgggctacagtccagagggcttggaaaccacaacttggagtaaatgtttcctaggaattcagctccacttcctccctcctgggttacttcagcgaaagccttttaagggtagggacaaatactccacaggggggcacccctgcacccaccctctttgggcagcttccatccgagcagcatcatccctggtccagaanttcaaggagatgctcatgcagcatcagctgggtccacag

SEQ ID NO: 437759 - DNA, 436 bp, Homo Sapiens
  misc_feature (388)..(388): n is a, c, g, or t
cttctttgcaaatggtattgagcacaattagcacaaccctccactgctcctgctgttgttcctctgaagaccaactgctgtccgtgcttttactgatggccccccccactctactggaggacttttgccaacagcctcctgacacagtacgctagcagtccttaccaccccagggagtgcaccaccagcagcctctgctgtccccaaaggagtgctttagctggtggccccccaatggagtgcttttgctagcagccagagagcaccccagcacccctaggacagctggtacttgactttgaggggccagagaattaaaccacaggactggtgccagcccccagggttagagagtacagcctaggagtgtcaaggtgagcccagaaanaaagttagaaagtcagtaaactatacccaatttacaccaagttaaatc

SEQ ID NO: 437760 - DNA, 481 bp, Homo Sapiens
  misc_feature (405)..(405): n is a, c, g, or t
  misc_feature (412)..(412): n is a, c, g, or t
  misc_feature (424)..(424): n is a, c, g, or t
  misc_feature (439)..(439): n is a, c, g, or t
  misc_feature (449)..(449): n is a, c, g, or t
  misc_feature (454)..(454): n is a, c, g, or t
gaaacatgcttccaagcaacaggtaaccttaagctccttccatcaaacaggtaaccttcagtaccaagaggaagtagttctccttgccggcctccgtagccttaaaaagagtggatagaagaaagcccagcccacactcagcaatttggcattctagaagtgtagcagattctttctacgaattcttacaccattgagcaagctctacccatcttctcagagacccacagatcttccaaagccaagagtttccatcatccaccaaccctcatttcagggagctctgtttttttcatctgcaggccaaaaatgagcatatctgggtcctggcaggacctgagtctcactcatattttcggggccttttcttgtgatgatggcaggtcacttgacgaggaaaaagantggtcanataaatgaatangttggcaaaggaaangcatcacggnactanacttcaaatctgacagtcttcccacaa

SEQ ID NO: 437761 - DNA, 1202 bp, Homo Sapiens
  misc_feature (933)..(933): n is a, c, g, or t
  misc_feature (935)..(935): n is a, c, g, or t
  misc_feature (945)..(945): n is a, c, g, or t
  misc_feature (951)..(951): n is a, c, g, or t
  misc_feature (1014)..(1014): n is a, c, g, or t
  misc_feature (1060)..(1060): n is a, c, g, or t
  misc_feature (1174)..(1174): n is a, c, g, or t
  misc_feature (1192)..(1192): n is a, c, g, or t
taaatagtgtggaatgtccggttccccgggggaccagttttcaaggtgaaaattaccacctgtaatccatataagaacatgaaggaatccggtacttacaaggaagtacctttggaactggaagggattgctaaaattccaatgctggtttagagtccaattgtgttccttggcgttgtttttcccgtaaagaacctgttgttccaggactgttctgtgagaatacacctatgaattaggtacttggtgttgtggcaagagtttgggcagacagttgctaaagttctgtaaagatgtgaaatttaaatgttttggttcaggatctggctttttcacctagtttcacataatgattcaaaagggagaccagaggaaaggatttaaactaaggctcttttggtaacattctgatcctttggcaagccgatctgtcttgcaatatacatgtcccaacaatgaaagagtaaagcaagctgaatcaccaaactcagtaacaatatcatcatggcttttctgcttattaaacactccaccagataagatttgttccccttctgcaagcttgctgagatcaacacaacattttgcaagcaggtatttgcattgcggtgtagtacaactgtgtcctttcaagagtctatatgctttatatgcctttcctgagcggtaataacaggttgccagtaaaaacaaggcttcttctgagtgtacttctgcataaaggcgttctgcgaggaaaaccgcatctcggtaagcatagtggtttagtgcttgccatatagcagcctggacgggttcctgcagcaccgtcatcctcgaggctcaggcccactttctgcagtgcctcaggccccccctgtagcggctccggcccggccagcccctgctcatttaaactcaccagcgaccgttaccgggggatgggggagtccnanacagaatganttcttnatcctgctgactctggaaagcccggcgccttgtaatccattgcaaaccgagagtaacctcgtntttagaacacggttccactcccaagttcagtggggggatgtaaggngtgtggcaggtaggacgaaggactcttttccttctaattcggtctgcacagtggggcctagggctggagctctctccgtgcggaccgctgactccctctaccttgggttccctnggccccaccctggaccgncgggccttgg

SEQ ID NO: 437762 - DNA, 516 bp, Homo Sapiens
attttgtttgtttttatttggggagaatgaaggaggagggagattttagactgaatcattctagagtatttgacgactacagctcctctctctttgtactacggagaccctgcttatagcccccaacaggaaatcctcatctgcggttgccagacagccagaatatttccacctgtgccagaacaagacagaagaccccaggagattcttcctggggacaggtctcaagcagacccaatcccccatacagagaatttcttagatgaaaacagcctcaggcccttagacccagcctctggtctctcttctgggcccacaccagcacaacaccctggagaagccccaagcctgcacaagtaccaaacccaccagggaacagcaccaccatcctcgcctctaccggagaagaggggtgttcctgcctccccaccctaggcctcaggcctgggatcagggcccactcgagctgggactgcactagccaggaaggctgccgccttcctcctgcggggagct

SEQ ID NO: 437763 - DNA, 256 bp, Homo Sapiens
tttgtgcattcagggtaacctgtacgtccttccttcccagcaccaatctcctttctttttaatgtgttttaaggtatgtgcctctcattccaaattgtatctgaccacagggcctggcacgcagtctaatttctcagtaaagattttattgaatttctgaatggatggataaatggtgggggcatagacaagtagacagcaaattatgatttaagacacgaatgaaatgataattaccaccactaacattttttga

SEQ ID NO: 437764 - DNA, 1155 bp, Homo Sapiens
tccggccaatggtaccggcccggaattctccggatgctgcagagaagaggaggttggtgtggagcacaggcagcaccgagcctgccccgtgagctgagggcctgcagtctgcggctggaatcaggatagacaccaaggcaggacccccagagatgctgaagcctctttggaaagcagcagtggcccccacatggccatgctccatgccgccccgccgcccgtgggacagacaggctggcacgttgcaggtcctgggagcgctggctgtgctgtggctgggctccgtggctcttatctgcctcctgtggcaagtgccccgtcctcccacctggggccaggtgcagcccaaggacgtgcccaggtcctgggagcatggctccagcccagcttgggagcccctggaagcagaggccaggcagcagagggactcctgccagcttgtccttgtggaaagcatcccccaggacctgccatctgcagccggcagcccctctgcccagcctctgggccaggcctggctgcagctgctggacactgcccaggagagcgtccacgtggcttcatactactggtccctcacagggcctgacatcggggtcaacgactcgtcttcccagctgggagaggctcttctgcagaagctgcagcagctgctgggcaggaacatttccctggctgtggccaccagcaagcccgacactggcccaggacatcccccggacctgcaggttctggctgccccgagtgcccatgtacgaccagggccccatggggcggctccacccaggcgtggttatgcctcccaaattctggggttgggggctgggacgccacaaaaaccatagggcccaccgcccgcaatagccctgggtggcgcccctgcggccagataaaaggccccctagccgctggaattgtaaacgccgtgaacccgtctgggcgcacggatctgccaggaggcactgccccgacacacctcggtggcccgggggggcgcctcccgggacgggccttccccaaacaaacagggctataataaccctcctctatcgctacaaaaaaacccccgaccgcgcggcttttacgcggtgcatatataagataggggggataggcagacgcggcccaacctgtaccccgcggaaccccacataa

SEQ ID NO: 437765 - DNA, 438 bp, Homo Sapiens
  misc_feature (116)..(116): n is a, c, g, or t
  misc_feature (145)..(145): n is a, c, g, or t
  misc_feature (332)..(332): n is a, c, g, or t
  misc_feature (355)..(355): n is a, c, g, or t
ctggtccggggggcaaaagttttgggaacagaccatgggaaaaattttgcatgttttccctagaccgttgaatcatgaaaagccaaaggcctttggcttccgggcccatggggcangaaaacggtccctatgtatctgactgaangaaaaagacactttgcttctcagggatgtgtgcacgccaaaaagcttctttcccttggaggagagagggaatcctctcatgccctgcatcctgaattgtagtaaagtaggagtctactactctttctctctagaccccttacaggtacaagtgtcatcagaaagaggtttaagaatactgagaaatnactcccttcaaagcctagggctnaagagccttagagcactgggagctcatgtactgctccatagacccagggccacatggaatcaatgcagccctcttaggtttct

SEQ ID NO: 437766 - DNA, 1747 bp, Homo Sapiens
gcccaagcaccaacatgtcaggtttatttctccttcgctctcaactgagagcggggcatccaaatcataacaaaaccagggcccaagagtgggaagcggccccctgggtgggcctgaaccccaatttcacccttcccccgggcatagggcccaggccaggacgctcacccgaatgtggctgggactccttgtgccctaggcccacggggcggaggcagcaccaacattggggatggtcccccaagaacagaggaggaagcccagcctccggcagggcaggtatccacatccacgcccacctgctcaggcctgcagcctccagacctctagcgacaggtctccagagccggccaccaccaggttgccctcagcacagaccctattgagcccattgtcatgccttcgggtgcaaatggtccttggtgggtctgtgggcacgtgcacccggatggtcttgtcagtggatgtggtgtacaaggctcccacggagtactggatcccagtgatgggaaagctgtggcccacatcaaaggaccggataagctggaagcagccgttgcggttggcgaagacgtgcagcaggccctggttgtcaccagcccagagctggggttcctggtaggacatgcagagcaggtaggagtccagctgcagacgctgcaggacgctgttggctcggcggtccaccaccaccagggtgtggtcctcgctgcctgagatgatgtgccggtcatccgccagcagggtcagcacgggtctggagtgtagttgctggtgcttcaacagggctgggccggctctggggtcgtagatggtcaccttcttgtcataggtgccagtcaccaggatgtcaggcaggtaggagaggcacagcacggctgagctggcctttatctcgccgaactgctgcccatccgctgccatgtcccagagcttcactgtgctgtcccaggagccggagcacacgcggtggtcctgcgctgccagtgaccacacccagccctcatgggtactatttcgcttagtgcctaaggtcttgatcagaacctggttggactccgtccccagctgccgcaggtcccacaagttgacgttgcgatctcgggagcccgacagacagagtgacccaccctggagcagcagcactgagtcaacggaagccacgtggccttcggccaggcagaagtattcgacccagcgcccatcctctgcccagcgggacaggtgctgctccagcgcaatgcaggctgccggccagtcaaagttcttctcttccaccactgggtagggcgcgcgtacgcggcgtagcgcgcgtagcctccaggtgacatggtcagacacgaggtcgcggagcgcgtggcacacccgcgacaggacgtggagcacgaggcgggcgtccaggtaggagcagatctcgagcagcagctccgggggaaggctcagaaggcccggctcacttacggccgaaaccctggacgcggcccgaggctccgaagcgctcggggacgcggcgggtgtggatagctgcgaggggcgcgagaacgccagcccggattttggcggactgagaacgcgggccacgtaggccttggcctgcgcgtctgggtctgtctctgactctgggtccgagtcatcgtcccaggtgcgggaatcatcgcaccgccctaggggaagctccattgcgaccgggtgggcgctgccggcctcgcgtcttgtctcctaatcccgggaattccggaccggtacc

SEQ ID NO: 437767 - DNA, 522 bp, Homo Sapiens
ggcgtggatgtggatactgcctgccggaggctgggctatcctcctctgttcttgggggaccatccccaatgttggtgctgcctccgccccgtgggcctagggcacaaggagtcccagccacattcgggagttggtggcggccgggatgcccacaaggaaggggtcattcttggcctgctccgtgcagaacttcagcagatcggcggccatctttggacacctgcagaccaggtggttcagccagaccagacccaggcatgcacctgtcccctggcccatgtgttcccacctcttcccgcctcctgcactggccccgaccctcaccttcacttggtcgatgcctgcctccgtctggagctgctccactgcccagagggcctgcccaatgtcactgttgatggccaccttgctggacatctgggtaaagtgggcaggccgtgggcagcaggcccaacctcagtcccctagggggagctggctgcccgaggttcccacacatccgtactgacccgggtaccgacc

SEQ ID NO: 437768 - DNA, 1777 bp, Homo Sapiens
cgggttctcttctctggcccccttaacatttctttctctccaaaaacttcacattttctcttcgatttcctttgacccattaaacatgctcccagggcatgttcatgcactaaaatcagccttcccaggcccacatctagctctttgatccaggaaccagccattggcacaagaccagaagccagacacctggggcagagaggtcaatagcacaggtctccctgatacggggtctttcttcctcctatgtaccaatgcttcagcttctgatacaaatggaagcccacagtggaaaggttcaggggctaggagtcatagagatagctgtctgttcacaattaaacagaaatgcctttgggattacttattagggatgccttgttctattctgtgagaacctgattcttattcctgtggccagattctaaaaaaactgaaaaatacttagactacatgcactaaatttattatttagagtttatgttagaaaccgagcacactaacattaagaacaaacaaacccatatttttagtttcccaagtctatctctgaaatatcaacagcacctttctatgaagatttttctttcttgtaaaggagttctctgtcagctggaaagaatcatagaggtaggccagcatgcctcggtctaggtccccatttacagagagaacacaaggaaccacattttttcgtccatctcggccatgtaatttagacacattgccaggatacatgtgtaaaagttcgtgatctcctaggttccacagggtttctattaactcctttccccagggaaaattgtagtaaagtttgtttcctttccggccttcttcatcctgacagtcactgctgctgaagttagatggactcatggcaaactttctccaccactggagtcgatgacgtaaccagaaatcaagccactggtttaagttctcggaggagtaaaccatactaacgaagcttcagtcttctcaccaatacttttaacaccatttcgtatctgcttagtgtcaaaaacaggatgaaaacacactccaatctgagcaaggccataaggtagcctcttgtttaccagatccaggcaattaacatagtgttccaaggcaccgtgaagaaggttctcccgtagtttcccagaagtttttaatacgttctcaagaaatgctactagctgttccttactcagctctttgtcttgcaagatttcgcgtagagtttctgcagaaactaacctgaaggcactgtccccgggtagcaaagggcctggtttgtggtggagggcgtccaccgggaatacctgctccctgaacaccaccaccgaggtccaccattctgcggccaggttcttccgcaactctacgcccaagggtccgaagccggggtggcacccactcagaagagaatcccggctaagctgctgcttgcttccacttaggaaatgccttctctgacagatctctaacagcgcctcgcttccctctccagacccgggggcttctgggtgctcgccgttcccctcgagctccgcgtgcgacttcacatgccctcctttggggctactcctttccgtcaacagctccggctgccccgcatctactcgacccccaaacccagacaacaggcacctgcagaccttatggcaggccctgacggctacacgagagcgcatctctctccgaagttaaagagcacactctcccatcactcaacggatcccaacaagccaccactaccgttaacagaatatccagggaattccggaccggtcca

SEQ ID NO: 437769 - DNA, 658 bp, Homo Sapiens
  misc_feature (259)..(268): n is a, c, g, or t
  misc_feature (471)..(471): n is a, c, g, or t
  misc_feature (484)..(484): n is a, c, g, or t
  misc_feature (500)..(500): n is a, c, g, or t
  misc_feature (506)..(506): n is a, c, g, or t
  misc_feature (609)..(609): n is a, c, g, or t
atgagccactgctcccagcccagtttatcttattaactatcagttcgacgataactgtgtgaaatacaactggtagaatagagtcccaggtatcagaaagtttactgcctttgagggcaaattcttgtgaatctttaaagtatcatatgcaattcaaataggtttaaaatgtcagtacatatatgtattaatgaagactgtggttgatcatgaataattaacagaagctgaggatttaaatttgtggggttttctctcnnnnnnnnnngttctgtgactctagctaaaggtggttatttaagtatttttaaaaattacatgaatatccaggtgaacaatgatttacaaaaaaagaaagatgaaagtggaactgtttttatccaaaacttaagaaatttctaggattgaaatttttaagaagtttgaaatgattcctcttcagtttagagaagaaggccgagatggacgaanaaatgtggttccnttgtgatctctctgtnaatggnggacctagaccgaggcatgctggcctacctctatgattctttccagctgaacagagaactcccttttacagaaaagaaaaatctttcatagaaaaggtacttnaaaacttcaccccttggtttagcccccctaattaagggtttgcttttgg

SEQ ID NO: 437770 - DNA, 480 bp, Homo Sapiens
ggccaatagcttgtggagaaataattctaaaaataaaaagattttagaagaggaaggctctgactgtaaaaaaattttagggatatccttaaccaatttatttttcttcacctattttaccgtttttatatattcacaaaaatatgtaaaatttatatttaattaaatctaaaagagttctttcaataagcataagacaaaaatcctgaacgataagagagatttgtgttaccacataattattatttttctttgtttcttagggagtgcctaaaacaatggtgccttcgaggtgatgaaataccatccttgtttagggtcttgattttcagcgacagggaagtcggctctgcctcattcacagctgtatcccctgcggctgacacagagctgggacagagcagccattcaataaacatctgatgaagtgacttaaggtagcgcctctgccaggcaaagggccacaccaaatggctaaca

SEQ ID NO: 437771 - DNA, 476 bp, Homo Sapiens
ccagaaaccaagcctcctgtattctttgtgggcagcccacatgcgggttgaaactttgggtgcacccacctcttttaacagctgcagccacggctctactcaattccccttcaccgccaatctgtcctcaccaatcagccctctcccaccgaatcacactcttcctcaaactcagtttatttgctttgccagtacaggaactaagtcaacaagagggctggcgtgcagtatgtcctgtcaaacgggcggctgctaaatgagaacacgtaatccaaacatgcatctccgcagtgagtgcacagcatgatcctccaacattcctttgcgattaggggtcattgtgcttccccacattcgggtcagaagattctacccaggagggaagacctgggacaggcaccaggatcatgcattttgggctcctggaggcactggatatctctgtgacaggcaccaggatcatgcattttgggctc

SEQ ID NO: 437772 - DNA, 1046 bp, Homo Sapiens
  misc_feature (165)..(165): n is a, c, g, or t
tttgagagtggagggaacctttcgggttaatactattttttaacaattcttcttccccaaggtggaaacccagttggtcaatagtccattacagcctccaaattccctgcccttgtaccagtaggtccctcagtcccctttctcatttacagatgttgtttactnaagcttcttattacttggaggtcagcttagctcagtggttagcacaagtagctaataaatgctcgagtatgagggtgcaaagaaaggggtagggaggtgcaagactcttggcttcaaatgcccagtcccctactcatctgctcaggcccctgtctagcctctgtatctaagccaaactacacgcctcctcccctgagaagccctcttggatttttcctgtcccgtcttccctgctctatcctcgggtgagtggatccacccatctgcctctgtgctgggcagatgccactgctctctgctttctggctggacgaggcaagggggcagttgtgtgtgtagaagtccccctaaaccttggcctttgcctcatgcctggcgcattcaacctttgcttgacacctccacagaaatatcaacctcaccaaacatctgtcagaatgggccgccagggtctgtctggagcttgggtgggattttcacttgactacaaatacacacacatacaccctaggcttccaggtctgcattccttggctggctcttcacacttgagtccaagacaggtcaatggttagtggctggatttgcaagcatgtgtgtttctgggcaggatatcagctggggcagtctgagaggaagctgtcaagggaagctaaagaggagggagtcagtcacgtctctcttcacctgttgcactctctaaattttactgtccactcctaggcctgatctagagggctgtctagtctaggggagacaaagttggatgtatctactgccagccccatggggtcagaactacaggggaaggatggggactgtgggattccagaggaacaacagggagggcttcttggaggaatgcttgttcttgagctgag

SEQ ID NO: 437773 - DNA, 962 bp, Homo Sapiens
  misc_feature (28)..(29): n is a, c, g, or t
  misc_feature (39)..(39): n is a, c, g, or t
  misc_feature (51)..(51): n is a, c, g, or t
  misc_feature (53)..(53): n is a, c, g, or t
  misc_feature (60)..(60): n is a, c, g, or t
ggttttaaccccgttcctttcccaattnnaaggtggcangaaagaaagctngncccttgncgttcggggccctgggaaccaccacgggatgggtgacccacagtttttctgatccaggtgtatgaagcctttatacaaagtgagttctgcatccttttatagaatcccagattttccaaagaggggaaattttatgcagccagctgacagatctctatgctcagaaagaggaggccctttggctaagggttgggttatttcaggggtctcaaggactttagtttagctggtccctttcctctcctaggtggagcagatgaggcttggtgccaggctcgaggtctgaattgggcagcattgtgccaagcccataaacttcggggagaactcctagaactcatgcaacgaattgaacttcccttgtccctaccagcctttggctctgagcagaatcgcagagaccttcagaaagcactggtgtcaggatactttctcaaggttagaggaaagggtgggggtgagggtgatcaaaggagcaaaaggcaaagagaacaaatattggtaagccactttgaaatcagggtccaggtggccattcaaaagattctttagaaccagaaaggacttttcccttgaggatttgaggtacaaggggctatggtaaatgccatgaggtatagtagagaccagacaacacctagaggtaatgctttacttttcatgctctcatcacccttactctttctcaatccccttttatttttttctactggctgcctcttcccttttatttattccgtcaatatttctgcctttcaataaggtggccagagacacagacgggactggaaattaccttctcctaacccataagcatgtggcccagctctcctcatactgctgctaccgaagccgcagagctcctgcccctcgtgccgaattcgccacccaggcctcgctcc

SEQ ID NO: 437774 - DNA, 349 bp, Homo Sapiens
gtgtcaaacgcattaggatttcagcttccagatgaaatgaaatgtctgatgaatcactatatttcaacatattaggaaagatggacctatttgcatccgatgagcaaaatgcacttttttattgattgaaaagttgatgaggcaaacaaatcagggaaaatggctcccttttcatttccctctgagcagcaaattaagcgacttaaaaagagctttgaatgagtcaacaacaaaatgcccctaattgtggaaaatgtgaagtgcaaacgtttcagcctcactgtcagtgcccaccgaggacacagcctgcctcccgccctgggaagctgggggctgtggaggacccccc

SEQ ID NO: 437775 - DNA, 923 bp, Homo Sapiens
atgtgctgataagtatagcctggactctctggtaaaggttgatgcttagggtgcatttcctcaagtttttgagcgataactgagccaggagtacttttaggtttggaaaacttgggaagaaagaattaaaatgttttctagccttttttcagtataaacatctttcatagttttaaactttcttgaacttttccattttgtttgtttgtttcccaaaaattcgagtagaagctgaattacaatgtggaaaaaatatggaaccagtagcagtatctggcatctgctcacggacatgcttagtagatttctggggtgatgaaattgcagtcactctttcttgtacacagtgatcaagaaagatattttggatattgataggtgttagtgattgatttcttaaaacatcaggaaaacgagttctattccattttcaatggaagtggtttcatcttcagtgaatgctacatgtagtgcctcaattttaccagttttagctgtatgggtttttttctcatgtaaagacagcttagtgaattttggaggtaagggtcttcgaagaagcagtgggggcttttgcattttaatgaataataagtgctgtttttcataatccgccaaaagataactgcacacaagcgctcaaggtgtactcctggtcatatgttccacacgatgctggaaatctcccttccgtagtacccacagaggggcatggaagtgctggactcccacactaccctttaggataatcggccgctttccaaaccaactggcttttcgtctcctatctccttttcctcggaatctaggcagcgaggtaaaggtccagcgagggtcttcctgcaggaggctgttcccgaagaagcaccacggatccccaccctctaggaggccaaggagacacaccctagcaaccggagtcc

SEQ ID NO: 437776 - DNA, 298 bp, Homo Sapiens
acccgggtgttcgaggcttccttgccttgcatgtcctgtaaggcctgtagacagtagacagagtcgtagcatccaaccctaaacacactcatggagaaacaagcccaccagggtcactgttgtgaactggggacggctgaggatccgtgaaatggccttgtctaagaaaacaggccctgggtgtacaaaacccagccaacccccgcttcaacatttccatcaggttcaaatgctgagacggcaacatccctgcaacctgtaaggagatagctgcatggcccctgactcctgtttccag

SEQ ID NO: 437777 - DNA, 619 bp, Homo Sapiens
  misc_feature (376)..(401): n is a, c, g, or t
cgcgatctagaactagccgagcttttgtgggcaatgtgcatgaggtcacgctcgttctcatctagctcccccgtgtacaggtacttgaggacagcccggaagggccccggctggatggaactgtccatcttcaccaccaccatcagccgggatttgtaggtgagaggatcttctgccatctcttcctggatgctcacaaaagctcggctccaggaagacagcacacgacccctgcccggtaggtaccctgttccgttgccccgtaagatcccgtcgctggtggaagcacggaggccagcaggaccggagcccccagcctcatccacgctctcgcacacgtcaaagctggctgctcggagcaggaagtctcgcccannnnnnnnnnnnnnnnnnnnnnnnnnttgatcagagtggccctggtggtcctctgggtgggtgccccctggctccgaggggccccccagctccccctcactcaggtccatgaggaacaggtcatagaacttggaggaggaggtggagaggtagatcttgtgggcaaagatgcgcacccgctcctgcagcaccaggatgacgtccgcgcagagcgggtcctccaggaggtgggcggggcacccac

SEQ ID NO: 437778 - DNA, 825 bp, Homo Sapiens
  misc_feature (644)..(745): n is a, c, g, or t
  misc_feature (770)..(770): n is a, c, g, or t
  misc_feature (783)..(783): n is a, c, g, or t
  misc_feature (792)..(792): n is a, c, g, or t
gcggccgccaccacttcctcctccccatgccagccccttccgggggcctgaggccgcatcctgtcaccccgtctctgctctgcgatgtacgactccacctggttcagccactgagtcttcctggggctgtcaccagcgggcctgggcctgggccccctcatctgaggcaggttcttcacagggtgcccaggaggccacttgtcggaatgaggtgaatcttggctgggctcagggctgggtttttgcttcctcttctctggctgctgcactggaatgtggctggtcctccctgggaaggacgctgtggagttccgcttggagaagggggccagcaggccctcccggggctgagccaggagtttccgcaggcttcggaggcggtagtcagtggcatcttgctccagggtggaggcaggtgtctgtcttccctcgagcatcctggcattctggttgttggaggcaggggtctcctctgccacttccccatactgggactcttctagaaggttttcctcaaaacctgctattaataacaaccattcctcatgtcaagagtttccaaccctttccaaacaagacatacaagacagaggatgatcatacgtgtgacgcaccatggggctccagactggggttgaatccannnnnnnnnnnnnnnnnnnnnnnnnnnnnnnnnnnnnnnnnnnnnnnnnnnnnnnnnnnnnnnnnnnnnnnnnnnnnnnnnnnnnnnnnnnnnnnnnnnnnntttgtgaagactgaggtgagataancggcatcacatgnccggcaagntgcatagcacttagggggaacccagcagatggt

SEQ ID NO: 437779 - DNA, 434 bp, Homo Sapiens
  misc_feature (22)..(22): n is a, c, g, or t
  misc_feature (111)..(111): n is a, c, g, or t
  misc_feature (142)..(142): n is a, c, g, or t
gcaaataattggggccccaccnctgaaaccatgatggctgctgcccctaagtgccttgcaactggttaccccactgaaagtgcatgacaaaccaagatggtcattgattancctcatttcatggacaggaattgatatgacnccctttaactgggttccaaagagtatgaataccaatctctgagtattcacaactgcatatttcatcaactgcaatcacaactgatatccacgacgattctcatttccatggataaggacactgaaacagactgcttatgtaacttgcccaacatgcacagccagcgtggtatctgttctccaaagacggctcccattgaacccaacttcgtggcactggtgtccctgtataaataaatcctcccacactgaccctgggctgcccgagactcactttagctaacagcatcagt

SEQ ID NO: 437780 - DNA, 405 bp, Homo Sapiens
  misc_feature (248)..(362): n is a, c, g, or t
agagctaggcacacttcctgcctcagggcctttgcacctgcagcttctctgctggaaacaccttacctctcctcaaagattaccttcttaactaggctgtccctgcccaccctctttgacatggacccatgcccactcccaattccccctaacctgctttattttcctccatagcatatgtcagcatctggcacatgacatctctatgtctcatttattcgtcatccgacacccactacatgcaagtnnnnnnnnnnnnnnnnnnnnnnnnnnnnnnnnnnnnnnnnnnnnnnnnnnnnnnnnnnnnnnnnnnnnnnnnnnnnnnnnnnnnnnnnnnnnnnnnnnnnnnnnnnnnnnnnnnngggaatctttataacagccctaagagacagttatttgtacccg

SEQ ID NO: 437781 - DNA, 416 bp, Homo Sapiens
  misc_feature (58)..(58): n is a, c, g, or t
  misc_feature (75)..(75): n is a, c, g, or t
aaaaaaataatttgggtaggcataaacatttaccaggtccatggtgtaacacatgtcntattttatgaagtgagnttttgtcttcctacctttttatttttctgcttatctgtttcatctacttctcaatagaattttgttttagatagaatacaatttgtttatattctaaacctaattttccctacttacatttttttcatggcttactaagaaagataagtgtgaccttttaatgtttctgcagaaacgttgaatgactggacagattaatgcagaaattatcacttcttcactgtatcccagatgcaaatctgctttaactgtgcaaatagtcttcaaacttctagactcacaggttctcttagtgaataatctatgaccaggatcccctggtgccctcaggcctttctcct

SEQ ID NO: 437782 - DNA, 2698 bp, Homo Sapiens
  misc_feature (1347)..(1347): n is a, c, g, or t
  misc_feature (1349)..(1349): n is a, c, g, or t
  misc_feature (1355)..(1355): n is a, c, g, or t
  misc_feature (1357)..(1357): n is a, c, g, or t
  misc_feature (1365)..(1365): n is a, c, g, or t
ggatcttaaggagaaatagtgacactgaagccccatgactatatcacaagtatacctgtatgttttgcccatctctggcagaacagagacggttttacattcagatctgggctctttcccatgcttctggtaaggtaataggagttggaatttcccaaatagcctgagaccttgagaacatttccgttcctcaccaataccataaaacatgtaaggtcttcaaggggtgaaaagttttaacctcggggcaagtgacatgtcagaagctcaaagcgactcataatgcatgtgaatttgctttggagagacttatcttctgagtgaaccaggacagccagctgagctgaccagagtacctaccaacatatgtcagccaaggtccgtagacccactgggagccacagaaaaaaagccacgtcagcttaaagaaaaataatttagaaaacataacaatatattactaacattaataacaataatgtaaaaggttaaaatataataccacttgaagggctttctacattgaaatactcaagggaacatgaggaaagatggccatccagtctcctttgccaactgaggtgcagactgagttgtggaaggtgggtgttgatggaacccagcattacaatattgtgtagaactagtctcctaatatacctcactctgcaacttacggaagctgaggaagatcagaaaaagaccacactcctcactcagaatatttattatattctgccccatggggccttgcaggaaaagggacccaagctatacccctactccttttccaagctactttcctgaaccaagggacaggattctaagagaatcatgtatctcaaataagccagaatgtatctggggaagaatagccattaatttcctagacctgacactgggtttatttgtgtctgccaggaagacggggagtcagtgagaatcgtaaatggactagatgaggggaaataggatgggcccttctttatcacagcttgagctcaaaaaggttgggataaacaggtgtttaaaaaagagaggaggtaaaagggaggatgggcaggggatagaggaaggtcaggggctgggttcacccatatcacacagcattgtaggaagaagcagggtaaccatttgagttctcagcctggaacagggaggtgagggctcagcacctagagagaggagaatcctaaggcctctctttcaactctattgtgattagatgcaaaagccctttccctttagagaattcagaatggtctgtctgaaggcaagagagcatagtgacagacctgtagccccagcccaggctgtttctccccattctcaaaggctctgccaggngnactatngnaataccgngtcccaggtctctgcccctcctccccagttccaagagagggagtagagacaaggcacaaagaccctggacgtaaaggtgaacatcagtgtggccacatataacattattttgagaaaggaaagaaagtgcatgccccaaaagggatgccttccttcaccttgcaggtagctggaactttgatagtggcagaaaccacaatggagtagggttcacagaaatggcctgtgaacagaccctattcctagagagacagaggaaaaacctcagctggtatggcacaatcttgaatggatgacagagggcagcgggcagacttctcccgcaggtgacactcctgcctcaggtcccaatggttctgctgactccagatgttcccccatagctgggactcagagaggaaaacgtgttgttttcacatgatcagacactgttcaccactggcacctggtgggcccgaaagattgagggcatccaggtcaaagttgaggccaggaggcatctctccagccagctcttttggaggatggcctaaatcttgtagctgctgcataagatccagcaccatctcaaaacgagccttttgagtggtttcactgtctgtgggggtctctgcctcaaactgctcacatattttgcacatgacgctgtgctgctcctgatatttttcaaactgctctggaggtagagattcccgatgactctgcaaccattctggatacttttctgtgatctccttcagtgatgggtacagcacatccttggagagtaggttctgcataatactctgcatgatggggaggatgttcccttccccatccccttcgtccatgcctagcccctccatggccttggtcagctcttcttccgacatgctggagttctgaaggtcagtggcatttttggctaatccacttagtgtttcctttaggcaagaagtgaattcttgttgggaggtcatatcactgcccactctccctgcagcctctgagagcttttggaactgctccaccaggtggggttcttcctcagccaactccttcattgccttctcgaactccgcagtggcttgggaagccagttcactgtcgaatagttcctggaaaaacttctcttgggaagcgaagagggcatctttggcagtgtctcctggcgatctcttctggggccccgaagcatcaggggccgtggtggtagaagggggtgctggggagggtttggctttatcgaaatcatcaagagcactttccagaagctcctccaattccctgtccgcttcggccccgacactacagccttcctcagcggcggccatcttgcatcccgggaattccg

SEQ ID NO: 437783 - DNA, 1799 bp, Homo Sapiens
  misc_feature (334)..(334): n is a, c, g, or t
  misc_feature (1082)..(1082): n is a, c, g, or t
aaggggcgcgcctttttaccgggggcatttattcccttggggccctgggatttttcctaaaacctacttgggcccccatgcccttttaaaaggagattgaaaaaaggtaaaattttttccctcaatggaaacctgcccaggacgcttttgtgcccgtcgggggtgtttaccccaagccaagggtggaagtttcgcttgggacttccactgttcccccagtttaatgagggacagaatcttctggagggattccatggttctccatttcacatccaatttcccttgggttcataagtcctttacaaaacggatgtttgtccaccccattgcaaantggtggggtatggccaggatttcacatagaattgtatacagcccgcaccttcttttctttctcctttggacaccaccaggtttcgacggctgggcggtcttgtctcaggtcaatggtgaaaacaactgcatcttcacctgcagataagaacgtacagggagagtctggttccagtgccaacttgtgggacgctcccttgtgctgggccacacgttttgtattcttgcaacactgtgtggcagacagttctgctactcgaacctgcccgtcacgggcacacatggccagagtagaatcaccactgttaggaagaaacttggcctggaacacattacttttgtggccactctcaaagtccagtactggctgccgccgtacccaatcccacaccaccaccttcaggtcatcgctgccactggccagccaggtgccgcgctggttaaagtgcagggtattgacacaaccagtatggccctcaagcccatgctgcaggcggaaacgctgcacaaagactcttgccccacaggcctcatagacaaagcgggcacttgaacccagctcccgctcccgaagggcagggagggcttgccagcgaggtcggggtagagctgatgtttctgaggacacccagtcctctagggcccgctcatcatctgatgagtcctggtcacggttagcccgcttgcgctgtacacggcgccgaggctgctcttcttcctcctctttttcctcctcttccttcttcctntgagcggtcatggactcgattttcatcattaatggagtaatgaccagtgtcctccatgctgtcagagtccttatcttcacctgagctctctgtgtctgtgcctcgactttctgtgctggtgcggttggggccaccatcatccccagtcaagctcaaactcaggtctgaggcctccacttcaatgcctgaggatgtctccctcccctcttcagctccagacatctcctctggactgctagacaggcttccattagctaagtctgttctgccatctgtgctgctccctttgctggacatcttgaatgatgtttgctgtagccagcctttcctccttttatcactgaagtaaggccaggctgagctcctgagaaaataggtctgtagattcactgaaggactgaggaaagggcaaccagtactcccagcgatgacttcgggtcggcggaaggaaaagacctgagcgctaagagcttgggatacgggtcaggcccatccttaggggaaaccggctgggaagcgagggggggcgcaggccgagccggaacgagacacagaccgggtaggtcaagggagggggggtgtccggctggggcagttacaagcacgggaatcggcgaggctcagcagcccgcttcccgtcttgggtcatccttctgctagcggctgctccgactgttccaggcccagccgccatcccgggaattccggaccggtcca

SEQ ID NO: 437784 - DNA, 978 bp, Homo Sapiens
  misc_feature (890)..(926): n is a, c, g, or t
cttgccccacaggccctcttagccaaacgggcacttggaacccagctcccgctccccgaaaggccagtgaagggctttgccaagcgagttcgggttagacgctgatgtttcttccaggaccaccccagtcctgctagggccccgcgtcatctatctgatgagtcctgggtcacggttagcccgctttgcgctgtacacggcgccgaggctgctcttcttcctcctcttctgtcctcctcttcctcttcctctgagcggtcatggactcgattttcatcattaatggagtaatgaccagtgtcctcccatgctgtcagagtccttatcttcacctgagctctctgtgtctgtgcctcgactttctgtgctggtgcggttggggccaccatcatccccagtcaagctcaaactcaggtctgaggcctccacttcaatgcctgaggatgtctccctcccctcttcagctccagacatctcctctggactgctagacaggcttccattagctaagtctgttctgccatctgtgctgctccctttgctggacatcttgaatgatgtttgctgtagccagcctttcctccttttatcactgaagtaaggccaggctgagctcctgagaaaataggtctgtagattcactgaaggacgggtaggtcaagggagggggggtgtccggctggggcagttacaagcacgggaatcggcgaggctcagcagcccgcttcccgtcttgggtcatccttctgctagcggctgctccgactgttccaggcccagccgccccgtccactgccaccaccaacgccgccgccatcttacactggccagcggccgccaccaccccccacgctctcgacgaattcgagctcggccgatttggcctgatnnnnnnnnnnnnnnnnnnnnnnnnnnnnnnnnnnnnncgccgccaccccaggcagagaaaaaaacggcgctcgcggggggttctgcgcc

SEQ ID NO: 437785 - DNA, 829 bp, Homo Sapiens
  misc_feature (693)..(693): n is a, c, g, or t
  misc_feature (768)..(768): n is a, c, g, or t
  misc_feature (800)..(800): n is a, c, g, or t
acagttttggacccaccaccccagtctcccgtctaatgcaaaggcacctcctcctggaatcctgccaggactgcccccagggctcccatcctcggtccctctgtctcatgactgagacctgtttttttattcccatgcatggcttctgtatttttactacataactatgaattcgtcatcattgctttttgtgttttggagaaatagcataattggcatcatactctacatatccttttgcaattttcttttttcactcaacgtcatgtcctcgagggctatccgcactggtgcgtgtagatcttcgtccatcttcgctgtatccccgcatatgaaataaccatgcgctgtgttggtttcccacctcctcctggctgacggggagttaggcgggttctgttttcgcatcattgtaaatggtgctgccacgagcacccctgtctgcatctaaggcccatctgctcaggagctttcagagcaggcgcttgaatgggaggtggcagggctgagggacagccatctttgactgtttcagcactgcaagctgctacccaaagcagcgaccaggatgaacgcctgtttcccgacacctcccaagcctgatgggcagtctgaggggcagagaggatttctccctgttgaattttaatgtgcatttcctgagtactcatgattcagccactcactggctgncccaaggtttttttcaatttgggggttttcccgggcccctttttccccttgttgttcttcttgtgggcgtggttnattaatccatgggttttaaggtttttttcggnttgggttaatccgggccccctttttcttt

SEQ ID NO: 437786 - DNA, 998 bp, Homo Sapiens
  misc_feature (946)..(946): n is a, c, g, or t
  misc_feature (968)..(968): n is a, c, g, or t
  misc_feature (985)..(985): n is a, c, g, or t
ctttgttttggggctgtatttttgaaatactctacaagaaagctgtggctcaacacatgagaagaagcacgaagcagttaggctgtacatcagacagaagggtaatgcgtgcagttcctgctgcctgcaggcagaacgaggcctttgctttacagcactgtatgtgttgcacgatggatccgtgacagcactttcctgttgcactgaaactcttggccatgtagaggaaaagatatggagttatgtggatttcatcactagtatgtgtgcgtgagctggtcagttgccaaagggggaaataaggttagaagcctgaaccgttacaaaagaagagctcactatggtcaaaaagtgatggctttcaggacttgttttttatcctgcctcacagttgttaaagtctgttccaaggcatcaccttccttctctacccaacaaccctgtgtaacaactaaagtagaattatctctcatttgttgtgtttttcctcaaaattaccaaacaaagcaaaaaatacccttgttttttatagttgagatgtcaagaagttaaattgaggcttaatgagcataggtagcttgtccaaggtctcatgaccagtcaagggcaagctggagttaataatctatatttatttgactcagcactgttttcatcacaacttgttttcccagcatcatgtagtgcatttagttttgtctttctcagggtatagtcaatatgcctgcaggagtttctatagcgagacatagaatagtattctgatcagttgccaaagaatctaggaaattagttgtattttgtgcaagctaatttaaaaacatgatggggctgttttaagaccagagtgggaaattccatggggagggaacttttacttacccaaaaggggccccaaatggacccaaatccctggggttaattggctttcacagcctttgggccntcccggggttcagcttctccantttagttttatttggcnggttcccgtggcc

SEQ ID NO: 437787 - DNA, 617 bp, Homo Sapiens
ttttagaaacaatattgttttaatgttgtcttctttgttttttagtcatttcaattgtaaaatcaactgaaacttaggttctcgccatctatataaaaactgagagaggaggcctcagattgtatgcagtgccacggaaagcactgtgtgcatattatatttaatgcaatacagatactttagctttaattttaaaacaaaactcaagaaatctttatctccaccaaagaagaatacagcatttgcatgataatatagttgtggtagcagtagtggaaaaacaagatacagccacatagacagcagtatgtaaaagggaagaaccttgtcaaacccatctcttaatctactttttgtgtcagtgataaggaaggaaaaaggtaaaaatacagtatacttcacgaaacatcatccactcaaaaaagtgtctggaaaaagtacaggagagagaatggaaccattcgcaaatgtgaaaaacacatatatcagcgaaacatatgcagttctcaatgcagttacataggaaatgagttttgaaatgatctgattctcatattatctctggtgtattattcaagttgtcagttactgcttttcctacttcctttccccaattt

SEQ ID NO: 437788 - DNA, 179 bp, Homo Sapiens
  misc_feature (27)..(27): n is a, c, g, or t
  misc_feature (55)..(55): n is a, c, g, or t
ccctatttacagacatttacattgttncgcactctttgatttgattaacaattcnggacaatctctttgtgtatatgtagaatgatttttctcaagagtcacaatgtgtacacatacacaaattcactacagattatctctgcagattaattctgatggtaaaaattaacatatcattg

SEQ ID NO: 437789 - DNA, 461 bp, Homo Sapiens
  misc_feature (433)..(433): n is a, c, g, or t
taaagaatagtttcatatttatgtggacttttgccatttatgatgttcttcctgcattcccaaagttttgaattgcccccagtaatctcttctgtctgaagaacttggtttaacatttttttaaagcagattctttggttatgaatttcctcagcttgccttcatttgagaatgtctttattttatttcattcttttattcccagtaaaatagaaaatttttactggatatagaattcttgggtgacagttatttcaaaactaaaaatgttccacttctttctggcctctatagtttctggtgaagatccagtctttcaaagaattgttcacctgaatgaaatgtatcgtttttctctggctgatcttatttttcttggtctttagttttcagaagtttctttatgatgtgtctaagcttggacttttgttgntaatttatccagttgtgtggttcactga

SEQ ID NO: 437790 - DNA, 1172 bp, Homo Sapiens
  misc_feature (699)..(699): n is a, c, g, or t
  misc_feature (1041)..(1041): n is a, c, g, or t
  misc_feature (1118)..(1118): n is a, c, g, or t
ttttgaaatatatttatgtttttatttaggaataatcaaaaggtttgaagtaccattgaggcccatttcaaattgtacaagcaatttgtccgtgttcccctcccttatccaaatccacagatacaaaatctaggaaatgtgcaatttgcatcttagaaatagcagcatccccacaggggacctcgtgaggcctggagattcagccccaagagggcaaccccactcctgcctcagcacgaccacagtccaaaccgaagttaagttccatttttttgttaaaacgtttacccagggtaaagaattcccattctacccaaggcttaagtgatagagtatgctgttttctcggtttggtctctcacacctggccatggcaggagatgggaccctcttgcagagtttggctaaagtttcattgtgcctcaaaacaaacaaaaacagggcagttgcctcttacttgtttagcaccaagatgatcaccttttcagccatctctcctgacagcagactgctcaacagtcactccccagtcttattgcccagaagttcggccacagggaacaaggctttgtgctgaagcccaaaatgcaaatgggtgctagaaaaccaggattcaagaccttgtcaggaggcatctacaggcctttggcaacctccctgacttccacaaaggctgccctcagtgaacctcaatgaacnaattggccagccaggggagaaaggaaggtgggcgtgttttctctttaataacaagttctggcacctatctgaccctcctaacacttctgaacaaagcaactgctcagaagcacagcgggaaccctctacacaggggtgactgcttctcccctggccccgacccagtctaaccgagaacaaccggattgctgtgctgggtccctgctgaggagtagggactggcgctcctcactcctgctgacaatctcatgtggggctctggccctgttccaagcaaactgcaagaacgagaccaaacagtatgggcaggaaccagggatgagtgacaagatctccctaaanaaattacaggattcataggtaccatgtagatttttcttttaaatgtatttctactcaggtttgattcttgggaaagnccaagcacttgtagctctctattcagtgactaaacaacctgacatttcactttt

SEQ ID NO: 437791 - DNA, 558 bp, Homo Sapiens
  misc_feature (337)..(337): n is a, c, g, or t
  misc_feature (385)..(385): n is a, c, g, or t
  misc_feature (449)..(449): n is a, c, g, or t
  misc_feature (461)..(461): n is a, c, g, or t
  misc_feature (472)..(472): n is a, c, g, or t
  misc_feature (486)..(488): n is a, c, g, or t
  misc_feature (511)..(511): n is a, c, g, or t
  misc_feature (518)..(518): n is a, c, g, or t
  misc_feature (537)..(537): n is a, c, g, or t
ctactattgagatattattggctacttcacgtttacatagtaaatgtttgcagcatataacattacagactcataaacccataattaacttataagtgttaatggacaactgtgctttgatttttgcctttagtgataagaaaacaaagtagtgaaatgggtcactcctcaaagcatggaacattttaactttgcctagtaaggaaaaacaaaacaaaatatagcaattacatgtggaaccgtaacctgcaaaagtaacacaaatattgtctcaaaaggtacaaataggttgtacctgggaccttaaggcaggcatgatcaccttgctctcacaaantattacaaacaggaattgtaaaatgttaaagtttaggtaacaaaacanttctggaaaacggtggactacttaaacaccctttcagggagggggaaaagtcgcacatgttggnatttgaagtttnttttacaacantttaaaattagggnnnttccccaaaccacttttttggtnaccattntttaccgtggaagggtttnggaattttgggggaccttttt

SEQ ID NO: 437792 - DNA, 1250 bp, Homo Sapiens
cataggtaaaatttttatttatgaatgtgtggacacatgactttggatccagccagccagtgacataaataaacttgagcaaaagtttcaagctagaggatatatatgtatagaaaattatatatttgtgtgtgtgtgtaaggcctcttggaacagtgccacaaacctggacaccaaccaacagaatactcccgtcctttgaaatttccattaagagcacaatgggggtaattataccaggatgctccaatcgctctttccatcttgtgcactcacatgcccgccaaacatgaaatgttcgccttctcccttccaatgtgatggttgttgaacttatctttagtgtcatttgataagcctttgtgctcacagagagacatcccactgacccagccactggtcattgtctataccagttcacatcaaagcaggcgcactttgtcaggtttccactcgaatatccatttcgcatctgaagtacagtatcgaaagtgactagatcatttgagcttttttcttcagctgctgccttcctcccccacggtgtttctgctcacgctaacataatttggcatcgtcgacgtgacacgatggtggtttttctaaaaaattataatacatacatcgtcaatgttttgtgatagcgaccctccagaagatttaatttgtaaattgaagaaaggtggtctttttcctctactgaatcataaccaaggtagagtgcccctcaaaatccaagtaatgcgcatacagtaataggtcattcaatgtcaaaaggcataaaaaagatgagcaaaatcttcacaggctgctgcttgctgttgcttttaattatattaattaaactttgaaattttaatgcaaagagagttgctggcttgtgacgctgaagagcccttggagacttgaagaaagaaaaaaccctgagcggaagctttgtggttactgcttcctttaaattaaaagcaaaacaaacttctaggtatgtttatggatattaatgctttatgcactactaaatcctaaacacaggaaaagggggaatctactagtcacagggacaagttcgcaaagcatgagtcccttgcactacactcaagatctctggctagaggccttctgtggaataacgctctattaattttcttgtcccgagtgcataatgaaagaaaggtgtcttcgaaaactaaagggcaaaatcttgcttgctaccaataccttgaggcatcttgtctacattttgtcatgcg

SEQ ID NO: 437793 - DNA, 686 bp, Homo Sapiens
tcttatatccttttattctgcgttgcatccatacattgtttcactttgatcattcatctccataaaatttgaattgctaaataaggcctactccctagatacccaactccatacctaaccaaatggcagtttacaaaggtcttagatactatatcccaagaagtatatgcagcatagaggtggccaatattcagaagctacattttcttatactgcccaagtgatcatgaataaccaaaacatttgaaatgaattaaaattacttatggtcagaaatgcacttgaggataaatcccaggaatgcaaacacaggagaaaaaaagtaagtgtagaattcattctgtatcacccagtaatatttgctatagtgagtccattttcaaggcagattcctaggtttttaatgtttgtaatgaaaacctttatgagaggactctgattttgagaaatgccgtgtggaactctgctggtttgtaaaatgagtgtaatccgcatcttcaccatctgtcatgataggtggtggtggccgtgctggcctttcattcttagaatggtgaggttcatcactctcttttgactttgaatttgctgctttagctgtttttggcttccactcggggtcttgctttcttttgtccaaagatgatttctcccgctccttggcttttttgtaagctttcttttct

SEQ ID NO: 437794 - DNA, 738 bp, Homo Sapiens
ggggaagaaggtcctgtttaacaccaaatcagactataacacagggtcattttgaggacatttagaacttcatgggcaccatttcctagctgttttggattgggacccgggtgctacaatctaggggccaagagaagtctccactgctcttgcttaagcccatgacaacgttggaggagaaaagccgatctctttttctcctccgcctgagacttgtgctccttctagggttttgcttccagaagctgacctctgagttctgaaacgatgtctgtgaggtcaaacggcagaggcatcgaagcatcatccttttcccagtatggccgacattctggcttctgatcagcaggtaatgttcgggcaattcgtgactggcacctggcatgccattctctcctcaggttctggcgtgcagtgagcgaggcaaggatggcagtcaagatttcattcctttgttccacggggagcccctctcttttaacttcatgaagcacagcatttgtcacaccctccatcttcttccacagtgcttccagttgagccatgggttgacaccaccagtcagtgcactttctgtatcgattgccttgaaaccaaaactgcctcagccactcaaactcgacccatgggccaggaggagctggtgataatcttaacctatatatataaaacactgcccagctaaagaaacgtggagccaccacagcttatccgctaagattccggaccggaccagcc

SEQ ID NO: 437795 - DNA, 665 bp, Homo Sapiens
gagcacacagcatactacgttaactttgctgaatttcagtggatcctcagaaaatgccatacctgaaagaggaaccttattttggcgtggggagaatggcagtgagctggcatcatgatgaaaatctggtggacaggtcagcggtggcagtgtacagttatagctgtgaaggccctgaagaggaaagtgaggatgactctcatctcgaaggcagggatcctgatatttggcatgttggttttaagatctcatgggacatagagacacctggtttggcgataccccttcaccaaggagactgctatttcatgcttgatgatctcaatgccacccaccaacactgtgttttggccggttcacaacctcggtttagttccacccaccgagtggcagagtgctcaacaggaaccttggattatattttacaacgctgtcagttggctctgcagatgtctgtgacgatgtggacaatgatgatgtctcgtttgaaatccttttgagcctgccagttttgaaacaaggagaagaaattcataatgaggtcgagtttgagtggctgaggcagtctcggttccaaggtcaatcgatacagaaagtgcactgacctggtggcgtcaacccatggctcaactggaagcactgtggcaagaagatggacgggtgtc

SEQ ID NO: 437796 - DNA, 365 bp, Homo Sapiens
  misc_feature (346)..(346): n is a, c, g, or t
gtgaggaaagagtcttctcttgaccagaaaatgatacctgtggtgtcttttcctgaaactgaaaacattaaagcattctgatcccagagaaaacaaattctctgggatataagggttcaccttttggaggtggattacacttttcaggacaccagagaaccatagagcaaattacttcttccagagtgctaaatgatcccctggtgccctggaaagagaccgtttacctccaaaaggtgagttgtttattgccagagagtagaatattggctgtaatgcctgctcatccatccttcttccatccctgcgaggtatttagggtggaggagatatttatccacctgtnaccatggggaagggagact

SEQ ID NO: 437797 - DNA, 302 bp, Homo Sapiens
tctgggttcaagagctccacccaccctggtctcccaaagcgctggaattacaagcatgagcagctgcacctggctccttttctataaattgggtgtgcagcaaggacacagcaaaaacaaaacagatatcctttactccctaaaaacaacaaaattatgatgtaccaaaaatagaaaaatctcactctatacactgattcttttcaaactataacaagtatacaaatactagtatttcccgtctttcattgaggtattttgtaaaagtctgctgattagttatctatcaagaacttagggga

SEQ ID NO: 437798 - DNA, 873 bp, Homo Sapiens
tttttgtacatgtggtaaacagataatgctttaatagaaagtaacagatacgaacagtgaatggaaatacgaaccaaaagctaaaaagaaatgctattaaaataggcatcaattataaggcactctaaatgcaaaactaaaaccaaaacgaaacaaagtacagcacttcccaggaatgctgtatgccacaaaatgtttctgactgaacagagtaacatgaatttggctttgcccctgttacatatcataaatgcaaatttcatagcacatactatagacaatatacgattgaatacactttttttaaacaactcgatagctgatatattacaacattctcccctcctaaagggatatgcactgacctttcccacatgcacacctcttagctatttaataataatttttattgcactagagtgttagaaatattgaactttgttggaagcctgactaacaaacaaacaaaacaatttgtggatgtgattgattggttaggtgggggtagattaggtaggaaatcagggggtgaggtttgacaatcaatcactgatgtgcattcctcatttccctttaaagaaataccaatatgtcaaaaaattaagaataaatggaaagagatgtttacaatagcttttctacgtttaaaaaaactaaatcatggaagaactgactgactgataactgtatctattttttgtgtggacacactgtctatatatacatagacacccttataaaatatggatatatatgtatatatgttagcagcaactttatactttgcgcctccctgttgattccaaaaacaaaacaaaataataattatctttgattatttgaagagaatgggtactttctcaccaatcaaaa

SEQ ID NO: 437799 - DNA, 334 bp, Homo Sapiens
gtgtcttacaaatttttaaaccctttctctgtcatctttttaatctttttttaaaagtaatcaagattaaatgagattggtaggtttgttaaattgcttcatctatagattttcaagccatcatatttttcttgcaatatgttgaagaaacttgactgacagttttccacagcctgggttttgatgatcacatccccatggtgatatttatttgttgccccatctcctatgaactgatctacatcacacatgcagcatgcatacaaatgccattgattattttccattgtaacttaacaccataagcaccttatttcttgtgaggctttatttc

SEQ ID NO: 437800 - DNA, 1678 bp, Homo Sapiens
gggcgtgcagggccaactttaatacgggccgccctgtctgggggtcgaggtggccgctccctttgtccttgtggctttccacgggcaggggcggtcccagcgagatcgtctcataaccaaaccagccctgtgcacgagaagtcacgccatgccccacagcctccagtcctggctgctggtggctcggggacccgcagggcaggagggtcccgggtctcgcagttccatgagccccagccgcggggacccccatggacaaacttccggggctgcacctgccggagcagcgtctcccaagcatcggaggtcctttctcagcagggctgagccctagtggacagagccgtgagtggcaaggcgggagtcagggctctcggagtcgtcaattcagcaagaaagcccctggcccgccaccttcaaactggaggtgggtgtctagggtgcggaggcagaggcacggagaggttcagcacatgctggtctcctggggatccccccaccagcagggaagctgaggtgcgccgggaagccaggccaagggagggaccccttaacggaagcctgcaccagctaatgggagcagcgaggagcaagaggaagcgcggggaccccaaggtctggaggtgtcttcctcacagacgagcgcgagccacgcggggctgggactgcaggggaacagcaccagaggcgttgggcctgggcctcggccaccgggggagcccacaaccggcagaagctgggctcggtcgagagttaatccggactgagagcaggccagtggcgcctgagtgcgttcaggctcaaggtctccaggagacgctctggagtcctcctgcaatgcgcctgcgtggctgcagctctgctcagcaccgtgcgcactgggctccagggaacccggtcaggggctggccgtgacccaaactctctgtgggccacagtccctggggcatccccgtgagtcccacaagacgaggccacgttacgaagctgccaccagctccgcctgcctgggcctggccttgacagggacgttttctgggatcttctcaggaaggggctcggagggaacctctggcagctctatttgttcctgagtgattgcgctcagctcctccaggatggcgtcttcatcctcctgagtgaagcttcctgccaggagctcgtctatttgccgctggtactccacggcctcctgcgtctcgtccaggatcctctccacctcttcaatggacatcacctggtgcatcttgttcagacactcatttccaaactgcagcccctccatcactttcatttcgatctgggtgaactcaatactctgaaccatggcctccaggctgctgatctggttctccgtcctgtccaggagctgctcctggtatcgcttcttcttgagcagcagcttggcccgttccttcctgccgtcccgcagcagctgccgggccagggcgcgctcgcgctccagctgctgggcgatcctcttctggtactgcctcagcttgtcccgctgctgcttcagttgcaggatggccttgtcctgctccgtgacgcggctctgcttcttgcggccgaacaggttacccatggcggcgcccgcccctggcccgggacccaccaagtccaatcgccaccgccgccccgcggccaccgtagatcccgggaattccggaccggtcca

SEQ ID NO: 437801 - DNA, 1077 bp, Homo Sapiens
  misc_feature (76)..(76): n is a, c, g, or t
aaattgggagccagcgggagccaagaggaagccgcggggacccccaaagttcggggggagtgtctccttcccagangggagcgcgagccacgcgggggctggggactgcaggggaccagcacccgaggggcgttgggcttgggctcgggcccacggggggagccccacaaccgggcagaaagctggcttcggtcgagagttaatcccggactgagagcaggccagtggcgcctgagtgcgttcaggctccaaggtctccaggagacgctctggagtcttcctgcaatgcgcctgcgtggctgcagctctgctcagcaccgtgcgcactgggctccagggaacccggtcaggggctggccgtgacccaaactctctgtgggccacagtccctggggcatccccgtgagtcccacaagacgaggccacgttacgaagctgccaccagctccgcctgcctgggcctggccttgacagggacgttttctgggatcttctcaggaaggggctcggagggaacctctggcagctctatttgttcctgagtgattgcgctcagctcctccaggatggcgtcttcatcctcctgagtgaagcttcctgccaggagctcgtctatttgccgctggtactccacggcctcctgcgtctcgtccaggatcctctccacctcttcaatggacatcacctggtgcatcttgttcagacactcatttccaaactgcagcccctccatcactttcatttcgatctgggtgaactcaatactctgaaccatggcctccaggctgctgatctggttctccgtcctgtccaggagctgctcctggtatcgcttcttcttgagcagcagcttggcccgttccttcctgccgtcccgcagcagctgccgggccagggcgcgctcgcgctccagctgctgggcgatcctcttctggtactgcctcagcttgtcccgctgctgcttcagttgcaggatggccttgtcctgctccgtgacgcggctctgcttcttgcggccgaacaggttacccatggcggcgcccgcccctggcccgggacccaccaatcccgggaatt

SEQ ID NO: 437802 - DNA, 798 bp, Homo Sapiens
cgctgttgtccggctgggtgtggtgtgcacagtaataaacatatattaacagatgtacaatttgagaattctaattcaagaaatacagcttccagaggatcctttaggatctatgttcttattgcacatggctcagcccgtctagggacatctaccaagaccagatggtcggggcgtgggggcagagcaccggggccacagtgggtaggcactctggccacatcagttcttataatctctctgggctgaagtggctgcttcattgcagggttggaccttgtttaaaaaccagatttgacatttccttaccgaacttcctttcccagcaagaatcctatttgttgggggacttttaaaaaaagagccgagagaaactctgggagggtggttatcacctcctggctggcagcttggggaagtaaggctttggaagacggcgggcgcaatgacacacccaccgccacaggaaaacatggtcattccagaaggcccaggagaaactgtgggaataaataaaacctccctcctcccactggcggcaagtgctgttttaagcaaaatcctcatttcaatgtgagggtaagaaaactattctggttcaggtgtatcctttgtccaaggtacgagaggaggcctggcggtcacatcaacagcgagtgaagacagaggcagccacgggcactgccttttcttcaggagtcgaggaggctcgcctggggtcccggcaccactgactgactcggaggaagaactttctgaagtccttggtatcccatacttccgggcggtacagcctgc

SEQ ID NO: 437803 - DNA, 491 bp, Homo Sapiens
  misc_feature (435)..(435): n is a, c, g, or t
ggaattagtgactctaagtgaaggtcactgacacagagaagcagtatgtgtctggggcttccaggacctgcaggcccactagcgtgcacttaccagaatggcatacacaggacctgatcatgaggaagaccaggtttccagtgtaaactactcttgttcccaccacctctggagcactcagggagccccatacagtacttacaatgtctttaatggacttgattctgtttaattttttgttttatattaggcacactgtattaattttccaaaatgttataccacactatgttcttggtcctgacctattgctctggaggaaagagttgtataagaacgtggctcatgtgaacttttgctagcttcatttgaggacctgagaatcatggggaaagggaaggtaatgttttcattgaaatcatcacagtgattttnattccctgggaacacagcgtgtactaaaaatacatgagaaaatagcatgtatatga

SEQ ID NO: 437804 - DNA, 747 bp, Homo Sapiens
  misc_feature (16)..(16): n is a, c, g, or t
gaagttgccatttttnctctgctccgagtccatcatgtcatgaaagatgggaatcatgatattccgtacttctggctgtgggaccagtgtcacacccagaaaaggaccaatcattcccggaataaagtggatcttatgttcacccaaattctgccacatgctgaacagttcataggccatcattacacgcatgtccccatacttatctagaatcttcttcctttttggctgaggtgataatttctagctgaaggcttggctgatttatgaataggaactgccagggtaaagtaaggaattccacaccttaaagtcaaagtcagtctctgtgaaattcttgtgcagtgcagaggacaggtactggacagtagtgactataatattgcttgtgagcagtctcattaccatccagtcccgagggaagacactcatcttcatcaggttccggaacacgcaaaaaatcttcagcagaaattccttgagttcatctttgctctggaagttgtccaggaggtgctggaaatgggtgtcacacatctggcggagcagtgagagaaggcaggacacatactcgccctgagaaagaaaacaggcggctatccactgtcctggcaatggactgcagcttgaccacgtccattgactgcccaatgtgcacagtgctgggcatgctccccagtgtccctctcacaaactctgccacctcttgcacggtgaacatttgcagaagctcatcaaagatggttg

SEQ ID NO: 437805 - DNA, 839 bp, Homo Sapiens
  misc_feature (697)..(698): n is a, c, g, or t
ttccagggtttgcacctgtttccccatgtagtttttaatagcatcccgcttcatactcagaagtgtcccagggtggacaagacattgtgtggcacccttgcaatggcccgcgctgagcagtgggagtaggggatggggagggcggggggcaggtgcccctctccactctaccttcccataaggccccacccacctccctcagtcaccatctccagtgagtggggcaacatctgtcctggcctcagattgcccaagacaccatttgctcacggtaggccaccatgccccaactatgtacttcccgttttcgggaccaccaagctctggggactggaatgcaggctgtggaagccccagattgacttaacctgttgacagcatcttcagagtaaactgctggtatgagtgcagtctggggaaggtggcgatggccagtgggcaggcatggcctggtcccctagtagccactgtggtacaaagaggaagtctgacagaagagcagcctcgggcaaaacgggggagccaaggcggccacgggggagaagtctctccaccgtgccctgtgtctggtgcctgggagggtggcccagtgtccatcttgtcccactatgacatacagtttggggtctttagggaataggcagggggaacaggggtccaattatgcaagaaattctggttccctaatttcattttnntttcaccagtatttcttaattgcttctaattaatattaccttgccaaaacgaaatatatctttacggaggaacttggagggtttaaatagccttcatgggtataatagcagtgcagtagcagtgatactataaggtataaa

SEQ ID NO: 437806 - DNA, 310 bp, Homo Sapiens
ctcgaactcttgacttcaggtgatctgcccgccttggctcccaatttgtagggattacaggcgtgagccaccgcgcctggcctggaagcatttaagtcagacactataacctggtctctctccctaaggaagtcccttgagctcagatggcaggatgtgtaggggataagtagataaacctgcaagtggagaggaggatggtccagggcagagtgaagctgatacaacagcctttgcgagagggaccatggctggtgtggggaagtgagatatctgaggtcagtgtggctggcagcagagctttatgggt

SEQ ID NO: 437807 - DNA, 1042 bp, Homo Sapiens
  misc_feature (153)..(154): n is a, c, g, or t
  misc_feature (205)..(205): n is a, c, g, or t
  misc_feature (207)..(208): n is a, c, g, or t
  misc_feature (793)..(884): n is a, c, g, or t
gacaatctttattgataaagaagcttaagttcattaagggtttaagttgcatttcaactctgctacagtgttttcaatgactattttcttctgcttttatcattatgttcaagtttagttattgtaggttagggtaacattttcatatatttnntttttactttatcaagcatacagaggtcctaaacaaatgctttattaattntnntttttaaatttaacattactcacctacaaacatatccaatgcaatgggatataaaggttttagtaatataatcctagcagagtttttatggattgtcctcatgggaaaaattaaattgtgggaaatacgggttctggatttgtgggttcgagtcagttcaagggcaaattcctggtgactgctaagtacttttccagatcaaacattaggcccaattaattaacatttctaaatttacagtcacatgagtatttatgagcttcaaaaaagtgcgctcacttttactttccctgttaaagaacataaacgcatatgccactgattcctaaggaagatctctttgccagggtcttgggaagatttttgttcaaacagtactacccccctgccttctctgtatcccagggaatcgtggaattatgagtcactactaatagcagtgtgtcaaacccctccaagaatgttttgagacccactgggccttttgcactagaaatatataggcttcatggataaacaacagaacaaggattcagtccctcaccaactttttccactgactgcaagggtgaaacctgtgttccnnnnnnnnnnnnnnnnnnnnnnnnnnnnnnnnnnnnnnnnnnnnnnnnnnnnnnnnnnnnnnnnnnnnnnnnnnnnnnnnnnnnnnnnnnnncagtcacagccctcgccttcaagaagctcaagatctcatgaggaacacagtgtgccatgggcacacagcagggagagcctccaacctaatgcagaggagtcaggcacattccctgggggaggtgggactgtgctgggacctggaggatgggatagacc

SEQ ID NO: 437808 - DNA, 657 bp, Homo Sapiens
  misc_feature (67)..(67): n is a, c, g, or t
  misc_feature (74)..(74): n is a, c, g, or t
  misc_feature (137)..(137): n is a, c, g, or t
  misc_feature (176)..(176): n is a, c, g, or t
  misc_feature (504)..(560): n is a, c, g, or t
  misc_feature (643)..(643): n is a, c, g, or t
gcttcacaaaccttaaccattacagcatcctcaggtcattaaggtattataatatctatctaattancataaanaattcaatttaaaacccagaagaagaacatcattcagggtcaaggtttgtttgttggatgagnagaaatatacattcgttataaccgtgttttgttttcaanaaatatgaaaaagtattcctttcaaaacattacactctggattggtgatgttcttttcccaatgagcatacctttgtaaagtaaaatttactttactttgtctattacttggtatctctctgtctcttttacttttgattgtggagaatttcaaacatgcagggaagtcagcagcccagtaaaatgaatgccctcgtggcctatggtctcaataaccatcaacccttggccagtcttgccctatccacacctagattcccttccccagcccctgttcctacgtgagtttgaagcaaatcccaggcatcatttaaacacctccatttannnnnnnnnnnnnnnnnnnnnnnnnnnnnnnnnnnnnnnnnnnnnnnnnnnnnnnnngaggggtcatttgaaggagtttgaggaccagccggggcaacacagtgaggacctcatcttttacaaaaattttttttaaaaanttaggctgggacgt

SEQ ID NO: 437809 - DNA, 283 bp, Homo Sapiens
  misc_feature (246)..(246): n is a, c, g, or t
catgatgggagcagttgatgccgggtctctgggcctgagagacacgccagtccgtgttgggcggggcttgcacgctgggaagtcactacactggaattacaaagtggaaatacggccccagatgaatcaccgcaccgtatgtcttgtcctgaactcaattgctcactacattttaggaaattaaactccgtctttcctgtatgtgcaacacctaggttgtaggaataaggcaaagtcccctgactntagttggggggaaccacaggtccagacttttacacag

SEQ ID NO: 437810 - DNA, 409 bp, Homo Sapiens
  misc_feature (45)..(45): n is a, c, g, or t
tcagtttttggtgtaaggaattgttttaactgagcgtccttctcnaatttctactggactttcactccctggtataagacccagtagcatcaggtattattcacagatttagtatttacagtatcttctgtattcagctgtactgactgcatgtttgtatttacaacttgggatggaaaacttatgtccacaaattggtcttgaataagcttttcattacatggagctgatactgaagaagccattagtgattcttgtgatagcaaagtattggttttgagaattcctgtattttctgctacaggtttattttctaacaggaaagcttcagaatttaactgtgaaactgaggctgttttctggatagtttcttcaagtgtcagaggtaaaatattgtcaaccaaacctt

SEQ ID NO: 437811 - DNA, 431 bp, Homo Sapiens
  misc_feature (81)..(81): n is a, c, g, or t
tcctttacttgagtgaaaactccatgaactcattgcctgacacagagcagacacttaataaaattgtgttgagtgaatganttaatagatgtgcattacattggtttgtttggaaagatgctaatgaggccaacatcagaaatgtagccccagcctgggctcctgtggctcactctgctccctggctcactctctagcaggcctccagcccggattgtgctcacagtgtgtttctgggcctgtacaggtcgtgttgctgttcaaacccatggaggctctgctgcccttctcctagactcagacaatcagtgaaaggtttttgacagccagtgttgtaccattatcctcttaacctttccttcctctggaaatctcagagcaccactgaggatacagtgaactcagcacaagccggggatactctagagcgg

SEQ ID NO: 437812 - DNA, 901 bp, Homo Sapiens
aaggaattataaactaactttaattacttcaacaggaagaatttcaaactatgttgtaattcttattttaaagtttaaatctaattaatatattctgactaacataatcatccaaagataaaagtatttgtgatggcaaatggacagaacaatcatttaggtagcatctaggaatattgctacaattactttacataaataggaaatccacgtctttattagtaatgtgccacacatcttagagtaaaaatttacataaggatagggcttataaatatacataaatctcaaaattaatcacaaacattagggtacacaattgttattaaaacaaatataacctatcaatgtctatgtaaaggcatagtttttacaaaataggattttgtagacagtctcaaaaaagtatattaatactcctggagccagactgttccagcatatcagcatgtctgtggaaataaggcatccggagaagctgcattcactcttccccatggccagggccttctatgtgatgaaacaggtaggattctagtgacctgggtgaatgctacacccactgcagcaccccattaccttagagaatcaattactctccagaagaatccaaccaaatggctatcagcctaatagcaaatatccaggggaaaactgaacacattaatcaagcagcagtgtgttttatgttaaaaatcccaaatagcttgatgaatccattacattttgagttgccagacatacttaaaatcacactagcctagccactattttcatgaagaggaacttatatgcaagtcttttattaaatataaaaacaaagaaatctaccttgaaactaaataactggatacttgaataactgaataaggaacctaattaaatacaaaacctgtatagg

SEQ ID NO: 437813 - DNA, 1006 bp, Homo Sapiens
  misc_feature (81)..(282): n is a, c, g, or t
gggtaatttttttcagccccttatagggtactacttcaggcttctagtaccccaagttttttcagtactgctttgggtaannnnnnnnnnnnnnnnnnnnnnnnnnnnnnnnnnnnnnnnnnnnnnnnnnnnnnnnnnnnnnnnnnnnnnnnnnnnnnnnnnnnnnnnnnnnnnnnnnnnnnnnnnnnnnnnnnnnnnnnnnnnnnnnnnnnnnnnnnnnnnnnnnnnnnnnnnnnnnnnnnnnnnnnnnnnnnnnnnnnnnnnnnnnnnnnnnnnnnnnnngaatattttattttacatgaaagaatagccttgtccttaaaaagcaacaaggtctagaataggagtaaaaccttcagagaaaatgcatttgttatcatcagggaggcagggccctggaataactgccactccctcaacttgcaccactctgctggcccctggagaataccctggtgtctcactccttccttctctggtccagcaagagggttatgcactagagaggaggaaaataaaacatagtctatcaaggttgttcatccctgagaactggctttttaaaggatgagtagatgaaaagataaaaatagatgctgtgcattcctaggcatcctcccctgactgtatttcttccgactctttatatagcttctttgtttctttagctgcaaaactgaaattaacttgtgaagggctttagacatgagagcattaaggatcatatcaaacaagccccaaagcaaacagaactgagtgtgaactgatacatacgtgataacagcattcagatttccagtagacggtcaagttggtccagagaagttcattatggatgagtagcaaagcctgatccatcttcagctctgcatgtctttttttgtctaagtctcgtggcggcgcggcctgggcatcgcgccccgaagagccgccgggggccagcagcgcggcgctcagcacggacgcggccagcagcagcgcggccagcgccctgcccacccccgct

SEQ ID NO: 437814 - DNA, 582 bp, Homo Sapiens
  misc_feature (502)..(502): n is a, c, g, or t
  misc_feature (538)..(538): n is a, c, g, or t
acatgatgctgggcggcagaatgaaggtcaaggagtgggagaaatcaacatggcaacttctggtaatggtcagggttcaactacacgaatggaccatgaaacagccagtgttttgagttctagtagcacacactctgcacctcgaaggctgacaagtcatctgggaaccaaggtggaaatggtgtattcattgttgtcaatgcttggtactcatgataaggatgatatgtcgcgaactttgctagctatgtctagctcccaagacagctgtatatccatgcgacagtctggatgtcttcctctcctcatccagcttttacatggcaatgacaaagactctgtattgttgggaaattcccggggcagtaaagaggctcgggccagggccagtgcagcactccacaacatcattcactcacagcctgatgacaagagaggcaggcgtgaaatccgagtccttcatcttttggaacagatacgcgcttactgtgaaacctgttgngagtggcaggaagctcatgaaccaggcatggaccangacaaaaatccaatgccagctcctgttgaacatcagatctgtcc

SEQ ID NO: 437815 - DNA, 1028 bp, Homo Sapiens
  misc_feature (434)..(462): n is a, c, g, or t
aatttaaatccactttttattctttcacagattttaacaattatacacaacttttaacataaaggtagtgaaatctcaaggataaggaggcaatatatatggcctcttctaattcgttattcaggatggaaggaatttttcaaagtacagtgtgtgagattcaacacctggaaaaatacatatgaaacttgtttaattgggctccactttaggacccagacacagcacaataaatacagaactgcatcatctttttaaaagatcattgtaattttaacacattcttactaaagaaatacatactatcagtgaccgatctgaaactctgtaacaggtgaagggagacttacgatgaatatctgagcataggttcgctagcatcttcacactcatacataaacattcttaaagggaataagaatgatttcaaattnnnnnnnnnnnnnnnnnnnnnnnnnnnnntttggtcaaactttcttcatcataccattcattgctatcacaatcctagtttgctggtaggtttaagaaaggaatagaaagtttttgaaatccttttaatttctaccagtcttagggcctcttgagtaggccactttggaagcaaactgattaaacagcaccatcaagtccgtatctcaacaaaccattgcataatttctgtcaatgttctcaaaggttaaaacaagttgtatagaagaatacctttcctcaatagcaggccactgtaaaaacatgtaatctgcaagaatttaaacaaaactatcctgaattctctactgattgcttctttccttaatagaccaagagataggcattacctaaaaaattaaataataatatactgaggcataaaataaatactttatttatgctatcacaatttgggtatttgaagattgttagccatgttcacacaccctttcctcttcccaaagaggaagcaacggtgccagcactattggtcagaaagagttaatgggaaactgttctctcagagctgtgtctgcaatatgcagacacataaa

SEQ ID NO: 437816 - DNA, 549 bp, Homo Sapiens
  misc_feature (466)..(466): n is a, c, g, or t
  misc_feature (483)..(483): n is a, c, g, or t
  misc_feature (489)..(489): n is a, c, g, or t
  misc_feature (498)..(498): n is a, c, g, or t
  misc_feature (523)..(523): n is a, c, g, or t
  misc_feature (535)..(535): n is a, c, g, or t
acgtatttaaatccactttttattctttcacagattttaacaattatacacaacttttaacataaaggtagtgaaatctcaaggataaggaggcaatatatatggcctcttctattcgttattcaggatggaaggaaattttcaaagtacagtgtgtgagattcaacactggaaaaatacatatgaaacttgtttaattggctccacttaggaccagacacagcacaataaatacagaactgcatcatctttttaaaagatcattgtaattttaacacattcttactaaagaaatacatactatcagtgaccgatctgaaactctgtaacaggtgaagggagacttacgatgaatatctgagcataggttcgctagcatcttcacactcatacataaacattcttaaagggaataagaatgatttcaaattcaaaaccacaacaacaacaaaaaaacaatttgggnccaacctttcttcatcnctaccntttcattgncatcccatcccaggtttgcccgggnaggtttaagaanggataggaggtttt

SEQ ID NO: 437817 - DNA, 344 bp, Homo Sapiens
ttcgagtgaatccatgtcatcatccgcagaggtgtcgtagtgcacggggtggttggcgtggacctgcttcaacctcgcaagcagcgcctcctccaggctgtctcggtcccggagctcaatgaactggaaggccaccttgcttctgatactgacaatgatgggatgcggcagcaggctcgtgtcctccatcttctcgatgctcaccacctctctgagtggcaggatgatcttacacgcagccatcttctctgctggcaaagcagatgtagctgtcagaggcgacatccgccccgtggtgtgacagcgactgaacggcgtccagagcgaacagtctacaacgcgcg

SEQ ID NO: 437818 - DNA, 1276 bp, Homo Sapiens
ggggtcacgggcgggagcaaacggtataggggtgtgccagtgggttgagaagataggaccgctattgcgagtatataaagcgcgtaaaggagattttcgctctagggacaatgggcgagggagcgcgatacatacatttacacgggcgtggtccagaactgtatcttggagggggtaaataaaatttagtggtgcgcgaaagaaaattcgctgagaaagtcacaatcggggtgtcgcggggtatggggtgtttcaataggatgtttatggggagatataagcgtcagagagagtgtgtaccacaaagggcgagaggattattcatcctgatggaggagcggccctttctatacaggagcacacgagggagtgaggtgaatgagaaaaccggacgccgccatatggattttctatgtcagcgtcctaggtggataagggggcggcggctgggagaacgttataaaggaggggcgagtttcaaaagtgaggaggccgatgaggttgttcttagccgacgttttaacccggggggcccccgtggaccagtggggaagaataaacaaggaaaggttgtctagttcttccagggattaatattcaggaagggggccaaagagcaaaacaagggtggtgaattcaccaggtgagaggagctttttcataatgggggtggcaatttaacagaaaggttggaaaactgtcaatacaaaaaaagttacaaagaattgtttataaagaagaagaagaaaaaagcaaacccaaccaagctcaagcctagatccgtatttggattcagctcgtctcggggcggagcaggcgtcacggcctccggattaaagtatccccccggggagtgtgctctgtgaatctgggtggggagggcgctcggtgctgttcccagcaacccaccaccctcctcctagtgcttgcaagaataggcagggaactcagctgactgcatcagaacctgagaagctggaggctgaagccagacaccagcctctcaggacttggggacactatgagcccactcagccccacaggtctgaatctttggggaggggagggttccagtctgcactctgcccttgaccatcagggcagggggatcacactggctatcggcatcatctctagcagtttctccagccccagccctagaatcaggccaagctctcagcactgcgtgggtttgatcttgagatccgaagaataccggaccggtaccagccgtaaaagaaacctaaaggaaggaagtcgagtttaaataaaaatt

SEQ ID NO: 437819 - DNA, 680 bp, Homo Sapiens
  misc_feature (621)..(621): n is a, c, g, or t
  misc_feature (654)..(654): n is a, c, g, or t
  misc_feature (657)..(657): n is a, c, g, or t
aaatcataacaggatatgtgtatttaaatgtgtaaggggagatactagaagtactaaaataacacggtaagattggaggggagaaagtggaagtacatatgaaagttatcacaagaaagctcctatgccagtgatttgcctggttgcttttatatctgctttttatgcttgtcctgccctgctctctatcacagaaattgaccccttcaaacattgttttcctctggctacttccattaccaaatatcctctggctacttccattaccaagagctcaacttgccaataccagattccaaaactgagcccacaatatgtctttgttcaaagagaggggaaaggcaaccagctaccctgtggaagattggttactttgtacttctttctcctttgaggtgagggattttccctcatgggttgaatatacacctgttctctgcaggtattttacaggtctttccatcctgcaatgctgccatcactactctactggacttacagaatgcattagaagctgtcagtatcccatatcctcctgttatgtaaatcattggtgttattacaggtctcacatctagaagtatctggcttatcttcagactatcttactgaaaccagagntacagtgtgggctaggacaacatcctgtgcagntgngtggtgccctgcaagtattcttt

SEQ ID NO: 437820 - DNA, 846 bp, Homo Sapiens
  misc_feature (600)..(646): n is a, c, g, or t
  misc_feature (676)..(676): n is a, c, g, or t
aaggggcagcgagagcccgcccaaaaaaaccctgaaacaatccgggccggtcaaatgggaaaaaagcccaggagctccgttgtgggtacaacagacagggagccagtgtttcgttcatgtatgtgctgggacactgcctgctgtttccccgcctgccccgtagtttctcggcccagagattttaaaaacactttatttaataaaagttaaacatacaaaactgaaataatacacatcctaaaaattaccttcttccattaataggaagacccttttctatgcatgtatttggcttaaactcaactcaggataactgtgatgatgttcacttacaccaacaaatgcagacaacctgatctaattaacaaaaattacaaacagctaaatgaacataatatacagggaaattatcgtcagattaatgcacaagaaatacaagaaatttttaatgatgaaatattcagtattcttgttcattaatttagccttgtgtttttacaaaaatagtatctacactgtatacagggctatacatcagctttttgttctcccatataaacatcacacatcccaaaacatggtaccactgccgtaaatggnnnnnnnnnnnnnnnnnnnnnnnnnnnnnnnnnnnnnnnnnnnnnnnccttagaaaagggagctcatccctaaggtntcttacataaaactaagagtacataaaaataaaacagctagatcaattttagagaatgcctaataggcctgggaaacaagttattgaggaaaaacctcaaaacaaactttgccatttacaaattaacctatctttaagcttaactgaacgacagctaagttttaaagctg

SEQ ID NO: 437821 - DNA, 2027 bp, Homo Sapiens
  misc_feature (47)..(182): n is a, c, g, or t
  misc_feature (1446)..(1446): n is a, c, g, or t
  misc_feature (1517)..(1517): n is a, c, g, or t
  misc_feature (1557)..(1726): n is a, c, g, or t
tggtacggtccggaattccgggatatcgtcgacccacgcgttcggcnnnnnnnnnnnnnnnnnnnnnnnnnnnnnnnnnnnnnnnnnnnnnnnnnnnnnnnnnnnnnnnnnnnnnnnnnnnnnnnnnnnnnnnnnnnnnnnnnnnnnnnnnnnnnnnnnnnnnnnnnnnnnnnnnnnnnnnnctccctctctcacacacacaagagcagtttgctgttgctgtttcctaccttctgaggcttcaaagtattttttaaaatctatgctttgtggcagctctacggtgcttatctctgtctttgtgtcaatccttaagtacccatgtctttttcatgtctaaccattgggaaggtagaggctggcagggaagacaaatctgctacaagtccatgggaagaccctacaatgaaatgttcattggttggtatactgttttagtcttgaattgccaactttccaactgatctatccatattccttaagtactaaagacaaaatagagggcttctttttctctcttaatgtcttgccttctggttttcctggtttgcaagactaagtgtacctaatctcaccatctcttcacttctagctctctgaaacaagggtcacactactcagagggataaccccttacagtggtctgaggagtaactatttcctaaagtattctaaaagagtaggaagagagaaatggtagcctgctgcttctcacagacacctcacatcctcacttgggatggcatccacatagaaaccctgcatttaggtaaaatttgcctgactgaaggggactcagtcctccaaatcaaggtcaagaagatatctgcatgagaccttaagaactctttattgccattatttggagagggcgggggaattgtcctaatcacacatttaacacagggaataagtgctgaagtgacccagatcaccaagcgcagttcctcatcatactttatttttgctttccttattccttggcactgactaagctaaagttaagaagccgacttcataagccaacccctgtgatgggatggaaaaatgggcttttgcagagggtttattaatagagatggatatactactcacaagttgtggctcatggctccactgagaaggccatagtaataaaatgatcttatgaacactgttccccaaaggccaaagcctgaagatattgccccttataatccaatcagccttatattttaataagtcctgaatcaacctgactacggatatatggggccaccagggtgcatgggtgcatgtctgctcagcctagccctggaagtgagcactgccggccacagatcctgggaaaggtggtagtaacccagaagatgtagccttgaagggaggatacctatcaaaatgccaaagctgcagggacacgaagacggttgaaaattcaacctatgtatactagatccttccagntttgatggtttggtcattcttcttcatgattataccatggaggaattttctgtgacaagggtggtcatggnaagtaagtgagtgatcccctggtttctcattccttacagnnnnnnnnnnnnnnnnnnnnnnnnnnnnnnnnnnnnnnnnnnnnnnnnnnnnnnnnnnnnnnnnnnnnnnnnnnnnnnnnnnnnnnnnnnnnnnnnnnnnnnnnnnnnnnnnnnnnnnnnnnnnnnnnnnnnnnnnnnnnnnnnnnnnnnnnnnnnnnnnnnnnnnnnnnttcaactgttttaaagggacagccctttatagtatcggagttcccacactgaggaggctttggggcccaacaatagaaggttctacggtgctcattcaagaattttagcaattcattttcgaagtgcacccttctccatggccatcctggaggcttctggtatatccaatgtaggaatgtaagcaaagaaaaggggatgtgaggccaaggggtcgaagattagagcaatgtcgggacgtacataatggactcaacccattcagaggcaaaaccttgtactgtgaaatacacacgggcaaag

SEQ ID NO: 437822 - DNA, 991 bp, Homo Sapiens
  misc_feature (936)..(936): n is a, c, g, or t
  misc_feature (964)..(964): n is a, c, g, or t
ttttttactttttccatcctattacataatcagctcggaatagatacaaataattcggcagaagagcaatctggaagagacctccaactgcttttccttgttgaagcccctttgtgtgccaggtagtaatttccaaggcataaggtttttctctgaaggttgtattcaactaggaaagacacaaacattctcctaacttccacccaaaagcacacatacctttctttgttaaaatcataaatggaaaaacagaaacacaaggaagcatgagaaaggtgactttgaaattaatgttaaagtctgaatgacaacctagaaccttcttattttgggccccaaagcctctcagtgtgggaactccaatactataaagggctttccctttaaaacagttgaatttagtgtgcatcagaatcaccaggagggcttattaaaacgtggattgccgggtcctctcattagagtttctgattcagcagatctgggatgggattgagaattttcgtttctaacaagttcccaaaggctgctgatgctgctggtcttgtgccatactttgcgaaccactgcttttaaggaatgagaaaccaggggatcactcacttacttccatgaccacccttgtcacagaaaattttccatggtatattcttgaagaagaatgacccaacccttaaactggaaggatctagtatacataggttgaattttcaaccgtcttcgtgtccctgcagctttggcattttgataggtatcctcccttcaaggctacatcttctgggttactaccacctttcccaggatctgtggccggcagtgctcacttccagggctaggctgagcagacatgcacccatgcaccctggtggccccatatatccgtagtcaggttgattcaggacttattaaaatataaggctgattggattataaggngcaatatcttcaggctttggcctttggncgacagtgttcataagatcattttatt

SEQ ID NO: 437823 - DNA, 684 bp, Homo Sapiens
  misc_feature (564)..(567): n is a, c, g, or t
  misc_feature (579)..(579): n is a, c, g, or t
  misc_feature (588)..(588): n is a, c, g, or t
  misc_feature (678)..(678): n is a, c, g, or t
ggagtttttcagaacaaatgtttatttaataattaagggcaaacaaaaacattaaagcataggaatacatcaactgaatacaagttgtcttgtttggtctgaaatcttgaaaaagttaatctaactacttacctgaggtagatttaggttggcactgcttcaagggaacctccgtccatcccagaagttaccttctagttttggttacaggctcccaagtggtcctctccaacctcaggttatgctatatgaataataccaacacctttttctcccatggttaaaagccttcagccttgtttcatacccccatagttctctgtttgggggatggtccatcattaatttacttaaaaactagagacaactaccagtaagatcagttgatagaagggtcaagtcattgccctgttaatgataccaactttgagcccttctccatgttctctctaatgactaacaagtagccgtaaggactacttttcatcaccaccatgcctcacacccaatactattttaagtatactagcaatgtccaacatatactagtgataggcatgattnnnnccagagaaaaanatacatctngtgtgtcttatactgggcaactttttatgatacaagagctatttctaaatattacaaaaacatgtcagatcaaataaacttccaggatcnttttct

SEQ ID NO: 437824 - DNA, 506 bp, Homo Sapiens
tggagtttttcagaacaaatgtttatttaataattaagggcaaacaaaaacattaaagcataggaatacatcaactgaatacaagttgtcttgtttggtctgaaatcttgaaaaagttaatctaactacttacctgaggtagatttaggttggcactgcttcaagggaacctccgtccatcccagaagttaccttctagttttggttacaggctcccaagtggtcctctccaacctcaggttatgcttataatgtggtgattgcaatcctttccctgggattaaaaggtattttctctttccttggcagaaccacaattaaatctctcactgcagaacaggttttttggggcctgataagacaggagcttctaccaaaggttttctcagactcaaggtaagtatgggttttttcacctatgtgagttcccctgatgtaccacaagagttgatcattgacaagcactcttcattcagacacttgcagtcctttcctccagattgggg

SEQ ID NO: 437825 - DNA, 538 bp, Homo Sapiens
acgactgtcacaagcagttcctgttccttcaactcacctgccccatccctgtttaggtgctttgtcctccttgaggagcctccaatgctgctgctcctatacatgtcacaatttcagacccagcatgctaggaactgctgccagcgcctggttaagccaatactaaatggggccaaacaggtgaacagacattctgtctttctccaaacctctgaaaaagattctgcaactcatctcacagtaatttgttccctaatttactcttaggaaattgtcgttaaagtctgattaggttaagtccaattccctgtaattagatcctcagtgaagaaaaatctacccatcaccacaatttattttcttttctatagctccagcatcagtattgtaccattatttttggcagctctggagaaaggatttgaaaaatatatcctgggtgaagggaaagtcagctgcatgtcttttctgaagaaatgcgctaccttctagttataatatcatcattctagaagattcccattgtaacagcctattc

SEQ ID NO: 437826 - DNA, 1220 bp, Homo Sapiens
  misc_feature (179)..(179): n is a, c, g, or t
  misc_feature (214)..(214): n is a, c, g, or t
  misc_feature (224)..(224): n is a, c, g, or t
  misc_feature (300)..(300): n is a, c, g, or t
  misc_feature (1110)..(1110): n is a, c, g, or t
gggcttttaggagttcacctttccctggagggtgggggggccactgggccatttttttccggggcagcccttcagggagccagcacgtttgctgtccagggccttcgagccccggcccagaggaatggtctcacttggaactcgtagttcttggcccccagtggaggcctccaagcttntgcgctctgccagccggccagcagctcctctgccnacgggagctnccctggcctccccggggcagtctgggtcctgaacaaggccgtgtaagattgggcaggcgcagcagggccactgacnttccagctgagccacaccgccggtctaggcttggggccctctgcaggatccgggttcagcagtgtcacattttccagctgtattcgcacagccagaagctccacaggctccgtgtagtcctggggctcctggatggaaacccgggctgcgcggctctccctgtgtcctgcgctgttggtggccacacacatgtaggtcccttcgtcactcttctctgctcttgccatcagcagggatcccccggacactgtgtgccttccgggctggagggccaggggtttcccatctttccaccatgagactgtgggctctgggtggccccagggcggcccacattccagagtaaactgctcacccaccacagccaccatgtcccgaggctggatctggaaatcctcccggaggacagccacagacagccgagcgcctctgctgactgccgtgccaagccggttgctggcctcacatgtgtagacacccaggtctgtggacagggcctggccatcgtgggcatgtccccgggcagggggctgtagcagcagaagggtcccatcaggcaggaggtggtgtgggtctgggggcaccatgctcaggggctgcccattcagcaaccagcggatggtgggaggtggctggcctgaggctcggcagctcatcctggcagggccagggccctggaacagctggtcctgggggtggactaggatctggggcggggagtcctgagccatgcctcccatgatgagcaggagcagcagaggcagggaacccctgccccccaggaggctgtctcctccagatcccatggcnactctcagccctatgtccttgtcccgagcactttgtcctgctgctctgagctcacagtgaagagggaaggaggggcggggtgggccggtggtggttgtttgatcccggga

SEQ ID NO: 437827 - DNA, 899 bp, Homo Sapiens
  misc_feature (18)..(18): n is a, c, g, or t
agggcccaggtgggcacnagcaagactccccccttgggccccacccctcctccagtcctgcccatgtccgtgaactctgaggctgttgggacgctgatgtacccataggtggtggggggtgaaggagcccttggcatgggagagacgctgttcctgggagtctcctcaccctcactgagttccaagcacagggctacctcctcaggggtcagcacgctgtcttgatcctcccccagggatgacagtgaggagctggacaggcgactggaagctgggctggggccagagagggaagaggcctgggggctagggggactgcaggggctaaggatggggatgggggctgctggcagcaggatggaggagggagcctgtggtgccaccggaggctgggtctgttgactctgagttgggggagtttcatgaggaaagaggggtgctggagggagatgacgagtaaccagctcatttgaggagctgaggagtttcggtcccagggcccgccaggcaaccagagcttggggcacagctcctgggctttgggaaaggttcttggaacctctatttcctaactcacaggcccggagctccaaggagtggctgccccggagcagtggggaactgttggcatgctgcagctcctgcttctttttggccttccaagcctctgcaggggccagagacaagcggggagaagagagtcccctgcggctgcagaggctgtctgagctggaacaggggctggagagctgggccagctggggtgggaggcgcctgacagctgggacctgagcaggagcagcagaggcagggaacccctgccccccaggaggctgtctcctccagagcccatggctactctcagccctagtccatcccgggaattccggaccggtcca

SEQ ID NO: 437828 - DNA, 471 bp, Homo Sapiens
  misc_feature (14)..(14): n is a, c, g, or t
  misc_feature (37)..(37): n is a, c, g, or t
  misc_feature (39)..(39): n is a, c, g, or t
  misc_feature (115)..(115): n is a, c, g, or t
cccaccccaggagntgctgtagctcgtcctcatgctnanaaatgtctcggcgcctgctccaaagcctacctgccacaatctaagaccctttctaatagtttcatctgcaggaaanaaaatcatcattctcggcatcagcatcttgcagcctattaggaaatatcctttatggaatgttctgttctcaacttctcccctcctttcattttcacctgggaaccagttaccgtggggagggacaaggcagaaacagaaagcccgccactcgcctcgcagtgaccaacgctgcgatcccactgcttggtttcctgtttccatcgccccccaccagaaagccacagcactcagcccggggtctcccaccccagccccgggaccgggacctcgttgccactgtggggcacttaggcagggtccagcgcaggccaggggcagacagccgggaagaggcctcagcccgaggccaggaga

SEQ ID NO: 437829 - DNA, 1117 bp, Homo Sapiens
  misc_feature (2)..(2): n is a, c, g, or t
  misc_feature (5)..(5): n is a, c, g, or t
  misc_feature (15)..(15): n is a, c, g, or t
  misc_feature (19)..(19): n is a, c, g, or t
  misc_feature (32)..(32): n is a, c, g, or t
  misc_feature (36)..(36): n is a, c, g, or t
  misc_feature (39)..(39): n is a, c, g, or t
  misc_feature (41)..(41): n is a, c, g, or t
  misc_feature (50)..(50): n is a, c, g, or t
  misc_feature (56)..(56): n is a, c, g, or t
  misc_feature (61)..(61): n is a, c, g, or t
  misc_feature (70)..(70): n is a, c, g, or t
  misc_feature (76)..(76): n is a, c, g, or t
  misc_feature (79)..(79): n is a, c, g, or t
  misc_feature (88)..(88): n is a, c, g, or t
  misc_feature (110)..(110): n is a, c, g, or t
  misc_feature (179)..(179): n is a, c, g, or t
  misc_feature (183)..(183): n is a, c, g, or t
  misc_feature (187)..(187): n is a, c, g, or t
  misc_feature (245)..(245): n is a, c, g, or t
cnaancaattaaaanttcnattaatttttggngaanccntntaaccttcntgaggngggangtggagggnaaaaanagngggctcggnccgtggcctaccctgccggctnagcgaaaagaagcatagagctgggaggtcacttcagacgacacttggttgagcccagggggttctgatnaatnactnaggagatcctcccgccccgaggggtgaactggggctgtcagctgatgttgccatgaanacagggaagagacaaccggagacagcaaagagctgggaggttctgctttagcaaagtccaggaggaaaagttcacggagaaagacttgggagaagggaggaagactccacgccaaggatccttggtgaattaaggatatcgaggctttctggttagaggaaaaggtttccaccagttcccaggggcccatgggagtgggcaaaagcatccctttccccagctcctgggaacagcgttaagagggtgcagcgcagagcgggtgcggacagaagacctactgtgggacaacagcgctgctgaagctcctcttcccgactacgagtgctggaagctgcagatcaactccggcacaggctatccccggtcaactgagctcttaagttctcacacccataacgtcccaacggaaacggacccaaatccactaggagcccaatttctgtccccctgccctactagtccctcaattggttccagtctcaagagagggcggaacctcacgctcccccatcccttcacccgttctacccagggtcagctcccttgtactttcccttcgacccctcctggcaagaaagccatagcgagcttccttgttccctagaatctctccctcccgaccaccccaaaagaaaccttgtgaaccctcagtcacgccctaagtcgtccctaagaagcacgccgccctcaagcctagcccgagatcctctgccccgacgaccacctggttccgcctactctccacccttccagtcctcagtccccaatttgccaaagtggggggcaagcgattgacctcctctcactgagatcaccccgtctcacgcctccccctacgctcaaaaccgttggcagcctcccgcccactgtcc

SEQ ID NO: 437830 - DNA, 1237 bp, Homo Sapiens
  misc_feature (250)..(250): n is a, c, g, or t
  misc_feature (278)..(278): n is a, c, g, or t
  misc_feature (880)..(880): n is a, c, g, or t
  misc_feature (884)..(884): n is a, c, g, or t
  misc_feature (895)..(895): n is a, c, g, or t
  misc_feature (898)..(898): n is a, c, g, or t
  misc_feature (909)..(909): n is a, c, g, or t
  misc_feature (911)..(911): n is a, c, g, or t
  misc_feature (916)..(916): n is a, c, g, or t
  misc_feature (925)..(925): n is a, c, g, or t
  misc_feature (935)..(935): n is a, c, g, or t
  misc_feature (943)..(943): n is a, c, g, or t
  misc_feature (946)..(946): n is a, c, g, or t
  misc_feature (950)..(950): n is a, c, g, or t
  misc_feature (952)..(961): n is a, c, g, or t
  misc_feature (963)..(963): n is a, c, g, or t
  misc_feature (967)..(967): n is a, c, g, or t
  misc_feature (970)..(970): n is a, c, g, or t
  misc_feature (979)..(979): n is a, c, g, or t
  misc_feature (988)..(988): n is a, c, g, or t
  misc_feature (1015)..(1015): n is a, c, g, or t
  misc_feature (1022)..(1022): n is a, c, g, or t
  misc_feature (1032)..(1033): n is a, c, g, or t
  misc_feature (1044)..(1044): n is a, c, g, or t
  misc_feature (1050)..(1050): n is a, c, g, or t
  misc_feature (1052)..(1052): n is a, c, g, or t
  misc_feature (1076)..(1076): n is a, c, g, or t
  misc_feature (1080)..(1080): n is a, c, g, or t
  misc_feature (1084)..(1086): n is a, c, g, or t
  misc_feature (1088)..(1088): n is a, c, g, or t
  misc_feature (1094)..(1094): n is a, c, g, or t
  misc_feature (1119)..(1119): n is a, c, g, or t
  misc_feature (1123)..(1123): n is a, c, g, or t
  misc_feature (1125)..(1125): n is a, c, g, or t
  misc_feature (1144)..(1144): n is a, c, g, or t
  misc_feature (1146)..(1146): n is a, c, g, or t
  misc_feature (1156)..(1156): n is a, c, g, or t
  misc_feature (1165)..(1165): n is a, c, g, or t
  misc_feature (1179)..(1179): n is a, c, g, or t
  misc_feature (1183)..(1184): n is a, c, g, or t
  misc_feature (1190)..(1191): n is a, c, g, or t
  misc_feature (1194)..(1194): n is a, c, g, or t
  misc_feature (1198)..(1198): n is a, c, g, or t
  misc_feature (1201)..(1201): n is a, c, g, or t
  misc_feature (1205)..(1208): n is a, c, g, or t
  misc_feature (1215)..(1215): n is a, c, g, or t
  misc_feature (1220)..(1221): n is a, c, g, or t
ggcagaacgagaggaacggcaacagcaggtggctgaggactacgagctcagactggcccgggagcaagcgcgagtgtgcgaactgcagagtgggaaccagcagctggaggagcagcgggtggagctggtggaaagactgcaggccatgctgcaggcccactgggatgaggccaaccagctgctcagcaccactctcccgccgcccaaccctcaagctcctccttctggaccctcccagccccgggcctcnaggagccggagaaggaggagaggagggntctggactatgcctccccatggccgtggccctgaagcctgtattgcagcagagccgggaagcaagggacgagctacctggagcgcctcctgttctttgcagttcctcctcagatcttagcctcctgttgggcccctcttttcagagccagcattctttccagcccctggagcccaaaccagacctcacttcatccacagctggggccttctctgcacttggggccttccatcccgatcatagggcagaaaggccattccctggaggaagatcctggacctgacggggagggcctcctaaagcaagggctgccgcctgctcagctggaggggcctcaagaattttttgcaccagttgctggagacagtgccccagaacaatgagaacccttctgtcgagctgttgccccctaagtctggtcctctgactgtcccatcttggggaggaagcccctcaagtgccacgtattccaccggctgtcccacaaaaagcaaagttcccttagccatggcattcagtcttttccgggtccctgagccttcctcctcccattcacaaggcaggtggtcccagcagtggttccccagagagaggtggagatgngctnacattcccaangcngctgatggagntntctcnactgttgcnactctaccangctcggcnccngggngnnnnnnnnnntnacgntcncctgctctncctgaagangctggaacacagcggcactgatggccnagggganaatgtccccnnaaggaacacanactccnanatgggtaaaatcccccaaaaaaanatanccannnangctgtncctcgccgccttgcaacagcccccnagantnaaaatcttccttcactgtntnaaaatatctnccttctttnagtagcatgaggancccnngggcannctngacnccncccnnnntggcgtntctcnnctttgttctctcattg

SEQ ID NO: 437831 - DNA, 2279 bp, Homo Sapiens
  misc_feature (73)..(73): n is a, c, g, or t
  misc_feature (115)..(115): n is a, c, g, or t
agcgatacggggcatacagggcggtacacgccgacacgcggtaagaggcaatccgtaacgggggcgatcggcntacgggcctgcgcccctcggcggtccgcgcgctcgcggcgcncgacaacacgccatggacggcggtggcgacgtaacggggaataggccgtaagcggcagggcggaggagcggggtccacgcggatggcgggggcggagaggcgcgtagtgtggggggaagggacgggtaatgggtggttcagactgcggattgcacacgtaggcggtgggagcgttaccggttggcttcggaggcccagtgggagcttggaggtcctcgggcccgccggggggtaccgttcgcttcggttctgccattcccccccggaaccgaggttagctgactggccagctcctgttggtgctgttcactcaggtcgtgcagctgcttcctgtgatgttccttgagggaggctgcttgccgtaggctgctctcctgagcttgcggcagccgctctgtcacccgctgctccagctgcacagccagctccgactccagctggatccgctggctttcataccgggcctgcaccaagctcatttccagctgcagggcatctctctctctccgagctgtatccagctctccttccagccgccgcacctcagactgcaccaatgccaactggtgctgggtctcccaggcggcctgggcttccctctggctcttctccttctccctttccagctgagcctggctctcctcctgcagcgcctggtagtgttccttaagctggtgctcttgctgggcccaggtctgccgttcttcttctagggcagcccgaagagtctccaactctcgatgctcactcagttgcccagcccgagctgcatcccgctcttcctgcaggacacagcaccgctgctgttctgcctccaacctcagagtcagagcttgcctttcctcctccagtgtctctctttcccgttgctgcagtctggcactttcctgctcacgattcagggcctccatggcctcagaaaggctttgttccaggcgggttactgtctcctgctgcttgcttctggtgagctctgctgcctggtgttcctcttgaagtcccctgagaacctctgtccgctcagcctcatgccggttccagccctccaccacacgggccagggtcttgtccagttgttcaatcatggtatctttcttgcggtcggcagccacaggcacggctaattgttgctgtagctctaacactcgggtctgcaggctctgaatatggcgctcacaatgcttgcggcgggtatgctcgtgaatccaatgcatctctcagcccctgaaaatctgggggattgagtggaggccctggccgaaggctggtgtagcggggaaacagctcctccagggcttgggctgagctagatggagacaagtcttgcaggggccgggtgttgagcaaggtggctgtgctatcactgtcaaaggagtcgctcttcccgtctctttgagccaggcgccaggaatgagaggatcccgataggctgtatcacgtgaggtttggagcatggtctggagctgaccccgacacgttgccatctcgaagatatgccttagaaccatccgtggtcttgcaagttctgtgtccaatccgactgacaagcttcgactcaattcttgggcgaagccgtctaacccttcatgagccggggagtcggagggtaaatacagctgggctcgggccagtggcctccgcctgccggctgaggcgcaaagaagcatagagctgggaggtcacttcagacgacacttggttgagcccagggggttctgatgaatcactcaggagatcctccgccccgaggggtgaactggggctgtcagctgatgttgccatgaatacagggaagagacaaccggagacagcaaagagctgggaggttctgctgttagcaaagtccaggaggaaaagttcacggagaaagacttgggagaagggaggaagactccacgccaaggatccttggtgaattaaggatatcgaggctttctggttagaggaaaggtttccaccagttccaggggccatgggagtgggcaaaagcatccctttccccagctcctgggaacagcgttaagagggtgcagcgcagagcgggtgcggacagaagacctactgtgggacaacagcgctgctgaagctcctcttcccgactacgagtgctggaagctgcagatcaactccggcacaggctatccccggtcaactgagctcttac

SEQ ID NO: 437832 - DNA, 1005 bp, Homo Sapiens
  misc_feature (139)..(165): n is a, c, g, or t
tctccctcccaggttctttctttccccgttggtgcagtctggcacttttcctgttcaggatttcagggcctccagggcctcagaaaaggctttgtcccaggcgggttactgtctcctgcggcttgcttttggtgagctnnnnnnnnnnnnnnnnnnnnnnnnnnncccctgagaacctctgtccgctcagctcatgccgggtttccagccctccaccacacggggccagggtcttgtccagttgttcaatcatggtatctttcttgcggtcggcagccacagccacggctaattgttgctgtagctctaacactcgggtctgcaggctctgaatatggcgctcacaatgcttgcggcgggtatgctctgaatccaatgcatctctcagcccctgaaaatctgggggattgacgtggaggccctggccgaaggctggtgtagcggggaaacagctcctccagggcttgggctgagctagatggagacaagtcttgcaggggccgggtgttgagcaaggtggctgtgctatcactgtcaaaggagtcctcttcccgtctctctgagccagcgccaggaatgagaggatcccgataggctgtatcacgtgaggtttggagcatggtctggagctgaccccgaacactttccatctcaaagatatgcttagaaccatcctttttcttcaagttcttttccaatccgactgacaagcttcgactcaattcttgggcgaagccgtctaacccttcatgaggcggggaggtggagggtaaatacagctgggctcgggccgtggcctccgcctgccggctgaggcgcaaagaagcatagagctgggaggtcacttcagacgacacttggttgagcccagggggttctgatgaatcactcaggagatcctccgccccgaggggtgaactggggctgtcagtgtgggacaacagcgctgctgaagctcctcttcccgaccctcgtgccgaattcgccacccaggcctcgctacct

SEQ ID NO: 437833 - DNA, 360 bp, Homo Sapiens
  misc_feature (12)..(12): n is a, c, g, or t
  misc_feature (81)..(81): n is a, c, g, or t
agtgcccgttgnaagcgcccccgcgtccggccattgtcctcgctttctgaagatggaatggagagactcctctcctcctcnaaggacaggtcactgtcagagtcggagtctgcgccagcatctcgatggaacatggccacgtccaggtcagtggggccagcatgagcctggaggctgtggtcagtgtggtcagcggctgagccatgtcgaaccaggacattgtccctgaggtagctgcggccccgctggctgtcctggtcctgggtccggccggagcgggcactgctcacagaggagacggtggaggcgcccagagtgatgcggatgaggccactctcctcaaagagagccgtgttgttg

SEQ ID NO: 437834 - DNA, 474 bp, Homo Sapiens
  misc_feature (361)..(429): n is a, c, g, or t
attcatgaatggtttaatttccctttaaagctagaaaataaagatcatttaccttctgatcttcgtttttccaaatggtaataagcattgatccttccctcgaataaaggtgaaatttttaaaatctcagtgaataggaatgtgcaaagctctaagaaaactattacttgaatgtctctaaagtggtagaagatcacaagttgggaataccctcaaaaactatatttttaccctactgttaaaacttgttttcaaagtggtgtaatctgaaagattacagttcaaaagtaattcccataccaaataatatcaactttaggtgaacatctaagtatttaagagtattatttttcttggctgnnnnnnnnnnnnnnnnnnnnnnnnnnnnnnnnnnnnnnnnnnnnnnnnnnnnnnnnnnnnnnnnnnnnncccagcctgaccaacatggtgaaaccttgtctctactaaaaaaaa

SEQ ID NO: 437835 - DNA, 1169 bp, Homo Sapiens
  misc_feature (466)..(466): n is a, c, g, or t
  misc_feature (475)..(475): n is a, c, g, or t
  misc_feature (525)..(525): n is a, c, g, or t
  misc_feature (607)..(607): n is a, c, g, or t
  misc_feature (621)..(621): n is a, c, g, or t
  misc_feature (689)..(689): n is a, c, g, or t
  misc_feature (751)..(751): n is a, c, g, or t
  misc_feature (762)..(762): n is a, c, g, or t
  misc_feature (773)..(773): n is a, c, g, or t
  misc_feature (780)..(781): n is a, c, g, or t
  misc_feature (1051)..(1051): n is a, c, g, or t
  misc_feature (1055)..(1055): n is a, c, g, or t
  misc_feature (1105)..(1105): n is a, c, g, or t
  misc_feature (1138)..(1138): n is a, c, g, or t
  misc_feature (1158)..(1158): n is a, c, g, or t
gatcatccgggtacctactcatccagaggggaagcgtgtctgctgggagtttgcgaccgatgactatgacattggctttggagtttattttgactggacccctgtaactagcactgacataactgtgcaggtcagtgattccagtgacgatgaggatgaagaagaggaagaggaggaagagattgaagaacccgttccagcctggagatgtggagagaggctcccaggagctccttgcggggtcgctatggggaggtcatgcctgtgtaccggcgggacagccaccgagacgtgcaggctggcagcccatgactaccctggtgagggcatctacctgctcaagttcgacaactcctactccctgctgccgcaacaagactctctacttccacatctactacacccagctgaaggactgctgggacaggggcaggctgtatttgctggctgaagcaggctgccagcnggtgcctcntgtttgggataggcaagagccaaaggttcatggggggctgctgagcctcncaccctgtctggcatgcctgactgttggcccacgtagctttttccccttcttggcttctgcaggtggtggtgtagtgccccngttctgtagtcccngactcatacccctcttgcttcagactccagcaaattccctcttgaaggcacctatggggcacaagccnaaaaggaagcagggcgatgttttttaaaaatagattcatcttggcacaggtttatcattcanattgctgcccnctcctctcccncagcccnnattgccagtgcatttagtggcacccactctcttcaagttgttgaggtgccagaagagggaaaagcacattgcccatgaaggagccccatcttttggttggagaaagctctatccagcctgtcaccactgccatattcctgcctgctggttattcttggtctctgcatagctgggagaccacactgccttttgaggggtattactattcctgatggtagacaccccctcctttctctttcctaagtctatgtttttgccattacagcaagnacantcatgcaatctcaagtgatgatcaatgtaacctaagatcttgtgggaagnaaaactgcccccattatttcctattccaagagntggtttcccttactatgggnactggcagtca

SEQ ID NO: 437836 - DNA, 830 bp, Homo Sapiens
  misc_feature (486)..(531): n is a, c, g, or t
  misc_feature (775)..(775): n is a, c, g, or t
  misc_feature (798)..(798): n is a, c, g, or t
agcggttcacgggccaataactgcgcagcgcgcgggacccgggtggggaagctggagctgttgcggggtccgcggggaagtcttggcggtggagccatggtcggccagctgagcgagggggccattgcggccatcatgcagaagggggatacaaacataaagcccatcctccaagtcatcaacatccgtcccattactacggggaatagtccgccgcgttatcgactgctcatgagtgatggattgaacactctatcctctttcatgttggcgacacagttgaaccctctcgtggaggaagaacaattgtccagcaactgtgtatgccagattcacagattttttgtgaacactctgaaagacggaaggagagtagttatcttgatggaattagaagttttgaagtcagctgaagcagttggagtgaagattggcaatccagtgccctataatgaaggactcgggcagccgcaagtagctcctccnnnnnnnnnnnnnnnnnnnnnnnnnnnnnnnnnnnnnnnnnnnnnnaatggaagctcgggaatgggttctactgtttctaaggcttatggtgcttcaaagacatttggaaaagctgcaggtcccagcctgtcacacacttctgggggaacacagtccaaagtggtgcccattgccagcctcactccttaccagtccaagtggaccatttgtgctcgtgttaccaacaaaagtcagatccgtaccttggagcaactcccgaggggaagggaagcttttctccctagaactngttgacgcaagtggtgaaatccnagctacagctttcaatgagcaagtggggcaaa

SEQ ID NO: 437837 - DNA, 1168 bp, Homo Sapiens
  misc_feature (56)..(56): n is a, c, g, or t
  misc_feature (111)..(111): n is a, c, g, or t
  misc_feature (792)..(850): n is a, c, g, or t
  misc_feature (1057)..(1057): n is a, c, g, or t
  misc_feature (1060)..(1060): n is a, c, g, or t
  misc_feature (1063)..(1063): n is a, c, g, or t
  misc_feature (1094)..(1094): n is a, c, g, or t
  misc_feature (1107)..(1107): n is a, c, g, or t
  misc_feature (1128)..(1128): n is a, c, g, or t
cccgcccccggggaccggggacgggggctcgtagtccccgggaaagcggagggcgncccagaccgggcgcctcgggctccagcaacctgcgccccgcctcgtcgtgctgtntgcgcctctcggttcccaggcgggctgtaataccctttcttcctgtcgcctcttttcttcagcgtctcgttttgttcgctctccctcctgccgccggcgctcttcctcttgcctcgctcggtcttccgcttcccgcttgcgcatctcttctaactgctgctgccgcctccgctcctcgtcctgcaacctcgctcttcgttcagcctccaggcgctgcatgatcagcatggtgtccacatcatcgtcctcctcctcctcgtcatcttcgtccttctgcttcgactcctggagtctcttctggaactgccactccagcatgagcttgcgcagccggtcgctctcctcggcgctgcggtccggtttgctctggagctcctggatctccttgctcagcatgtccacgatgtgcatctgctgctgcttctccagcttctccttggcgtcccgcttccacgggtcgggggacagactgtcccccgaggaaagctcctctttgctgactgtaatgtactgcaagtctctgcgctcgatcgtgcggggctgctgctgaggctgcagctcccgaatgactgtttcctgtggccgctggagtgtggaaggcttttcgggcttcatctgctgtgcagtcaggggagaaaacggagcagggtttaaggactgagtgcgcatctggcccaactnnnnnnnnnnnnnnnnnnnnnnnnnnnnnnnnnnnnnnnnnnnnnnnnnnnnnnnnnnntcataccaacgctgatgttcttctctctttctccgttcagcagcagccacctgcgcagacggcagccctatctggttggcggaagggggtggtggaagaggcaaatccatggacattccatcgaaatcaccggcatagtggactggaggtggcgggggtggcggaggcaggtctgttcggattggctgggagacggccacaggggtngcnctnatggctgctggtgttttccaacggccagggncacttttggtcanttgtggaagcaggggtgaccnacttagaggaatggttcaaatgctcctggctagaggtact

SEQ ID NO: 437838 - DNA, 481 bp, Homo Sapiens
ttcggtaaagaaagtcagatgtattagaaaaagtatgaaagggtacagtgggtaggtcagcaagaaaggagccgactgcaaggaaacaaaggcttgctggagattttataggatggtgcttgtgctgtgtgccgaagagggctttgtgcagtactgataatgctgtggttgcagtgagctaacttacttacgtttttctgttagctgaggatctggtgataagttgagtacaggaaggctgtgttgtagaccatgaagaaaggcagacttacagcttatttgctttctctttttgattttcctcagttccgccggctcaacttcccctccctgataaggactctatccttcccacctttcagcattatccacccttcatgatttactcatttaataaatatttgttgagctccaggcactgggtttgctgctagaattttacatctttatgcaagagaataggtaaaagtagaatggatgg

SEQ ID NO: 437839 - DNA, 534 bp, Homo Sapiens
  misc_feature (70)..(70): n is a, c, g, or t
  misc_feature (94)..(94): n is a, c, g, or t
  misc_feature (295)..(295): n is a, c, g, or t
  misc_feature (459)..(459): n is a, c, g, or t
  misc_feature (493)..(493): n is a, c, g, or t
  misc_feature (514)..(514): n is a, c, g, or t
tttttttaacaaacatttccaggaggaactcctcagccaggcagctcgaatcctgggatcagtggatttncttggcaatcctatggggcttttnaatgatgtttctgaaggggttactggactgataaaatatggaaatgtcgggggcctcatcagaaatgttacacacggagtatcaaactctgctgccaagtttgctggaacattatcagatggcttagggaagacgatggacaatcggcatcagtcagagcgggagtacatcaggtaccatgcagccacaagtggtgaacanctttgtagccggcatccatgggcctgggctcatgggtatcattgggtgggcttgacccagtgttataacttcgaccagtggaagggtgtgaaaacagaaagggggtgtcagcggtttcatatctggccttggaaaagggcttgttggcactgtaaccaagccantggcaggcgccctggattttgcatcagaaacagnccaggcggtgagagacacagncacacttcagcggccccagg

SEQ ID NO: 437840 - DNA, 1236 bp, Homo Sapiens
  misc_feature (1190)..(1190): n is a, c, g, or t
cgtggtaccgggtgccggaattcccgggaaattcaaggtgatatttgcagactggctttatgagagacaacactgatctactaggggctggaccctagattggttgccagggcttgtgtgtgaatcaaccctaggaggaaaaacctactaccaaaccagaagagcaggcctaagagtactttgagcttctagaagaagtaagcgggaaaggaagagaaagagtagaaagttggtgcatcttctcctccccaagagcctgagtataagaagttggattttaagggtgggggagctgggttggagaaaggtaatataattaaagccaccacacaacaacttaaacaagccatgttcatgagtaattgtaagtggcttctggatgagacttggcagtgtctctacatacttcctcagggagatagcaattgaaaatgtaattgaataaataaggaaaggaactgctatttggtgtgttcctctgtggacccagtttatttaatccttaaaataatatttttgggaagacattgattttgtccatttatgtggatgggaaaactgagactcattaatttgtccaatgtcgaacagctggtgttagtagagcctagactcaaacccagcttttaaagcccttgttctttactccactaaactgtaacctgtaatcctgtatgcactaacaggagttttcggtgaccttgaaaacacagattactataattactataataaatcccttacattcctgtctctagcatggtttagggagtgccaaggctcaatgtagatggggtcaccttgtcagagcatctgttcatacagaaactgggtttcctgcagaccccaggtgctgcataggattcctcaaaccctacaggatatatctccccactggctgctgtccattttgcttgttaccctgactccccctcttcagccagagcagtctttgtaactaaagctgccagcctggctcatctttcctgacaacgtgcatctcctgccctgtgatcacctttgtgcttggctcctgcccttcagcctgaatgtgttctagggagggctggaattcctgctttcggagtcctgcccaaggaggccagtcttgggttcaggcccttaccttcactcttcttcccaattctttcatttcataaaagtggccaaaaagatttaggacctgtaantttgtttaggccaggttttacagggggcagggggtttaggtgagtt

SEQ ID NO: 437841 - DNA, 1034 bp, Homo Sapiens
  misc_feature (44)..(53): n is a, c, g, or t
ggggggtttgtttgaaggcccaatggctggggtctcccgggggnnnnnnnnnntggccagcccattttgggggtttaccagccttcccttgggggggcgggcatgtttacccccgtagggcccaacgtcgctggggccccatttcccactgggcgcctgagcccagggccggggaagggcgaaagccagatgggggcaatggcccacaatcctccttgggtctgacagcccccggcatactccacaccctgggctccctttccacaatccggaggcagcgtctccgttcacacttgcagaacagccccgatgccacatcatggggcagctgcaggaggcaggtggagcaggcccccacagtcttctgttacctggcaggctgcacactccccacagcccacacgcttaaacattctctgttcccggttgaaggcaattctctgtgctcgacagtctttgcacaacgttttgagccgctgcctttgggtgccatcccctgagaagctgattccacagttctcacagcacccaggagcagggaatgaagctggggctgtgtcagtgtcagccttggtctcatccctcggggcctccttcctgacctcaccactctggggtccaacctgacgtttccgagtcttggctggccttgaaggcttctttcgcttcttgctggcaaccgccacgggatgggccttgggggctggatagcacaagatgccttgtttgaagtcgaagagggtgagatcacacgcagggcccaggtatcgagtcagctcaactttgcttcggatcctgtctcctgtggggctctggtaataggtgtctgagcgtccacaggtggcccctgacttgcgaaagacttcgcggcgcttccagccagggcccagggccgggcagtccagccagtcctcagccatggaggccacaggaagcagcagtagccagtttggcaccaggccggtatcttccgccactctaggcccgtggacccatggcgagggtccctccctcgtccgaattcgccacccagc

SEQ ID NO: 437842 - DNA, 2329 bp, Homo Sapiens
  misc_feature (757)..(757): n is a, c, g, or t
ttatttattcaattacattttcaattgctatctccctgaggaagtatgtagagacactgccaggtctcatccagaagccacttacaattactcatgaacatggcttgtttaggttgttttgtggtggctttaattatattacctttctccaacccagctcccccacccttaaaatccaacttcttatactcaggctcttggggaggagaagatgcaccaactttctactctttctcttcctttcccgcttacttcttctagaagctcaaagtactcttaggcctgctcttctggtttggtagtaggtttttcctcctagggttgattcacacacaagccctggcaaccaatctagggtccagcccctagtagatcagtgttgtctctcataaagccagtctgcaaatatcaccttgaatcctacagtctgtagaagcctccagtctactgctttctagctccaggttttttaaggtctttggaccttggcaaccagactgctgtatctcggaagcgggttccacccaggctgaaaatctccgtgatcacgggtgtgccagcccctcctgcctcttcctctggggccaatttggaggcagaatcatccttgttctcctccttgtcctcctctgggtcaggtggctcttgcttcacagaaggcaggcctgggtctactgcctgcaacagggcttctgtgaagctgcaacagggcccggcacctgcacaggactgcttgcgcctttcccgtaaaaacacnaaggtcatgtgccaggcgggggcagcacaaagccacccacctgcttcctgcttcgttggagcctgggtatgttctggttgggctgtgcgtgtagccaagttgggcttcaaggtagggccaagatggtgccgtcgggtcagagctgggcctctttcgacgacggtaaggtgggggcgatcctgccccatcctcagactctgaccagacactgggcagcagccgcttcatggcaaactgcaggcattggcgccaacgacacttctggcgcttctggttgctgcccccgaatttgggcttgtcgcagcagaagtcgcagcggccacagtccatccgccgtaggcaggctgcacaggccccgcacttgcggttctgccggcggttcgtgtagggctgtagctcgtcctcgtctacacagtaatagatgaactcggcaggtggcgagggggccagggctctggggtgcggctctgtgggctctggggactgtgatgggggtggtggaggcagtggctgggctccggggcgccgcctggcagccatcttggagtcacagcctcccttgcggcgggcatgtttaccagttgggggagccacagccaggggagtgcgtcgctgacatctctgatgacggcgacgcagacggtgagcaaggtgccgtaggcaacgtcgctggacacatttccactggcgcctgagaccagggcggggagggcgaaggcagatggggcaatggccacaatcctcttgggtctgacagccccggcatactccacaccctcggctcctttccacaatccggaggcagcgtctccgttcacacttgcagaacagccccgatgccacatcatggggcagctgcaggaggcaggtggagcaggccccacagtcttctgttacctggcaggctgcacactccccacagcccacacgcttaaacattctctgttcccggttgaaggcaattctctgtgctcgacagtctttgcacaacgttttgagccgctgcctttgggtgccatcccctgagaagctgattccacagttctcacagcacccaggagcagggaatgaagctggggctgtgtcagtgtcagccttggtctcatccctcggggcctccttcctgacctcaccactctggggtccaacctgacgtttccgagtcttggctggccttgaaggcttctttcgcttcttgctggcaactgccacgggatgggccttgggggctggatagcacaagatgccttgtttgaagtcgaagagggtgagatcacacgcagggcccaggtatcgagtcagctcaactttgcttcggatcctgtctcctgtggggctctggtaataggtgtctgagcgtccacaggtggcccctgacttgcgaaagacttcgcggcgcttccagccagggcccagggccgggcagtccagccagtcctcagcgcatggaggccacaggaagcagcagtagccagtttggcaccaggccggtatcttccgccactctaggcccgtggacccatggcgagggtccctccctcgtgccgaattcgccaccccaggcctcgcttc

SEQ ID NO: 437843 - DNA, 1118 bp, Homo Sapiens
ttttttttaagtgggacaataaaaatttaaaaataattttaaaatagaacagcttagagatagaaactaaattatttccaattcctactgtgccccaaacaaggttcacaaaagggctgtcctcccaacaattttctgaattctatatattcagcattaaattccatgataaagttggaaatccattcaccatttgtaatacatattgatgcatttaataaaattgcatgggccgtatcttttgcatttctgtatcctagtattaagtacagtgcctaccacaggccaggttctcaatacttgaataaatgacacaaaaatagccaggaccagcaagttttttctgggtgggcttcatagaatctctgtacttgctggaatcaccatgaaatccatggtcttcagctttgcattttcagcaacatagttatattgagttatcctcaggtgagcagtgagacccttgggagcggattcatggtagggtggctttgtaatgtgtcaccttggtgaggctatgtttcccggaactctcttccagtaagatgggccacaagagacattttgcttgataaccggagggcggaagtgaagcagcagcacattgtttttacacttggaaggttggtgctggggcaccaggcgttgttgcagttcacacgttgccatgtatctgctagatcacctcgttggtgtgggcagtagtcaggcctgcagccaggcctgcagctgctccaccttccccaggatcatcctttcagcttctctaattcctgggccagatgcatatttaactctgtgaggaagggcaccagcttcttctgcaggacacccacatcatcgaagctggaggtggtgagagactgacatgggttccaggccatcctcgtgggttccagctcgtgctcgtgggctccactgtgtcctcggtctcccacactttacatccatcttcccttcccgagtgcctgccctgcagacttcaagctccagcattagatgcaaagacaacagccttacagagactgtttaaccagctcccacaatggcatgcggtcagatccctataataaatccctttaaatacatatatacataatctttatcttcagtggttc

SEQ ID NO: 437844 - DNA, 1348 bp, Homo Sapiens
  misc_feature (62)..(62): n is a, c, g, or t
  misc_feature (64)..(65): n is a, c, g, or t
  misc_feature (68)..(68): n is a, c, g, or t
  misc_feature (70)..(89): n is a, c, g, or t
  misc_feature (646)..(702): n is a, c, g, or t
  misc_feature (719)..(719): n is a, c, g, or t
aaaaagggaaagggtttttagaaaaagcttttttcgagggccggaggggggcccgacaaggntnnttntnnnnnnnnnnnnnnnnnnnntttcaatataggctttaattcaaaatgcactcaaggagagggaagggagggactaggacactgtttagaaggggtaattacactaaatacactgaccttcgctgaaaaatagaagggacaggtggctacagaagccagctcttaccccttttgccgtccccaccccataccccaaaccatcttggtttcttgactcctctggtccagtaagaacctacaaacgtgtttgtttgtttttgttttaacacttgaggttgtgattaaacaatccccaactcgtcttcatctcttttttctgaagttgcttttattaattgaatttttaaaaatctggtttcatctccacgtgcattttcccatcgttcttcagatttaggagaaacccacggaggcgcggcgctctccacagccgtctctaatgaagggaagcgtgcctcgaagtcagtcccggtgcgccccctcctcccccggcgccccttcccaaaccccgtcggatctccaaaggctggaataggcggtgcggctgtagcccgcgctgtaatcgtaggacacctgannnnnnnnnnnnnnnnnnnnnnnnnnnnnnnnnnnnnnnnnnnnnnnnnnnnnnnnnaaatggcccggcccgtncctccccgccgggagaaattcgcagcggcggggtacagggggctcaagggctcgttcaaggtcaagccgccgcggggggcagtcagggggctctttttggtcggggagcagcccgggacgctccagggctcggggtacaataggtttcccaccactgccggcggcggctcaaagaggccgggctccagctccgggggtccccgcagtacggaggctccggcggggaacacgtcgagaggctcggcggcaagcaagactgccgcctccgtgccggcgccgtagtcgggccccagcagctcaaagaactccacggcctccgcgcccttctccaggtcgcccaagctcacgtccggccccgacgggccacacccgccgccgcctgcccgggacggctccgtgaagaaggacggaggcagattgcgtgcccgcagcgggaccttcctggcccctgggatcgccgtggcccccgcggggcctgccacgtcccctcccgcgcccccagtgcccgcacctcctagcccggccgccggcgcagccacctcaccccccgccggctcggcacccccggggacgtggcgcagcgagtcgaagagcgcggccagacttcggctttgcaagctggcggccgc

SEQ ID NO: 437845 - DNA, 2235 bp, Homo Sapiens
  misc_feature (558)..(558): n is a, c, g, or t
tatttttttccctgggatttcgaaccaatatactcctagcctgaacaacatagaacatttcctttccattttggtagaaattattttttaatgtaaattatattgtgttctatttgtttccaatgtcttgaaaagttcaatcacttctccaaattctccgaataaacataagaaaatatctctccccagcactacccggtcccccagtatcaccatcctaaaggcacttccacttcctctatcatcagggaaggagtgtgcagttctgatttagctcctcagtggagtaaagggaatttagaggaagggggatttctgcagaaattgtcagttacacaagtaagttcctcttggttccccgtttcatcaaaagtgaaaaactgttcacaggagtgcccatgtcccctgtttccctatgcatcactagagccaagaggggactccgccagcaaggcaccctctgctctgtcccgcagatcacagtccccgactttcaccccattgtttgtgcaatgtgcagaactggagcccaaagcagcgggcttaggatcactctcncaggcccggcgggcccatagactccttccttggctgggaagaggggctttcgtgaaagcagagcttgacaagccccagtactgtcatggtcaagatcacccaacactactactgctgtgctcacaaatatgaagaccacggcagaggaggagtcgaaagcctgaggagtggcagaggaagtcgtagaattaaacttggaaatcacgctccctgatggggtgatagtggcctttgactcggcttgaagggacatttgaagggtagacatcgtgctctgtgatccccatcgaggaatctcaggaatagatgttactgaattgtcttgttcagggacaagtggtgtctctcccagcttctcgtcgaccctgattggccatgttctctgcggcacggggctggttgcagtggccggcgggcgcctggtgggcaccccggtccccccaagggtcggctgtccttccccactggtcacacaagagcggccgtccttccccagctcgaagcccgtagcacattcgcaggcaaagcctcccaagtcgtctaggcagttagggagctctgcgcatttgccagcacggaggtacctcccggggcagggacacaacacatcgcccgagagtttgtcccagcgagcgccgatttcgtccgcgatgcaagtaactgagatcgggagctgtccccggcagagcgcactcacctcggtcccaggtggactgaagtccagagcggcgctgtgcagctggaagggcgcgcgatagctcaagttagaggcggccccggggcgcggcgcaggacacaagacctcaaactggtacttgcacaggtagccgttggcgcgcaggtggcatcgcatctccttccagcctgcgggctcgaccccaccggtggcctggagtaccgcgcatctccgcgcggtgcaggagcgttggggctcctccacccactgcagcgtgtcgctttcgagaccgccggggtcggaggacagccaggagaaaccccgcaaaggctcgttctccagggtgcagtgggaacgcctgcgctccagtgcgacccagaacagcaggtctttggagccccctccgggccctgggcctgcccgcaggagcgcgagcacagcgcgcagctcggcgcccgcacgcacggtgctgagcgccccacctcgcaggatgcaggcctcctcggccgcctgccgcttcatggtagcgtggtgcaggctgtagcaggcccccgaggccgagcagccagcacggtcggcagtggggtgttcgccgccgcccggcccgggccagagcgcctgccagaggaggcacagggcgaacgccggcctcattctctgaggccccgcacgcagagctgctcccaacttggatctgtcccgctcgaggacgcagagctgtgtctggagcgcggtcaccgccctctacagctggcttccccaacccggttccccctcccttcccctccgccctcgctcccgacggaccccccaactgccaagaatccccccgcgggcccagcggccaacagtttcccttaggccgcgacaggaaatgtgtgcggagcgctgccaggcccggtgcagccctgagttattctggggtcaggaacacagtggcgccgggtacaggggacgcagtcgactagaaggtcaaacaccctgcttagagcaagaggaga

SEQ ID NO: 437846 - DNA, 606 bp, Homo Sapiens
agatcctttccatccaaatgacagtttgtctatgatcattaatttgatttgccaatttttgatcaatactagattgtgaattccacaatcttgtagaattcttttgccaatcattaacaaagtttaccgactgaacagaagagtgcaatgcaactcctgccacagcacccgtagctgtgactgcaattaatcccataatcactgcaattaaggtaaaaatgaatcttttggatctatttaaaatgccttttaatacttcagtcaaaatatggatggatggtgaggcctcccatggtcggtccatggacacagggatccacacgccctctcttgctctcaccagcagaatacggtgttgccaattaaaagttgaatcaatgcaagtaagcaatctacaattttcacaggttatagtttgggagtctggtttaataactatatttcctacaactagcatataagggggctttacgcaactttgtaaaggaactgttagactggaatttaggtcgatagtataaaatggcttacaatctcttgtttctaaagtttgatttccagaccaaattctaatgtggtgtgaggccacagtaagcctccataatt

SEQ ID NO: 437847 - DNA, 363 bp, Homo Sapiens
  misc_feature (59)..(59): n is a, c, g, or t
  misc_feature (66)..(66): n is a, c, g, or t
ccctattaaaggaaaatcactagagttaaatattaagtcctttaaggttgtaagttgtntgtaatntattatatactctgtacatgtggttgttttagcctaattgttatttgtgaaaattaactgtctttatggtggttccatctagattacattaacattaatgttttaacctgtgaatataatgataacttacttcaaattacctgccaaattcaaaggttaaaatattgtaaggtttagaaaatggtagaatattctgaagcactaaaccatagttgttattttatttgtacacatgatatgaacattgagcagttcttgctcacccatctctattattctgacattctttgattcatt

SEQ ID NO: 437848 - DNA, 1229 bp, Homo Sapiens
caacgtaacggtcctctgtggcttgggcaaggcaatcatgggctagagtcagtattatcggcaagaagctccatctgtggtttcctcatcactgtgtggcctaagtggagacacaggccctgccctctgcactgagcgtcacggcaggccctccatgggaggactgtggtcaggtggctcatgcagtcaccggagctttgcttcaggacatgtgtgctacaagtccaggctggacaaccccaagaactgtgagggttccagcaaagcggggtgggtcccactgagctcctcaaacacaagcttcccgggaccccagaccctcatctggaaaaccacacaggcccagcccctgcgatgcctctgtgtaagcagggagcaagggtcacaccacagccacatctgcttcattcgggggatccaacttggcatgtcttggtaaaggcattcatggtgctgcccaggacaccagcaagcactgaagtcctcacaagttacttcaggagtttaaccctgcacacgcccaacagaagggttttcaccagctctgagcctggacacttacaggcacactgtatgttcaagtcagttattctgtctccatctagaaaggcctttggatactcttaacaatactggcaatctatactgagaataaaactgaaggccccagcatcagtcaattgaaaagagcctgcttaattgatgcaaccaaacttgcttcctaaacctgactcagttcaactctcgtatgatttttactatctatagctcaagtcactgtgtctttggatgctccttgtttgggaaaaagtttaacttaggtttatacctgattatattctaagagaaactgaattcaattctaatgatctccaactacagtagaaacttgttcaccacaggtacttatttccatctgcccaccacatgatgtgtgattctgtctactctatttcttcaagctgtgcaaagggaaggaaatgcagcaggaagtgttgacctagcgcaatactgaaagtttcccccacttgctggcactactgaaccccacattagaagcctgttcactgcctgcaccaggacccccacctttgtgattgcaacaagttggtcagcaggcctgcctctgcatccccttctccaggtcctgtagctttccttctcaccacaggaatcagaaatccaccagggattccagttcccctcgtgccgaattcgccacccaggcc

SEQ ID NO: 437849 - DNA, 363 bp, Homo Sapiens
  misc_feature (173)..(173): n is a, c, g, or t
  misc_feature (176)..(176): n is a, c, g, or t
  misc_feature (209)..(209): n is a, c, g, or t
  misc_feature (242)..(242): n is a, c, g, or t
ttttttaaaagtagatgttggcgcagatgtggtgaacagggaacacttctacactgctggtgggaatgtaaactagtacaaccactatggaaaacagtgtggagattccttagggaactaaaagtagaactaccatttgatccagcaatcgaactactggatttctacacagnagnaaagaagtcattactcgaaaaagatacttgcanacacatgtttatagcagcacaattcacaattgnaaaatcatggaaccaacccaaatgccaatcaatcaatgagtggataaagaaactgtagtatatatatgcagccataaaaaggaatgaattaacaacatttgcagtgacctggatgagactg

SEQ ID NO: 437850 - DNA, 362 bp, Homo Sapiens
  misc_feature (185)..(185): n is a, c, g, or t
ctaatcctcaatcctatcccttttcctcttagccatcctctctaatttgtttaacctaagcctgtgtgtcctcagaaaataggttatgctgttggtgtgtgtggttggtaatctatatacatggtgttatgctattgattttgtttggtaatctccctttttactcaatactatatttataaganccatttaagtggttgtatgcctctactttattgcttctgactgctgcatggtattccatactcatgtccaccacacttactcattctccctcttgatggacgctgaagttgcttgcctccaacaacctctactgcaaacattgcagcagagacatcttatatatgcagcctaaaccc

SEQ ID NO: 437851 - DNA, 599 bp, Homo Sapiens
agaggctggggcttgagttagtcttgctatttgctttcagcacagagacaagtcctggcctgttttaggtttgggggtggagaggtccgtctatttcgcagaatctaaattagtaaagaaatgcttctgatctcaggttcatgctccctgtgtcttaatgatcccttcaaagggcacttacttacttacttacttaccagacacatgggactggtcgcagccagatttttattcaggaaactgcccttcctgcagcccttccctaacagagcagaatgattcctaacaacagagaacgaatgctcctttgtttcgtttcagttgcttagttgagttgtttagttgtaagagctgatgtacagccagtgccaggcctgtgccgaggctttggttccaatgttcttgctatccactcaatagtggcctcgctcactcaaaggtcagcctacccaatgaccacgagacctagaagatgtgtcttctagacaagcttcaagatcagaagcttgctgtctatctcatgcccccacccagggctgccaacagggctgaaaggggtctttcttcaccctgacacgtttttcctgcgtctgactctc

SEQ ID NO: 437852 - DNA, 493 bp, Homo Sapiens
  misc_feature (24)..(24): n is a, c, g, or t
  misc_feature (34)..(34): n is a, c, g, or t
  misc_feature (158)..(158): n is a, c, g, or t
aaagggcaacaagttcctggaaanggcaaaaagntgctggggccaagcccgctggggttgcacagccccttaggaggcccagcttgcagtagctgggaaggaagaagaattgcgcctcaggtacttgaggacatacagcgggaggcagctgaccacgntgatcgccgacactttccacaggaaggtcacggtggtgataaaggcaacatcaaaatattcattgagaaaagcgagtgaggacacgtagcagcctaagctgaggaactcggccaccaccatcagccagtgccacgtgcggacggtcagcgccaccatcagcagctcggtcaggatcagtgcggtgaaggagatggccaccacgtggacgaactcagactcgaagagcaccagggccccatacatgaggatgccgccttggtaaatacttattaaaacccagatgaggaaggttttgaaggacaaggatcttcccttggtgaggttctctgacgag

SEQ ID NO: 437853 - DNA, 470 bp, Homo Sapiens
  misc_feature (1)..(1): n is a, c, g, or t
  misc_feature (396)..(396): n is a, c, g, or t
  misc_feature (423)..(423): n is a, c, g, or t
  misc_feature (442)..(442): n is a, c, g, or t
  misc_feature (458)..(458): n is a, c, g, or t
natgagccactgcgcccggcctgcaatctataatgctttggttttgttttttccattaaaagaagaatgaattatgcccggtatgcaggtcaaacaattctgcagtcaagaaaacctgagatttggagctgggcccctgtaaatgcacagtgatgtttccgtgggcaagcttaggaccgtctggtggcctggccagggtctgtggctgtggccatgagggcccagggcttcttggtcagctcttacctttttctctgtttcctgccaacagatgttgcctttatcaccaccgtgaccttcctgtggaaagtgtcggcgatcaccgtgggtcagctggcctcccgcttgtatgtcctcaagtaccctgagggcgcaattctctccttccagttactnaaagttggccttctaagggggttttgnaaccccaagggggttgggncccaagaactttttgncctttccaagaa

SEQ ID NO: 437854 - DNA, 948 bp, Homo Sapiens
  misc_feature (927)..(927): n is a, c, g, or t
ttttttttgcttttggtctaagtatcagattcttttattgagctatggaatttgcatatctgtacatttagtaggcatggttagaactcttaaggttttaatccacattatctcctctttcctgagtttctaagagccatgattatgaagcctcagcagtgtttttaacaaagtacactgtaaattgtaaccagaaggcagcggctttaaaggagtgcttatttgcctaaatggctgttgacatacttaatagttttgtatctgattctagtatgctaaagcatttcagtattatgagaatacaatttacacactggatccccttgtactttttctttcagttgtcaaaatgttaccattattgctgggattctaagggaatctctacaaatgcctctgatgacatcagggaacaattgggttctaatcctgtggactctcttgtgaagaaagcatgagactccttcggtttagaagccatatctttcaggtcgtcagaggtgcccaagccacaccaacagagaagatagtgattcctgcatcatgtgcagcagctgcagggccttggacatcatcataggactgcccatctgtgacaattactaggaagttcttgttggggctctcccttatagggccaaacacatttctaacagtgaaggaaatggcatcaccagtagctgttccaccactcatatagcggatgtttctgatgacagctaggacattctctttggtgctatagtcagtgaaactgaactccgttgcgctgatcataagtaaactgtacagcagctatcttggcaccaatgtccgagatttcaaaagtcttggctatgttggaaacaaaattcacgcatgaggcggaaattgctatctccaaacactgctggagccatcacttagaaaggcaatgttcactgagtnataacaggtcttgctgcacat

SEQ ID NO: 437855 - DNA, 571 bp, Homo Sapiens
  misc_feature (533)..(533): n is a, c, g, or t
  misc_feature (540)..(540): n is a, c, g, or t
cacacctggtgccctcgcaaccagcaccctcacacctggtgccctcacacccagtgccctcacacccagcactctcacacttgcactgtcctcatcccaactctgtggttcctctggggaatcactgtggaatccctcatgggaggatgttttcaaaagaaacaacagcccaatgaagggtatttgaggatgagaagcaggaaagaagtcagtgggtggctgagttgtgtcctggttttgcgtggccatggaaaatcaggtgaaggacattaaatatcttgcagtggcttctccattaggagcatgaaatgaggaaaggggctgtcctcacaggccagccaagagggatgcctatgccaaacagaaagactgacagtaaacagaatccaggatgacatgactgaggtatggtgtgcagggcatggcccagggaggagggtagataagtaagcctgggtgcaccttcagaggaagaaattacagaggctgcaggcgagagagttacaaggaaggaggagcaggaagacacgagnaaaattnagataaactcaacatctccagcctgggggaa

SEQ ID NO: 437856 - DNA, 361 bp, Homo Sapiens
tttttcttttaaacatttatttatctactgtacaaaatatttacatcatcagctgcaactgcctggccctttcacctggcctgacgaatctgcagcagggcttggtctctgccaattttccagaaacatgctgacactctcctaggtattcactcatgtctggtctccttcaaagacgctaaaaggccagaagggtagctggccccccaagtacctgggtcacaaggacataaataaaagaactggccaaaataagaaacactaatagaaaattgcccaagaaataacactctctcatctctttgacatattgtaccttttccccacactgggctagtatggaaagcagggattaggaaaa

SEQ ID NO: 437857 - DNA, 656 bp, Homo Sapiens
ccaccggggcctcagtctagagaatcctcctgtcgctattcattctctagttccagtatcatggcttcaaataccaaccaaacgcatacataaaatatgtatcttcaggctatacattttccctgaactccaggtccatatatctaattgcctaatcatcatttctacttgcaacatctgtagacaccttaaactataaggctttccttcccagtcagcctcacctgcaggattcctgtcttacactgatggcaactccaaactttcaatagctcaggccaaacattctaaggttattcttaagatttttctttctcttattcaatgtctaattcatcagcaaactgtgtgatatcgattctttaaaacatttctggaatccaactgcttcttatcacctcccttgctaacatcatggcccaagcaactatgatctcttaccaggattattgcaagagcttcctaaccggtctttcagccgcttccattgtctgccctctcacggtatactctcaacacagcagtcccaaagcttcctcttcaactgaagtcagatcatatcactctatgctccgaaccttctagcaacttctcatcttgctcttggtaaaagccaaatcctgacagtgtcctacaaggccctacctgacatgcgt

SEQ ID NO: 437858 - DNA, 1197 bp, Homo Sapiens
  misc_feature (1081)..(1116): n is a, c, g, or t
ccacaagaaaagctggggtatcgcgttaagcttgggccccctctggggggattttctaagagccgcgcgcccccgggggggataggagttaatgtacatcactttgtgtggttaccaaaaggggtctttatttgtaaaaagccaaaggggcccctggggcaacaggacaggcaggccggcttctcaggggtcaggggcatttgggcagatgcgcttgagtgggggggcaccctccgagtcctctgtgtcaccctgggctgcctcagggacaggtggcactggctcaaagacagggtaagcttcgggggcctcagcttccagcagttctggaacaggctcctccttggtcagcattgggggttcgtcggtgctgccagcagttatgcccccgggatctctctcttggcccagccgtgggggctgagcctcctcagggaccccttctgggggtccggcaggtgacacagggcggctgggctggggggtgcccccaggactgggctctgtgcccttttgcagggaaccttccgaatggaaactctggttgctgttctcatcattaagatccagcaggatgagagggccaccccctcggggactggcgcccctgccccgacgttcccggccacgggatctctctgccccgccacctgcccgccttcgctcctcctcctggggatccaccactggcacccacttgaagatacgaagggaagtgtcgcccacagtcacccatcgcttctcccatctccggaccttctcgatggtcgccatcaccttcttgatgtcatccttggcccggctccgggtctcggcccgtacagtccggccggccatgctggcggggctggggccggggccgagcccgcggcggggccgcctcccgtccggcgggctcaggctccgcgccaggcccgggcgccgcgctctcggcctgccgtcccccctggagttggccgcgccctctctcgtccccaacgcctccgcaagtccccgccccgtttcctgccagccgcgccccgccccggcctgtccccggagcggcccggtggcgcgggcggccagagcccaggcctggaannnnnnnnnnnnnnnnnnnnnnnnnnnnnnnnnnnnttggagcgcctggacgctcagcgccacactgcccgcacgccgagagcgggagttggggacagacgcgcgagttggggacga

SEQ ID NO: 437859 - DNA, 894 bp, Homo Sapiens
  misc_feature (155)..(287): n is a, c, g, or t
  misc_feature (325)..(352): n is a, c, g, or t
  misc_feature (457)..(534): n is a, c, g, or t
gggcagtcaatcccgttgctgttgtctatgtgcatgttagtgagtagggcatcattcattttccattctgttgatgggttatttccagtttggggctgttatgaaaagggctctgaacattcccatgcaccctcttgatgctcacacctacacannnnnnnnnnnnnnnnnnnnnnnnnnnnnnnnnnnnnnnnnnnnnnnnnnnnnnnnnnnnnnnnnnnnnnnnnnnnnnnnnnnnnnnnnnnnnnnnnnnnnnnnnnnnnnnnnnnnnnnnnnnnnnnnnnnnngtccagtcgctctactttctcgcctccacacggtgcgnnnnnnnnnnnnnnnnnnnnnnnnnnnntggagacccactcgtattcgcagcgccttgacgttccagatcccgggggcataactgctggcagcaccgacgaacccccaatgctgaccaaggaggagcctgttnnnnnnnnnnnnnnnnnnnnnnnnnnnnnnnnnnnnnnnnnnnnnnnnnnnnnnnnnnnnnnnnnnnnnnnnnnnnnnagtcgaaggcttggagcctgcgtcctgagggcctggaggagaggcagacctgggacagagctgaaggcttaggggctgggttcttgggatttctgtcctcttgcatttgcctgtggatttgcagttggtaatggcgttcttgcccggccctcctttgttcctccaggcagccaggcagctgtggcgtagtgaaagggcaggatgcgggataggaatggagttattcctgattcagactgatttgctctaactgtgatttggggcaagtcccttcgcctgtctagaccttagctggctgccgcatctaaaaaatggagccaataatcttttcctcgtctttggggtcatccatctttcaac

SEQ ID NO: 437860 - DNA, 838 bp, Homo Sapiens
gtagcattacccggatataattctctagaaagagaattcccattttattcatttatttattttttgcaaacaattttagaggcagggtgttaaactgattaaaatttcacaagattgacattattgcttaaagtgcttgaattggttacattttaaaaaattaaggtacagattattttaaataaaaactacaatatttttagcaacaaaataataggaatgccacacaaatacagtaactattttggttatacagaaatggaagccaaaaataaattaatgtaatactggaaaacagaaatttaattaggcagaaaagtaggaaataattttccctgacccatgccacttacatgagttcattacaatagtgctgataaatgccttgaccatataatagcaaacaagggcaaaacatttagtgcacaatattttaatacacgtgaatatacaaagttgatcaaaatgcaatgttgaaagataaaatccatctgtaataaagctacactccaatatctaaaataagccctaagctccagttagaacatagatcattattaggcatgcccatgaaattaagggtatccatgaaaataaatgcatagggatcatttctgacatttttccctattttatcttaaacccaaaatacaccaggccataaaaccaaatatgattgacttcctattcaaactaatgccctgcttgtgttgtgcctcactctctttagaccagtccatttcctatgaccacagaagtgaaaatgcatcaacacaataggaccagatgccagccccttaccaacatttacttttaaacacatgattttcctcgtgcc

SEQ ID NO: 437861 - DNA, 402 bp, Homo Sapiens
  misc_feature (220)..(308): n is a, c, g, or t
taaacatagtaatttcatatttaggttctcaaagcagagttacaaaatatgaataaggtattatagagacattttcttaagaattatggctatatttgtgcaatataaaatgtctcacagctgtatttgtacatggcggataaagtgcacaagagctgtaaaatattattatagctgggttaaagaatagttcggttctaggccaggcacagtggctcannnnnnnnnnnnnnnnnnnnnnnnnnnnnnnnnnnnnnnnnnnnnnnnnnnnnnnnnnnnnnnnnnnnnnnnnnnnnnnnnnnnnnnnncaccctctctactaaaaatacaaaattagctgggcgtggtggctcatgcctgtaatcccagctactctggaggttgatacagaatccctcaaac

SEQ ID NO: 437862 - DNA, 914 bp, Homo Sapiens; identical to SEQ ID NO: 2681
  misc_feature (348)..(356): n is a, c, g, or t

SEQ ID NO: 437863 - DNA, 408 bp, Homo Sapiens
  misc_feature (15)..(15): n is a, c, g, or t
  misc_feature (57)..(57): n is a, c, g, or t
  misc_feature (128)..(128): n is a, c, g, or t
  misc_feature (373)..(373): n is a, c, g, or t
catttcggcaccctnaatggtactgggaatgccagcagttcccaaagcctgtttaanaatttccactaccttcttgactgacactggtattaaagttagtcacaccagatcgaggaaatgtatttggnaaaaatgctggcgagcgattttcagcaagaagctgtagaaatgatggatctttaaaacatgcttctggattgaaggtagattgttgtggctgctgcaaatttactgcatttgtggagagaatcatgctggctagaagagaaggctgtccattactctgtagaagttcttgagcaatttcggctccatccagtggtttacagtaagatcgcttggataagtgcccacccagtgatctgggattagnaaaagccctgtaacacctgctacagataaatttcc

SEQ ID NO: 437864 - DNA, 591 bp, Homo Sapiens
tccctaaaaggccagcattcacctgtcaataactggaaatgccatcttttccacacgcaaagatgaccaggtcccaggtcagtgcccagtgcgctggatcctgggctcctggctctgccacgcagccccagcaccagaacatgctttcagctgccacagccttgcgtgaagtcttagctacagtgcaaatcctctatgtcattttccgttttcttagacgttcttgtccatagcttcttacacaattgtcctggaacctgcttggacttctgcatgaaatcgcactacaatgctgtgggaagagtgagaggcttctctttccttcatcccacgtctgtcagccaagcctgtggctctgccatcgagacaggtgcaggagccgagcactcctccccactgctgttgccactctcgttcctaacaggtgagcacacaggcttccaactgctctccctgaaacctcccatccattttgtaaatcaaatacaggatttgttgagagaataataaagttattcaccgatctattattgagataatgcaattaacagatttcgtaacattaaatcattctcaagctatctgattaag

SEQ ID NO: 437865 - DNA, 338 bp, Homo Sapiens
  misc_feature (138)..(138): n is a, c, g, or t
  misc_feature (202)..(202): n is a, c, g, or t
gaaggagcggggaaccagtttctcactctcctcccacttgctattgtcagaagagcgagatttcagggcagcagagagcatcaggagatcaaaagaagacactgctgggtggtcccttagcaagttttagcttctttncctgctgggagagtattccttgggcacagtgccaagtgtctctaagaaactagtcatgcctgancttaagggctcgcggattctgggtggtggatttccttaggcttgtctgagcctgccagtgctctcctctgtcgctctgatttccattcacgctgagcagtctgcactcccttggacagacccactggcattttggg

SEQ ID NO: 437866 - DNA, 863 bp, Homo Sapiens
  misc_feature (46)..(46): n is a, c, g, or t
  misc_feature (425)..(425): n is a, c, g, or t
atttgaccaccgagcattattacgtaattagagggttatccttttnttgtgaaaggaaggaggggactgaaatctcccaaagtgcaaattggagagtgtttaatctttgttctgttgaataacatcggtgtaattacaaagtcaactccaagaatgtgtatttacaatatttgccatgttaagtgctggtaattatatggttatatgtgccatgtaaaatatagtgatatcaaatattctgttgtttccaatgtctagtttcaagaggacaatctttataatcattagaagggcttattaaatcccagcattatccagggcaaactcactggtggacctggaatacataaggtaccattagtgcgctgggtgttcgggattgctgtattaggggtttacatctctgcagtattccttggaacttngccatgcttctgcatgcagattcttcactgacttgaattgagatgggcaagggaaaaggtccctggactccctcctgccatctacaggcttgtcacatctcaccaccagaaacaggcttcctcaggcttctcacctgtggccaacttcactttgtaagacccatatttttaactcttcccagggaacattcatgttgctgcagaagtaggctaaggcagaccacccacttctgctgaaatgcattgggagcctgtgaaagcacaaagctggaggctgggcagcctgcgttctcctacacggcaaaggaatctaattccaagagtctagggaaatggttgctattgtgagttcgttctgactctttctcattctgagttttcagtgttaaactaggaagtgtgacagcagggagcctcatgtctaggtaccgagctcga

SEQ ID NO: 437867 - DNA, 1012 bp, Homo Sapiens
  misc_feature (17)..(17): n is a, c, g, or t
  misc_feature (28)..(28): n is a, c, g, or t
  misc_feature (30)..(30): n is a, c, g, or t
  misc_feature (32)..(32): n is a, c, g, or t
  misc_feature (37)..(37): n is a, c, g, or t
  misc_feature (43)..(43): n is a, c, g, or t
  misc_feature (45)..(45): n is a, c, g, or t
  misc_feature (52)..(53): n is a, c, g, or t
  misc_feature (57)..(57): n is a, c, g, or t
  misc_feature (66)..(66): n is a, c, g, or t
  misc_feature (68)..(68): n is a, c, g, or t
  misc_feature (73)..(74): n is a, c, g, or t
  misc_feature (82)..(82): n is a, c, g, or t
  misc_feature (84)..(84): n is a, c, g, or t
  misc_feature (91)..(91): n is a, c, g, or t
atcacagaaccttttcnccccttccctncncnggttnttctcncnctcctgnnaganaaataagantnttcanntttcaacncntgaaagntggacttgacagacaggtccagcacacagtcaacatctgccgaatccctcacggaggtgacagacctctgggacaaagactctgttgagctgcaggggctggctactgtttttccagctgctgtggcgtgtggctctgcctctccgccagcctgggggatgcctgctgagtctgagggcaatcgcatccacatgttcccaggctcggccgccaagtcccttttgctgggcaggatgttcaatttttcatcttctccttcatcttcatcactgggcaaatcgcctgctatgtggctgctgccatcggagagactctcgactttgtccgaacaacttgaagcatcttcttcctttttggtgctgtctgcctccgtggtggctttctctttcagcttctttttgcagactttgacaatgtcatacatgtggagataactggcagctgctagcacgtcttcaatgggcaagtctttgaactggagtttcccttcatacatgaattcaagcaggagagcgaaagcgggggctgtaacaatgtcgctgttcagatgaacaatgtctcttttgtccagctggtccttgtaaaagaggtggaaatacatgctgcatgaagccagtacagctcggtgcgctcggaactgggcatctcccaccagaacagtgcagtcacaaagaaaaccctggtgtctctgctcgctcagacactgtagcaaatgtctactatggtctggaaactccatactgtcttcataacctttaggacacataaacctgattaagtcctttcctctgagtcctgctggctccaggtctgttacatcggtggaaaaaaagcagactaagagagacagatgcaaagtggagatgatgttagagaggaatgagataccttctccaccacagatccgcaacacactccgct

SEQ ID NO: 437868 - DNA, 1167 bp, Homo Sapiens
  misc_feature (13)..(14): n is a, c, g, or t
  misc_feature (16)..(16): n is a, c, g, or t
  misc_feature (19)..(20): n is a, c, g, or t
  misc_feature (33)..(33): n is a, c, g, or t
  misc_feature (37)..(37): n is a, c, g, or t
  misc_feature (41)..(41): n is a, c, g, or t
  misc_feature (46)..(46): n is a, c, g, or t
  misc_feature (49)..(49): n is a, c, g, or t
  misc_feature (52)..(52): n is a, c, g, or t
  misc_feature (54)..(54): n is a, c, g, or t
  misc_feature (57)..(57): n is a, c, g, or t
  misc_feature (70)..(70): n is a, c, g, or t
  misc_feature (72)..(72): n is a, c, g, or t
  misc_feature (80)..(80): n is a, c, g, or t
  misc_feature (92)..(92): n is a, c, g, or t
  misc_feature (110)..(110): n is a, c, g, or t
  misc_feature (458)..(458): n is a, c, g, or t
  misc_feature (460)..(460): n is a, c, g, or t
  misc_feature (462)..(462): n is a, c, g, or t
  misc_feature (467)..(467): n is a, c, g, or t
  misc_feature (470)..(470): n is a, c, g, or t
  misc_feature (472)..(475): n is a, c, g, or t
  misc_feature (477)..(477): n is a, c, g, or t
  misc_feature (479)..(480): n is a, c, g, or t
attgaacaagcgnngntannagtcttttggtanaagnaaancattnttnacncnatnctaaccaattttntnacttcagntactacaaactnaattaaattgtacatatnacaattgatagcttgaaagacaatacatcagtgatttgaaattaatacgaaactgaaatgagcaagaaaggaccacttctgagagggttaccatgattcttacgctttagagttaaaagtgacagacatacaactggaaaattatctaaattttgagagattgttctaacaaaaataattagtactaggcaccaatctagagcctccgaaagattctgaaagctgaatggaccatgctaccaccatgccaaaagagtcatatcacttggcatttgtatatcctttccataatgtggatttgtttctgatgacatacttctaaaatgcagttcaatgctactcggtttntncnatgtnccntnnnntnannttaacaataagcacaaatgtccttatgtcataggctttgaaagtgaaaactattttacttaaaaaatattctattacttcaatgtcatgtctgttgaacgaggaactcaacatgcttattttcctttggttccaagaaaaacccaagtctaaccaaatgtatgccacaaggaactgccaactgggttaaagcttggtattttcctggttatcaccctatttcctggtgtaggacctggggtttaatagagacatttacataaaaaaggtatttggttaaaacaagaaatatgcatgctcttccttaccaccttcctgggaaagaactgcttttttttctttctttctgtgaatcttgttcaagacatcctgtagtttagatatatgggctgcttcttttttaccctcaagcttttaggtgacacttataaaggtgagcatatcattctataaaatggaagatgctcttggcatcctgttcttaaacagattagaactttggtaaataagacagattaaagatgtactaaaatgtttgaattaattttggtgatcatgatgctattacaaaattagaatcgcccaaagcaaccatagtataaaagttctcatctgcctacaaatttaaaactttagttcaagcttctggcttccctagttaatttctctacctacaattcacacagtt

SEQ ID NO: 437869 - DNA, 402 bp, Homo Sapiens
tttactataacgttaacagtaattatttaaattattagcacatggacactgcagcgtaggatcaaaatgcattcaaacaacgggatggaatttattgccaacaaaatataatactaaaatcagttttgcacttccattgtttttttacacatgtcttcacacggacattttcatgtttcttcccaagcttttgccttccttttcacctaattctttgtcatttttgttgctgttggggtcttgcataagcatgctgatgttttgtaagatcagcccgctgtcccttatgatgattcccttcagaattggtgcattcaatgtctttggcagaaaatcctatgtaatactggcttgtgtgttaagctcattcccatcatcatcaattggagacgcttacttaag

SEQ ID NO: 437870 - DNA, 1577 bp, Homo Sapiens
  misc_feature (1207)..(1207): n is a, c, g, or t
  misc_feature (1370)..(1370): n is a, c, g, or t
gataagcaacttttttttccatttatttgaaataatatacaagaatatagtgtgcaaaatttaggggcaacatcatgaagaagtgtgatgaactgaaatcaattttacagctgtgattcctaaccagaaacaccacttggtaagtaacatgaaaagccatgattgtagctcagagcaaaagcagctgtattgccaatgtatttgctctaattttagacagttggaggaaaattaaagtgcaagtgttgcactgcagtaagtgcaaagtctgcccccaccataaagattatgatgacaaaatatatttaagatacatggctgaggagatacagaacacgaagttaaaaaatacaatggtgttgactgtttgttaatagcaccattacagtgactatatcccaatgctattaactaactttaccttggcctgggctaggtctccattggaaataataacggatggctgctgccacctggtgcatcaactcagcatgccatggtaactgcagcaggtggctcttaggctgggacaccaacaccagccacctgccccatgttctggtagcctcttggcactgaccagactaggagcgcctatgtttggcacagatgctgagccatgtggtggttactagaggaaaggccgactcccagcttctgcttcatttcatcatgtgtacaatacagattaataagcagtaaggagccaatgtataaacagcagttacatattttttaaattcccctttcgtacaatttaaaataaaacatgtatacacttctcctctctttctactgtactttagcaccacaggatatcaattttcaagcctattattacctgatagacatatatgaagtttggaagaaaaataaggcaatttggtttaaaatgttgatagttttagcttaatgctctaatggagaaagcaaatcctcactcatattattaaatcatttcaagactcaatgctatcagtatcttatggtcacacgaattgaggacaaatggtgagaccttgatcttcttaagtctttccatcaagagtcaatgtatatgcaaatatagacttaagaacataagcatcctggtttaatgttgttgtgagccctgtggaaataaaattaaactcagtgaatgtttacaaatcaatacatagtaatcctatatatgaaagctaagatgtataagatgtttataaatttnctattagaaaatactgctttcttaaaggtgattttaaaaagctagctgatatctgatggctcaagcatccagaaaatgtatgcaatgataagacattgactaggatgaacagaaaagggatacaggaaaagtccgaacacatgaaattctaaattaaccaagnactgccaaaattcagttcagccaccctctcatctgactactgactgaccactatttttaaagaaattgtgaaaaatttaaacagatatgacctgcattttactaagaaacaggcacatgtacacaatgaatttaaaacatctttggccagccctcctactataaaaatattgatatcttcccttcatctttcaatgatacttcaaat

SEQ ID NO: 437871 - DNA, 932 bp, Homo Sapiens
  misc_feature (192)..(207): n is a, c, g, or t
aacacagaaatctgtttattaaaccaaacaaaacagagaaaattataccagccctcaatttttgaattttcatttaaataagcaaactctaaatccacatcttaaaagatgtttgtgcagctatgtatttccaaaatactcatatttcaataagatttttcacattatattcaccaacagtatcacaaaagnnnnnnnnnnnnnnnngtttacataattgtaaggaacagtaattctagaaacactagaagaaaaaagcatagcaatgtccacagttacaagaaaaagtgcacattactcggtcacaatcacagtcattacttgaaaaactatatgtaacaagtagataagaaatatcactgatgcctcaaactcattgtcaaaaactgaatgacataaattttacatgaaataaggcaaattcaggaatgcacaaagaatttgtaatccaaccaaagctaaacaacagaaaaaagttgtataagaagcatgaactaaagtacttctccctaaatatttaaaaaataggcttgtctcagtgcacaaagaaaacatcactcatgtgtatcccacactataaaataagaaagaagggtaaagtatgggggataggagggcacagttcattgtaagttgcagctgcatccgctgagagttccttacattatttttagctagaactgaaaattatacaaatcatatcaggagatgtaatggtctttttggaaactatttctgaaagaaatgaaaagaaaactacacacaagagtgcaaattttcagattgtcacttgcaacctcttaacattcagtcatctacatccaggtgctgtcaccgggaatcccggaccggtaccaccttctttttggaatggggtgctggtgtgggtcgggccggttgatgtccgtcgctcgtgggtgggggccgtgttt

SEQ ID NO: 437872 - DNA, 660 bp, Homo Sapiens
  misc_feature (24)..(24): n is a, c, g, or t
  misc_feature (39)..(39): n is a, c, g, or t
  misc_feature (63)..(63): n is a, c, g, or t
  misc_feature (68)..(68): n is a, c, g, or t
  misc_feature (88)..(88): n is a, c, g, or t
actgttgggcctcccctcccaaancgcctaacaaggccnccacgatctttaaatacctgtgcnagctntgtaaaatggagcccagganactcctattttgaaagttgagattccctatccagtctgggggaggaaaaattatccaatgtagcatggatggtttcactttcttgtccactcagacacatgctcatacttattaaatggatttattggatgcttcaaaagtcctgatgtgtagtagcacaaaagttccttgtaaaaaaagaagttgcaaaattataaaaatttctgcagcagttctggctctggatgacaaagctcattctgattagtagtttttttgacatgcacagcagcttcccctataagtcctacgttcggagggttccgtttagacaacaggaagttggaatccaagtttaaaaggctctctgctgacaaaatgtggtacatccatcaacagaattctactcagcaataaaaggaacaaactaccaagacgttatctgtcatggacaaacctcaaaaacattagctaagtaaaaaagccagacacggctgggcgcagtggtttacgtctgtaatcctagcacttttggaagccgaagcgggcagatcacctgaggtcaggtgttcaagaccaccctggcgaacatg

SEQ ID NO: 437873 - DNA, 331 bp, Homo Sapiens
  misc_feature (318)..(318): n is a, c, g, or t
agatcatttaacatttcaaatttattgatatttttttcacagatataaatatcaagggttacttctctctagaaagacccacagctcatcagctcaagcaagttagtgaacaaggaactggctacagctaggaaacctgatccagctacctaaatccaggggaagagagttatacagatttattccagctatgatagggttggtctaaagaacacatcctcccttgagtaaagtcatagcactattaaaagttaagggaagaaagtaggccagggagtgctcaaagtgaaaaattcaaaggggaacaattctattccntctggaattcagg

SEQ ID NO: 437874 - DNA, 528 bp, Homo Sapiens
aaaactccattttctttcatattgataggcacataatgtgactttttcccccaagaaatatagtacacagagctctcatacatgtttcacaaaatcatttccttcaagtaggattaagtactagtgttctgtggaacatagtttccagaaattttggagtaaaggtactgtctcccagaagacctctgttaatgtgaaaatgttacctaagaggagaaacacattgtcctattagcaaaacctaattttattatagcacttaaaatagtcttcttcatgttacattttactgtttacaaattaaaaaccatgtgaaatcttgggtggacaagatgtattattctagatgattaatgactaattaatgacatctgcccaatctgagcaaactggacttggaggtacaaatcttaatctatgaatagagtgacattacagagatttggttaaaaataaagagttgtggcaatacttacttttattttgtggaaggtgctgtggtttgaatgtgtcccccaaagttcattt

SEQ ID NO: 437875 - DNA, 810 bp, Homo Sapiens
  misc_feature (785)..(785): n is a, c, g, or t
aagttagacatcatcttaagttacaacaacagaatccttcccactacttctacaaaattttgtacatgaaatatataattatatagcacttttatagactgaattaaggcaacccctttcaaaacttccagggatctacttgaaaggaaatgttttatagccatttgtgagctaacaaaagctacagtttactgaagtttacttcaagtcttaattgtctacataagtgtattgaagagcaatatgattagattatttcttaatagatatcttcttttgtaattttaaaatgctgttacacagcgttaagttatagaaactagtgtgtaaacatgttgcttcatcaagaaaaagtacaatacagggtgtatatttattttttgtgttataaagtttacttttagttgctcttctagagattattaggtaataaatgtgtatatactgtataatttgcaatatacccaggaactgatttaagatggaattgtgtgtgtgtttgcttgcacatgtgtgtgttaccattctgcttgcatttctaatagtgtttcaattttagcaacatataggagcaagttttccagaatgtaatatgaataggagaaatagggaagcagtaaaacaaaatttaacacaagcttgtgtctcttttcctctcatgtgtccaaaagctaatctctttattcactaaaaggaaatgtgtataagcctaaatcccctttggctttttaaaaacattttgtgatatcagtgacaatgcagttcttctagccattaatcttgtncccctgtaagaaatttcacctttct

SEQ ID NO: 437876 - DNA, 992 bp, Homo Sapiens
  misc_feature (166)..(200): n is a, c, g, or t
aataaactttattctatattacaaataagttttttttgttctgaactgcaaaataggaatgccttatatttacatacacaggtatacaattaattataacaaaggtacagaagcttgcctttaccaagttacaactgggctccaatttaaatagcacaggtttccnnnnnnnnnnnnnnnnnnnnnnnnnnnnnnnnnnnactaggatactcttctttaaaaatcaaaaccagaagaccctcttcttagagatctcatccacatacatttgaggctcattttaacactgttgtctaaagatatgctttgctttgttctaacaaagggtcaatgttcgaggtgggagctttagtttgaaacagaagtgggatggggctggaagggggtgactggaacagagataacctgccctacctccttcaacggcttctctatgtgactcaaagacccctgccagttccttaaaccacccttccatcctgtttctccccttctctagcatttgaagctcaactctgggtcctctggctgggccaaaacccctgcatcatccccacacgtcggctcgctgagccattgtctgttgtggtaccctggagttgctggttgctatggtaactcagcaggaccctgctggaagagatgggctggccccttacatgctaaagtggggaggagggcagtggcatccaatccttccttcccacctcagggcctggaggccttgttcctgctcaaagcagccaacacacgactaagcaaagaccgtatgtctcaaggacaccaggccaaggtagggagtggtgaggggagggctgtccattctaaaacacattttaagaacagaaggtttaacaagtcaacaagctaactagaacgtcggggagggagaggaaaggaggacagacagatgagcacgtgtatcccatcttcgtcctgtgcctggattgcggctgacttctgtgcacgaaagtgttccttagtcctgtttg

SEQ ID NO: 437877 - DNA, 328 bp, Homo Sapiens
  misc_feature (196)..(230): n is a, c, g, or t
aaatcccaaactgcatttttattattttttaataaactttattctatattacaaataagttttttttgttctgaactgcaaaataggaatgccttatatttacatacacaggtatacaattaattataacaaaggtacagaagcttgcctttaccaagttacaactgggctccaatttaaatagcataggtttccnnnnnnnnnnnnnnnnnnnnnnnnnnnnnnnnnnnactaggatactcttctttaaaaatcaaaaccagaagaccctcttcttagagatctcatccacatacatttgaggctcattttaacactgttgtctaaa

SEQ ID NO: 437878 - DNA, 1434 bp, Homo Sapiens
  misc_feature (195)..(208): n is a, c, g, or t
  misc_feature (1073)..(1073): n is a, c, g, or t
aacagcagggctgtacggtcccggaattcacgggatatcgtcgaccacgcggtcgccgaatgaggctgggacactctgctaacctctcctcatggtgctaagggtggcatgctcttgacaggaaacctaaatgaccactcctctcattggaaagtaatccactgcagtaaaagtttcagacatgcaagagagagnnnnnnnnnnnnnnactacaaattttggctcccccataaaattatttttttattagagggagtatccaagttttaaaagtatatagaattttttggttgtaagagaaatacatactcattaggatcccgattaaattccttgagtagactggtgcctaccagaaagcaaagcaaagttaaacaaaacgaaacaaaatccttcatatacaaaaagaactttctgtttgtattggcagaggtagtgaggtgattcaggtaggctgaaaatcctgggttgcgggacctcactttattccattcccacccgctttgatgtctatgcttggctctctgggctgcccctggtactgccgaatcctacacatctcttatcagctttcctcaaactttaaggaggctctgtgagggatgggtcatgggaagacccaagctttccctccgccaggattgcaaaagcaagtagacttggtctatgcagctcttcttccagcaatttctttatttggaattagaacttcctttgttagtatctttgatcttttgactcaagcacattttggaagggctcccttacaaaagtagaatttaaaacagaggatacagttaaagagcaacccaaaggacgcttaagaaaccgagaccacttcaccaaacaggactaaggaacactttcgtgcacagaagtcagccgcaatccaggcacaggacgaagatgggatacacgtgctcatctgtctgtcctcctttcctctccctccccgacgttctagttagcttgttgacttgttaaaccttctgttcttaaaatgaaaagctagcttacctcaaagaatcttgtttccattcggaaaccaacgattttgtgttttagaatggacnaggcctcccctcaccattccctactttgggcctggtgtctttgagacatacggtccttttgcttagtcggtgtgttggctgcctttgagcaggaacaaggcctccaggccctgaaggtgggaaggaaaggattggatgccacctgcccctcctcccccactttagcatgtaggggccagcccatctcttccagcagggtcctgctgagttaccatagcaaccagcaactccagggtaccacaacagacaatggctcagcgagccgacgtgtggggatgatgcaggggttttggcccagccagaggacccagagttgagcttcaaatgctagagaaggggagaaacaggatggaagggtggt

SEQ ID NO: 437879 - DNA, 203 bp, Homo Sapiens
  misc_feature (129)..(163): n is a, c, g, or t
gttctgaactgcaaaataggaatgccttatatttacatacacaggtatacaattaattataacaaaggtacagaagcttgcctttaccaagttacaactgggctccaatttaaatagcataggtttccnnnnnnnnnnnnnnnnnnnnnnnnnnnnnnnnnnnactaggatactcttctttaaaaatcaaaaccagaagaccc

SEQ ID NO: 437880 - DNA, 1361 bp, Homo Sapiens
gacacgaattaagagtcctttattaagccggcggccaaagagacggctaaagctcaaaattctttcggccccgaggaagggagttgattaacttttatatctaggtttaggaaggggaggggaactcaaatgcaataattctacagaagtaaaaacatgccagaatcaaaaaacaaatggttacagagtgataaacaatttaaaagacaaatggttacaagaagagcaacggtaccaggtgcaaggctttaaatctttcattataattagatatagggggtatgccggacacgaactcaaggctttatgttgttatctctttgagaaaaatcctgggaacttcatacattgttggtgctagtaccttatcaattaattgggctcctttgaaatgctgaggatctgcttacacaggtcaactccttgcggaagggggttgggtaaggagcccttagtgtcttgtaaattaaggggtcaactggagtttgtccggctttcccagctagagagagtcttatttacatgagaagcaaggctaggtgattaaagagacaagcaggataaaattcaaagtaacgagttagagtaaaaacaaggttagggatttcagcaagacctccaggctccagcctccttggggcagcaagactagtttactggttcttcttggagaacgtggccgtttttcgcgggtttaaactacgatttttggatgcttgtcttgttttcgttccacgcccagtctcgcagatggctgcatcgaatgctcgacgtacgtccccataccctcgccctccgtgctagccccagcgcattattgtgtggtctccaccgcgctcctatcaagagtccacttctatactattacgccacttgtgcgctcgcatttcgctctggaaacgtctaggggtttcactccaatataatcacagtgcgactgttcaaccggtgaccccgttatgttggcacccctcaccattctcctaatgtttactatagcaacgcgttcgagagcacccgtgcgcaataccctccggacaccgcatgcacctggggttgaggaataatggaataccatgcaccggcaggaatcgatatagtccacacgcacccggtacaatgttcgcacccgcccgttcatttccctttcgcgctctctcttgagtggtccacacgcgcgaagtttgtatgccccccacctgtttaattggtgcataacctcgctgctagatggcacacacgccggggctatctccaaccactacccctcccccctggccttatcctcgcaagctaacacagtaccaaacacgtacgcgctgtgaacgatgtggggccaaattgacggcattatgttactc

SEQ ID NO: 437881 - DNA, 871 bp, Homo Sapiens
  misc_feature (794)..(794): n is a, c, g, or t
  misc_feature (831)..(831): n is a, c, g, or t
  misc_feature (851)..(851): n is a, c, g, or t
gctcaatgatgtatacctgtttaggtattaaatagttgtgtttatatgcccaaaaatttgactttaggttatatgtgatatgctttggttccgatcaagcaggaggtcataagtttactcagaagtatccaaaatatgacattcaagatttaacttgcatatgtgtgtatatgcatatatttatacatgtatatgtagattgaatgtgacattatgtatttctaacataatatttggcctgccagcttataaatatgtatttaagcttttcattgattgacattactgtaaaaaatgaattatgattgagaagttctggatatttgctgtttttttcattttatatttttacctaaattattgaatttgttaaattaaaatgtgctatcactgtattgcccaaattatggcaatacactatgcagtattatttcaatactttaagaggcatctattacttcattgaacacataagcagctagcctcctttcctctgtaaataaggactttttggcatcctgatgttcctcgctgttcatttggtatcatcctggagttccatcaagactgaggattttctccatggccaataaactattgtcagcatcagctcacgtttggctgtatgacagggatatgtgagaagcccagaaataaatcacaaaaataataaggcatcttctgagtctctctgaagaagccagtgatccaaaaactaacttcatatctgagtgagtcttggtattcttgatttgcttgaagaggctgtgacatattacaaggtgtgtaatttnccaggcatatcacactgcttctgtttcatgaattgancaaattgtccagaagtaaanatttacaagattgagatttg

SEQ ID NO: 437882 - DNA, 772 bp, Homo Sapiens
  misc_feature (651)..(651): n is a, c, g, or t
cctgggaccggacaatgggctgtagccaagggtcttttgtttgtctcctcagggttctacccccggagaatacaggtcagcaactgtttattgcaatcagcaagcaggatggagaattcatgctgtgggggccaatccaggggttccctgtctgttatgagcagtggggagtgtgtaaaacccgtgggagatgggctttggtcaattaaagcttgttgaaggtgtagataagggtgttagctccttcatcagtctgagggtagcaaggacagttccactgcagaagcagtggcagagaggctttcagttgcccctggaggctctgtccagggagtggctgagttgctactggctcgacagctctggcaggggggttaggtagaggcccaggcctgcaagacttgcctagtgagaagatataggaatgggaacccaggtaacagtctggccacttttccatagggctgctgcagtatgcccagggcccgctccagtctctagtagcctcagattttccagtacctggagttatcatcagtgaagcctgtgaaacagcaaagatggcagcctaccgctccctttggaagctttgccctagggaggtatgaatgaacttgttgctggcccaaacacacctgtaggaggtggctngagaccccagtttggaggttttgcccagtgaggaggaatggcattgggaaagtgcttaaaaaagcagtctgggcctcatttttatagagcagctgtgctaatgctgaggggtccacaatca

SEQ ID NO: 437883 - DNA, 982 bp, Homo Sapiens
  misc_feature (3)..(3): n is a, c, g, or t
atnattcatatgctagtttatttatcttattattgagagataatttcatgatgacagttatcaataatcaattacaatatcaagaaattcaaagaacaaaatcttgcagagactatgcttttgtatttggatttaaaaagtatgtgatctcattttcacataccaagctgagaggccatttagactatctctttgctaatttttgcttactgctgtagggaagaagatttccaatgaactttaaatatctcattcatgtctaccattgtcgaaaaagagaaggaaaacgaggaggccaaaagaagcagcaggacagagaaaacgccacatggattcaagagttgagacaactgacagtaaaatatatgctctttggttagcaaagcaaaaagggggaaagtattgcatacatgatagatacacactagcattctaaagcaggagacaagaatgtcaagagtgtattctacccccactgccagatggaagggctattattataaatgaaaggcagcagtagtggatgccaaggcacaaaagtaacgtgtgccagataactaaaggaccagatgtaagcaggataccccaagagacaggacaggcaaacaaaatcgaagcagagagaaacagagacaagaacaaggatactcagcgaaaagataagcaggagatgaaaagactcccaataaaaatgacaatgtgaacgagacaacaaagacacacgggcacagagaaacgggaaactgttgttaaagaacaacaaaacattgaacgccatccaacagtgtatatgaatacagaacaaaaaggaagcgaaccttgattcgcatcagaaagactacgaagtcaaaaggaagaacgggacagaagacacggagaaatgaaacgagaaaaacaagagaacaaggaggagaggaaggaagacaaagggacgatacaaaaaccaacaaaaacacgaaggaggaaccaacaaaaaagaaga

SEQ ID NO: 437884 - DNA, 983 bp, Homo Sapiens
  misc_feature (25)..(25): n is a, c, g, or t
gcaaacaaaatactctgaatttccntgggcagactgaccagcattcacgcaagtgactaccagctggagaggaggaggaagcttcgctggcagaacagggatttttcaagttagcaagagcttaatttaacaggaatacacacttttggaaagacatttatccttttggcattggtaggctgccaaaaaggcggtttattgcctgcatcattgagcttgccagtttggacttggctctatagagaatgcattaccgtcaacacggcccctctggctcaggaagtgtggattctagtcttttaagacatctgtgtgcgtgcatctgtgcacgcgcacgcgtctgctttggtaaggctgtggtcactgctgctgacaaaatgaaatctccattccactggaaaacttcttttatgggaataaggggaagtcagggttaaaatgatccgttgatccaacaaatgccctaatacgacctaaacacgaagtcacccaagggattcactcaccattaacatgcttttaattaaacattttttgaagaaatacactgaatctacaattattagataaaaataagtaagttataaattataaccaagccatcggggcttgaacgtcttttcgtgtgcttgtttgccacgcgtgtatgctctttggtgaagtgtctattcaagtcttttgcctgcttttcacttgggctgtttgttttcttactatccggtttgagagttctttgtacatcctgggacacaaaccttttgtcagatacacgatttgcaaatattttctcccagtctgtgacttgtcaattggggaactgacagcatgacagtgttttcttttaacaaaccagggctctctttaggaatcctgccatttcaatcaagggaaatggggcataggaatctttaaacttcatgggcaggaaaaaggtccaaggttcagggagccgtgtaggtccacgggggccctctggaaggggg

SEQ ID NO: 437885 - DNA, 976 bp, Homo Sapiens
  misc_feature (892)..(892): n is a, c, g, or t
  misc_feature (902)..(902): n is a, c, g, or t
  misc_feature (911)..(912): n is a, c, g, or t
  misc_feature (932)..(932): n is a, c, g, or t
  misc_feature (940)..(940): n is a, c, g, or t
  misc_feature (945)..(945): n is a, c, g, or t
atttaattttttagtttcccctttgattgctgagagccattttcctttacacataactacacctgacaccaggctctgctggatgtgagtttccactgcatgggctgtgggctgggcctgtggtgcctgccgagtggtcactgtcagtgggaaacccgttgttcctcccgtcttcagatgctgagccaactgcttggacagcagccagcgcgtcatgacgtgcatgagagggggaccctggtgctcatcttctcttgtcattcatccaggcatgggctgccaggttttgtccctgctcgttcaacagtgtgagcatttgtctctgttatctaatgatgttctctgacccagcagaaatcatcatcatgatgatgataatttattaactttttggaagggtgaatagtttcctaatggttaaaaaccaactgtgaaaggaaccacctgtgtggttgggttcactcattctcagattaaattgccacttaaagaaataacgtgcatgctttaaaaaacacagtcacgcaccaagcaggcaaatagctttagtccttctcacctcacatcacagttgttctgcaaagtaaaattttttggttaagagcgtgtccagtagtaatgtgcttgttagctgtttctcaagaccaacagaagattttttcagttactttccccccatgtattttgtatgcatatgattgtccgtgataattggctacttttccattgtttcctccttaaatcgtttagcatggcatgagggccacattccatggacgggaagaccccttcctcttcagaggtcccgtggagtacacagctcctgaggttgatctttttctgccatgaggttaaaagattctatgcccatttccttgattgaaatggcagnattcctaaanagagcctgnnttgctaaaagaaaacactgncatgctgncagtncccaattgacaagtcacagactgggagaaaa

SEQ ID NO: 437886 - DNA, 749 bp, Homo Sapiens
ttcgtgtccagcaacagtctgatccttgcggtaagctatacaatgttctctgccccaggaaggggcccctgagggggtccacggtcctgcttactgtgcaactgggccagctgtagaactggcatgttgcacaggggacacactttacgaacctccagccacttaataaggcactttctgtggaaggcgtgcttacatgggcaaatccccaactcatctcgaggcttgaagtcttctaggcacactgcacagagctcatgtaaattcaattcttttactttctcttttaatataacctgtttgtaggcataaaattctttgtgtgcttgatgtcttagcctaatcaagtagcaacagaagagtaaactaaggatgaagacaaatatagcagtaccaaaaaccacaatatatatgttgagaggcagattctggaatccaatattaggcatcctgaagttgtaatgtgggaaatccgagctcatggatgaacttccctccgtgatctccaggtgacagccccgctccgccctttgtgagggactcaccctccagtcccggggccgcgccggaccctcctccgcgtccctcctcagcctggagacaccgcctcacccctgcacaccgcgcccggccggccgaggcgccgggagagtgtgtgtgtgtgggaggctggcgcgggcccgcggtctcctcagcatcccgaacccggagcggctcggtcccccaaacccagcccggggcggcggccc

SEQ ID NO: 437887 - DNA, 1542 bp, Homo Sapiens
  misc_feature (355)..(355): n is a, c, g, or t
  misc_feature (397)..(397): n is a, c, g, or t
  misc_feature (404)..(404): n is a, c, g, or t
gccaaagggtcggcattcccttcatccagccgggccagaagtatgggccattctcaaaaagccactgctctttggagccactcgagaggttcacagtggctcccttctgaggcagtggcagtgggctcacagcagctacactggaaccacagtgcacatgtggggatgtgggcagcctcctggatcactcagggacagtgtggactcagggcccactccctgctggggctctggacgggccttactggtgcataggagagggaaatgataaggaggaaatgggcttctgactaggcctttccaagcgcatctcatgttttcagcttagatgatttgatagcaggtgttgtaatcntgagggggaaatgggtgaagaagaaaacatagctactcaaanccaaganggccttatcaaaggaatacaacatgagccttgtgggcactgcctcaccaaccactggtggctggttgtgctggtatttacttggctcaagggctagctgggaaggtttgctgcgacaaagggcctagacatggcctacagagaaacccatccatcacgcagttgagggtgtggcttgaaagacctgctcttagttcccttctttaccctcctgcttgacatggagatgaggctccaggagagagagtgtaatggagttagtaagagaccctcatgaagtttcttgaggcaaacccgcaggctcatccactcctcttctctcggcagggggtagtgtcaaagtgctttggttgtcacaagacccagacacctaggttcccagtttggctggcccaagagttcttcatgaggcaaaagaagtggcagctggtgtcctaggtagagagcagccatacagacaccacatgtgttcctcctggctccacacagacgtcgtgtccagcaacagtctgatccttgcggtaagctatacaatgttctctgccccaggaaggggcccctgagggggtccacggtcctgcttactgtgcaactgggccagctgtagaactggcatgttgcacaggggacacactttacgaacctccagccacttaataaggcactttctgtggaaggcgtgcttacatgggcaaatccccaactcatctcgaggcttgaagtcttctaggcacactgcacagagctcatgtaaattcaattcttttactttctcttttaatataacctgtttgtaggcataaaattctttgtgtgcttgatgtcttagcctaatcaagtagcaacagaagagtaaactaaggatgaagacaaatatagcagtaccaaaaaccacaatatatatgttgagaggcagattctggaatccaatattaggcatcctgaagttgtaatgtgggaaatccgagctcatggatgaaccccctaagaccgggaacaaggcaggatatctgctctcaccactcttattcaacatagtgctggaagtttcgggcgcgccggtggcagcggcagacgtgcgggaccgtcagcgccctgcggcgggcggcaggctgcgggcggcgagcgtccgtccggac

SEQ ID NO: 437888 - DNA, 587 bp, Homo Sapiens
  misc_feature (245)..(457): n is a, c, g, or t
ctgttaacaaagcagttgccgctacagactgaatgcatttgggccatccacgggttactgggttaaggatttttgataggaaggcctcagtgctttcaggatacgccattgtttacactgacaatgaagtggtattggagtgttatagggttatggagaatactttcaattatcaattataggttttaaatttattttggcttttaaaggaatagggtacactgttttttctttactacttccannnnnnnnnnnnnnnnnnnnnnnnnnnnnnnnnnnnnnnnnnnnnnnnnnnnnnnnnnnnnnnnnnnnnnnnnnnnnnnnnnnnnnnnnnnnnnnnnnnnnnnnnnnnnnnnnnnnnnnnnnnnnnnnnnnnnnnnnnnnnnnnnnnnnnnnnnnnnnnnnnnnnnnnnnnnnnnnnnnnnnnnnnnnnnnnnnnnnnnnnnnnnnnnnnnnntctctgctagctgcttatgctactgttctcccctctccttcccctttttgatggcttcagcagtgtaagactgccacttccttgggtttttgcactgtgtgcaataactccataatttcctgtggaagta

SEQ ID NO: 437889 - DNA, 482 bp, Homo Sapiens
  misc_feature (210)..(347): n is a, c, g, or t
agaggactcccgggagccttaaccctgacaacaaggtggtattggagtgttatagggtcatggagaagaccttcaattatcaattataggttttaaatttaccctggcttttaaaggaatagggtacactgttttttaactacttgtatatttctctgtctttgacattgtctctctctccggtttgcctctggctctcactctttctcnnnnnnnnnnnnnnnnnnnnnnnnnnnnnnnnnnnnnnnnnnnnnnnnnnnnnnnnnnnnnnnnnnnnnnnnnnnnnnnnnnnnnnnnnnnnnnnnnnnnnnnnnnnnnnnnnnnnnnnnnnnnnnnnnnnnnnnnnnctgctggtctttccctgtctctgctagctgcttatgctactgttctcccctctccttcccctttttgatggcttcagcagtgtaagactgccacctccttgggtttttgcactgtgtgcaataactccataattt

SEQ ID NO: 437890 - DNA, 837 bp, Homo Sapiens
  misc_feature (656)..(656): n is a, c, g, or t
  misc_feature (679)..(679): n is a, c, g, or t
  misc_feature (681)..(681): n is a, c, g, or t
  misc_feature (740)..(740): n is a, c, g, or t
  misc_feature (807)..(807): n is a, c, g, or t
  misc_feature (824)..(824): n is a, c, g, or t
cacgggcatcgacgtgtaggaaacgtgatccggtagggtgcgtcggggatgtcatagtaaggctgatcctgttgaatatcagcgctcagtgacagtgacagggtctgcaggatgtccagcatggtcttcagcacagtcccgctccagagcaagtggggaaacttatccaccagaccagatagatacttgtctgccaccctccttatcctcttgtggatgtggttgaagttcaccaacaggaactgagcgtgccgctccagctcctcctcgttctccttggtcttggctttatccgccatcatgttcaggaaggcatcgaatactttgtccgcgactgcaatcacacactgcatcatcccagatttgtctttctgaatagctttatcctcaaagtagcagaacattacctggaagcgatcaggatctgttgaacgcagtaccctcatgtactccagccggtaacagagaggaggtaggtggacatggcgaagtccagcttgttgatgagtgcggacacctcgggaggggggtccagcaggttgatgatagtgctgcggagctcactcagctcagcgggggtgaccgtgtcattccttcatggctgagttatacgtggaggacggaccgcagtggctccttgctgggaaaggtgagcnaagggggacttagtggctatttnanagaccccctcgtaccattcttctggccagagtcctgagccctccacagcgaatcccatnagaacggaatacagccagaagtctcggaagagcttctgtaaccgaggcttagcttctttgatgggtngcagtcgtcgggtgagnacagctattacag

SEQ ID NO: 437891 - DNA, 2186 bp, Homo Sapiens
  misc_feature (192)..(221): n is a, c, g, or t
tttatgattgtaaaaattttattctcaataacaattccactaaaattatacaaagtacattcaatacttaagaatggcaaaggtggggagaggaggagaggaagccagtttggcctggaagcatcaacagttgactccaacaaaggaagcccagctgggctggaggaagttgggggtggaggtccggttgtnnnnnnnnnnnnnnnnnnnnnnnnnnnnnnggccacccacaaggaagcagagtgagcgtgcatgttgcctgggggagggcaggaggctcagctgacatgctgctgctgggcactggagctcaggcgggctccgagttggtggggggcaggtttttatgcttgaaatactgcacaacttgttggggcagctccgccagcacagctttggccaaggtctcttttgctgcgttgcggaactctcgaaagggaacgaactgcacaatatcgcgggctgcctcctcccccgtgtgggagcgcagcatgcggctgtccccatccaggaactccatggcagcgaagtccgcattgcccacgcccacgatgatgatggacatgggcagcttggaagcctgcaccacggcatgccgtgtctcctccatgtcactgatgaccccgtccgtgatgatgaggaggatgaagtactgcgtggccgtccgctgttgtgtggcctgggccgcaaaccgggccacgtggttgacgatgggggagaaattggtaggaccgtagaagcggatgtggggcaggcaagctgagtacgcctgggcaataccatccacacctgagcagaaggggttggtggggttgaagttgatggcaaactcatgggagaccttccagtctgggggtaactgggccccgaatcccagagctggaaacatcttatcactgtcgtagtcctgaatgatctgcccaacagcccagatggccgacagatattcgttggtgcccatagggttgatatagtgcaaagaggaagggtcgaggggattcccgttggaggctgtaaagtctattccaacggtgaacatgagctggcagcctcccaggatgtagtcaaggaaggagtagtctcggtttatcttgcaggatcgcaggatgatgatgcccgagtttttatagttcttcttcttcctctgcttcttggggttgatgcactcgaacttccagcgggacgctgtctcgagcctcacacatctgtgacactgaggtctggaactcgccgatgaagtcatggcccccgtcattgtcatagtcgtagcacatgacctggatgggcttctccatgtccccatcacacagggacaccaagggcactgtgaatggcttccacacagggtccagtgtgtacttgatcacctcagtcctgtggaccagcatccacttgccatcgtctcctggcttataaaactccagaaaggggtctgacttcccaaagaggtccttcttgtccagcctcctgcccgccaggcttagtgtgatgacgcggttgtcggacagctcctgggcagcgatcgtaatcaagcccttccccgcaggcttgtcattcagcagcagcagaggcctagtgatcttcttgctggagacgatcgtgcccaggctgcaggagaactggcccaggaagtcatgctcgtccagccgcatactggacttgtcctggtcaaagagcgcgaacttgagcttctgtacctcctcgaagtggtagtcaagcacgaacttcttggagaaggcggggttgaggttgttgatcgcggtttctgtcctgtcgtactcgatccatctgccattgttctctgtaaagaggacacagaaggggtcggacttggaggtaacatcccggtccagtaggttctggccactcactgacagctccaccttgcacacgcaatactgggggcccatgggggctgcccccgctgctggggcacccccactgggtatgtgggccatgggagccggtggcggtggcaggagttcctggcagtcgcaggtcccgcgggcgccaccgccctcaccgcacggctgccgctgcccgcgctccgagccgcccgggcatccccgggagctgctcctgctcggccgggcccgcgggcgcgggacaggctcagggcgctgcccgcgcggccacggcccgctcgcgtgcgctcccagccgctcgatcccgggaattccggaccg

SEQ ID NO: 437892 - DNA, 445 bp, Homo Sapiens
  misc_feature (340)..(340): n is a, c, g, or t
  misc_feature (433)..(433): n is a, c, g, or t
ttttttttgcattcttaactgtttttattttgtctgtgtcaggtttacatgcacaccatattgcttattctgtattagagaaaccattaggcatttctgatgagaaaattacatggtgggctgaccttaatggaatttggaatataggaaatcataacatcaccattggcatccaatgcatcattattgccaacatacccagtaggcatgtcccggagacttgcccttatgtagttagttatttttggttaaggactcacctatctggtgtctgccatgctcagcacacacctcacaagtttccttgagtgggaaggattatgggcatgaagccgtgtgncaaaagagccaacaacaacaacaacaaaatacctccctacatcttcttcctcttagcagggcactattggacatccaacatttaccctccagnacattggccatt

SEQ ID NO: 437893 - DNA, 386 bp, Homo Sapiens
  misc_feature (29)..(29): n is a, c, g, or t
  misc_feature (45)..(45): n is a, c, g, or t
  misc_feature (71)..(71): n is a, c, g, or t
  misc_feature (78)..(78): n is a, c, g, or t
  misc_feature (107)..(107): n is a, c, g, or t
  misc_feature (261)..(261): n is a, c, g, or t
cctggtagatttgaacatttcccacgagnagctgcttttcctcantgggaaggtagaaagcattaaaagangagtatntgctatcagatttagataccttgagaatntcctaattgcctttagatcttaacaatattaggcagataataagtatggcaagtgctgcgttgttttttccaagtcaattccagtcaagtccccaaatttaaaaacaaaaacaaaaccctggaatgggtaggttacagctagtccagatagtgnaaagataaggcattgtatttagaagctacttcattcatcttcattccattagcaatagatgtcagttatacctcagatgaatttttatcagtgaggttggtgataatttaactatttttcactgg

SEQ ID NO: 437894 - DNA, 942 bp, Homo Sapiens
  misc_feature (76)..(106): n is a, c, g, or t
agcggatcaataatgttgcgaagggagactacagggatctcacgacgaatattctgatacaatactcaacctcggnnnnnnnnnnnnnnnnnnnnnnnnnnnnnnncccagcggcactttatactgttcactgtacaaaagcttacagttttccacaaggactttaataactagctgggaaaagacgatgtaattatttcggggctctgcggaaccttctctgtacagcgccccctttctgttgtgctattggttgcagctgccatgctcagaatgcgttttgagagctgaagcaaggtgcttgcagtcacctgaggccgtccgtgtggcccagggccccagctgcctttagggcccccattgttcataacagcatatgcatttccccaccgcgttgtgtctgcagcttctttgccaatatagtaatgcttttagtagagtactagatagtatcagttttggattcttattgttatcacctatgtacaatggaaagggattttaagcacaaacctgctgctcatctaacgttggtacataatctcaaatcaaaagttatctgtgactattatatagggatcacaaaagtgtcacatattagaatgctgacctttcatatggattattgtgagtcatcagagtttattataacttattgttcatattcatttctaagttaatttaagtaatcatttattaagacagaattttgtataaactatttattgtgctctctgtggaactgaagtttgatttatttttgtactacacggcatgggtttgttgacactttaattttgctataaatgtgtggaatcacaagttgctgtgatacttcatttttaaattgtgaactttgtacaaattttgtcatgctggatgttaacacatcttactctaaataaacaaggtgttgccacatttgtagcacgaaggatctct

SEQ ID NO: 437895 - DNA, 737 bp, Homo Sapiens
  misc_feature (23)..(23): n is a, c, g, or t
acatttaataaaatttttgaganacataaaacccaaagctattaaaattaatttttaaaaaatcaaaaatgcaaagaatcggtattgttaaaaaattacagaattaatactggttaatagattttatatgtcagtaaaaataactgcaattttggaacttaattgtggagacctgttgttccaaggatatgaaagtagccatggtttcctaacaactagagtttttatattccttggactgcattcatgctagagaaagatttaaaggcagcagccaaaatgactgaacttcaacttggatgctgaagcagtggtttgatgggcttttcttggtcataactgactcataagcttaagatcataagccaaagcccccagtgggaagtatgctcaatttggtgggccttaaagccatctctggccaaacaacatcagccttatgggaggccagccatgtagaaagggagtctccccaagatctgatttcttgaggccacaacctaagagcaggtcccacagtcaaattattcacattccttggaaagagagaacaggcatcagttgtgtccatcgaagggggacactgtccaggtataccctggatattttttgaaatctctgggctgcttctgcattcagaaaggtgctcagaagttgggatacaaacagaaactttctgcattacaacttggcaagtatgagttttatgttgacttaagtgtgtagccatattatcc

SEQ ID NO: 437896 - DNA, 1740 bp, Homo Sapiens
gatgcatccaacgccgcgggagcgctgacgtccagtgctgaggttggggggtgaagtattcgtgtatacttgtccctcaagcacagtggggcccacagcagctgatgcttgggtggaggaactcactgcttcttgttcctctggctggacttctggcttctggaataggtaatactcagagggctggctggggcctgggtctgggccagggcctggtgtggggacttatcttggtgtgttcctcagagcagctagtgatggaagagccagcagggcttgggtgatgattgggaagataggtcacaggtgacaagtttatagtaattttgtgtggccacaacaagacgggcctggctttggaagcaggctgtgaggtcagccactgctgggcacggctcacagtgtgggcggtaggagttgcagttggcatcaagctcaggagaagaggcatgagggcaaccatagcccccttcccttcctccactttcagggtgatgggactcataagacatcttagactcaaatggggagggctgcagatccagatagaaggcgccagggtctgagtggctgcagaaggaagagtcgctgcaggactgtggggcagagttgagattggcacggggggtgccatgcatcttgttgtagagggtgctgaaggtgaccagcacaccatctgaactgttgcaggaggagtcgctcacatagcccatggactggtcagctgcctcggactgactggatgtgctactgcagcggcagtgctggtcccctgagccggagcatccagggttccttggggattcatctgaactgagcttccattcctggtcaaaggaaaagccagaggtatcgctggctccacccccactgccactcccaccaggtcccccacactcatccagctccatagtctctgcttccagctctggccggcagcattggctggtgccgcactgctgagtatccaaggtcatcactggctcctgttcctgcgcttccaccactccagcccgactgcgtgttgtcccccatggcctgcccactctggggccagatggtggcagctggaaagaggatagatgaaagttgggctggccagtgccatgcaggtggaaggactgctgggtggcactgtcaccaatgctgtcatcatacaggtcaccaagtcctggctcacccacaccctcctgcagcaagaaggggttgtgtcgtttgggggctccagggcctcttccatcccgactcctactcttggtgctgtctatagaccgtgcagttcctcctggagcagagtgcaggctgctgaatagcagggagtcagcttgtcctaggtcttgatcgggctgggtgatgcccagctcaggtgggcagaagggattaggtcttgtgctcccaccacctccacctgcccctccacagcactgcctgtctgggacttggcagtgcaccagggggatgtgatgaacgatgagggtctctccagtcagctttgggggactatccattctggaaagttcgaataagggcttcaacagcaccagacactgtccctggagcccagtggggcagaacacatttcatcaggagagcttggcacctctgtcaggagccttgagttggacccctgatgcgtctgtcccttttgcactccgaccaagctctaccgcgacagttccagctgagacactgttccacgggactcatttattttaactggccgatttcctaagatctgat

SEQ ID NO: 437897 - DNA, 1075 bp, Homo Sapiens
  misc_feature (21)..(21): n is a, c, g, or t
  misc_feature (443)..(443): n is a, c, g, or t
  misc_feature (516)..(595): n is a, c, g, or t
  misc_feature (597)..(598): n is a, c, g, or t
tctccagtaggattccccacngggtcatgatagggccatgcaatttgccccgtttccccggcaaatttttcccagcgcccaagggtgttcccctggcgatttccagggtttcctccacccccccttttgggaggggtcttcccccgtcggccgaggaatggcttaattggattttcccacccccgttttttccaaataagtggccccgcgcccgggggcgttattttgtatattgaaggctccgcctggggactccccgttggaaagaaatccccgtttatggcccccccggaactccccttctggggatttgttccagaaaccctcgcggtttcccccccggggggtttttttatttggggggagattcccaggccctttgttctggtccccgggttttccctaggagaaacaggtatgggcccaagtttccctttcctctntgggggcccccggcgcccaaaaggaaggtttttgaaaagtttttgaggggccgagggggggcccgacaagggnnnnnnnnnnnnnnnnnnnnnnnnnnnnnnnnnnnnnnnnnnnnnnnnnnnnnnnnnnnnnnnnnnnnnnnnnnnnnnnntnntatttatacttgtatataatttttattatacccatgaaaatgaccctatagtcaatagcaatttacttgtacattttaaagtaactaaaagtgtagaatcggtttgtaatacaaatgataaatgctggagttgatggatatttcatttgccctgatgtgattaatacctattcatatgcctgtatcaaaatatgccatatatggcataaatatatacacacactatgtacccacaaaagttaagaaaaatatgtttaaataagaataaaaatttaacctatgggaacaatgttctttaattaagttctttagtttaaagtcactggcaagagaaattattagagatgttagtccactctgttattaaatagtacattgttactatcttttaccaacacccttgagtaaggtgggataggttgaagttagtggcatgataatacttcactgaatgcacaattggtcttaccatgttaa

SEQ ID NO: 437898 - DNA, 641 bp, Homo Sapiens
  misc_feature (289)..(351): n is a, c, g, or t
  misc_feature (526)..(526): n is a, c, g, or t
  misc_feature (565)..(565): n is a, c, g, or t
  misc_feature (571)..(571): n is a, c, g, or t
  misc_feature (590)..(590): n is a, c, g, or t
  misc_feature (602)..(602): n is a, c, g, or t
  misc_feature (625)..(625): n is a, c, g, or t
ggcctttcatgtagcttgtaggaaatgtgttttgggatccactgaggctcattcacatgagacttagaacctgtatcagtaaccacaatgggtttacattattattgttgtctcctattagtgcatttgacctacctcaggatatccaaaggagaacagagggaagtgaggggttgagaactgacaccctacaacgccagcacctcagtggaaaggaggaatagagcccaggagggatgtgggggtgagggtttgtgtctgccttatgtgagcatatggtgtgtgcacnnnnnnnnnnnnnnnnnnnnnnnnnnnnnnnnnnnnnnnnnnnnnnnnnnnnnnnnnnnnnnnctgctttatgagggtgagaaactgagtggtgtgtgacctggtgtgaggttggatgtatgtgcttccatggtgtgtgggaagctcggtcgtgatattagggacacctggctacatataagtataaatccactctaggaacagacactcttggatttggaaggttaccaaatgcagncagcacggtgacactgctgagttctccccaccccctctntaccanatcgcatctcctccaactnaaccccacaggngaactatggggactggggtgcanggaagccgtgtttaaa

SEQ ID NO: 437899 - DNA, 710 bp, Homo Sapiens
tggggctcgggtccgttgtgtgcctggtggccatcgcgcggtacccaggtgctggcccctggagcagttcttgcgtcgtctgtggcctgcttctagccccccttatccttggccctcagcccaggcgtggttcgggagggggcaggcgctggggacgagggtgtagggcactcacctccatgcagccccctcccctgccacctcatcccctgggtcctgataaataatgaagggtctgtgactggaagcttcgttttcagtgggggcagcccccttcccttcggaaccttcaccgtcctcttcccctccacaacagttctgctcctaggaagggtaagcccccaaaggcagaagctgtggcagagaaaaggctgtccccccactccaaggcacggaccctggggcttcccgatcctccccagagccagaggccacaccgctgagcaggggaggtgaggggggaacacacagacctttcccccacaccctgttcccatccaggcaccaggcaaggccctcatgaaaagaactcgccccagtcagatagcagagggaccacgtacaggcagatggctggggtggggggtcaggacctcttccaggagggagtgggattgttcctaaccccctgcccccagctgtcctctggaacactgattctggggtgggggtgagctgctgctgccctccagttgagggaggtctctgtg

SEQ ID NO: 437900 - DNA, 885 bp, Homo Sapiens
  misc_feature (22)..(22): n is a, c, g, or t
  misc_feature (41)..(41): n is a, c, g, or t
  misc_feature (51)..(51): n is a, c, g, or t
  misc_feature (184)..(222): n is a, c, g, or t
cagatcactgccttaatgaaanggaattgacccaccgtcangctcgaaaancccaccccacagtcctagaattgggtgtttatccaggccagaagttctctcccaaagacatttttagcatgtgtcaacaaactataagagagaaaacccaaagcttaaaggagggtgtgtaaggggagccttnnnnnnnnnnnnnnnnnnnnnnnnnnnnnnnnnnnnnnngcaactcgattctcctagtaagtctggcatttctttttttgttcagtagggaggtggagaagaaattaacccccatttactagcaattgcttggggcaagtctcaccagggaacatcagaatgtgggctaataaaggaatctgtatgatgctccgacctcttcagggtccttgcaagcctcttgtctttcctcatcatcaccacacccacctggggcaggtggagctggagtcctcacctcctatatatgacatatgagagaaccgaggcacaagcaggcagggtggcttgcccaagatttcagtgggttcctgatttttacctgaccacatcgctgctatgtaggcctcatctcagtctctcggactggagggacaaccccatggctgttttattacaagacaaccaggggaagaaggccttgtattccctagtgccctgcacattcccgggctgcagcacaaagttgcctcagattataaaggccagggggtcggtaaggattcactgactcattagcgtttgagccatcaccacccaggctttaggtttagccccctaatgggcactagctgttaaggatctctcattgctgggttcactctcctttgcaaaagaccttttacaagacttgcttctttgtggctgctcccctgatatagg

SEQ ID NO: 437901 - DNA, 480 bp, Homo Sapiens
cacccaaacctcgccagccactcggccgcggccgttgtcggcagcctgatgtttgctgagtgtgtccgtgggctcctctctcttcagcctggcgtaggggtgcttcggacagtggcggtttgcatgggtgaatctgctcaggcagccactgaacaaacaaaaggtttctctccggtgtgaagacgctgatgtgttttgagctgtccactttgaacaaaggcttttccacagtctggatagtcacacagatagggcctctcacctgtatgagtccttttgtgagcctggagcgatttctcccgtggaaacaccctattacagatgttacaacggattctgctggatgaatgctctccttcatttattaaatcgcggacagtatctgctctgggcctaccacgtcggattccatccttgaggtggccgctgtctgggctgctcgcttcctcctcgtcctcacctcccgaggcggcggcggag

SEQ ID NO: 437902 - DNA, 991 bp, Homo Sapiens
gaggtttttcccaaaatgtggcaagagctcttccgtggggaaaattttttatgtgggggggcccacaaataaaggaaaacccctttttgttttaacccttggggtaaaatccctaagggagggaggaaacccgggaattttttccggttgaaaaaaacacatttaaaacttcccccccagggttaaaaattcctaacaacatttttacagggggtttttcctcaaggggccttttttccccggagaaagataagaccaacctttaaatatcccatggtttctaactaatacccgggtttccatttagtttttaaaagaaaataatccatttccccctagcctcttggattgggcaattcataaaaagaaaattatcccttagggagagctctgtatacaactgcttcattatgaagtggtatccacttcaattttttcctatttaaatatagatatgcatgagcccaattacttagaattgaaggaaggaattttaaaaacagatttttacaccctgtgatttattaactactgtaatatactaacaccataatgcaagtaacaaatcacagcagcatcctaataaagggatacagttaagaaaagtccacaccatggccttcatggcgctcccaccaaaagtatcttaaacgaggaaaacctattggaagctgggctgcttggcaaccagaagctggttgctaagctgcacgcctttaacatgccatcatgaatgctagcacagtgaaagaataatttggtatgaacaaaagcctataaaagagactgggacttaagtgcgtctggtttaccctccgagaacaatgcagctgccaaaccaatctggaagctccgacatcattgttctataaaccccacaatctgctctgactgcaggaagtgcatttaatgggcaacatttttctctcccctgaaaagtttgggttttgtataagtgctgttgtgagataattcttcaagataatgacat

SEQ ID NO: 437903 - DNA, 1071 bp, Homo Sapiens
gtggtaccggtccggaattcccgggatcggcggcggatgtttacggcggccgaggttggagcggcgctgctcggccgcggacacacgagggacgcgcccgaggagctgcaggtggcagcccaggcggtccgaacccgtcggccggccgagcctggagtattgcctaagtgtaatcttgaacatgggcggtgctgtgagtgctggtgaagacaatgatgagctgatagataatttgaaagaagcacagtatatccggactgagctggtagagcaggctttcagagctatcgatcgtgcagactattatcttgaagaatttaaagaaaatgcttataaagacttggcatggaagcatggaaacattcacctctcagccccgtgcatctactcggaggtgatggaagccctagatctgcagcctggactctcgtttctgaacctgggcagtggcactgggtatctcagctccatggtgggcctcattctaggtccttttggtgtgaaccatggggtggaacttcactcagatgtgatagagtatgcaaagcagaaactggacttcttcatcagaacaagtgatagttttgacaagtttgacttctgtgaaccttcctttgttactgggaattgcctggagatttctccggattgttctcagtatgatcgtgtatactgtggggctggcgtgcagaaagagcatgaagagtacatgaagaatcttctcaaagtgggagggatccttgtcatgccactgggaagagaaccctgccattcagagtcaggaaaatcaagacctgtccagttaccaccagtggcagttcgcagcctcccagacttggctcgcatcgccatccgggggcaccttaaaaagattattcctcaggaaactgtgagcaaaaacggaaacggactaaagaacaccccagggtttaaacaaaggaaaattcgccgcccgtccaaatggaaacgattgtccttttttggacaaagaagccttggccaggtcgggatttcccaccccctcaaatgacaaccgcttgtgaaaaacttggaaaaaggaccgaaggggac

SEQ ID NO: 437904 - DNA, 2108 bp, Homo Sapiens
  misc_feature (1881)..(2056): n is a, c, g, or t
cgggctgcaggattcggcacgagaaaacatatggagacgtttatacccattgatttgacaactgaaaatcaagagatggacaaggaggaaaccaagacaaaaccaagacttttaagatatgaagagaaaaaatatgaagatgtgaaaccattagagactcaaccagctgaaatagcagaaaaggaaacattggaatataaaacagttagaacattctctgaatctttgaagtcagagaaaacagaagattaccttagagaaagtataattcaacaacatatggtttctccagagccagcttcccttaaggagaaagggaagtcaaggagaaaaaaggatcaaactcatgcttgtccaaatgttaggaaagccaggcctgtgtcctatgatagaacagaaccaaaagatgatgatgtgataagaaatattattaggctacgagaaaagcttggttggcaaactatattaccgcagcacagtttgaaatacggaagctccaaaattgcaattcagaagattactttaaagaaacctttggaagatgatggagaatttgtttattgccttcctcggaaaagtcctaaatccttttacaatccatatgatcttcaggtagtatcggctcatacttgctaaacattgcaaagaattttgggttattactgcttcatttatctcaaaggttattaatatagttggtagtgtaaaggaagtagaactcatacctactttggaatggctatcagaaagaagacattactatttattacggcaattcaagatattttctgatttccggaagtcagggaccctgaacggagggaccggccgaagccatggcagaagaacgtggattgtgaagatttcatggacatttattagttccccaaattaatacttttataatttcttacgcctgtctttactgcaatctctgaacataaattgtgaagatttcatggatacttatcacttccccaagtcaatacccttgtgctttcctatgcctgtctttactttaatctcttaatcctgtcatctcgtaaaccgaggaggatgtacatcgcctcaggaccctgtgataattgcgttaactgcacaaattgtacagcatgtgtgtttaaacaatatgaaatctgggcaccttgaaaaagaacaggataacagcaatgtttaggaaacaagagagataaccttaaactctgacctccggtgagctgggcggaacagagccatatttctcttctttcaaaagcaaatgggagaaatatcgctgaattctttttctcagcaaggaacatccctgggaaagagaatacgcgcctgggggtgggtctctgaaatggcccccctgggcgtggccgtcttctatggtcgaggctgtagggatgaaataaaccccagtctcccatagcgctcccaggcttattaggaagaggaaattcccgcctaataaattttggtcagaccggttgctctcaaaaccctgtctcctgataagatgttatcaatgacaatggtgcccaaaacttcattagcaattttaatttcgccccggtcctgtggtcctgtgatctcgccctgcctccacttgccttgtgatattctattaccttgtgaagtacgtgatctctgtgacccacaccctattcgtacactccctccccttttgaaaatccctaataaaaacttgctggttttgtggcttgtggggcatcacggaacctaccgacgtgtgatgtctcccccggacacccagctttaaaatttctctcttttgtactctgtccctttatttctcaagccggccgatgcttagggaaaatagaaaagaacctatgtgattatctgggcaggttccctgatagttgtctggctgtnnnnnnnnnnnnnnnnnnnnnnnnnnnnnnnnnnnnnnnnnnnnnnnnnnnnnnnnnnnnnnnnnnnnnnnnnnnnnnnnnnnnnnnnnnnnnnnnnnnnnnnnnnnnnnnnnnnnnnnnnnnnnnnnnnnnnnnnnnnnnnnnnnnnnnnnnnnnnnnnnnnnnnnnnnnnnnnncatatagatatacgatatctcaaaaccatttatttattattgtccgggtacc

SEQ ID NO: 437905 - DNA, 651 bp, Homo Sapiens
  misc_feature (112)..(112): n is a, c, g, or t
  misc_feature (159)..(160): n is a, c, g, or t
  misc_feature (208)..(208): n is a, c, g, or t
  misc_feature (213)..(213): n is a, c, g, or t
tgaatctctgacataattgtaagattcatgacatttatcactcccagtcaaaactcttgtgatttctatgcctgtctttatctcttaatcccgtcatcttcgtaagctgagnatgtatgtcgcctcaggaccctgtgatgattgtgttactgcacaatnntgtttaaccaatatgaaatctgggcaccttgaaaaaagaacaggatancagcngatgttcagggaacaagggagataaccattaggtctggctgcctgagagccaggcagaacagagctcagcaaggaacagccctgagaaagagaatgcgttcctagtgggaggtctctgaaatggccactctgggaatgtctgtcttttacggttggagataagggatgaaataagccccagtctcccgtagcactcccaggcttattaggacgaggaaattcccacctaataaattttggtcagactggttgtctgctctcaaaccctatctcctgataagatgttatcaatgacaatgcgtgcccagtgggacatgatacttcattagcatttttaatttcacctgggtcctgtgatctcgccctgcctccatttgccttgtgatattttattaccttgtgaagcatgtcatctctgtgacccacaccctattcata

SEQ ID NO: 437906 - DNA, 700 bp, Homo Sapiens
cggtacccctcggctctaccttgtctttactttaatctcttaatcctgtcatcttagtaagctgagaatgtatgtcgcctcagcaccctgtgatgattgcgttaactgcaccaattgtttgtaaagcatgtgtgtttaaacaatatgaaatctgggcaccttgaaaaaaagaacaggataacagtaatgttcaggaaacaagggagctgaccatcaggtctgactgcctgagagccgggcggaacagagccatatttctcttcttacaaaagcgaataggagaaatattgatgaattctttttctcagcaaggaacagccctgagaaagagaatgctttcctagggggaggtctctgaaatggccactctgggaatgtctgtcttttacggttggagataagggatgaaataagccccagtctcccatagcactcccaggcttattaggacgaggaaattcccacctaataaattttagtcagaccggttttctgctctcaaaccctgtctcctgataagatgttatcaatgacaatgcgtgcccagtgggacatgatacttcattagcatttttaatttcacctgggtcctgtgatctcgccctgcctccatttgccttgtgatattttattaccttgtgaagcatgtcatctctgtgacccacacctatttgcacactccctccccttttgaaaatcc

SEQ ID NO: 437907 - DNA, 304 bp, Homo Sapiens
  misc_feature (40)..(40): n is a, c, g, or t
  misc_feature (46)..(46): n is a, c, g, or t
  misc_feature (69)..(69): n is a, c, g, or t
  misc_feature (269)..(269): n is a, c, g, or t
  misc_feature (284)..(284): n is a, c, g, or t
tactgtgcacaaaattagccctggaaagctgacaaagtcnaaactnagatataagacatttctccattnccattgcaaataatttaatttataacatgatattaaaatcacattaaatgaactttaaggttcttgtacacaatagtttgactttaatgttgcatattagaggctaaatagataatttaaatgctagcataacatttgcattgtaataaaactttgctgattctttttgtacatttgccaaacgtccacataactaactnaatttttaaattcantcattcatttagtcattctg

SEQ ID NO: 437908 - DNA, 956 bp, Homo Sapiens
  misc_feature (877)..(913): n is a, c, g, or t
gttcgccccatttcggcagtccaagaacacattcgtgtttggtactgttgtggacagtcggacaattgaggtgatattaattgtcgcttgggtcgcctttggttccacgccattttttgtaggtggaaggtaacctggaaggctgcaaggttttgtattcactttcacacaaagattgggtgggaagtgatcttcttgtggacaactggtttctgataaccaaaccttaactggacctgtactgtgaagtcacatttggtcccagaaatatccatggaactactgatttgctgcacttgttgtggtgtcaaggcaaatgcaaaacaggtttctcgaaagcgctgactgttgtctgatgctagactggtgggttttatcagttcatccagtaaatcataaaatggtaatttttgaagttttatatccggatggactgggtgaagagctgatgtaagatgtgggagttccagttcatgtttaggtcccagaagagaaacagggagtaatggcgatgatgcagggtgaccatcgtaagtgagttgtggaatggtagatggagacaaagttgctggcataggacttgaatgtacgttggggatggacaagtctgcaggcgtcatgattttctgtgggaaccgccgcctatagagttccttaattttcatttgcacagcaggactacagccagcctttagcaaatgcagggcttttgtgagaagttcgtgtttgcgtccgtgcttgtttctcccggcgtagcccaacagtacttggagttcagaaactctaaggctcataaccatttgctttagttccgcactgtccgccatcttgcgtctccgctctcgacgaattcgagctcggccgatttggcctgatnnnnnnnnnnnnnnnnnnnnnnnnnnnnnnnnnnnnncgccgccaccgcgattaccccgggtcccctataggatctatca

SEQ ID NO: 437909 - DNA, 370 bp, Homo Sapiens
  misc_feature (292)..(292): n is a, c, g, or t
ctaagatttctgggtgttcaaatgggtccttccatggagtcaccattctacatcataaacttgtataccaatgaaaagttgtcccaggtactattcaaaagaagaaaatccagcaactttacactgcagctcttcattcctccaacgatttgagttttacacagccccctcccaaaggctctgtctatggaagctcataaatgaccagtcaattccaaatggcccgtattcagtttttacccatttgaattctgaccacacctatttctaaaaactgttttctctcctgggncataggaacattgctctctctgggtttgccctccaaggtaggaggtgactcttcctccgtatcgattctcccccttgt

SEQ ID NO: 437910 - DNA, 688 bp, Homo Sapiens
  misc_feature (530)..(530): n is a, c, g, or t
  misc_feature (572)..(572): n is a, c, g, or t
  misc_feature (622)..(622): n is a, c, g, or t
  misc_feature (657)..(657): n is a, c, g, or t
  misc_feature (661)..(661): n is a, c, g, or t
acctaatggaaaactgcttttctgtttttatttccctaatctataagcacaggaaaagtgtgtgtgtgcatgtgtctttttacacttaactctttgttgtagattttgtttggtgtgactcacagtcatttcacctttctatttcttcctcaatcactcccatccctcattggacctgtcagaagaagcctgtgaggaggagatatgagccgtatgggatgtattctgacgatgatgccaacagtgatgcctcaagtgtttgctctgagcgctcatatggctccaggaatggtggcattccccattatctgcggcagactgaggatgtagcagaagttctcaaccactgtgctagttcaaactggtcagaaaggaaagaagggcttctgggcctgcagaacttactgaagagccaaagaacactgagtcgagttgaactgaaaaggttgtgtgagatcttcactcggatgtttgctgaccctcatagcaagagagttttcagtatgtttttggagactcttgtggatttnataataattcataaggatgatttacaagactggctttttgtncttctcacacaatttacttaagaaaaatggggaggcagatttacttggtnctgtggcaagcaaaaggttccaaaaagggctctangatngtcacaaggggcctccttttccatttt

SEQ ID NO: 437911 - DNA, 450 bp, Homo Sapiens
  misc_feature (425)..(425): n is a, c, g, or t
tcgctaaatccagtggctaagtcttggccctcaacttacttgacccactagtatcacgtgacgcaggtgatcactacctccttgagacattttctcacctggcttccagaacatccctgcccagcactccttctactttactggcctctccttctcagtctcgtttggaggttcttccacatctccccagtttcttcatggtggaacacattagaaagctctcaagccttgagcatttccgtcacatcttaccctcgtggtgatctcaagccaatctcatggcttgaacaccatttatggatgttggcaatgcccaatgtatatatccaaaccagatactcgctttgaactccagacttcatctataggaattatgtcagtatcttttctcagatgtttcatttgaaacttaacatggcccaagntgaactgttctaactcctgcctaaa

SEQ ID NO: 437912 - DNA, 715 bp, Homo Sapiens
cgcggtctgtacggatgtgcgtgtgaccctgctgagcgctggtgcaaaggcgtgtagccgttcttggtttttgcgttaacatttgctccctgcttcagaagaaagttgaccattttcacatttccatagtgacaggccacaattaaaggtgtgtaaccaagctttgtatgagcatcctgatcagctccatgcttggtgagaatatcagcaacattcactttatcttcctgggctgcaaggtgtaaggatgtgagtccactcttagttgacatgtggatattggctcccttatccagaagcaaggtaaccatatctgtgtgcccctcctgcgaggccagatggagtggagttactccttgctttgtcacaatgtttgtctctgctccatagttcaggagtgtggaagctatctgcatttgattcttcttggcagcaatatgtaacggagtatagccattcttggcagtggcatgaggggaagcacccttctccagtaacagcagcgccaccttctggttgtcataatgagcagcaacatggagcggggtaaggccgttcttaccctgcaggatttgcggcggcacggcgttgcaagagaagttttgccacatccaggcatccatacaggtctacacatgacaggggagtaaaacccgtacctgagtagataaggagtgggatgcgcagctgccaatagactgatgcgaacccgacg

SEQ ID NO: 437913 - DNA, 444 bp, Homo Sapiens
  misc_feature (42)..(42): n is a, c, g, or t
  misc_feature (50)..(50): n is a, c, g, or t
  misc_feature (84)..(103): n is a, c, g, or t
agtcccctgttaaagtcatccctggacaaaaaatcctttttnaaaaatanggtaacccataaataaagttgctcaaaggcaccnnnnnnnnnnnnnnnnnnnngttctcctaatgaaatacccagttgaagtgcagcattttcattacagatagtcaaacagctagagctatacaatacacacagatttttcctaatagtaccagcaatcttagttacaaaataatacttttcagtagtctttcttgatgcacatttaaaaaccagcacaactcctctagtgaaatggtcaatttcccttaaaaaacaacatctgaaattataagacctgacaaatcatattatatttcaatattagactgctgtggctctagaacaacagaaaagcgtaactttcaaacagcttagggaaaaagcactgaaatgtagatgtcgtcaatcagcc

SEQ ID NO: 437914 - DNA, 975 bp, Homo Sapiens
  misc_feature (19)..(19): n is a, c, g, or t
  misc_feature (24)..(24): n is a, c, g, or t
  misc_feature (33)..(33): n is a, c, g, or t
  misc_feature (45)..(45): n is a, c, g, or t
  misc_feature (60)..(60): n is a, c, g, or t
  misc_feature (112)..(134): n is a, c, g, or t
  misc_feature (917)..(917): n is a, c, g, or t
  misc_feature (933)..(933): n is a, c, g, or t
  misc_feature (956)..(956): n is a, c, g, or t
ccgggtacctattaggganaaaanctgtgtgtnattgtaaaagcncctagctgtttgacnacctgtaatgaaaatgctgcaccttccaactggtatttccattagagaaccnnnnnnnnnnnnnnnnnnnnnnncctttgagcaactttatttatggttaccatatttttaaaaagattttttgtcagggtgacttaacatggactcttatagggtattaaaacaatctagattattccttttcatcctaaataagcctaccaaatttcatgctgttggtttgccatgaatgatattacttcctacattatatttgtgttttttcaaatctgctatggaatgaacttattcctagatttggatatgtaagagaaacctgcagtcatcttttgatttataaggcaattcttgtggataaatagtgatttctcagcctctgacccattttataactgaaatttaggccctttaggaggcttgttatatctgggttttcctacgtttttctatgtaatattattccattccagtagcattattgatagaaatagtaagtatttatggaatagtgcaatatggacaaattacgtgtgtgacatatctgtcaatataagttagaagcttattcttggtttgtgtaatgaatttatgtattgtagtgaatacctttactggtgtgaagataattatgcacaaaccctcacaatacgcgttaacattgaaacctgtgaaatgtccttagtttgggtcatataaagccaaccatttttgaggaccatgtacctagtgctttgaaaactctaagtcactatatgaatatgacaatatgtggcacatttaaaattcagagctcgggcattgtgatactgatgcagaagctagtaggttgggttaaaagtctggggttctgtgggggntttttcgtggacgcgntaatcttttcttaggcagggccncaggagccgttttttgggg

SEQ ID NO: 437915 - DNA, 526 bp, Homo Sapiens
ctcaatttgtagctagctgtctgttcctcacccacagtcatggagcgcttcatagcaggagctcccagtttcccaggtgtaggactaggcattgggctactagggggaggcagcaggccagaagaaggctcttctcgggcagggaagtttcagggtacttatctgccaaggttgacagctgggggaactgagaggtgagaacattcagacagggccctgcgcactgcctttttctgctggggggcttggttgagcacagcctcctcggtagaactcaatttctccaactccttatcatggtctctgatgtgacagcttgcattcaaatgttcctgggtgaacaccatagtgattggcggaatggtggtgggtgaatgctcaataatgggggctgggtgggctagagacaccaggagtggggactcacacttcagctgctcagagttatcatttaccaccccaatcactgggcagccaggggtgatgctattctccatctctcccggagttgcttcccttgagccca

SEQ ID NO: 437916 - DNA, 1094 bp, Homo Sapiens
ccccccctttaacccgatcccaatttttggtttggggagggaaaaagaattttttaaaaaaagctgtttttccaagatttttaaaccctgacccccgggttttcccttttaaatttttcgggggggcaaagtttggggtacgcaatgattacgtgcgacccgtttcgggaaggcccgcgatggcccaaactggtcttttggcaaggggatttcgctggtgatgtgggacgatgcccctttgacaccgatatcgggtggtcactgaaccactttcttgatctcgctctggcaaaggccagtcactcggatgagccgggtaaacctcggcatcgtcagggaactggctctggagaaagctggccttgagatgtgctatctgctcctttgtcttcttgcggtcactggctggtgtgagcggggggttggccaccttgggtgggggctctggcacctgagcgatgtgtggacgcttgggttcgggggcagcttggggagtcaccaagggtctcttctggccatggttagtgactcctgccacggcaagtgtgatgggggagcaagagacggttgttgacccgctggtcacctgagtcagcaccaggctagtctggccgaggatctggcacggtagagccgtctggaggatgggctgcgtcacctttgtgggggccaactgggcgggcagcacagtgatggtcgggggtactgactggatggtgccgttgaacatcttcttccgggcctcctccacctcttctggggaccagctgatgccatgctttaagcgctgggtggcaaaccagattctgatgtgctcctctgggtgtttggaggcagctgtcagccaggacaactcagcctgggtcgggtaaggaaacttgttgaaagagttgatcatcgtggcatttgtatccagggcagagttgtatttggtagtatttagtgggacagggaccttgggcacaaggttgatatttggtggcagctgtacagaaggcatgacgtgtcctaatgtgtcttggaggagctccaccccgccgagtcttgagaggatctcagctgtgtctgtcatcccgggaattccggaccggtcc

SEQ ID NO: 437917 - DNA, 1040 bp, Homo Sapiens
  misc_feature (109)..(109): n is a, c, g, or t
cggatgcaggccagcccttgcccttacaggtagctggaagtgacgaaggagtggggcccccggactctgctcaggtggatcatcgcacggtcataggccacctgcactnacttgcggatgctggtcttgcggccttccagcatcttgagcttgtccacggtgtcttccccacccaagggcaggactttgtcccttggaagccattgccaggtgcgcttgttgtcaaagaagaggacaaggaagagcttctctccagcctctgcctgtttctgctctcccagcttcagcacgtccagcggggggacagggatgggaacgccattgtgcaggaggccctcccggggcatcttgggatcgatgatcaaggcagggtaggagggggtaggctcggcacttggcccacaccagctccaagggctccaggtctccgcggtcttcaaagggcagcaggaggcttctgcctgagccattgtagtcagagtctccgttcacaccttccaggaagggcactcgagacagggctggcttcccacggctgcgtttggggggcgtcagaccactgcaagcttcaaatgccagtccaccactgagacccaaactacattcagagtcagacccgctttcggtgtgttttccaaagccgttggtcatgcctgtctcttcctcctgctggggggacctctccccttcgctctcactacagctcctgctccttggccgcttccgggagtggcgctcttcctcgatgctggctggagaggcaggagagcctgccacaccatggtcctcgccattctccaggaccctgtctgggcttctctgtagcttaaccccattcttggccttcttgaagaggactgatgtgcggcgacccacaccactaagtggggtaccggccggggtgtcaggggccatgagggatagtctgttgatgccattgtcactgagcaagcgttgcaaaggctcattccctagctgcagtggtgatttttccaagagctcatcttcttccacctttctgggctttaggaacctgcttg

SEQ ID NO: 437918 - DNA, 383 bp, Homo Sapiens
  misc_feature (31)..(31): n is a, c, g, or t
  misc_feature (65)..(65): n is a, c, g, or t
  misc_feature (102)..(102): n is a, c, g, or t
cctgttgacacaaacacatcaccatcacggnctgtaaacaaattgatcacaaaatggaaaagtcntggtttctctttactttttactttccctgatatcttnccctttgtcgtcctttcctgatttgtctttttcaaatttttctttttctggtttggtcacactatcatacgagggtggagacgtggtggaaggcgtcatatcggttttctctggagttgaattctcattcagtttatcaatgagagtatcttctttgatgggtgttccatcacattctttgcctttgtctttcttgtatatacttgatacctttttaactttttgcttcaagaggtagcgtctgtaagccctctggataataatagcagacacctcctctt

SEQ ID NO: 437919 - DNA, 206 bp, Homo Sapiens
  misc_feature (29)..(29): n is a, c, g, or t
  misc_feature (69)..(69): n is a, c, g, or t
agaatcactagtctgggggaactgctgcnttatacatgtaaccccaggcacagactaatggaaagcaanacaaactgctacatgcttactctacagaataggtttgcaaatttaacctacagtacatttaaatgcagcatatctcatatttgtattagccatattttaatacaaactttctgtatttcctttctgccattatcctt

SEQ ID NO: 437920 - DNA, 280 bp, Homo Sapiens
cccacttacagcaagtaaaagtggtctgaggttatccttgtttttcttcgcggtttgccatgtgtgaaagtagatttcctgctattgatatattctcattatagacagaatagtggagaacagtgttgccatggacaaaatccagttttggtccactctggggagcatttggacctgtggtgcttctaacaattaaaagtctagatggtccttgactgtcccccagccatactgcatactactttgtgcattctactttgtgtcattaatgaaagattgg

SEQ ID NO: 437921 - DNA, 809 bp, Homo Sapiens
  misc_feature (6)..(6): n is a, c, g, or t
  misc_feature (628)..(628): n is a, c, g, or t
  misc_feature (648)..(648): n is a, c, g, or t
  misc_feature (675)..(675): n is a, c, g, or t
  misc_feature (677)..(677): n is a, c, g, or t
  misc_feature (705)..(705): n is a, c, g, or t
  misc_feature (727)..(727): n is a, c, g, or t
  misc_feature (731)..(732): n is a, c, g, or t
  misc_feature (755)..(755): n is a, c, g, or t
  misc_feature (770)..(770): n is a, c, g, or t
  misc_feature (776)..(776): n is a, c, g, or t
  misc_feature (780)..(780): n is a, c, g, or t
  misc_feature (788)..(788): n is a, c, g, or t
  misc_feature (802)..(802): n is a, c, g, or t
ctattncaatggtaaggaatctcagtttggctggagaatagacttcaaatgccagctgaaatccagacggtgattggcctcaaagatggtgaaattaggtttttacatgcttattctcctcttaatgcccaatgagtaactggtttttctcccattttcttattaaaggaaaatgaaaaactgagtaggctgcaaatgatgggattttatttcggctctgcaaggatttttataaatactacagcagctgtttacatgttttccatgattgccccatgcatatcagaatgattctgctcattgtttcatgcataagcccacatttgactagtttatctttgaatgtttgccattctcattttgtttgcactcctttgggtaatattagttacctgatgaagggactctcctgtatttggaattccaagctcttccaacttcagaatgccatgtctttactacatatattatgtagtactgttaaacaatcagtttgagatctgtagcacaattcacagagcaacaatctctcctgtatttccaaataaagtctttgaagggaatgatatttgcagaatgtgctatagtggtaaatttagagagtacaagataattacttgtaattatngcaatttctgtaagggaaancatcttaatttgttcccactaagaaananaatcgccccacccctagcgtgtgaatcnttttaggagagtaatgcggtgngccnncattactttgaatggacattacngcttttcactacatntgaaantacnccttaatncatgcttctgtttnaatttct

SEQ ID NO: 437922 - DNA, 1454 bp, Homo Sapiens
  misc_feature (1279)..(1279): n is a, c, g, or t
  misc_feature (1299)..(1299): n is a, c, g, or t
  misc_feature (1323)..(1323): n is a, c, g, or t
  misc_feature (1326)..(1326): n is a, c, g, or t
  misc_feature (1454)..(1454): n is a, c, g, or t
cggctaggtacgaggcctgggtgtcgaattcggcacgaggaaagagttctgccaacctgttcctgcctgtgacagcatcctgggccagacgctgctgcccgagggcctgacctcagatgcacagtgtgacgactccttgcgagctgtgaagtcacagctgtactcctgctactagcccgtcccccagggtcaccatctttaattcttttccttcttttctttggagaggcacaaggagaatttaagggtccatggattcagtcttgctccttgtaattaaactgcaggatggaggaacagcctgagatatgagcatgagcccattttggggtaagcctttggttactttaattactccatggaagacatggaaaatgtccccactgattcttaaacatttggaatcccagtctgcaactattaatctggaggctatatctattttgttttgctttttggttggggggtggtgatctggttcttacacatcttggaagcaagaacaatcaggaccaaagtcactttgatcccacttttccaggagaaaaaccacctgtttggccagtgagaactacttgtatgaaataatttggccaaaccttcagtgtgaccaaatgtgagactgggagtttgtgtttttcacaggaaccctaagtatagacctctgctgctcatcaggaaacttactggagatgaaggccccagctgttgtcaccgggtttggaaagcaccttaactgaatcatgtaagcatcaggacataagcagcactttgtggtcaaatgtggaagccggagacttcaaagcacctctgggacccactggttgaagtttgcaatagaaacttaagttttcccaaatccataaagccttagccctggttctcaatagaatcagggacctagcaggaaatgattttactcaacctaaaatgctggatcccaggcccgtgtagctataagaattctggcctggatcccaggtgtacaactatggacaagatatgggcctctactttctcctctataaaatgaggctggatgaaatgtcagctagggccattttggctgctgaggctctgggatttggtttagttactgaatgttagattttctgcctagaaagataactatctagatacaagtggttggatcctgtttttgtttgtggtacatgtgtctttccaagagagatgtgtcaccaattagccctgcctttaaagaaactattatgtgtattcctgggactcactgacaccaattttctttttatagtgatgnttcaattttgaaaagatggnttttgtgaggcctggttataggtnacnaggatcttgtatgatgaattccttcccataccctgagactctggtactatattgtaaacctggcctacagtagttaattacttgagattctttaattttggtctctgagctgggcgtggtggttcatn

SEQ ID NO: 437923 - DNA, 978 bp, Homo Sapiens
  misc_feature (656)..(752): n is a, c, g, or t
agtatttagttctagagatcctattggctgtgcatgatcatggtttctaggccttgtgtgtctatgttaaaagatgtaacaatcataattgtagtaaattaaagtttaatacgtatagttttatttaaattgaagactacaaggtttttatttaacttctatcttatttgtatcgccttcgtgtcacccaccaagaatcttgttactctggaataccagggatgataatttgagaatatcacattcacataagtattcatttggtttgttccacagttatccacaaggtattcttacaatcgttaataccaaaaagtaacactgttactgaaaataatgtttttaaaaagggtttgcagttcttttgtctttagagcatcccattactgattgtacagttttgagtatatcatagttagaataggaattggtaactttgttcacacgtaccaaagatggcatgtaggctgattttgagcagcatccaatcagtatagttatgcattttattttcctgtgtttgaggcgcactgtcacctcactgtttctgggttagcttgctttcttgtcttattctcctctttgtgagcatgtcaaatgaagagggatcaccactttgacagtttggtgtgctgcttttgaaaagccattgatcnnnnnnnnnnnnnnnnnnnnnnnnnnnnnnnnnnnnnnnnnnnnnnnnnnnnnnnnnnnnnnnnnnnnnnnnnnnnnnnnnnnnnnnnnnnnnnnnnagccattctgagggtcaggagtctcctcccttccatccgccaacacttgaatcaggactataaagtaggtgtttccaagtctcaggcaggtaaatggataaattgcaaactggatgcagaactcacatctgcctcatacataggccctgtgacaccccaccagctcctttgctccctttctgcctttctcatgccgtcccagagtcttgcacactaccagatggtg

SEQ ID NO: 437924 - DNA, 442 bp, Homo Sapiens
  misc_feature (135)..(192): n is a, c, g, or t
ttgcctatttgtttttgggtgagtttcccccctccttattctgtcctgagaccacgggcaaagctcttcattttgagagagaagaaaaactgtttggaaccacaccaatgatatttttctttgtaatacttgaannnnnnnnnnnnnnnnnnnnnnnnnnnnnnnnnnnnnnnnnnnnnnnnnnnnnnnnnnggagcctaaacaatagaaagctgtagagattgggtttcattgttaattggtttgggagcctcctatgtgtgacttatgacttctctgtgttctgtgtatttgtctgaattaatgacctgggatataaagctatgctagctttcaaacaggagatgcctttcagaaatttgtatattttgcagttgccagaccaataaaatacctggttgaaatacatggacgaagtaaacctatggtcctttcgtggggg

SEQ ID NO: 437925 - DNA, 813 bp, Homo Sapiens
  misc_feature (65)..(83): n is a, c, g, or t
  misc_feature (580)..(580): n is a, c, g, or t
  misc_feature (582)..(633): n is a, c, g, or t
  misc_feature (635)..(636): n is a, c, g, or t
  misc_feature (641)..(643): n is a, c, g, or t
  misc_feature (647)..(649): n is a, c, g, or t
  misc_feature (651)..(651): n is a, c, g, or t
  misc_feature (654)..(656): n is a, c, g, or t
  misc_feature (659)..(659): n is a, c, g, or t
  misc_feature (662)..(668): n is a, c, g, or t
ggatagaaaggagaacactgcctactttgcaagccagtgacctgccttttgaggggacattggannnnnnnnnnnnnnnnnnnttgggtttgagctacagtcatgaacttttggcgtctactgattcctccaactctccaccccacaaaataacggggaccaatatttttaactttgcctatttgtttttgggtgagtttcccccctccttattctgtcctgagaccacgggcaaagctcttcattttgagagagaagaaaaactgtttggaaccacaccaatgatatttttctttgtaatacttgaaatttatttttttattattttgatagcagatgtgctatttatttatttaatatgtataaggagcctaaacaatagaaagctgtagagattgggtttcattgttaattggtttgggagcctcctatgtgtgacttatgacttctctgtgttctgtgtatttgtctgaattaatgacctgggatataaagctatgctagctttcaaacaggagatgcctttcagaaatttgtatattttgcagttgccagaccaataaaatacctggttgaaatncnnnnnnnnnnnnnnnnnnnnnnnnnnnnnnnnnnnnnnnnnnnnnnnnnnnnannattgnnnaaannnanaannnaanaannnnnnnccttggcggccgccctcggcccctaaaaaacttttctaaacatttcttttgggggcgcggcccccaaagggaaagggaacagtgggcaaaaccttgttcccaaaggaaaccccggggaaagaaataaagggttggaattctcccc

SEQ ID NO: 437926 - DNA, 1079 bp, Homo Sapiens
  misc_feature (137)..(137): n is a, c, g, or t
  misc_feature (195)..(195): n is a, c, g, or t
  misc_feature (202)..(203): n is a, c, g, or t
  misc_feature (206)..(213): n is a, c, g, or t
  misc_feature (713)..(730): n is a, c, g, or t
ggggggaatccaagccctggtcaggcccaggttttcctgggaaacagctaagcccccgtttccctttcccccgggggccccggccccaaacgaaggttttagaaagcttttggggggccggggccggccaccaaagntttttttctcgtcccgtgtgtttttttccccccgccgggttgttttgcggttcgtttncttcccnntcnnnnnnnnggtatttcaaccaggtattttattggtctggcaactgcaaaatatacaaatttctgaaaggcatctcctgtttgaaagctagcatagctttatatcccaggtcattaattcagacaaatacacagaacacagagaagtcataagtcacacataggaggctcccaaaccaattaacaatgaaacccaatctctacagctttctattgtttaggctccttatacatattaaataaataaatagcacatctgctatcaaaataataaaaaaataaatttcaagtattacaaagaaaaatatcattggtgtggttccaaacagtttttcttctctctcaaaatgaagagctttgcccgtggtctcaggacagaataaggaggggggaaactcacccaaaaacaaataggcaaagttaaaaatattggtccccgttattttgtggggtggagagttggaggaatcagtagacgccaaaagttcatgactgtagctcaaacccaannnnnnnnnnnnnnnnnngtccaatgtcccctcaaaaggcaggtcactggcttgcaaagtaggcagtgttctcctttctatagtatctccctccctgtccagattcatgttacctctctccctatctaggcccttcgcaaactaaaagtcccgtgttagaccaaggcttctgtatttaggtattgattttaggtagtcagaggggagaggggaccacagctatcaagccccctatctgtatcaaacttcagagttgatgttcaaagaatgaagcctggcaagggggacacgagaaactatttctcaagaagcaaaagcaaccaggcccttccatgttcaaatcgaaaaaaataccaacccaggttaa

SEQ ID NO: 437927 - DNA, 962 bp, Homo Sapiens
  misc_feature (172)..(353): n is a, c, g, or t
gcaatctggatgcattttcagttaacttcttgggttgccagtttcagaaaggagccatcaccaggcgaagacctatgacatagttgttaaaattcttgtgttttcacgtggatttaagaactaagaactgagtgaattaattttaggagactgtcatgcctgtgtgtgtgtnnnnnnnnnnnnnnnnnnnnnnnnnnnnnnnnnnnnnnnnnnnnnnnnnnnnnnnnnnnnnnnnnnnnnnnnnnnnnnnnnnnnnnnnnnnnnnnnnnnnnnnnnnnnnnnnnnnnnnnnnnnnnnnnnnnnnnnnnnnnnnnnnnnnnnnnnnnnnnnnnnnnnnnnnnnnnnnnnnnnnnagagagagaacacaattggctgattaataaaggaagccattttaaaaggttctaacacttcagtgagagaggcaaaagtcaagcatgaatgattaatgtccctttctatcaatcctgcattgggtctgcaagtggcaggtgctactaaagactctaggaccaagaagctaaaagataactttctcagcatgatgagaatctgcaatctcgggactctgaggaggcaaggtccccacggagggccaacacccggggcgtgggattacagcgcagctcctgactgccgctctcaggagaccagtctcaaagtctaccttcctctccctccaaaaaaagacaagctttgaaaacagatggcaggaaacatagtcatgaagcccgaatgctgactcccttgagaaaggtccttcttggggagtgttcgtaatgtctgggtggaataagggtgacacacgtaccttcctttgccactgacagtggcagctgtgagcatggcccgtggacccattccctgcgtccccaagaaaatgtgtttctatgacactccacgctgccaggttgcacccatgatttgcatatcctgcttttgtgggttctttgagcttagaa

SEQ ID NO: 437928 - DNA, 1489 bp, Homo Sapiens
gcttctttttaatgtaaacagaatacacaatcacattaaaaaccccaacatgacacagaatacacacagaattatatatagatatttacaggccctcgaaagccaaaaggaaaaatggcccctctggttaagggaagcttctcttcctaccttgtccctgtccaaaatcaaagtgctgaggcagctgaaggagcctccgcaattacttctggatataatgtagcaggaggctggaataacatcagaaacaccccacccccaccccagagcacaaccaagataccgactttctggccctggccctaatcctaaactctcctcctttgcaagctgacaaagcaaggatttgtatgtctcgagaggcatcagcatgacccctgaaattcagatgcacggcggaggggttcccatcccattccagctttcccagccttgggctgattgtgaaatgagccaaaaccaaccatatccaagagaggagggtgggggaagtaaaggaagaatggatctcaggcagagatgactgcttcggagcaggaccctgggaaccaaggggaggtcaagctgggctcacccaagcccaggacagactgcggaagacacagtggggctgtgctgccacctggtgggggatgggagcactgcagcaatgaactaggacagtcccacaggtaccttcagatcatcttttctctccatttcagtcccctaaccaacagcctcactgcagcagctcttcccaggaaatgggcttggagaagacctccctttctaaccagaggtcatagttcatctgaaagtcctcagggaggtccacccgttggcccaggacactctgcaggcagttgtccactggcaggaagtcagggttgctgtgggcccggtcatagcgccgggcgttgaagcgttcaatgttggcacgaagggcacactcctctgcctggaagtcccaaggccgggcatcaagatcattgccgtatgcccagtcgtcgttcagccgatgccgcaccttctggtagatggcagacatggtcttcatgttgctctttcgccactgccgccccaagtatttggtctgtaccttgagcagcttcagcacatagagctgcatcatggcttgtttcacctttagggcccgcttcaagatgggggctgacttgaacaccaccagcatcattgtccttgaatgcttccactttgtcagcttgttcaagatccgaagcagattgatacaagaaaagaggttcctccagcaaaattggttactgtcacctgcttccaaactctccgccgtcagctctggcagctcatgcaccacgcagtgagggtaatccaggacagaaatgctgttcttggcagtgatgtaggacatgatgttttgattgaagaactttaggatcaaaggaatgcagttggcaaacaccaggtgctgggccatgtattcaaactggtagacatggttcaacttcaaagtgcttgagcagcagca

SEQ ID NO: 437929 - DNA, 878 bp, Homo Sapiens
  misc_feature (799)..(835): n is a, c, g, or t
cccgttccccaattgtcagaatgtttgcaactgtgttttccatgattgtgatttgtttattgtctctgttgtattcctatatgaatcccagacgcgtgtcacaatgacttacctgccattaagattggattatcagtatataaacaagggccatggttttttttactaaagtaggtctgaaagatcaatataaatactaatgggggcagggaggagtgttttataccccgaactccaatattccagctctgtgtcctgtcctattattataatttgtaaaaatcttaacgacgcagtgattcgagttttcgtaacttcaatgatgtgttagaggacaatgcatcttggtttgaagaatttgctgtatccgaaggccggaaaagtactcgaccacgatgattaaatacataaaaggatgggtgattccttaacgtatcaaatgtcttatttttcagttctgaagtggcatccatgtctttaaactctcctgcaatatgaactataccgtaacaggtaactgcaaaggccagaagtgtctgaagaactatatctattggcagtgattcatcttctttttctgttaatcgcatataagaacgatgctgcgcagcggaaaaggcggcgtgggctagggcaaagagaccgatgcccaccagccccttccacagcgacggcgccatgatgccgaaggagcagcagcccagcaaaagaagcgaaggacggcggagctgtttcttcttccaccggcgggtgtccgcccgctctcgacgaattcgagctcggccgatttggcctgatnnnnnnnnnnnnnnnnnnnnnnnnnnnnnnnnnnnnncgccgccccgcgggaaatccaggtgcccatagactaataccct

SEQ ID NO: 437930 - DNA, 578 bp, Homo Sapiens
  misc_feature (442)..(442): n is a, c, g, or t
  misc_feature (484)..(484): n is a, c, g, or t
  misc_feature (526)..(526): n is a, c, g, or t
cataggtgtaggtaagttccagtagttcgcgtcggtttggggtcaaatatgtgtgagtaattttttgtcttaggaggagcaatacctgtgtccgtccctttaaatgggtaaggagacacccgttgtctcatcgtgtaagactgccacccatgctctatataatctaaggaataaataaactccgagcataaggtatttttgctggagcaatcttgccaataatgtccttttggagcccaatcaataacaatacccatggctagagtttggagtacaacagccttgggagcattacaattatcccataaaatttgaagtcactataaaaggcccattttgtaggtttctttggacagtccggcagtccttttgttttattagttttggtagtgagaggaactctccatgcctcatgtggggtacgtttgacagtgagaagttnaaaagagttagtactgaacacattatatacttgattagaatnatttgtaaaggacggtacagtccacatccaattctgttaagnataagctaaacaaccaggcgacttcccaatacataatggtggatatttatag

SEQ ID NO: 437931 - DNA, 1828 bp, Homo Sapiens
ttccaaggtgcccccctttaaatttcacagagtggtctctttttttgggcccccgtggccattgggaaaaagttttccaaaggagaattcccaacctcccagaaaataatctggccgatcacaggaggctattattcgtaagtccaccattttatattacctttaggagttccattgtaacaccatgcaaaaggcatgctgcttgatgcaatcacagattattggaggactttgaaaaatcccatcacagtgccatctttaaaaattgtggcacatccaacagctgcatgaactcgtgtgtattctaaaagcagcccagaaacatcacaaatggagtgaggtaaagtcttgatgtacaacctaaatatattcaaaattattttcagccatgagatagtcttccagaaggaaggggtacgtcacttactcgtcttgatctgaaaccaagaaaaacgacaaacaggaaactttggatgccagtcatgcggtatttgtcatgcgggactacaattggaaaaacttaatgttaaaatcatcagcagttgataggacaacaggaactcttgtagtgatctgaagtaggcatgcagcttctaaccacactctgatagagtgatcagtggaggcatggctttgattcttcattgtgtctctattgtctgtcttatgccgtcctttgctttatctgaagacgagttgagaaatgaaaggatcatgttgattagctgtcactatggtgacctcttctctatggtacttccttcattaagaggacaattccataattgaaagatcccttgtttactattctgtgtacttttttgactatgcaccgacaaattaggttctagcatcagttgctccactggaatttccaaatagttcttgttaattttgccacctgctgctccatcccttccagctgggaggtttttattttcagaaacaggtacttctgaatccaaattccagtgagataagttctcctgagagatgtttgacacacgtaggctgttagcacagttctcatttcttctccccattttgttgtagctgttgctctgtttccttaaaatccgcgcgaaggcccacgtgtcctccccggcgtgctctcccggtgcgccgccccgaggcccgagcgcctccgcgtgcgtggctgacggcttggagggcgccccctctgccgcggccttcctgcagcggggggacaaagagggcggcgggcggctggcggccttgagcgcagcccggtcggcagtgcagggcctgcgaagcccgcgggccggcgcaggggtgggagtcgggcccggggcccagagagaccttccggggccggggctgcggctccgcgggcttccccgaccggcctgggtctcccggcaactacctagagagcgggggcgcccggggaggccctggcgttccacaaggtccacgcgtattcgcgggcctgcggggtcgcccgccggccgcccaggcgctggagcctctcgtggggtcaacccggcctgccgggccctgcgggacggcacggggcctgccagggggaggacaacacagcctcaggccctgtccctgacgcccacgtccggcctcccccggcggggcttgcgcagcccactcggccatccttggcctgaatggggccggccccgcggccttcgcggggaaacgccctgagccctccccgggccattctcgaggccattctcgggaccttatccccacaggcggtcctgtgagccttacttcgggcccttccgtggtgcctcgctcgaggccttccgttgaccccatcccccaagggccttaccccggaaggcctaca

SEQ ID NO: 437932 - DNA, 775 bp, Homo Sapiens
ctaacatccagtggttaaaaggttcatctggtttcgaataaagtccagtctatcatttggtcttccctctcttccactgaataatgccttttatcttcagctgccaggtttactgaatccattatgtttttcacagtagctagtatctgtttagctctgatagtgtgctgttcgaactttgttttcactgctgactgcaagatacactcctcaaagatttgttcaaaattctgaaattcctgtaatcttgcatgaaatccttcagcaagtgccacaccactttctggcatcccctgtgctttttgctttctagcactaagaacttcctttgctgaaacaaagaagatacgattctgtgcttctaaagcatttacaactttgagctcctccaccaagaaatgcaggcatctttccatgtgctgtctgcgtacgtcttcccatatattctggctctgatgcagaggcatcccaacgattattgagaatgaaaatattaggcttggaaagccgctcattcaccttgtgaaaaaagtgtttttccgtattcattagtgttgattcagagtttgcgaccataacaaagacatcagcatctaggcaaaacttatcaatccagctatccagctctgtagtgacatctgtgcctggactgtctactaacaccaggtcatctctcaagagggcacattttgcttttggccacaacacacgtacaagacagccagctttcaaatctttgtccatgtgaagggcatgggccagttgattaactgtc

SEQ ID NO: 437933 - DNA, 1504 bp, Homo Sapiens
  misc_feature (39)..(39): n is a, c, g, or t
  misc_feature (55)..(55): n is a, c, g, or t
  misc_feature (87)..(87): n is a, c, g, or t
  misc_feature (117)..(117): n is a, c, g, or t
  misc_feature (127)..(162): n is a, c, g, or t
ccatagcagccttttataagtttactaacaactttagcntaatcccaataaagcntgataccagtcataagaatccattaggaagtntactggggggtaccattatacccatgcctntacgagtccnnnnnnnnnnnnnnnnnnnnnnnnnnnnnnnnnnnntaagagtgaatttggattgcctgagtaacagctgtctggcaaactggacatgatggcgttctcttttcacagatcttgttggcacattccatgcagaagaggttgtggccacatggaactagggcagcaataacctcattctcaaagcaaatcacacagtcgtgctttcgtcttgattctggaggtgagctagaggtggaaccaccattggaagaggagtaactattggtaccattagaaaaagcagggatatatattggaaggccaacatggttgcctgtactaggtgggtcgctcctaaccctccgagcaagtggatgttctatgctctcaggaaatgtaggagacagacgaggagtagatggctgacttcctctgcgctgagtcttcatgttaccagaaggatcactcccaaagccagagagtgggttaactggttcaaatggagtccagatagtttgagcagatgttggtaaagagtcaaaggcaggagagtcaactgctaggtcttctgagcctacagatggtagtgtatctccatacccagaagtttcctgtgctaaatgggcttgttggactaaagtcagccagcctattgcttccaaagtaggaatctgtagagccactttcctagagaactggaactatcatttcgataattggatatcattcttgcgcggctaggaggaacaggattggaggagagccacgcagagccaagagtgccaccttcaaagcttacatcggtaccattgtaatggaaatcattctcttcattgagctctatatagtttcctgtacgcatggcaatatgcatttctatttcttcccgtgctcggtcaacattttcaggcatccctgtcacttcaaagacaggttccttatctctgctcggagttactatgtaggtgtgggtctgctgctgaattcttttaatagttgctcctttgggtccaaccactaatcctaccacacgataagggaccctgacttggacggtggtttgaccgggcagattaggactacatgataatcctcccagggcaggcccatttttgtttcgagatgcacgaatcatggagaagtgctctgcagctgagaggatctctcttttggccatggcaacatcttctttccttccagtgacaacaaaaatgggctcttcaccacgaacaggagtcttgatatacgtgtttgtcttggctctcagtgctttaattttacaaccctggcggccgacgatctcggcgacgtgctcggagctgggcaccgggacgcactcggtggtgttgacgctctttctccggagcagggccgcctgctccccgttcagggcggccgc

SEQ ID NO: 437934 - DNA, 856 bp, Homo Sapiens
cgtggattttgcccatagatgtaaccctgttgccggtgatcggttgtcagtccacgggagtcattgtggctcctaaagtagcctcccgtgtctagcccagtgagcttggctcagtgtgagcaccgctggagaaggtgccatcctgggccttgccatgttcctgtgggggctccttgggacatccgttcccacaccaccggagctgaacccgagcaggtcagaacgaaggtgctggagacattgaggacaagctctggccccgggggtgtgacgaccaggccctgagagatctgtggttccagaagtaacaggagagacagcaacagcagctcgcctttgagggccagagctggcatcgcacccggaagccgcatggtgtccttgctgctgatggcttctggtgtgggcacagttccaggctctggacagtcaccccctccaggaagtcctccttactgccctctcccagttatcagaaagactgctggtcccagagtgggtaacagctgagtagaaggacaggcaggactggtgcaggctcctgaaggctcaggagaacagagggatggaggaagggggctgctgtaggggagaggagcggcccagcttcgcctcactccccaagcatccttcgggaggagcagagccgccagaggggccgccctgggtctggctgtctgcgttgggcagggcgagcacaggctgctgctgggcagcagggctgaggggccggctctctcctcctccttgttgatctcctctctggctccaagttgctcacagagcgatcctgggtcccagatagggcgggcagtcactgctggctgctggcagcctcaggagctcacaccactat

SEQ ID NO: 437935 - DNA, 561 bp, Homo Sapiens
  misc_feature (44)..(266): n is a, c, g, or t
agcggggtttcatatccagtgataccgactttcaagtagtcatnnnnnnnnnnnnnnnnnnnnnnnnnnnnnnnnnnnnnnnnnnnnnnnnnnnnnnnnnnnnnnnnnnnnnnnnnnnnnnnnnnnnnnnnnnnnnnnnnnnnnnnnnnnnnnnnnnnnnnnnnnnnnnnnnnnnnnnnnnnnnnnnnnnnnnnnnnnnnnnnnnnnnnnnnnnnnnnnnnnnnnnnnnnnnnnnnnnnnnnnnnnnnnnnnnnnnnnnnnnnnnncctggggatccacaaactgcactcatgtaatacagcaaacttaaaaaaattttaaatggtaagttcaggggtacaagttcaggtttgttacataggtaaacttgtgtcatggtggtttgttatacagattatttcatcacccaggtattaagcctagtacccattagttatttttcatgatcctctccctcctcccaccctctactctcagaaaggccccagcacgtgttgtttccctttatgtatccatgtgttctcatcatttagcgtcccacttagaagtgagaacatgcgg

SEQ ID NO: 437936 - DNA, 1195 bp, Homo Sapiens
gtgcccgtgatcgtgttcttgtctcttgcacccgcggtgcgttcttcttggggtctgtcagacggccgcctgtgttgtgggtgtttgtttggtgattccgctttgcgtgtttgccctggataaggatgtgcacgttccgatcttcctttcttggcgttccctacggttgggcttctatcagccgctccggtgtgttctcctggtattatttgttgtccagattccagtgataagtgtcccgtcctgctattagttattatatggaaccatgcgaatattccgaagtttggtatttcccttctgttggccagcgcttgagtcattattgggaagattttaataaaagctgcttcgatggatgtggccatggatatccctcctggcttgtggcagaccatagctggtccctactccgacccgaggcaagcgtatagactacttttgtttactgttgcttgatcagggaaattaaacataactgaggttcggtttgccagtaattacttccgaagcagtgtttttgtagaaggtaacgtcttggtgaatacagctcgtatctcgctgaacatccattttccgtgaagtccctcagtgtatgcaagaactttcgtgtcgatcttcttgaaggcagaatcatcctcatctacctcgaagtagatttctgtcgtggtgatggagagagtccccttggccaccaccacgggagcgatgagctgggcaggggtgctgagaaccatctgggcctgcaaggttgtcaatttctgttctcctgtagcagactgactgcatcatcgtctccttccagcataagttctgtctctgcattttggttcactattgcttgacgttctgaatgtgtttctttgactttacgtacatcttcttgccgtagccatattctattgcagctttcagcaatgcttcagcatgagtggagccaaatgcattgcgaacaaatcgtctccttcgacgaagatcatcttcccagtaatccaaacgccagaaatcatgcaattggctatgagaaactgctccccaagcaccatgtttatttgtgagaatattgagaatcttctgtttcagctgatttgctgttacatgatctcgatgtttagcagcactgataagatggtcacacatcttttcttcctctcttctatcagcagcatatgggcaatcccgggaattccggacc

SEQ ID NO: 437937 - DNA, 864 bp, Homo Sapiens
  misc_feature (70)..(96): n is a, c, g, or t
atcaggccaaatcggccgagctcgaattcgtcgagagcgggtgtacgcgcgcgagccccagaggctgcgnnnnnnnnnnnnnnnnnnnnnnnnnnnccctgcctggcgcgacgtgcttccagtgcattctgagtcactcctctcctggctagaggggcacattcctgcgtgacgacttgtctcccgtggcaggagcaacaggctctgctttccctgtgcctgataaccctggcgtactgtgcttgcctctgctgactgttgccagagcgatggcaagtgttgcccagaaaaagatttagcaacattatacagaaagtgctgagtaagcccaagccgctgggaacgttgtcttgaaacgagatccggaccctggtggacatggccctgacatccgcccactgcaggatgactccatcaaccaggccccgactggaaatcgttctcgaaacttgctctcgagagaacatcaatacttgaccagcccaggagctatgaatcacatcattgtggcaatcgctcctttgtctggaaaacaaccacccaccaccagatctctgtgaattcttttgcaagcactgcagagagcggccccggtccatggtggtcatcgaggtgttcacccccgtggtgcagcgaatcctcaagcataacatggactttgggaagtgcccgcgactgaggctgtttactcaggagtacatccttgccttgaacgagctcaacgcggtggatggaaagtggtgaaagaagtttcattcagagcatgcacgggcccacagggcactggccccacccccgggtcctgcccaacctggtggccgtgtgcctggctgccatctactcctgctatgaagagttcatcaa

SEQ ID NO: 437938 - DNA, 364 bp, Homo Sapiens
caattctttgttatcctatcttttgaagaaataacatgcattagaaataacatttcctccaggaacaatgcagcagcttaacagaaagcattcttctgaaagttattttctggtgcaccaccaagtcattcaggcaagtccttcttcttttataatagccataggatatttcttcttctacattcctagtttcacttatcacaaaacggttctcttgttacaggaataaggtaatgcttctcacctacattcactcttatcagctgctaggctgggctgcttgattcagaagtccgatttactgtgatgcagctacaaggatgctgtcagtatattcttcacaatctctcagcatcaatgactc

SEQ ID NO: 437939 - DNA, 2565 bp, Homo Sapiens
  misc_feature (919)..(919): n is a, c, g, or t
  misc_feature (2549)..(2549): n is a, c, g, or t
acaggtgtaaacatctcggttttatacccaaataacaaacttaacagcagtaaaacaaatggtttattactgcatatgttatattaaatttacacaatgatatataaaaacacatactgtttatattatatagtaatttaacatcaacaggagtatcaacacaagtactactcatgcacaaaacatgcatatattggtatacaaaaagcaattttacacaatactgtttaccaaaaattttttcttaaaaaacagcccttccacataggatcaaaggtccaatctggactggattgcactaatatgttcaggtcaacgcttcggtggcatagcgctcagtgagcaattctgggattggagtcatgcccaagggttacttcattaatagtgaatgtctctgtgcccaaggaccaaaattttatcccaaaactaaatcctccaaggaatgaaaggttggactggctacaaattagggagggaaaagaaggcatctaaatgttggataaacggccctagaaggtgttattaggaacaggtcctaggcaccaagtgtggcaaaagtttttgtgaatccttttaaggtccctatcgaggctgctatctctggatttaaggtttggcctccaagtcatgagtctagtaacagttctgagaataaaaccgaatggggatacatctgagaaatgtagactacataaaaaaactatagaatacaatgactgcccctcatacctacttcacactattgtatgtggtgcccctcaacaggaaaaccctcatggagacactgccctgaagactcaaggaacaaatataaatccaaaaattccatccacctgaccttgggatcaaaagatcttatcccaataaaacttgaacatcaaaacctgtaccttgccggatgctcagaaagtttaanataaaaaacagctggtgccacaaaactcactatcaccaccattaaaacctcaatatgtacttctaactagcaaagcattctttaccttccattaaaggcactagcatccatacgtgaagatgaaacaataatttaccttggttttatatttttttaaaaagcattccattaaagtattatacaaaaatgaaaacaccacctttttaattttggcaactagggagaagaaaaataaacacacaaactttctacaccaatgatgtcactcaaaccgtcgtcatcagtttcaaagagccagaccgaaagcggaggatcttcttcttgaggttatgtgaggccttaattttgacaaaggtttttgcggggtggttgtgaaggtctggggccgttaccgtttgaatgggcagagtctggacaaactgggaccaaattaagcccccgctttcttcagagtcgctggtggttgtgctctcccccacgaactcgccctcgctcacactcgactcgctgtccccgaagcagttggtggtgtaattgctctgctcgtcctcactggtgtccaccacggtggagtggaacagggactcgcactcggccgagtactcggagtcgctagccacgtaggcgtaggggctggcgtagggcagaggcacaggcgcggggtacagccccacattctcccggcgaccgcgccgggccctcctcagggcctcttcgtaggaaatctcggccgaggacttccaccgccggtagtcagttcgcttgtgcttaggtttggccaccaccgcctcccgtccgtggccatgcgccctgctccccgccctgtggcccccgcccgcgggcctgccgggaacaccagcctcgggcccgcccccactcttcctccccttggaggaggctttcttgagtttcttatttgtatccaagtcatctgggaagcgacacttcttgctcccggcccgcgttttctccctgacggtgggcaagccgttctccagcccctggagggctgggccgcggtgcttcaggctggagttcttcacgacgcccatgttcctgtggccccggtggagcctgacactgggctgctgccccgggataaactgggccttgaccaggtgcgcttcctccaggctttgggaagagccctcgctcttgaaatccaaggcaggcctctcttccacggggaaagctgtagacagcaggggaggagtggccggggggacgccctgcaggctgtttttctgtgacatctttttcaggggctgtacaactttgttctcctgcggcggggcagggcctctgctaggactctcttttggagaggcccctgagagctgagcgctttccttaggggactcccctgtcccaatggcggaacaccgagcatgttcttgcgaggctggcttggccgtttttggcaggtgcttactctgaaggtcggaggcagcgcctgaggggcagccctctggcaggggcaccctcttgctttcggcttgttcggcctttgattctttcgaccactgcttcggtggggagaatgtcccattgttcagagaaggtatcccgccagagggcagacacgcctgtttcgaattcttaaggttcacactgttgccctgtgagacancgcccggggctctgac

SEQ ID NO: 437940 - DNA, 210 bp, Homo Sapiens
acccggccgttctgttgctttcctttttaaaattcactttctcctctcaatcatagttggcttaaattcgactttcaaatagggaaaaagcataccgatattctgccactttttttcaatgtggtgttctatataaaagagaaaactcgtagtatgtaaaatttcactatattcctttgaaatcatgagctaacataacatctatgtaac

SEQ ID NO: 437941 - DNA, 940 bp, Homo Sapiens
  misc_feature (48)..(48): n is a, c, g, or t
  misc_feature (466)..(466): n is a, c, g, or t
  misc_feature (722)..(722): n is a, c, g, or t
  misc_feature (894)..(894): n is a, c, g, or t
agctccacatttttctctgcccgctccttatccaccaggttcacgttncaccagcacgtcctcctcctcctgcagcacgcctttgtccttgagggtaagaatcattgtctccccttctcggaaggaatcaatggcatgctccacggtgaggccctgcaggtcccgggcactgtacaggtcctgccgcttctgcccgaactcctcctccaccagagtgctgacaccaaactcttggtccatctcctccagtaacttggccctcttctctgccaggtccttctccttctgcagctgccggctcctctcgatccaggctgcagtgtcgtccagccaggggtcatcctctcctagggtctttatcttccccagcttttggttcagcaggcgcttctccttggcagctgccagcttctcccgcagctcctctcgctgtcgcaaggccatagggttgatgacatcagctgtncacgggctcctccttggtgcccgcctccttcttgatggcattaacctccaagggtttcagccccaactttgcccggagtttgttagtctcctcgatgctgagtgaggaggcatcgcctgagttagttttggagctggcagcggcctcgtagccgtcatcgcgcttctcccgcttcacgcgccgctcggagggctctgcctggtgcgctcccgcccgtgcgtgctgctccgggcctcagcttcggccccgcgccgcnctgttcccgcgtttgcccccatgttcccggctccgcttccgtcgttcgccaccgctaccgccactgccgccactccggtgcttgtgttttttgtgttcccggtgccgcggcggctgctcggtggcacccccggtgccggccgccgccgtcgtcccggccgcctccttctctnccgcgatgcttcttggacgaccccatagtggcacgtccactccgag

SEQ ID NO: 437942 - DNA, 608 bp, Homo Sapiens
  misc_feature (55)..(55): n is a, c, g, or t
  misc_feature (82)..(83): n is a, c, g, or t
  misc_feature (115)..(115): n is a, c, g, or t
  misc_feature (130)..(131): n is a, c, g, or t
  misc_feature (149)..(150): n is a, c, g, or t
  misc_feature (172)..(172): n is a, c, g, or t
  misc_feature (177)..(178): n is a, c, g, or t
tgaaaaaataaggagggagctttatttaatatgaaggttgaggcagggccggggncgggagggccgctgtcactttggtganntggtgttcgcgttcatgcctcttgccgctgcncgctgagcacagatnngtagggggtcttctgagnnccttctgcttctcctggagcangggcnncacggtgcccagggggcgtgtcgctggagctcatcttcttcaggagcgcctcctcgtccagcttcttcatccgccgctctgtcttcatcttgcctgagcccttgccatggaagcggtgcgacagctgccggaaagcctccttgggtgtgagtttccggcccgtctcatccacgtattcgatcttaacgtcgggtttgtagccgtccttctccttgaagtcctgtgtgaagcctcggtattcctccctccggctgtacttgtcatcgatggccatcttatcctcgatgcagtacacggctgagggcagcgacttgttgggggccttcacccgggccaccttctgcactgtggtctccaacaaccccttggttctgaacagggagcagggagctgccagccccctatttaccatcgggtcctgtacaaggat

SEQ ID NO: 437943 - DNA, 1857 bp, Homo Sapiens
  misc_feature (120)..(128): n is a, c, g, or t
  misc_feature (419)..(419): n is a, c, g, or t
  misc_feature (489)..(497): n is a, c, g, or t
  misc_feature (555)..(570): n is a, c, g, or t
  misc_feature (710)..(768): n is a, c, g, or t
ttttgcgtcccggggtgggggatattggttggtgcgccaaggcgccccacaaagggagctgtacattgcccggggggggagatatgtgagggttttaaacacaacgagcgtatttaggannnnnnnnnccactacacttcccggcggagaaggattctaaggatggaaattcgttgacacgcgagtccgtctacgcaagtagggggtagcaaacaggtggtggggcgccgtgtgaattcgtgttatattcgggggcggtgcgccgtgggaaaaaactcccggggggagaataaaaagaaggccacaactaaaatagggccgccccaaaaaaatgggcccattatatagaggaaattttggtgtacaagagaaaacagtctctgcgattgtcggcgcgcgccgcggggggagggtttgtntttttgttggtgggtggcggaaaatatggcccacaaaccgccctcttatgtcttaagggtcccacgaggnnnnnnnnnggggtgggaaagcaccactttatataggccccgggggttctcctattcgccctgtaannnnnnnnnnnnnnnntgcccaaaaggggaagggggtgtttaaaaaatcttcttctgaatggccgggggcgggcccggcacaaaagtattaatttattgcgtggtcggcgttatggggggcatgtgggggtcgtattttaatagaaagatatggtnnnnnnnnnnnnnnnnnnnnnnnnnnnnnnnnnnnnnnnnnnnnnnnnnnnnnnnnnnntccaacaaaactttatttacaaaaacaggaagcaggcacgtttggccctcagactgtaatcttcccatcactactcttaatgatactcagatgacctggctgcctgagggggctgtggcctggtctgattctctgtgagatggaaaccactctagggtctcctggtgcgctgaggctgtacacaccggcagaacagggcactgcgtttggaagtttctgaccaagtggtgacagcagagggcaaaacgtgaaggctgtgctggataaggctgaaccttcctcataagcaacaccaactgctttattccaggtcagggccaactcttccgccatgatacatacatggtccctggcgggcactgtccttactgggcccctaggagtccctgcgttgtggcctgaccaccagcccctctctggtgatggcccagttgtagttcttccgggagtccaatgctgcttccacccgtgcctccaggttctctcgggtgatgaagtttttcacctcttcctgcagctgcagcacttcccgctccttgcgctgcgcccaggcctgcacctcttcggccttgcgggcctgctccaacgcctgccgctgctcctgctcccgctcctcctgccgcagcctcgctatccgcagctcgtgcagccgccggttctccgcctggttccaggccatcagctcgcggtgctcggcggcgtccttcagggccttgcgctccgccagaaccccggctcgggcctcgtgcaccttcctctgcacctcggacacgaactccatcctgagggcgcgcacggtctggcggtagtgctggtaacgctccatcagcacgaagaactccgcagggtccaccgcgggcggcatgttcactcgctcgatcttggatttggccagcgggtcgtggcgggtcttgcggccgcgcgctggcagcaccagaggggcccggggcctgcacggggtccccgcgcccaggcggctcagcgcgcgtagcatggccgagtctcccctcgtgccgaattcgccacccaggcctcgctacttaggacgtttgataatattaaggcgcgcgcggtaggtgaggggaggag

SEQ ID NO: 437944 - DNA, 2458 bp, Homo Sapiens
  misc_feature (588)..(588): n is a, c, g, or t
  misc_feature (609)..(609): n is a, c, g, or t
  misc_feature (620)..(620): n is a, c, g, or t
  misc_feature (623)..(623): n is a, c, g, or t
  misc_feature (677)..(677): n is a, c, g, or t
  misc_feature (685)..(685): n is a, c, g, or t
  misc_feature (733)..(733): n is a, c, g, or t
  misc_feature (735)..(735): n is a, c, g, or t
  misc_feature (746)..(746): n is a, c, g, or t
  misc_feature (775)..(775): n is a, c, g, or t
  misc_feature (779)..(780): n is a, c, g, or t
  misc_feature (806)..(806): n is a, c, g, or t
  misc_feature (809)..(809): n is a, c, g, or t
cgctctctcttccatcgtttagttgtttgtgtcatttgacggccaggtctcacctagcaggagccagactctgtgccacacccaaccaaagatccaaccctggaatctgtaccacgaccagggaggaaaaaataaggagggagctttatttaatatgaaggttgaggcagggccggggcgggagggcgctgtcacttggtgatggtgttcgcgttcatgctcttgccgctgccgctgagcacgatgtagggggtcttctgagccttctgcttctcctggagcagggccacggtgcccaggggcgtgtcgctggagctcatcttcttcaggagcgcctcctcgtccagcttcttcatccgccgctctgtcttcatcttgcctgagcccttgccatggaagcggtgcgacagctgccggaaagcctccttgggtgtgagtttccggcccgtctcatccacgtattcgatcttaacgtcgggtttgtagccgtccttctccttgaagtcctgtgtgaagcctcggtattcctccctccggctgtacttgtcatcgatggccatcttatcctcgatgcagtacacggctganggcagcgacttgttggggganttaaaccgganaancttctgcactgtggtctccagcagccctttgttcttacacaggagcagggcaanaacaagcnccctattcacgatcggttcctcgtccaggatggtggttgatgaagcananaaatcctgctnctgcttctcctcgtccaggttcaccgtgntccnnccgatgttctcctccccgtcagattnggngccaccgttggctgagcgctcctcatcccgttccaaagtggcatgagctcttcctgttcttcgcgattgccaagccaggcccgtaggtgggggatctcccccaaggtgcggcagaactcggacgtggcgttgaacacgatggcccccttccgctcgggatcctcatcctcttcccagccccggctggcgagactccagcttcttcacaatctcccacccaccttctcgccactgtctcgcagctgctgtagctgctgtaactgtcgcagccggcgtcccttctccaggctgcttctgcagctccagctccgcctcgtcctcctccagcacctgcggggacgccggcggtggagctccaccttcctcctcatcactgatgtccatgttctccactcgggtgtggtccgacggcaggggctgaggcacaggctccttctcctcctccacttcggacactcggcggcgaccccgtccccgcagtctggaaccaaagtccccatcctgagtctggtccccgagaggcagcaagtcatctgcccgcactactacctccttctccttcttgcggattttcttcaccctccgcttggtctttttaaaggtcaccatctcctcaggcgtgaggtattcggaggccagccggggccccactgtgctcagggactgagcctgcagccgcagcttggcccggatctcctccagctcccgctcccgcaggccatcagccgtgccgccctgctccaagcggaaggaatgtggccgctccccttcaagctcttcgtcatacttggacaggatagagcgaggtttttgctgcgcccaggtcgtccacgctctcgtcctcggcatagggcaggtagtcaggcttcttcttccgcagctccacatttttgctctgcccgctccttatccagccaggttcacgttcaccagcacgtcctcctcctcctgcagcacgcctttgtccttgagggtaagaatcattgtctccccttctcggaaggaaatcaatggcatgctccacagtgaggccctgcaggtcccgggcactgtacaggtcctgccgcctctgcccgaactcctcctccaccagagtgctgacaccaaactcttggtccatctcctccagtaacttggccctcttctctgccaggtccttctccttctgcagctgccggctcctctcgatccaggctgcagtgtcgtccagccaggggtcatcctctcctagggtctttatcttccccagcttttggttcagcaggcgcttctccttggcagccgccagcttctcccgcagctcctctcgctgtcgcaaggccatagggttgatgacatcagctgtcacgggctcctccttggtgcccgcctccttcttgatggcattaacctccaagggtttcagccccaactttgcccggagtttgttagtctcctcgatgctgagtgaggaggcatcgcctgagctagttttggagctggcagcggcctcgtagccgtcatcgcgcttctcccgcttcacgcgccgctcggagggctctgcctggctgcgctcccgcccgtgcgtgctgctccgggcctcagcttcggccccgcctcgtgccgatgtagccacccggcctcgtaccgttagccggtatgtttgcgta

SEQ ID NO: 437945 - DNA, 1047 bp, Homo Sapiens
cgggaaactacccccatttttgtttggccgtctcccttttccccccagggttggggtttcaacaaggaagtcttctcttctttcctggaaggaacgcctttttccttggagggtaaagaaatcattgttctcccccttcttcggaaaggaatcaaatgggcatgttcccccagtgagggccctgcaggttccggggcactggtacaggttcctgcccgcttcttgcccgaactcctcctccaccagagtgctgacaccaaactcttggtccatctcctccagtaacttggccctcttctctgccaggtcccttctccttctgcagctgccggctcctctcgatccaggctgcagtgtcgtccagccaggggtcatcctctcctagggtctttatcttccccagcttttggttcagcaggcgcttctccttggcagccgccagcttctcccgcagctcctctcgctgtcgcaaggccatagggttgatgacatcagctgtcacgggctcctccttggtgcccgcctccttcttgatggcattaacctccaagggtttcagccccaactttgcccggagtttgttagtctcctcgatgctgagtgaggaggcatcgcctgagctagttttggagctggcagcggcctcgtagccgtcatcgcgcttctcccgcttcacgcgccgctcggagggctctgcctggctgcgctcccgcccgtgcgtgctgctccgggcctcagcttcggccccgcgccgcccgctcccgcgctcgcccccacgttcccggctccgcttccgtcgttcgccaccgctaccgccactgccgccactccggtgcttgtgttttttgtgttcccggtgccgcggcggctgctcggtggcacccccggtgccggccgccgccgtcgtcccggccgcctccttctctccgcgatgcttcttggacgaccccatagtggcacgtccactccgagcccggctgccgccgagcccagacaaccctcgtgccgaattcgccacccagcctcgacctgcctatgttttccccc

SEQ ID NO: 437946 - DNA, 995 bp, Homo Sapiens
  misc_feature (32)..(32): n is a, c, g, or t
  misc_feature (309)..(361): n is a, c, g, or t
tgccaatgtttaaaacccccctcccgggttanggtagcgaggcctgggtggccgaattctggcacgagggttgtctgggctcgtgctggcagccgggctcgagagtggacgttccactatggggtcgtccaataagcatcgcggagagaatgaggcggccgggacgacggcggctggccgggcaccgggggtgccaccgagcagccgccgcggcaccgggaacacaaaaaacacaagcaccgtgagtgtgcggcatgtgtgctggtaggcgtgtggctggaacgactgtgaagctgtgagcctgggaannnnnnnnnnnnnnnnnnnnnnnnnnnnnnnnnnnnnnnnnnnnnnnnnnnnnccgaatgctttgagtgccctggtatgcagcactgcactgtgtgctgtggatggcggcagcccatggggcagaggccctccgagctgggctgctgtgaagcgggagaatgctgcgatgacgtgctactagtggcctgcttgccagctccaaaactagctcagtgcggatgcctcctcactcagcatctgagtgagactaacaaactccgggcaaagttggtgtgctgaaacccttgggaggttaatgccatcaagaagtgaggccgggcaccaatggtaggatgccctgtgacagctgatgtcatcaaccctattgcttgcgacaagcgagaggagctgcgggagaagctggcggctgccaaggagaagcgcctgtgaaccaaaagctggggaagataagaccctaggagaggatgaccgtggtttggaggagactgagctggatcgagaggagctggaggtgcagaaggagaaggcctggatagaagagggggaagttactggagggagatgacaagagttggggtgaaatctgttgaggaagagtcgggaaggggggggtgtaagtgagggatggggtatgtggatggcaggtacttcgaggggagagagttacatggatgtatgatagggga

SEQ ID NO: 437947 - DNA, 751 bp, Homo Sapiens
  misc_feature (180)..(180): n is a, c, g, or t
  misc_feature (280)..(280): n is a, c, g, or t
gtcgcgtcatgcctctatgcgctgccgctgagcacgatgttgtggtcttctgagccttctgcttctacttgagcacgaccacggtgcccagggcggtgtcgctggagctcatcttcttcaggagcgcctcctcggtccagcttctgcatccgccgctctgtcttcatcttgcctgagccncttgccatggaagcggtgcgacagctgccggaaagcctcctttgggtgtgagtttccggcccgtcttcattccaccgtatttcgatcttaacagtcgggntttgtagccgtcccttttccttgaagtcctgtgtgaagcctcggtattcctccctccggctgtacttgtcatcgatggccatcttatcctcgatgcagtacacggctgagggcagcgacttgttgggggccttcacccgggccaccttctgcactgtggtctccagcagccctttgttctgacatcaggagcagggcagctgccagccccctattcacgatcggttcctcgtccaggatggtggtggaggaagcagagaaatcctgctgctgcttctcctcgtccaggttcaccgtgctccagccgatgttctcctccccgtcagattcgtgagccacctttggctgagcgctcctcctcccgttcaaaagtccatgagctccgcctgcacctcttcggccttgcgggcctgctccaacgcctgccgctgctcctgctcccgctcctcctgccgcagcctcgctatccgca

SEQ ID NO: 437948 - DNA, 527 bp, Homo Sapiens
ttttttttgaccacattaacatagcttttattacaatatattaattggcccaatttaatatttttaatctcttactgtgcctaatttatgaactttatcatagctgtgtatatatagaaaaaaacataatatatatagggtttggtactatccaaggttttaagcatcccttcctcccatcctcagtttcagttatagtcaactgtggtccaaaaatattaaatggaaaagttctgaaatacacactattctaagcaacatgaggaaatcatgggggagttttctgcttcatatttttatagggaaaggaaggtcatgtgtgctcattttattgttcttacaatttctcttgaccccagagtgggtaccacttcctgggggaaggatttgttttccaaaacagagggttcaatttttatataggccctcttatttcccccattaggaattcacttgactagggggcttttatttactctgtcattttaatcatgtttcaaatcccatccaaaggccataaggctttt

SEQ ID NO: 437949 - DNA, 392 bp, Homo Sapiens
  misc_feature (50)..(50): n is a, c, g, or t
aagcctaccttctcccctcccccacggtgccatcaatggaatcactttcntgggtccctcaccttaatcatattcacctggggcaaccaacgcctgacagagttgtagtgcagaaggcacctctttgaagtgaaaaccaggagatcttttatcacttccccagccctgcaggctcagtcacatgtcaaatagataatgaataaatgcatcgccaatgcactctattcatttatttttgacaagtgagttggtgacagtgcccccttgcatgctaataaaatatacagcagccacacttgtaaagtctttgaaatacgaggcttcatgcaagtactccactattaaatctttgcaggaaaatggggtaaccagactgctgggactcttgcaaa

SEQ ID NO: 437950 - DNA, 1603 bp, Homo Sapiens
  misc_feature (71)..(71): n is a, c, g, or t
  misc_feature (77)..(77): n is a, c, g, or t
  misc_feature (79)..(79): n is a, c, g, or t
  misc_feature (166)..(215): n is a, c, g, or t
  misc_feature (246)..(246): n is a, c, g, or t
aagtctattggtagagattaagtaaagtatttattgctacatcatagttgataaattgatgttatcgtacngccatnangtctgttcaagtcttgtttgcttgaaatgattattcctacaagtgaaacactagactatttggagtgtatatggcttgtgttttggnnnnnnnnnnnnnnnnnnnnnnnnnnnnnnnnnnnnnnnnnnnnnnnnnncatttggtagttcatctgccttttaacccantcaccaaaatttaccttgttaacaagcatcaccaatgaacatttcagagcaatctgcatatttaacagacctaaaataaatcctattaggcaagtcagttgaaaatgctcgtgctgctaatggaattagagtgcgttcattttacaggctagtattttaaaagtagaaatcaaaatctggcaccgaagcatgctaattgtttactgtaccttgtgaggttttcactcataaatttaaaccagtgtatttttttagaactggtttgtgtatatatatagtgattatggatactaattcaatgtaatttataattttctatgtcaatacaaaaatacatcacagccttctcaaacagctcaagcaatatattgtatattgcccatatcgtctggtgaaagggttaaattacttcacctcttgcacttttagatgcaaatcagtttttcatttctgtaatagaaaattattcacgtatttttacatcatttgtttttcctgaccagtatttaaaaccaaaaggatattctgaaaaatggccaacaatttttttagaagtagcatcccaagcagcgtgcctaaacattacattgcatatggaaataaaagaatcaaacgtctaatgccttatttctgatttcctttttcattttaagtggtgtggagattccagcactcccaggacagtggagtcagcagtaagccctgggacaggtggcaagggtgggtcccttgacctttgcacgccttctcaggaaccccctttcccgggtgagcccctctctgaagagactgtcccttggggcctcctctggaagccagcacccccagagggacagggctccctcctgcttgccctcagggctgcctgacttgaatggcgttggacctcggggattactggtagataatatgctctggtctcgcctggtggtgagttttgccagccatggccagggtttggctccactggtggcacacgtggcctccgtggtatggacctggtggcttctccatcccactgtggcctctgtggtatggacctggtggcttctccatcctacccaaggtaacagtgtcttgcttcatcccactgactgctgggagagagcctctgggacttttctttggggcatcattttgttttgtctttcgtagcagggaaaggatatgacaatggggaggacagttcttttggaggttggaggggccaagccaaggacaggagcaagtgtgccctcattttgtttctacttttaatttctgtgtgttggccatactgaattatgagactaacagatgtctacaatacaatacctgtattcaaaataacaaaaataaagcctgattctttgtttct

SEQ ID NO: 437951 - DNA, 355 bp, Homo Sapiens
  misc_feature (181)..(197): n is a, c, g, or t
tagaaacattctaatgaaaagtctagaactaagaagttataataacaaattaaaaactcagtggatgaatttaaccgcttgttaggtatagccagagagattttgtaaagtggaaattagataaatcaaataaaatatctgaaaatactgaagcatgcagagacaaaatatagaaaaagannnnnnnnnnnnnnnnnaaagacagagaggtgaaaagtggagaagaaacaatatttgaaaagataatgactcaaaatttttcagaattgatgaaagacaattattcacatattcaataagtgctacaagccccttaaagggatagatgcaaccatgcctagggacctttatagta

SEQ ID NO: 437952 - DNA, 543 bp, Homo Sapiens
  misc_feature (90)..(115): n is a, c, g, or t
ataaaactgtttgtgaaacagcttttttatccccatggcagagtgacccctgaaagatgcactaacccctttttaaggccataacaagannnnnnnnnnnnnnnnnnnnnnnnnnaaaactcagatatttaaaaattatacaatttacaaaacaaaacaacacaacataaagaatcacgtagcatggggctgcctatctgacaggtcctcttttcctttataaaaatgaaagcaaaaagaaaaaggggttaaatgggtgttcctggtcagcttaacccactctgatcacagcgacagtccctccccgtccctgcctacagctcacactgccagctctggcaacacaggcctggacctcctcccatccccacgggtccctgtgggtcagggcacagctgcctggaatgtgctgaggacagggggccccagaggagggtcatcccttgattttgctgctgctgtgtacacttgatggggtccttgaggtcctcaccagccacagtgacccaggacacagctatgacctcaggcatctgccaattt

SEQ ID NO: 437953 - DNA, 1483 bp, Homo Sapiens
atcaggccaaatcggccgagctcgaattcgtcgagagcggcgtttgtataatctcaaaaaatgttggcttgctgcaattaaaatggaaaaatactaaacgtttacaatgtgagctttttttccgctagtaaggcaagaaatgaagaaacaagtgaagaaagtcaggaagatgaaaagcaagatacttgggaacaacagcaaatgaggaaagcagttaaaatcatagaggaaagagacatagatctttcctgtggcaatggctcttcaaaagtgaagaaatttgatacttccatttcatttccgccagtaaatttagaaattataaagaagcaattaaatactagattaacattactacaggaaactcaccgctcacacctgagggagtatgaaaaatacgtacaagatgtcaaaagctcaaagagtaccatccagaacctagagagttcatcaaatcaagctctaaattgtaaattctataaaagcatgaaaaatttatgtggaaaatttaattgactgccttaatgaaaaggcaaagatgagacatccacaagtggaaacttctcagtagatgaaaaaactcagtggattttacgaagagattgaatctcgaaggacaaaaagaagacaagcaagggtgctttctggggaattgtaaccatcaggaaggaacatctagtgatgatgaactgccttcagcagagatgattgacttccaaaaaagccaaggtgacattttacagaaacagaagaaagtttttgaagaagtgcaagatgatttttgtaacatccagaatattttgttgaaatttcagcaatggcgagaaaagtttcctgactcctattatgaagctttcattagtttatgcataccaaagcttttaaatcccctaatacgagttcagttgattgattggaatcctcttaagttggaatccacaggtttaaaagagatgccatggttcaaatctgtagaagaatttatggatagcagtgtggaagattcaaagaaggaaagtagttcagataaaaaagtcttgtctgcaatcatcaacaaaacaattattccccgacttacagactttgtagaattcctttgggatcctttgtcaacctcacagacaacaagtttaataacacattgcagagtgattcttgaagaacattccacttgtgaaaatgaagttagtaaaagcagacaggatttacttaaatccattgtttcaagaatgaaaaaggcagtagaagatgatgtttttattcctctgtatccaaagagtgctgtagaaaacaaaacatcacctcattcaaagttcccaagaaagacagttctggtcaggcctaaagctctttccgcaatattctttcttttggaatgggactcccttacagaatgacaaccttggcaagaacctaggaactagggaaagcctgcctaaaatcctttacccttatatattagccacttttctccaatgcccac

SEQ ID NO: 437954 - DNA, 2291 bp, Homo Sapiens
  misc_feature (793)..(801): n is a, c, g, or t
  misc_feature (1818)..(1826): n is a, c, g, or t
  misc_feature (1976)..(1985): n is a, c, g, or t
cggcctgcagttcctggggaaaagagtacatctgagctacttgtccaagcctctgtctgcaggtgacaggttttgggggaaatgagatgcattaagtagaacatcatctcgggtcagacattgccccttttgtttgccaatgccccagtcctagagacttgtcctgacagtgccgcacacctacttttgatctctcagagcaggtggctccatccccagactagcctggctgctctccgaggcccctccacctgctccccttattgccccattcttgtggcttgccgggccacttggcttcccttcttgccggtgacagcgttccatcatctccccgctccccaagggccaactgcttctcactcaggctggtgtcatttcaggaggaccaaagcctgcgtgagcctttttattttcagtaaaatggtgcttttttccttacttcgagatactatatataaataataatgtaaatgacaccttttcgtacggagctgtttgagtattgctttacagagctcactaaatcagcttcaacaatcttgagctctgtggctcctcaccctgtctgcatggaagaccttgctggacgctctcgggagagcagacatagcaccagaagccactgggagaagtgttttcgatccgtgtctgggccacagtagtattcactgtttagtctttgagttccgtaagcagtctcttcatacatttcttacagtctggagtgtactgactaaatctgtgtaagcaaattgaaatactctttcttttaggtagcgtcacagtgggnnnnnnnnncctcaggataatttctatacaatttccttactgtcagagggaccagatctttccctcactgtgggcaggggccgtgcaggtggataaaggaagagctggtttccggagagtgactgtaacagcgttgactcgaagctagagatggagggggtggccgtctcttagacattggacacctctcagagcctcctgagggcttctttgtcttctagaatctctaccggtggtcctcctgcaggttctggctcacagacatcatcatgcctttttttccctccctgaggcgccttggcagaagagcgtgaccctgtgagccaggccccccttagctctgcttcagatcacagaacacagacagactcgcgagttgctggacctctttggtattaagtgtttgaatccatggtgggccttttgcaagtagcgttagctctttttaaatgttgaactgagctaaggatgcactttcttgtggacatagaaggggcccacgtaaggccctgagtaggctccttagttgctgctttacctgatgagggccaaagagattaactctgcctcgttgccatgtctcagaaaagttgccatatttcacccagaaggggctcgttttcctcttactcttactttaaccatgtgccttgaggagccattctgggctcttgcacttgcccagtctttctttgccaggggcagagaagggaaagggggtagattgagtgtgccaagggccgtgcaagggcaggcttgctttccacccatctgctgagggagccctctcctctcgctccttgcctctgttcacacctgttgtcttggaagaggatggtccctttgtcttaaggctttgtgataaagtcatctccagttaggatctgcacctgtttccttcgtaatagtgcctggcggcctttctgaagttacaggtggttgggagccctctcgcatgcagaacatctggtagattgatctgccaggcttgggtggttctactgctttctcaatttctaagaaccnnnnnnnnncttaaagagttctgctgaattatttgacaatatttgtaagtaccatgtttccttgtggtgtatgctctgttctggtttctgttttcaaatcaaatgcctgttttgggaggagatgaacgtatttagtctattagatttgcactgctggannnnnnnnnnaaagtgtaaccttgaatagctgtcttattggtttatcctgtaaagattagtcaatcgaattaaaaggtttcgactaatttcacaacaacacaataccaacaatgatcactgaagcgacaaccgagccagaacacgccacaaatcacagctatcttacccacactagatcacatgcacacactaagaggggggggcgggcccgtacaaaatgcacccccgcgggcggggcaccacaattttcgtcgcccgcccgcggtttttgtcatcacgcaggcgcccccctagaggacgagcattattaaagag

SEQ ID NO: 437955 - DNA, 325 bp, Homo Sapiens
  misc_feature (81)..(90): n is a, c, g, or t
  misc_feature (239)..(248): n is a, c, g, or t
ttttttttaattatcaaactttaatcgattgactaatcttacaggataaacaataagacagctattcaaggttacactttnnnnnnnnnntccagcagtgcaaatctaatagactaaatacgttcatctcctcccaaacaggcatttgatttgaaaacagaaaccagaacagagcatacaccacaaggaaacatggtacttacaaatattgtcaaataattcagcagaactctttaagnnnnnnnnnnggttcttagaaattgagaaagcagtagaaccacccagcctggcagatcaatctaccagatgttctgcatgcgagacc

SEQ ID NO: 437956 - DNA, 1418 bp, Homo Sapiens
  misc_feature (32)..(32): n is a, c, g, or t
  misc_feature (1099)..(1121): n is a, c, g, or t
  misc_feature (1408)..(1408): n is a, c, g, or t
cgccccatgctactcacatggaacaagggcancctggcagggcagagcagagcacaaggcctaaggagagtgggggttggaactggattctgaaggtgatgcaggagcccctacctaacccgtgaggaactggaagaaccagggacttcaacctgaagccagcatccagggaagactttgggggaaactgaggttcccaccccaccatagccaggaaacatcagaagggaggtggaggcgcacccaggaacaggaatcccagccaatgctaggggctactgaaaaaaacagcccagccactgtaatatggactggcctcagctctggcccccaagactgcccagggagtaagcccaccccctcagtgggctgggggcaggggctggcccaggcctgagctgggtgtggcagcagcagaaggccccagccctggcacagtgcccacggggccaaggagctccctgagtcagcagtcactgattccacaccgacccgcgttcagggaagaggcgggtctctgtggcgtcatctgctcacgctactcaggtggggcggactgcaagactggcaacaacccatggggccgagtcctctccttgggcctggccaaggacatggggctgagtctggccacagttagctgtcccttaatgtccatgggatcttcggtaccatcaaaaaagtgaccttgaaaaggggatggaccgcttgtttgcttttacaagtgactgattaattaaaaaacataaaaaagggtctaacaacctctagtattcaacacttgcagttttaaaaagatcaactcagactaaacgctagcacaatcatgcatgccccgtggtgccgcggcaccccagaggctctcagggtcagcaggaagtcctttccttgtcatgtcaaaccaaaacagcggcccgcaggtcggggggcacaggcttcagggctgctccactccagggaggctccggccactttctccacaaccatttggcattgctttcccactgccttcattttcttgttcaaatcgtctttaaaattcttcttcagttaactgtacagtaccccactggggctggagcctgaggctagagccacnnnnnnnnnnnnnnnnnnnnnnncatgtacagctttcttttaagaatgcattctctcttgctgagggcaagggtggacaccgctggcctccagtccctctggtcactgcccgtcactcatggcccagatagatccaggccactgcgggccagaggagccctgccacagacctcaaggcccaagcagagtgcagcagaattttttcccctaaacacaaaaacagtccccagatgtcccactgctctggaggggccaggacactgtttgagatgccacactggaagccgctggggcagggacagagagagtngagagagagg

SEQ ID NO: 437957 - DNA, 702 bp, Homo Sapiens
  misc_feature (356)..(356): n is a, c, g, or t
  misc_feature (591)..(591): n is a, c, g, or t
  misc_feature (623)..(623): n is a, c, g, or t
  misc_feature (640)..(640): n is a, c, g, or t
  misc_feature (665)..(665): n is a, c, g, or t
  misc_feature (690)..(690): n is a, c, g, or t
gtccataaagcgtttcacttatattcttcaaacatgatgctaatttaaattaattacttcctatgatatgttattattcctatgattttgccactgttattagttctctcaaaaatacatctagggaagaggattattttaagtaatttgattatctttctatctcttttatttatttctcatttacttaagaaattcgttccattggttggcattgatacagtaaatttgtaaatgaggagacaatataaaaaatctaaattacttgtgcttaatgactgtagcagaatgccttttctctaaatcagattgtctttcttgcagtttagtttgatagatttgcaagctatgctgcnttccatgaagttagctgcgctggtaggaacgcaggcttctttgtctctggttgtagcttgcatgatcgccccattaggcagacaacgtagccggagatcacaaatcaggcccttggttgtagttgctagtgtgtgggaggtgcagagcaggttggcaggaaactgacctcactggggcaagggtggccatggacctgattctttaatgcactctatgtgttcaggaagccacagnccattatttgactctgaggaaagaaaacaagnagggaaaaaccccacanaagtgttaaccaacccctttaaggntacatctgtttttaaagtggaattnaattttgtcagt

SEQ ID NO: 437958 - DNA, 1505 bp, Homo Sapiens
ttttttttactaccacaaacaattagggaattttttatcgttatagatgttgttaaaggactccagtagcaaagatcaaagtctccgaattttgcctttggagaagggggtttcatttcagacatcaaaggtaaggctctcaagtcaatttatgctctgctgggttgagtcagtcaggatacaaattaaggtccatatatttcagtgacaagaaggaaacggttatgtaaatacacaagtattaacatcaatctgtattaaattatgtaaacatatacatcttctgaggtcagcacatagatcctcttctttgagcagagctctactgaaggcattgctcgaatctgtttgggaagttgattcatcgttcaagtgctttgtagtgaacctgagggcatttaggcagcccctccacactgtctgggggcctgctccttcaaaacttttatgcagcctttcatatcgatcttggatgtcttgcagaaagctcccacagggtggacatggtcatagaggatgatgactcccaccatcaccctcatgcagaacatcagggtctcttcactcgtaaacctacttctgtactccggagtttccagcatgactttacagacacttgtcattgtgctgaggcagtctgtggtgttctctattggcagagttttgttttcagagacaaagtgcattgtggcattgctaagggttttcagcattggcgtggcttctgcatagaagagggacattcgattggccatctcattattgacttcattctcaatgtctaggtgcatgttgttgatgcggttgcgactgattgttcttctgtagtagctgaagtcattctgaatagccgggttcctcatcttcagctcatcgaatcgaagggtaaaatgtaaaatttcggcaaactcctttgccagggcctgttccctttccaggtgttgggttggtgtgtagggtggacaagtcagagattccaataaactctgaagagctttttctagtctaatggaaaactcgtaaaatctctttagcctcacaacaagagggcacaccgcattccaagctttcttcttgaagctgaatgtcacttgggattttgaattgcatctcggatctctgggcctgcgcctttgtaagcctgcaggtctgcaaggatgctctcagaatcctgaaggacggcgctgatctggttccagatttctctctctccttctgtaggctgagcattttcaaaatcccaggaaaaagtgtggatagttttcaatttccctggtaaggactttgagcaggtttcccatcccagcaaacctggaaatatctcctgtgattcagtttcaccaatccaggctgatgggatgaaccagcttagctgctgtctggccaaagtaagttggacttcccaaatcaggacggtggcctcctagagtcctgtagcttttctgtccttaagatggtggtaccctgcgagtcgccgccgccctgctctgccgcccgctccgccg

SEQ ID NO: 437959 - DNA, 707 bp, Homo Sapiens
  misc_feature (457)..(457): n is a, c, g, or t
ttttgcgtgtggttttgatggtggttgtagttttgtttcgttttgtttttaagagatgagtcttgaaggcagagttgtaatggccctcctctctcccctcccattcccgaaattagggtagcttaacagaaagccaccttgaccacatggccagggactgagattcaatggggaaagaaagactgtagctggaatgtgaagaatttgatttgcagttgattgcaggttgggtttccggaagggcagacagctcaatgtagtgccatcatagggcctcagatgcccacactccacccccagagcttcacaaaatggaaggaccctggagtcacccttctcccccacccccataagcactcagcctacagattatttcaagtgatcaggagaattaaaacacaccccaaccctgagttgctctttagcaagtctatttacaatttttttctcacctctncctggaggtaaatctgggtttcaagttggaagccatgggtgaggggagttcccccagtgcaatgcccgatgacgagtatccttgccactgcccagttaaacaggcttggatgagctcctgtagacagcagcctcacatccatcagtaggtagcctagttttcatctgttgctacgctgtgaaatgatgggctctgcagtgacaatcccatacagagaatacacctgatcgaggggatgacactacctcta

SEQ ID NO: 437960 - DNA, 915 bp, Homo Sapiens
  misc_feature (748)..(774): n is a, c, g, or t
ctgcctccccaccagatccagcagaaacctcggtccagtaactagaagactcacaaaatcatttgcctttatccctcaaatgtaaaataagaaggttcataacaataataggaataatcataattttttaaagtgaaaaggggaaataaatgttcttaaattatcttttagcttaaatcgtaaacacacaaattctgttgataaactacattgcaataacagacagttcagaggggcacgaaactctaggggagatacgagaaggttgttccaaagtttattgaaaatggaaaaggaaatcttcacggttgtccacctctgataagatcctgtcttaactggagtttccatagtcacaaccatgtaacgcttaggagttaatttaaaagtgctgtttaagctgctttgaatcttctgccaagtttccatggcttgatgttgtcttacaataaattacttatttcatttcttacagttaatccatatgccatttccttggaatgcaaaaaacctcatttattgcccccaccatacaccatcctcctaaaacaaacaaacaaaaaagtcacataatatttccaagcattgttcaaaaataaagcatttttgcaacgaattcttgctatgaaacaatatgcacacaaaatgtatttcttaaattccataaagtcctccaacatgaggcaaaatgataacgtctaaaaagcggctgctcagccacaacatgatcattcaaagctgtgggtcnnnnnnnnnnnnnnnnnnnnnnnnnnnccatttcagttcaaaatactaaaacatttaatcactaaagcattaaaaagaatttacactctatttattttgatcagcttacctcttcagaaatagatatacccccaaatgtgcatacatcagcagctataaacattacat

SEQ ID NO: 437961 - DNA, 320 bp, Homo Sapiens
  misc_feature (144)..(144): n is a, c, g, or t
catttcggaaggagcagtaccccagataatcttttattcaacaaatataaattggcattttattcaattacaaaagattgctagtgtagttggaaacctttacaataaatgtttggggactctcaaagccagtgagggtatganctatcagttacaacatcagaatatatactctattttagcttgataagatttatatgctgaaatgtaaacactcctggatttaaaaaatgtatatatgattgatagatttcttggctctgatagcattagaggatttgttttattttgttttgactgtagtctccgctataagtagg

SEQ ID NO: 437962 - DNA, 1950 bp, Homo Sapiens
caaggaaggccatacggcactgccgcatccacctcgaggtgtttgctcttgtccgctgtctgagtactgtgattctcagattagtttgctgcgttgttgggaggacacagacggttctgtataggctagttcagtaacaacaaaatacactgttttgtcttccctcaaagagagatcttactagaacctgtaaatagaatgtattatttattataagtcactgcagctgatgaaaacagatggaggccatgctgcaggctgatactgatgggtggagttttgtcatcaggccagcctcatcccgaggtctcctccaccattggccgtagccagcaggcttcagtgctcaccgaaagtaaaatcccctccttcagcaagaataaagcaatatacaccttaggttccactaagtaacataggcataagcagggaacgtttcccccactgtgttccagtgcagaggagacgaagcctgtcctcaccgcggctcgctgggcccaggctggctctggaaagcctgtgcggtcctgggcaggaagcccggcccgtggagcaggttttcgttctgcttcagcaataaataagggtgaccacagggactttgcttttggtttcctttcctgtgaaaaggttggttttaaagtgagatacacttttccgtagaacaagtgttctatctttaaaaacccaaattgcagcaccgtggattactggtctcagaacaactcattgcgcatcagatttgactctctgattttctgtctattggccaaattgccctttaactgcacttgaatcctttgtgtactgatgcctttgagctgggcaccttgggagagtgttgtgttgctgtttacggttcttccttgcccttgctaattacagtctctggtgcccagcaagcccctttggcttccttccgtgactggtcacgttgtctgcctgggctcagcgtggacctgccccatgctgcagaacctggcctcacctggacttttcactagaattgccagcttcctcaacttagcagatcattcactcatgcgggcacaagcaaagatcaacactttcttttttggtaagcttgagttttacaagttattttttggtgatgcgtaagacattgcagtgggaaaccattcaacttgagtttattggagtttgctgttgtagcaggttttaactcaggaacaactcttgtctgatctctccgcccctctgccgggaggcgacattaactgtcctctcggagccggtagcgttgctgtccgagtccccaggacggatctcctgcagacctgccttaatgctcagatcgaagtatttcacaagaatacttgtgtttttaacagcccttcccctggacggtgcggccatgagggcctcatgttacggcattgccttttctttctgtggatccagtatcttcctcggctttttagggagcaggaaaaatgcgtctgagagcaactctttttaaaaacctgccctgttgtatataactgtgtctgtttcaccgtgtgacctcccaagggggtgggaacttgatataaacgtttaaaggggccacgatttgcccgagggttactcctttgctctcaccttgtatggatgaggagatgaagccatttcttatcctgtagatgtgaagcactttcagttttcagcgatgttggaatgtagcatcagaagctcgttccttcacactcagtggcgtctgtgcttgtccacatgcgctgggcgtctgggaccttgaatgcctgccctggttgtgtggactccttaatgccaatcatttcttcacttctctgggacacccagggcgcctgttgacaagtgtggagaaactcctaatttaaatgtcacagacaatgtcctagtgttgactactacaatgttgatgctacactgttgtaattattaaactgattatttttcttatgtcaaaaa

SEQ ID NO: 437963 - DNA, 652 bp, Homo Sapiens
  misc_feature (19)..(19): n is a, c, g, or t
  misc_feature (37)..(37): n is a, c, g, or t
  misc_feature (91)..(91): n is a, c, g, or t
  misc_feature (93)..(93): n is a, c, g, or t
cagaacattagaggcaatntcaagcaatgttgaatgncagtaaaccctgctgtcagcccctgctgctgcttgctgccaccctggccagtgntntggcccaggtagttcctccaaagatgtttgaggagcgtgcattggtcatctactttgtggataggcagggcgatctggcatgtgatcaccactgctcagaatgcctcactagagaagcttaaggtaaatccgatatacaaaaatgcagacttacaaaacagatacattaagggataattaattgcattacaaaagggtgctttactttacaaaagaattcacttctgggttcccttaaacagccagcttctcaaatacagtcagaatatgagctgagttacaaaaatgtccatgtacattaggagcatggctgtaatgtggattgaggtacacctgtacatcagccttccgggctgcacagaggttcaggggcacgcagagcatggtggcagagtctccagcattcttagctggtacaagtgggtggggatggctaaggggcaaaatcttccaaaggcagttgcaacctacttctgggcctgggggtgagaacgtgaggggatgggggtgtttcaacacaggaacttgtcctttttgtgtttttcaagggctcaacctg

SEQ ID NO: 437964 - DNA, 1797 bp, Homo Sapiens
  misc_feature (26)..(26): n is a, c, g, or t
  misc_feature (69)..(69): n is a, c, g, or t
  misc_feature (94)..(94): n is a, c, g, or t
gctggttaccatcaccaccaaagagnacaacaactgacaagggcagggcaccgcctcctctgttttctnggctttataaagtccaatttcaaantcagacgcagaactcttcagatttagctttctcacatgagttgcttcacatttttcatcatctttaaggacttcttataaggaaagatgtatcgtatcgcagtcatctgagttagtttctcctccatcacctcatgagtacttaaaaattagacatcaactttcaagagttccttagagagtgtgctctagctggctgcctgctaccccaaagctctgaaagagtaaggttgaagtgctggaacatgctcagattgttttttagttactcaaaagccccttcttgttctgaatgtgaaagctcttcccgttcctgcttactgcagccattctgtgtgtgtggttcagaccctggcctagggccggtgatgtggatgagtgaagggagccaggtacacggcagcagggcagaggagactatggggagcccaccgcctacacagtaggggcagtagcccaagctccacgcctgttgccatgtggaaaagtgggcctagggtggccacagctttgatttttcaagagacaagaaacctagatgttttttggtgccatctctccatttataaatgttggcaaccaatttgaacactttcagagaccatgtgcaggtgagctgtgtcctctaggctgccagctcacagcccccaccccagggccctgtaagctgtgcagtgtgagggcctggcttccccggacacacctggagcagcctctgagtcttacccgtaatggagccggccaaccctgtgtgttatgttggtgtcgctcctgtttttaaccatatgttctgtcccatagcagtcattcacacatgtgaagaagacacaagaatcaaagtacaagttgcctgaatacatgctaataactaagcttctattttcacaggactgatcgatgcacacctttatagcttgaccatatgctgtcatgaaagtagcaccccgacggtgcttgctttactaagtcaccgtgtgtggatgcttttgtcgcattttgcttcactgtgagtagcatgggaaaagggtccacgtctccaaaagactcttccacttgtttgtcccacagccctaagtgccacattgctgttggatgctcccgggatgccttctagaagggggcctcccaccttaagttcaggcgccatctgatagccttttctgcaggcttcatgtccttagctgaccctcctttatcttgcaaacccctgcccctgctgtcccagggaggacgggcttctgtagaggcttctgggaaatgagctgtctgcaggaggtgaagcagtgttttccttggaatgtttgaggacctgcaatagaagatgttgcctttatggccctagagaaagtcaaggaacatggggaccaacaaagcatttccagttgtaagaatatgtcagaagagtgctcggttagcccacggtgccaaaactccaaacaagttccccggtggaatgacgtggccattggagggctgcaggtcgtcctctctgtatgtgccccgcgcatttccttggcctcatctgagatctggtgtcagagttctctgctcctgttggcaaatcgcaccttatctgaacatttgttccagccaccttttgcacatggattccgtaccttgcactagcaatgtctacctacagtaacgtcgttctttttcgccctgtattctcaatgatcccatgcccggatttcggattcgagc

SEQ ID NO: 437965 - DNA, 542 bp, Homo Sapiens
gaccctcccaggggaacccagctcacccacagacgttcagctggtcacgcagcaggtcatacagtgtgcgtacgaaatcgccaaggctgccaagcagctggttaccatcaccaccaaagagaacaacaactgacaagggcagggcaccgcctcctctgttttctaggctttataaagtccaatttcaaattcagacgcagtactcttcagatttctacaaaaagaaacatttaatgacggtttaagactcttttataaagaaaactcagtattatttttgcatgttttctaaccaattttcaactatttaacccacttgccttattttgtgcctatttgctggtttagtattctgatgttcggttgtgttgtcaacaactgttgagttgatcacatacatccaaaagtatagtttcattgtcctaaagtttgtgaaaacttttccatcccttccaactccgttcctatggctggaactataaatgaaatttgttcatggacatattcttgagagagttacagctcaggaagcagtaatacgt

SEQ ID NO: 437966 - DNA, 1191 bp, Homo Sapiens
ctgggttggcccggcagtgatgagggtgttggtcgataacgggaacttggggacatggccgagcttcatcctggaaccgaaccgatctcttgtgaagacactggccagtggttggaactgagggcaccagctcaagccaggtagtcccagtttatagctgccacggagctcctcctcgccggccacaatggctgtcagcgcacctgccacacatggcttgccatctgctgggaagccatagtcccccagtgggttcaagggctcaggccacagccccccaggaaggctgtggcagtggctgggggcccctcctctctgtagagagtggctcctgcacctggcagcagcagccctcctttcggcccttataccaggtgtcaggggcaggtggttcgcaggatgtgtcactcagaccatctgcatcctgctggatgcctgagtcagggccacgggcagccagagaggaggccacactggccacacgggggaactcattgatcatgcggatctcatcatcctctgcagcctctgctgatcctcggccacttgaatgtgaagggtccaaggagccaccacgggggtagggtcctccagctcctggcccaccatagctgggaagagtctggtgatagaggtgctcagagggtggtggactaggtggctcccggcccagtttctgcagtgagtcactggctaggggtgctgcctgtgacattgggccaggggctgcctcagccttgcggctacgggcccgaacaagtcctaggaccagggctgccagtgcaagcaccaccacaactcccaaggaggctgccacggcccctactaatagcaggttgaggtcaggtgccaggcccagtgcggtgtgggtgatatccacggtcacaggcactgtggcactccgggaaccaggcagaggcccccgtgctatcacctccagcctcagctcccgtggtgcttcccgccgggtccggcccccacccccagaggtggctgttccgctgcctggtgcccgactgtccacccgcaggtacagggctcctgtagtctggttaataccaaaatagggggaagaggtggcaagggaatacagaaccaggccatcggcacccccatcctcatctgtggcctgcacgtgacccaagctgtggccacgccgggcaccttcgggcacttggaagtggaaagctg

SEQ ID NO: 437967 - DNA, 815 bp, Homo Sapiens
attgagctcggacccagggacagcgcttcgggcccccgtcgtgctgccgggattttggagccgggcccgcgctgagggcgccagctgaagaaatttggctattggcgatgagaggtggtgaacagtgaccatactggtatacaacactatgggacctggcatttttgctgcatgtgcagcccacccccactaataatgtaggaagctgtctggtccattggaaacactaatctgatctcagaagtggctgatcgtggcaggatgtgtcgacgatgatgatggcaagaaagcaagatgtccgaattcccacctacaacatcagtgtggtggattattctgggaccgagaaggataagggccagtgtgggattggaaagtcttgtttgtgcaaccgcttcgtgcgcccgagtgctgacgagtttcacttggaccatacctccgtcctcagcaccagtgactttggagggcgagtggtcaataatgaccactttctctactggggagaagttagccgctccctggaggattgtgtggaatgtaagatgcacattgtggagcagactgaatttattgatgatcagacttttcaacctcatcgaagcacggccctgcagccctatatcaagagagctgctgcgaccaagcttgcatcagctgaaaaactcatgtacttttgcactgaccagctggggctggagcaggactttgagcagaaacaaatgccagacggaaagctgctggttgatggttttcttcttggtattgatgttagcaggggcatgaataggaactttgatgaccagctcaagtttgtc

SEQ ID NO: 437968 - DNA, 962 bp, Homo Sapiens
  misc_feature (31)..(31): n is a, c, g, or t
  misc_feature (35)..(35): n is a, c, g, or t
  misc_feature (677)..(722): n is a, c, g, or t
tagaagaggaagagaaacttgaaatagagcncatngacccttaagttccttttccctccagaatattattttccaccacatattgcagcaagaggagtcaattccaatgttttcaaaacctggtttattgagagtaattcccagttgtatgcagaaaattgtccactttcaaaaactgttgtagaactgtaagatagccagtaacgttgctaatatgatggttgtcaggaagtttaattaaggcttttgaaaactgaacacttggttgagacttggcatcagctaattttccagtaattaaaacagtgtcttcaaatagccatatatttgcttggctttgcgggaacagtgaaagtgtaactgatgaatatattggcattcttctggttttccaaggcagaggggtcaacacgtagccatctttgtaagcaataatagttaaactaagtcctaatttgtagggtacttttatcagcactgctccattgcttttagttactgtggaatttgtcttcgtgtagtttacaaacacttctacaactgcttggctcaggtactgacgactgatgatgtcattcacctggactttcaacataaatacagacactggaaccgtcaaggtggaggttgccccaggcacctctgtcctctcctcctcagcctcctccagctgcttnnnnnnnnnnnnnnnnnnnnnnnnnnnnnnnnnnnnnnnnnnnnnnatgaggctgaggtcggagcggctgagttccgctctggcggccgcggggaccagccgcgctttcagcagcaccacggccaggccgagaagcagggtgcaggggacacgccggcagagcctcgccatggcctagagccagagggccgcggcggcatattgcggggctccgggcggcggcgggcgccagggctgcgggctcctggcagcgcccgctcgctcgctccccctcgcgcaatctccc

SEQ ID NO: 437969 - DNA, 2010 bp, Homo Sapiens
ttttttttgagatcacaggctttattcctacaaccacagggcttgagcctgactggggcaagaaaacagagtttcatctgagaatgtctcttatgggctgggttctgttcaggggagggtgggaacagaggacaaggaagacaagctcctctggccctaggaacaaaacacatttactccttcaaagaagcagatgatctgaataccctctggagactgaatctgcccatacagcccctggagccaatgggcagacagtactggcatctggcacaaaagggaattcagacccagaacagaagcagcaaaatattttaaaaatagtaaattgttcctggactcacaaatcattgtttttaagggcaagtgcatgcccaatataagtactggggcttcctaagagagctgacataggattacacagctgcctccctgcttcagtggaggccctcacatcccctttgaacacttaacttgggtaggagaggtagccttttcgtctctgttctgggttctgagagctctgcagtctggaggcacagcagactgaggctgacctgggccctgtcctttctgcctggcagtcacaggatgttgtctctacctggagacaaagctggtttccggtcccagacagctggtcaagggagggtagtgtgggtcaacactggccctcagcactcctgagggggcaaagaggatgggcaaagtttggagcaggaggaatcctaggtaaaggtcaggatcatgttcactggatggtcaggcagcggtggctgaagagttgactgatgacagatgggtcagccacagtagacatgtccccgaggtcatggtcattctgagcaatcttccgaagcactcgcctcatgattttccctgagcgggttttaggcaagccaggtgcattctggatgtagtctggtgtggcaatggggccaatcttttctctaatctgcttcttgagctcctcggtgagcttggggctgaaggtgtggccatcacacaaggtgacaaagcagtagaggcattcacccttcacaggatgagggtggcccaccacagctgcctctgcaacagcctcatgttccacaagtgctgactccacctctgctgtactcagcaggtgtccagatacattgagcatgtcatcaatcctgccagtgatccagtaatagccatcctggtcccgctggcagccatctcctgtaacatagtatccaggaaacttcttaaagtaggttgtctcaaagcgttcgtggttcccatagactgtgcgcatgatccctggccagggctgcttgaacaccagataaccttcagcttcaccttccaactcttccccggactcattcaggattgcaggagctactccaaagtatgggaaagtagcagaaccgggtttcatgggtgtggcaccaggaaggggagtcaacatgtggccacctgtctctgtttgccagaaggtgtccacgatggggcagcgctgggcacttctcacccggtggtaccatagccaggcctcagggttgatgggttcacccactgtgcctaacacctgcaaggatgcccggctatgcttggtgacaggctcatctccaaacttcatgagcagacggatggctgtgggtgctgtgtagaacttggtcaccttgtatttgtccacaatgctccacaggcggttcacgtccggatatgtgggaatcccttcaaacaaaacactggtggcaccattggccagtggcccataggtgacgtaggaatgaccagtgatccaaccaatgtctgccgtgcaccagaacacatcctctgcatggaagtcaaacacatacttgaaggttgtggctacatagagcatgtagcccccagctgtgtgaaccacacccttgggtttgcctgtggagcctctggtgtacaggatgaagagtgggtcctcggcatcacaccactcgggctcacactcatcccctgcctcttgcatgagctcatgccaccacaagtcaatccttt

SEQ ID NO: 437970 - DNA, 1648 bp, Homo Sapiens
  misc_feature (1255)..(1298): n is a, c, g, or t
  misc_feature (1385)..(1385): n is a, c, g, or t
  misc_feature (1513)..(1513): n is a, c, g, or t
  misc_feature (1522)..(1523): n is a, c, g, or t
  misc_feature (1572)..(1572): n is a, c, g, or t
  misc_feature (1576)..(1577): n is a, c, g, or t
  misc_feature (1581)..(1581): n is a, c, g, or t
atcctagtcaggatacgttatcccctcaggttttctctttctccagaaaatagatgattgtataagtccccctccctctagaccaagcagcctttggaggtagtcaccacagagataatcttgtccatcccccagctaggccaggtggctcccttctcatcaaaacactggtggcaccattggccagtggcccataggtgacgtaggaatgaccagtgatccaaccaatgtctgccgtgcaccagaacacatcctctgcatggaagtcaaacacatacttgaaggttgtgcgctacatagagcatgatagcccccaactgtgtgaaccacaccctgtgggaagaatggggaacaggttagggtcttatgcccacccctactgaccaccaaatggaggctgggcagagctggaggaagatcctcctcagggattccagccctgccagcacccttttcacagcatccatctcccttccatctccttttctccatgctcccatctcatctcctttatcacactcctgatgacacatatgtctatcaggccatcattcataccagcaccctcagatggtatttcagagccacccacattactcacacatgagtctctcatagcacactcataatagtccctctgttgtgtatttgtgcgccacacactcaattacacaccatcagagtgagtgggaaaaaaaagataattccctttgcttattccatccctaccctcatctctatgaaagagaggccaaaattgtgtttctaaagccttattgagggatattccaaagcatatggagataatttaggggtggagtgggcagaaggtagagtgacatagctttcaagtcaatgggaagaaacagttttcttaagtgtttccggctcccatggtgtgtgctggcagaggactatatgttaatagtgtgccaggtggaaggaattgaactctaagagttatggtcttagaagcctgagagggatctctgtgcccacccttggccttgagttaacagaatagctctccttcaaccaaaccatgggtgcatagggaaagaacatccatgtcagctgtatgaaaaccctccacctgaactgtctcaccctgggcctcaccacctatagattgaggatttatgtcttaatttgatttagaaaagacaatgctacatttccaaaactcagggttgtaggaaaaaaataatttcattacttgtttcctcagaaacttacttcttacccctacataatnnnnnnnnnnnnnnnnnnnnnnnnnnnnnnnnnnnnnnnnnnnnttgccttgggtttgcctgtggagccactggtgtacaggatgaagagtgggtcctcggcatcacaccactcgggctcacactcatccnctgcctcttgcatgagctcatgccaccacaagtcaatcccttggttccatgagatctgcagggatgggcagggaaagactgtgaacagctcaagatgggggacagatacacccgtaccttgcccctgnagggaatgnnagtggacaggggcagtagagtacaggaagggagagaagccccttcaggnatgnnatgnacagaaagaacagggagcagaccccagcttactgggtactccaaccaccctgccatcctcaccccat

SEQ ID NO: 437971 - DNA, 447 bp, Homo Sapiens
actacatacttccgagtctatgggaaccacgaacgctttgagacaacctactttaagaagtttcctggatactatgttacaggagatggctgccagcgggaccaggatggctattactggatcactggcaggattgatgacatgctcaatgtatctggacacctgctgagtacagcagaggtggagtcagcacttgtggaacatgaggctgttgcagaggcagctgtggtgggccaccctcatcctgtgaagggtgaatgcctctactgctttgtcaccttgtgtgatggccacaccttcagccccaagctcaccgaggagctcaagaagcagattagagaaaagattggccccattgccacaccagactacttccgaagcactcgcctcatgattttcctgagcgggttttaggcaagccagtgcattctgatgtagtctgtctgc

SEQ ID NO: 437972 - DNA, 527 bp, Homo Sapiens
aggcgaagccttcagggggagaggcattgctactgggggcagcgtggttgctgttggtgtaggttgcgtagtcactgcgtggagagctgtggtgggtggatacagagcctggacttctcccgttctctgggcagggctcccctccacatagcacctttcttctcacagtgaggttgacctgcccattgcgggctgcgtggtgcatgaggtcgatgacatagcggtgggttttgccggctactggaatcccatcaacatacacaagctcatctcctgggtgaaggcggccatctctgtcggctgagcccatggcaatgacagctccaatcaaaataggctgtccaggctcatctcccacgaggattctgaagccaaatccagactccatcctccgaggatgaacatccaattccttataatctggaccagaggaatccattcgaaaactgtcctcggctgcacttgttgcctactttcataaatggcccttgatttctcgtagagctcatatgatcagcttccgtggt

SEQ ID NO: 437973 - DNA, 1190 bp, Homo Sapiens
gtttcaaaataaaacctgaactttctcccacttttccttatccagaaaggccacgtccaaacccactgttcacgcgatggtcatctgctgaggaaagtttgtcttttggcagttccagtgtcactactgtgaggttccttcctgtcctgctcctccaccgttagtaatactgacaactgagcagattgatgaagagtcagatttaatttgaccatttccacagcttgtctcaatctgtggattcctctttcctagagggcacgaagccatatgtttgatagatctgtttatataagtactgaagcaatctctgattgaagtcctgtcctccaagtttattgtttccagacattgctcgggttagaaacatccctccttgtttattcagtaaagacacatctagagttcctccgcccaagtctatcaccaagacgtggaagacgtcagccttgtggagaccataggccatagctgctgctgtgggttcatttattaccctcaaaatcttcagtcctgcaaggttagcagcttcaattgttgaatttctctgttttagatcaaattctgctggtacagaaatgacagcattggcaactggcattccaagatatgcctctgccatttcctttaacttcaacaatagtcgagagccaacatattctggggacactgtgatggtctcattacttgtcacagaaaactcaaccattccatttttgtttaaaaccttaaatgggtatctgccaatttcagcctccaactcttctgcggtaaaaatcttgcctatgaatcttttggcatcatatattgtgttttgaggatttgaatctgccagctctacgctttcatatcccacatatacatcattgtcagtaaaagacaccatgctgggtatgctgatatgcccattttcatctggaatcacctttacttttcctgtgccaggaaaaaacaccccaacagaacaataggtggtgccaagatcaataccaatcactttaggagtaggcaatggtaaatactgttgtgccaaatagccggccaacaggagagtcaaaacagccgatcctaagatcgtcatctctctggccatcacagtcccgccgaacaggcttgtgatgactgtaccagacgtgaggcaccgcccccactcctcccggcagtcccgcagcccctgggaaacgtccgct

SEQ ID NO: 437974 - DNA, 368 bp, Homo Sapiens
tggctgtcatgggaaccaattcactatatggaatttgccataaagaatactgtatatttcattgttacttatagactgtgtgccacatatctttcgtatcagcaaaatttatgataaacatatggacatgtatatgcatacttcctcccctatagtgtttcttactcaacgttggaccagacaccattggttatgcaggaaagatgaaattcaataggaaacaaacttaaaagcagcttttccagaaagtcataaggaagagcaatgtgaacataatctgttaaaaatcagtgtatgttcatacacgatctccaatttgatttaccagtattgaaaaggattttgttgcaaactcctccagtttgaaa

SEQ ID NO: 437975 - DNA, 717 bp, Homo Sapiens
  misc_feature (504)..(550): n is a, c, g, or t
ttcatcagggatatcagcctgtagttttcttttttagttgtatcctttcctggttttggtattagggtgatgctggcttcatagaatgaattagggagggttccttctttctctgtcttgtggattagtgtcaatgggattggtaccaattcttctttgaatgtctggtagaattctgctgtgaatctgtctggtcctgtattttatttttgttggtaatttttcaattactatttcaatctcactgcttgttgttggtctgttcagggtatctaatttttcctgatttaagctaggaagtttgtatctttccaggaatttatccatctcttctaggttttctagtttatatgcgtaaaggtgttcatagtagccttgaatgatcttttgtatttctgcccccattttgtttcttattgaggttatttgaattttctctctttttttcttggttaatcttactaatggtctatcaattttatttatcttttcaaggaaccagcnnnnnnnnnnnnnnnnnnnnnnnnnnnnnnnnnnnnnnnnnnnnnnnagttcttctctgatcttggttatttcctttcttctactgggtttgggtttggtttgttcttgtttctctagttccttgacgtgtgaccttagaatgtcagtttgtgctctttcagtctttttgatgtatgcatttagggctgtgaactttcctcttaggaggaaagg

SEQ ID NO: 437976 - DNA, 554 bp, Homo Sapiens
acgtcatcatggggatcaccttcctggctgctgggaccagcgtgcctgactgcatggccagcctcattgtggccagacaagggatgggggacatggctgtgtccaactccattgggagcaacgtgtttgacatcctgattggcctcggtctcccctgggctctgcagaccctggctgtggattacggatcctacatccggctgaatagcagggggctgatctactccgtaggcttgctcctgggcctctgtttttgtcacggtgttcggcgtccacctgaacaagtggcagctggacaagaagctgggctgtgggtgcctcctcctgtatggtgtgttcctgtgcttctccatcatgactgagttcaacgtgttcacctttgtgaacctgcccatgtgcggggaccactgagccgccgggtgcccacagaggctcagctccttcttttctgtgcaatacgagacccggccgcaccccgagtcacacaggcccccggggccacggcgttcgtctctcctgtgctgtcctcaggcctccgctcctgttttggtggc

SEQ ID NO: 437977 - DNA, 468 bp, Homo Sapiens
  misc_feature (449)..(449): n is a, c, g, or t
cgtcaaatgtcgctgcctccaatgccaagctggctttgttttatgactggctgttctttagtccagacaaggatagcattatgaacatagaaccagccatcctggtcatgcaccactccatgaagccccacccagccatcactgccacactcctggaccttcatgtgccgcatcattcccaacttctatccaccattggagggccacgtgcggcagggtgtcttttcctccctcaaccacattgtggagaaacgggtcttggcacacctagctcccctgtttgacaaccctaagttggataaggagctgcgggcaatgtctgagagagaagtttcctgagttctgcagctcaccctctcccacctgtggaagtctaaaattgaggagccagtttccatggagatggacaaccatatgtcggataaggatgagagttgctatgacaatgnagaggcagccttcagtgac

SEQ ID NO: 437978 - DNA, 475 bp, Homo Sapiens
cagattcttcctcttggtgtccaattaacaaaaacgttttagagacgagtcaaacttaaccagtgtggctctaatttactggtcatcaggatatagaaaaaaaaagttaataatgtagaaccgaatgggacttttagattacttgttaagatggcaacctatgccagctagttgtagacatctaagggcaaacttgaccaacatttctggcaatgtaacccacaatgtcaagttttggctcagatttcttgtttgcaaattcacagcagtatattttgctcaaggaatgtcaattgttatttttgcttttaaaataggagaacatatctataacttcaaaaaattaatcaataagttaaggagaagccatagaaagcaaaatatgatcacaacaatttcaaaagattctctaaaataatatttataaaattatgcaaatttactcactaagaaaacagattcattagcagtacct

SEQ ID NO: 437979 - DNA, 396 bp, Homo Sapiens
  misc_feature (40)..(40): n is a, c, g, or t
  misc_feature (56)..(56): n is a, c, g, or t
  misc_feature (177)..(177): n is a, c, g, or t
cattttttagagcttttataagccaattaagcttttatancagccttccataagantttgctaggctttgtctgccctcaagacaaacaagcacatctcagccgggcttggggatctctctgggagagaggacagaccaaatcagcctgcaggaccagccaaacgcaacccactagnagattcacacatttctatctttgagggagttaaaaggtgaattttctattgcctttttcagcgctcgataattccaagtgtttaatatttttttaaatgagctaaaagaggccaagccccaaattccacattctattgttttttcttattacccaagaaataaatatgcgttcactgaagaaacgttgcaagttatctatgaatcatctgtcaatcaat

SEQ ID NO: 437980 - DNA, 1070 bp, Homo Sapiens
ggtcattcagaagtccaggtgggtttacttcccattcagcttccaaaggagaaagggggattcccacttccccaaattccccttggggttccagggtccccatgttgaattactgttaaaattccacttttttcagtagggaggcctttccagtgaccaacagtagttttcaggaataggccagaaaacacttctgctagcaaggtgggacttcctgtgtccgacagtttcatagactgaaagagttaaactctccggccagttgactatttgcaaattgaaaatctgcccaaagtgaactcggaagtctgctcctagtggccgactgactgtcctggacacctccttgttgttgaacagcacttttaagtacactgagcgctttctttacatcctcccttctcgagacctccgctctggggcactggtcattgggtgttacgcttcctgccaggcttagctccgggaccagcgtgggctcccaaggcctcctcctgctctgggctgctctctccctcacctcctgctctatcactgcccgatcagtgggctctggagggctgggcttcacaaggtcctcctcgggatacggctctgcaatctcatcaccgggatgttcttctgctgcttgtttccttttcttcttcttggccctttgcactttcctccaggccttccactgttgtaacgacgttctgtattcttccatcttctgtgcgtactcctccgtgtgctcttctaacagttcacttatttcagcttgaatttctgcttcatatgcttcttcatctgctttctggtcagctttttcctttctcaaaacaagtttcaagggagtatttgtaaatctctggaactctcgaagggatttcatctctttccaaacttttatgatagtcttaagcaatgttctatctttttcttgttcagcatcacggaattttcttgtttgtcgaatttcagatttatactcattgatggttttttggatggtatcgagagactgatgaggtttttctggatcaaggccagtccctcgtgccgaattcgccacccaggcctcgctccta

SEQ ID NO: 437981 - DNA, 360 bp, Homo Sapiens
ggtgctgccctttttccgagtgctctgcttctctttgactttactctctatcccctagtcaccccaacccactccttttccttcttcctcttggctgtagctccctcacagggctggggagcaatagacaaactctccaaaaatattttttttaagtttcccaaacttttccagatgccaagagggggccagggaaactgcaactgcagaggggggaaggggagaggaaatgttccaaggccttccctcccttccgcctggaggcgaggataactatgggagcagggtgactctggtgccctcagacagtccacctgggaagggagaaaggccccctaaccatcccacccttgctaccct

SEQ ID NO: 437982 - DNA, 324 bp, Homo Sapiens
  misc_feature (303)..(303): n is a, c, g, or t
  misc_feature (306)..(306): n is a, c, g, or t
catggcctggttggtttgggttttattctcaggaaatcagaaagcctctggagggctttaagcaggcaggcaacacagtctgacttgagtttctaaaaactctctctggctgagatgtggagaataaacctcagtgggtcgaggatggaatcactctccaatgagtggttaggaagccactgctggaattcaaatgagagctggtgcttggaattaaggggtggctatgacggtggagaaaagggaccagttctggatgttctggaggtaggtccagcaagacctgggggtggaaataagggnggngagagaagagggagccag

SEQ ID NO: 437983 - DNA, 297 bp, Homo Sapiens
tcaataatgacacttgggtgggcagaatgaatgtcggcatcaaggagagacataagatcctctataaacagaaacaaacatcactgcagcatacacacaaagagcaactgtagactgctgaaagagctctaaaaattcacatacatttaaaaactagggaatgacatcgcctgaggaaaaacacaacaacctacattattaacaaagattttaaagaacattaaatgcataaatgtcgcctgagctacttactacataatcacaagaaagatcactcgttaagatataacacttgtg

SEQ ID NO: 437984 - DNA, 892 bp, Homo Sapiens
  misc_feature (278)..(297): n is a, c, g, or t
gtctttctttttcttgtccttggctggagtcaaggcagggttgactgtgaaaggttctcccataacagtgggcttgggctgaatgggcttgagttggggactgttgggcatggcttgtgccactgtggcggtcaagcctgaggaagagcctgggctcgctgctgtgaaggtggctgtctggaaggtgtagatttgctgtggggggatggcaggggcaatgggacgggctgactttaggctcttggaaggaaatcttttcaggttttaaactagagggnnnnnnnnnnnnnnnnnnnnccatacacttcctttctaaagaatcaaaggcatcattgcttgtttcatccatcactgagggtccatcatcagagccatcattggataaggccccaaggtctgtgtccccttccccactcaactttttcttacagaggccttttgtgctgaatttgcttgaaggagaagggctatggggctctacaagtcgaactttgggggtagctgagcgggcaggggacaaggaacctttttgtgagacagatgcaccgttgcagctcccaagatctgcatggagaataggttcctctccgtactcactgtccccatccgcttccggcttgctgtcatcatctgtatgggcatgagcttggtggtacttaagtccattgatgtgcttgtacttcttgttgcagtttgggtggggacagtcaattaggacgggggaggggcagtttctgtccagaacagtggttctacctttgtcccaggaaggggccagtggctgagcccatggaattagtacggacacgcttgctccctttgagtcctctgagctagaattcagctccatgtctgaaaaggggttgtttttccgcttattagctgaggaagg

SEQ ID NO: 437985 - DNA, 1148 bp, Homo Sapiens
tgacggcggttccaatggtcatgagcggattagtcctctctagtatttttggcactctggtcacacactcccttttccagcctacactggtgtctgtcagtctttatctctctctctcagtccagagggtcatggaaagataggaggggagaacagagggatgatacctcaaaagccaagtaagctaagctccccacaccttggggaagacatgaccccaataaagctaccaaatcatcctcactttcccagtacaaagagtataaagcttccattgggagactgcatttctaaggagagcagagaaatgttggctgcctcaaagcacagctccactgagtacattctgagactctaataagtaatggcttggatgtgttattccagggtctaaggaacaaataacctcccatggccagtggcccctcaaacaaaatatgtgttaccaagaaacacagcttatattggcccacatggaggttatagactgagctatataaaatcatgtacttgtagacagaggaattgggctgtatatatctgtggcctcaaatgaggaagatatcagatggctagatgacaggacatctccaagaactgctgggtgctcccaggggctgccttctgggccttgccctaaggtgacctggcagactccaaggttccccaagctggggggaatactagtttatctgcctgaggcttaagagccaaggagtggaatagaagaggcaagaccagtgtggggattccccctggggaaaggccccaaggggcttaggacggaaggtttatcgggccccggtgttccccgcaccactcattctccaagtctgtccaagcgtcgaaccccgctctcccccttcctaaaccccgaccccatgcccggagccttccgcgcggtctgatgttgtccacccccgagttattcacaccgtagtcgcacacatcagtcgtttacgccccctttgtggcgcccctgccgcgcgacctgtgaccacgagccgttcgccccctgccagtccttgctgtggcgggtagcggcccaatggataagtcgacgctcccctcccctcacaacaaccccgggtacctccgagtggttcgccccgcgctgttgctgagcctagacgtctctgggtgtgcag

SEQ ID NO: 437986 - DNA, 354 bp, Homo Sapiens
  misc_feature (114)..(114): n is a, c, g, or t
  misc_feature (338)..(338): n is a, c, g, or t
ggcaccattcaaagcttattatcagttgtttgtctacaaactgacaggtcaggtaaagctttaaagcaagttttcagtgcaatgtttatagttccttcttttaagatacttggnaatctacagcctcgaagcatgttaagtaattatgccttggtagtagcaaggtgttaacatgtaaagagaaatgtgtcatgaaaagaaatgagacttattttggctgtgaaatgcatcttaaggtgtggtggctaatgctgtagtatgttgacaacatgcgggattatgaactgcaaatctgtaggtagctggtagctattagctctctgtggtcaccattacangatgtctcagctgctg

SEQ ID NO: 437987 - DNA, 434 bp, Homo Sapiens
  misc_feature (360)..(360): n is a, c, g, or t
  misc_feature (394)..(394): n is a, c, g, or t
tctgtagacgagatatgggtcttttcttgagtccagaggatggagtggctactgtggtactgaggtctgtcctctggctggattctgaaaccaaaagttggggatccggaggaggctgaaccccaataagcaggcctgaaggaggattgctgatgtttggtgggaaactactttgagtagctgcagggaaggaatgtaagtgctggtgatgagacatgggtagcaatcctttgctagcagaagggaacaaagattgagaagttggcaagcttggatttagtcctgtggtaagggtgagaccacctcccatgggtcccaatactgaagtatttgtctccatcacactgggtgtagagctancagaagaggtcaatttggattttttgggtcactncattttgaagagttttggggaacataaagtgggcttcatg

SEQ ID NO: 437988 - DNA, 529 bp, Homo Sapiens
  misc_feature (20)..(20): n is a, c, g, or t
  misc_feature (67)..(67): n is a, c, g, or t
  misc_feature (107)..(107): n is a, c, g, or t
  misc_feature (346)..(346): n is a, c, g, or t
  misc_feature (381)..(422): n is a, c, g, or t
  misc_feature (480)..(480): n is a, c, g, or t
ctgggaagtaaggcctgggntgtcaagcataggcacttgcttttgggaagtgacaagttttgcttgnagaccccacttgcctgcttgacatgctggtatcccagaanactggcacgagcaatggtggtttcaacagtggcagtgaatttgggtggaggcagtgactgttgccgcaggtatttcatgggattggggtcattcaggaaggaggataaatttggctctgttgaatggcttctttccagaatttttggcatctccaagcgttcgagaacagcctcactgatggtgaacctctcaatgtactgttgaaggatcccctctgcctcctcctgggaccgagcgntcttatatgcttcatgcagctctctctctctccgnnnnnnnnnnnnnnnnnnnnnnnnnnnnnnnnnnnnnnnnnnccttcgttcacttgtcccatcttctccagccagtaacttctccatttttttcctttcntcctctttcttgattaagtcctgagaaacacttcttctacgactcttcc

SEQ ID NO: 437989 - DNA, 422 bp, Homo Sapiens
aatggacagcaaagttttgccaagtgcaatgttccagaaaaaatttctagtgcaggatgctttatgggtcagtgttggtatcctgactaatcactaaatcttcagaagaagggagattaacagaaaagacagaggcatgaacccaacctccagagatcttagtttagtagatctgggtaacgcattcatacttatatttttcaaagactttctcaatctgtctgatcattagccaggtttggaaagtattgatgtagggtatattcaggtgacttaggttgggttctcccgaaaagtgggcaatgagatgaaatttgaatgcaaagagtttatttaggaagtgtttcccaaaggtttatttggggaaacaccaaaaggggaagtaggaaaagtgagacaaggggaaaaaagacagccaagat

SEQ ID NO: 437990 - DNA, 834 bp, Homo Sapiens
  misc_feature (651)..(665): n is a, c, g, or t
aagaggatccccgatcgtgtctgtaccatgcccagccaatatacaactgtaaagcaaatatagaaagtcggctgtagatacgatcgtctgttatcgaacacatcagtgataaagctgggttactgctgctttaggtgctctcaccttatctggaagatctgcaaacattacctaaataggctggcaagataaacactttctggaacccgagacttggccataaagataatgctgcatttttctgtcagaatcacatatgatgtgtgttctgtagaggttatttctgcatggaaactcaacttcttggatttagccgtcccagtgttaatcctcattgttggagtgtaaaccaaatacgaagccctcttgcaaagtagcctctttcatcccatacatctaaatacccagtttagcaagcaactgagatttaagtctctctggccctaagaggtttttcctctttgctccctccaatcttgagattgggttttgctttagagtgcaagtatcataattccgtatgatagatggggcctggacacaccatctgctacagggtcacttggtaattaactatagccatataaatgcggatacaggttactaccctcaccctttaccttccttaggtaacagtcgtagataccagcnnnnnnnnnnnnnnnaaattggctttggccagtagctaaagtgcaagactgaattaatgagaagatatattaaatgtagtcataggggactgaggagcaagggtggccttgaagaggccaaaggaatgtccatttgctgagtttcccttccttatgtctccagtctggtgccaggtagtggagt

SEQ ID NO: 437991 - DNA, 1887 bp, Homo Sapiens
  misc_feature (64)..(72): n is a, c, g, or t
  misc_feature (155)..(172): n is a, c, g, or t
aaggatcactttatcataaaataaaatatccttttcatataataaattacctaataaaaagtcnnnnnnnnncatattagcccaggttctttgctacatttatatggtaataaacgcctttattaaaatagaatattaaattataaagaactgcnnnnnnnnnnnnnnnnnngctatttttgttttctctcctctgtgttggtcgcctgtctcgctccctctcatgctctctttctctcctctattttgtctctcactattcgtgttttgtgtttgtttctaggtttggctcaattggtaagggtgggattgaatttgctgagccccctagtgtaacagtcttctgcctttgtgggtaaagagtggagagggggagggggacgacagacagacatcccttcttcccacccccctccccacctgccccccggcaaccgagggtgcccatttggtttggtttctattgtacagacatctcaggatggctcacataggcgggaaggagggaagtcgtcacagggcagttttcttggctgtgacctccttccccacccctccctggctggtgttctggaggggaaggctgtggagaggtgttaattctcgacaggaggaaggagaggaggaaatcccctctgcacctccacctgctccatccaggaagaatgggactctggagctttaagtgctcgggtgatcactcagaacagtcccaccccactatttacaaggatctcctgggactcccatccctccatcctctcttggcccggccagcggaaccaggagggtggagagctggtggcagccccaaatgagcaggagggaagcagcaaagggggtgcaaggcctgtaacaatatgtgattctcagaataggccctgctgcccacctccccccagtcctgctttgccccaggctgacccctctttgaagacctggcttctcctcaaccacatcaggtgggacacagactccatgatttgcatggaggaattcaagctaataaggattcaagctaataaggattcaataaaggttcaggtcaggttgagaggggtgcagggagtcgggcactgcatgggaggagcagctcttccctccaccagtctctcctcctgcctcacgccctttcctgctcctttaaatagcagacacactactctggcgcccccacttccacaaccagaaaatccagcccaagaactactccctaaatataatgcccatagtgatgaaggtgggggtttgaccctttaccccagtattagtcccctcctcacattttcactgagaatggggatacattccatcaataatttgagatgtttctttggaggagtgggggagagggcctccagatgcctgaagaggaatggagggaccatccaaatattcctccccctacttctccccagaaggatggtgtccccaaagctgggctggtaggggcaggggcagggggaagggaagaaagacaaagacaaggaacaagacagagctgggagtgacagccaccaaaagaaagcaaagcaaagagctggagggaaaggaaagagttgaggaaagggaagatcccaaaggaagggaagataggcggagagagtgaagggaaacactgcgggggacaggggcagagaggaggactcctctccagattcctctagcccagcttttgtggggacagatggcttctgagcctttcagccacagaaacgattgacatgcttctctccccaacccctagaagatctatgcaacttctgataggactccaactcccttacactgctggaaactggtgacagtttcccaaacaggatatgggggtggggtgggaggctaaagggtcatgttaggaatcccaaaatcccagaccgtaccagc

SEQ ID NO: 437992 - DNA, 332 bp, Homo Sapiens
  misc_feature (18)..(18): n is a, c, g, or t
  misc_feature (307)..(307): n is a, c, g, or t
tgtgtttctgtgtatgtnctagtttatgtgtgtccgtgtgtgtgcatgtacgtaatccacacacaggcactcataaactggtatttcagtaggggtctaaaatgattgcatttataattttgtgaatattatttgaaagttttttggtgactcttattgtggaaaattgaggacaaaaccacataaatgttttattagaaatatttctaatattttagaaatgtttacttgaaatgtttggttttaagttctaacttgtattaacacaattggtacaaaatatgagcctaaaactcaaaaataattngatttatcgaagttaaagctctttt

SEQ ID NO: 437993 - DNA, 348 bp, Homo Sapiens
  misc_feature (321)..(321): n is a, c, g, or t
ttaactactcagaattctcccatgttcacacatctttttactgtattgctgtgattgtccagttgggcttgaaaaatattatttattttctcatcagttttatgtctaagtttcattgactacaagttggaagatgaccacccagaattacagatcagggagtaatttggtcctctccctaaaataaagagcttttatcctcttaaagaagtaggaatggagtatagtctgtgtctgtgtattttaaactcatgataatgagttgccccatatgtagaaagcatgactctatatggttttcccattcccttctgtaaatantctctagcttacctgcaagttctgtag

SEQ ID NO: 437994 - DNA, 203 bp, Homo Sapiens
tattttacaatgtcttgataacttggggagcctcattatgaaaatatgggaatcacagaatgtctatcttgagtggggattggcaggctttccaggctgattcctcactgtgatgatctcgcacattcaagatttgcagagccttagagtttttcttttgggcttgattttctttgtaattgaaaccaggtaccaatgtctat

SEQ ID NO: 437995 - DNA, 565 bp, Homo Sapiens
  misc_feature (20)..(20): n is a, c, g, or t
  misc_feature (40)..(40): n is a, c, g, or t
  misc_feature (80)..(80): n is a, c, g, or t
  misc_feature (86)..(86): n is a, c, g, or t
  misc_feature (168)..(168): n is a, c, g, or t
ccctaaggctggcccaaaantaatgggtgggggaaaaaanccccaaccaaccttggggggcttgaatgtcccttggaaantcctanggggcttcccccgtggggccccctgaagtgtgcctcgggcaaaaaagaacacgcccctcccatcaccccacacactcctccnagcccacaccttgggcccccaccctgaagatttccccaggagttccctccccttttttaaaacttgaagttgccttcaaagactttttagggttccctagctacaggagcattcagaatgaaaatcttctgggaagagttaacagttgctggtatttttgtgtaggcgacaattcttattcccgtttctctcatttattttgtcactgagtactgacactgaatactgggatcacaccagctcgaagtccagtcctcatcttcagcactccggagcccaaacgctgaactagccaaggggaaagcaggttccataccttttatctaaaaaaacttggcttaaataggtaaatatgacattcctatctcagaaaattttaattatcaagcatggaact

SEQ ID NO: 437996 - DNA, 1264 bp, Homo Sapiens
  misc_feature (869)..(923): n is a, c, g, or t
cattgtaaaagtttttttcaaaatggtggatagtcaacctctgaatgatcaatggggggaagaggatcaatgatttttttggtagggtgcaattggatttcccgtcactatcatattctagattgtcttcctccttccttcctgaaccacaccagcagttgggttttctgccatgtatcgaaaataagcttcttggtcatcttcctcttcaatgtcatctcgaataccctttacgttttttctttccttgtccttttcttcaagcctcttcatgtctctagctgcctgatcctccacttcagccatgaatgcctccaagggatcatcatcgctgtcagaatctactggcttggaatggaattgctggcgagttggtgagttttcagcaggaatgtaaggtaaatcaacgttgctagaatcttcttcctcatcttcaaaataggcattttcttcatcaaagttggcccgcttagatccaattttgtagaaagaaggaagctgtggtggagctgactttccaaatccagaagaagagctggttgcccccaaaggcactgtgggactgctgtgggagtttgggttcctcctttttcccagcactgatggcaaaacctccaaagccaaatcctcgcttagtgccaggaccacctttattccagttcatggtgccaatgactgacctcttatgtgccagaaatgagcttggctctgcaaagcgccttaagacatagtccctgcgcttgaggaagtcctgctgctatggctgcagcggcagctgctacaaccgcgggcgcggagcgactcccggagcccaaagtacgcgctgtcccggcccggtcccgccgcgctccttcctctccgcccccttnnnnnnnnnnnnnnnnnnnnnnnnnnnnnnnnnnnnnnnnnnnnnnnnnnnnnnncctcacggcccgttgctgaaggggggaggggaacaaaaacgcgacatgcgcagtgaggaacgcgcgggcagaagggcggggccggggctacggctcccggaaggcgcctgaccttaaagctccagaacgcctcacaggctcctcagatactctgacgggaaactgcagttgggtggacagtgttcatgacccatctagaaagtgggtctgcgaatgaagaaaaagtggcgtcaaggggctagccaaaaatcccaagagaaaacgggttggacagaaaccatatttacatgaacatgcctatagtttaaactgttgcatatactactagagcgacactcttg

SEQ ID NO: 437997 - DNA, 766 bp, Homo Sapiens
  misc_feature (204)..(204): n is a, c, g, or t
  misc_feature (755)..(755): n is a, c, g, or t
cctagaggtatttactgatttctatatacttaacacatgtacaagacaggtatttcaaaagattaaagagggcagacagtgcgcagatgtctttctcattcctgtgtgcacagatgtctttctcattcctgtatccccatctccttacccagagacacttcccaaacaacaagcgaaatagtaacagctttcgctgttacaggnaaataaagagtaatgaggtatgtaacacggaccaaatcttgaaatatatcatttaaaaaccagtaaatagcataactcgaatctaagcagtgaaaatatgaacgtctacctgaaactcacaggtgcgggagcccacgcacaccataatcaatggaagacgtcctagcacatgtttacaaactggttgtgtgttgccgtcctacacaccagaggcaaagcgctgaaaacaacaagcctgttcacaatagcaccaggaacgtacagtacacaggaatcatctgcaggtgatttgtgacaactgtaggcagaacagtaaaagcgagagatacaatggatggtttgaaaaatcagagacactcttcttccttatcgaattgcaagattaacgttgtactacgcagacaaaggtgtgttcaagatttggatcgtaagcgagttcactgaaaactagcggaggggaagggcaaatactggaagggaatccccggtgtgaccaggccggaaacacctctttcacagcatgggatctgtgcaggtactcggacgctccncgcagggctgc

SEQ ID NO: 437998 - DNA, 1212 bp, Homo Sapiens
  misc_feature (1063)..(1101): n is a, c, g, or t
ttttttcaagaaatcataattttactgtctcaaagaaactttataacttatttacaaagtttttttcccaagatacaaagcaataagttaacattctcaatataaaactaaactttgacatagagaacacaaaacacagttgatttcaattgatcacattttccaaatttcacaagaaaaatgtcaagattctcatttcacaaagcatggggttttacagccacacacaacagaacgcaaaaaggctaagcttgtgcaacatgtttacagaacaacataataacaataataatactaacgattaatatgtacagtcattagatcctgcactggagattgtgcgttcagggtggtgactggcattattctgtggtcgagcctctagggattgttgtaaagctgattttgtcttattttaaagcccactggaattagagtgcttgttctcgcctgttttctctctactccccatttgccctcgctccctctttctacccaaggaggaaatcagcattttccttcttgtccaggcgaagcaacagagttcctcccgaaatgagaaaatcatgttggcttcatttatcgttcttttcttttaaaaattatttattaaataatgtcggacatgtaaaaaatgcaaatcattcggctccaaactctccataccagagaagtacaaaagttactgtataaattaaaaatcaccacgtcctccttattcgtttctccccgtgcgcttaaagtaaacagtgcgtttgaacagtgcgttccttgcgcccagcagaaccctgaattggcaaacagcctcaggcgaagtccatttctcaataaataaaaccccctccctccaatgcccccagattcccacaccagctacacagatggtcaggcagagtgtcccaggatccggagatggtcagcccggcaggacccgggccgctcagaccttgtggctttttgctgaggccgcagaatgaggacagcggacggatgaggacctggactttaccagcgcacagacagagcaaaaggagacaggagactgacaggacagaaaagagcnnnnnnnnnnnnnnnnnnnnnnnnnnnnnnnnnnnnnnnctgatagtcccacaaagctgaaggtcggcgggtcgggtggagcgggtttatcttgctgcttgggctgtctcaggtggcagtggcttccctccgaggccactctctgctgcc

SEQ ID NO: 437999 - DNA, 570 bp, Homo Sapiens
  misc_feature (116)..(159): n is a, c, g, or t
  misc_feature (193)..(247): n is a, c, g, or t
aactgtgctttatttagggctaagctggagaaagcgtcatccaatagttacagaaggttacaaggagttttagggagttgagtgtgaaaagagcagttgtactgaactgcagctgnnnnnnnnnnnnnnnnnnnnnnnnnnnnnnnnnnnnnnnnnnnnacatctggacatcctaaaaggaggagtcaagagnnnnnnnnnnnnnnnnnnnnnnnnnnnnnnnnnnnnnnnnnnnnnnnnnnnnnnnggcaggaggccctagaggaactggaaatttgttcttctaaagggaaactggtaggtctgagaacccccggcctccagatgacctggacatcaatgagaaggaatcaaggcagaatgccaaagcaatcttcccaagggtgcaaataaattataataaatatgttatactttaaaatatatgtgttcttaaataattcagtgttttttctgattctgagttttttaagcaatgtctttaactgctctaaagtcatttaccaaagataaatatcgtgctttcattaaatagttttccttgtttttttctctatcattacaattaaa

SEQ ID NO: 438000 - DNA, 521 bp, Homo Sapiens
  misc_feature (18)..(18): n is a, c, g, or t
  misc_feature (42)..(42): n is a, c, g, or t
  misc_feature (143)..(143): n is a, c, g, or t
  misc_feature (158)..(158): n is a, c, g, or t
  misc_feature (182)..(182): n is a, c, g, or t
cccatgagtttattaccnaagcttattattaagcttttaagncataaggattagataaactgtgttgaaagaaatattacttttatgataaagcagacattatcattgattggaatcaagtaattcagtatcagtaagctaangggtcaaaagaccantgtccaaaaagagcaaaagagaanctcttgtgtactcactgtattagactaacatcatccataaaaaatttaattctgaaaaacaaagtaaaattaacagtggctttggtctttttctttggttcttctttccatccctctggggccactttggttaattttaagtcaggatcaacaaagaaatattcattatctttgagggtagctaaagcaaacaaatgatgctctactaagccaatatgtgccacaaccatatcaaacacatctttacatatagttttggtatcacaggtcagttccagtctttgcccgttcagaagcattatgtttactttccttcggttatcctcggaagtatgtagt

SEQ ID NO: 438001 - DNA, 1114 bp, Homo Sapiens
tcttgttcctggtttaagtagtccggtactaggaaatcacttcatgctttaggcgatgcatctttagcgagtaagccctggtgaactttttcccacagcggtcacactgaaatggtttaattcctgagtggatgagcatgtgctgctttaggttctgaatacgggtgaatcgcaccccgcaggttggacactgaaaaggtctgtcgggaccatttggacttggtcgctctgtactgctggtggaaggagcaatgtagagttggtagggatactgaacattttccaatcgatcatcatcatccggaggagcattagtgctagacgtgctttgaagtgtaggcaagccctcagaaacgccttcatctactgagcctatagaggaagactgtggactaatcagaaggtcctcttggacttgttcacttcctggaactgtctgctgatcactcagcgaactctgagatgcactgacaggctgggacacttcctcatggacctcctcatcacttaatctttctactttgacccggacatcttcttcggtacctaaaggcaaggtagtttttgtgctctcacaagtcacataatcagccattcttctaccggtctcagatgggccaggtaattctaaagtccgggtattttctgcttgcttaactttctcaggctgaatccttcgatccattccaacaaggaaaagtccaaggaaaagctaagggaggagtcaaactggcttgttttctattttctgagtaggaagctgagagaattcaataccctggggtgagcttgtttgtgtgccacactttacaggacttttcaggagacataacaatgtagcttttgcgctttctccgggtttctcggcagacaggaatggttctttctaccacactgcactctgaggacacgggagaaatgctcccatctcgagaagtaaaattcgcagttagaattattttcttgtccagcatctagacccttttcaggttggctgttgggtgtattccataaaatgcttgatttcatgaactctgagcaggtgctggcaacactgaacatttgcatatagctggctgctgctagaacatcaataatattttctgtgttcccc

SEQ ID NO: 438002 - DNA, 340 bp, Homo Sapiens
  misc_feature (13)..(13): n is a, c, g, or t
actagtccacggnttggctgccttgcatgcagtaggcagccaacaaatccttaatgattggtaatgcaagctaaaatttttaatgtctctactatccttttttattgaataacgcacagtattttcctaaggttgctgggtttgggagtaagcttgggacttgaatcattgagaaataaagcacatttgactctaagaagtatgtagaaccttgtttataggtgagaataggctgtattatatgaaaccagcggagggatgctgagacagtcatggtttatagaatccaaattctctgagatgagggtgcttatggacctcaataccacactggactggt

SEQ ID NO: 438003 - DNA, 1817 bp, Homo Sapiens
  misc_feature (51)..(87): n is a, c, g, or t
tcattgaccgctaccttactgggcgaatgcggcttttcgcggtggcggcgnnnnnnnnnnnnnnnnnnnnnnnnnnnnnnnnnnnnnatcaggccaaatcggccgagctcgaattcgtcgagagcggggaggagagagagaggggagggcggcaccgcccctagccccgcgctccggaagtgaagcggccagaccaccagctaatggatgcggagcggagggcccgctgaccgctctccgcgcctggagcagcttggcttggctggagctaagagccagacacaccactgtgtggaggtgggtgatgtcttcctgtgctaaaaggtgaataaataagctcctcacctctcgcggaacactcgggaacacatcaacaggggtccaagccgccctgctgggaggcttctcttcaagagttctgggtcccagagtggaaggcattttcccatcaactggagagagacgaaacatcagagaccaggaggctgtggagaaagcagctgtcccaggtgcctcaactatcagagaagggtcagcgtcacgtggctgccagcatctttgagaaaatcactggcaatcggacttcagagctgcgggcacaggtgtggttagaactgagatacgacctgcccacctgggtcaggcctaaagacaagaagtcctgagttcttgccactgagtaggccagggtcatttgtccagaaaactttgtgactgtctttgagtgacctagtctgggacccattcattggtgggttctaaggttagaagctcatccaggatattttcaatattaagtcagtgcatagctgcaccactaacaaattggtgcctgtagagtcagagtgggtcaattcttaggacaatggcgctggcactgttagaggactggtgcaggataatgagtgtggatgagcagaagtcactgatggttacggggataccggcggactttgagagaggctgagattcaggaggtccttcaggagactttaaagtctctgggcaggtatagactgcttggcaagatattccggaagcaggagaatgccaatgctgtcttactagagcttctggaagatactgatgtctcggccattcccagtgaggtccagggaaaggggggtgtctggaaggtgatctttaagacccctaatcaggacactgagtttcttgaaagattgaacctgtttctagaaaaagaggggcagacggtctcgggtatgtttcgagccctggggcaggagggcgtgtctccagccacagtgccctgcatctcaccagaattactggcccatttgttgggacaggcaatggcacatgcgcctcagcccctgctacccatgagataccggaaactgcgagtattctcagggagtgctgtcccagccccagaggaagagtcctttgaggtctggttggaacaggccacggagatagtcaaagagtggccagtaacagaggcagaaaagaaaaggtggctggcggaaagcctgcggggccctgccctggacctcatgcacatagtgcaggcagacaacccgtccatcagtgtagaagagtgtttggaggcctttaagcaagtgtttgggagcctagagagccgcaggacagcccaggtgaggtatctgaagacctatcaggaggaaggagagaaggtctcagcctatgtgttacggctagaaaccctgctccggagagcggtggagaaacgcgccatccctcggcgtattgcggaccaggtccgcctggagcaggtcatggctggggccactcttaaccagatgctgtggtgccggcttagggagctgaaggat

SEQ ID NO: 438004 - DNA, 374 bp, Homo Sapiens
  misc_feature (288)..(288): n is a, c, g, or t
  misc_feature (312)..(322): n is a, c, g, or t
  misc_feature (340)..(340): n is a, c, g, or t
  misc_feature (343)..(343): n is a, c, g, or t
  misc_feature (357)..(357): n is a, c, g, or t
taaaatgaaaatgcaggctgggtgtggttgtaatcccagccggggaggggctgcagacagcagggggagaggactgcttcttattttttcctttctccttagtctttccctccctttaaaggcttctaaatattaaattgaaatacatgagaatgtgatacagagctgtgatggcagggaaagttcaatatgtattcactaatgaaggtttcctggtacacaaggtacattgaggaaatccatgtttttccatctcacgtaatgttatgtgtatgtgactttgtgggnattgtgtttgggggttcactgacnnnnnnnnnnnaaccagtgtttatatctnatntgctactaatgganctcagatagattttggg

SEQ ID NO: 438005 - DNA, 795 bp, Homo Sapiens
ggtcattagactctgaacaggttttattttgtatgattactttgttaccattgagttacaaatgggcatgattcactgaggatgtgtcttgtcactgcttcctgcttgacctgcaaatgccaagttagtcaggagtaggcttaaaataaagtcactgcagttcagcctgacttactgattactgggcctggtttcttaccaaaactgtgggaatcggttattccaaatagctaggtggagtcaggcagcttcacgtggccgttgctcttgactcctcagtccccaactcttaacccatatctgttttcttgtctatgcaatggtgaacctgttctctctggccttaagattattgctgaattttttactgattgctggtgatatttgaacctctaagcagagttagttattatcatcattgcaattacgtttctactataaatttttttgagttacaatcacaatgttatcagaacatcttttgataacatttcctttattttagataatgatttcagtaccaaggagactttattgctagatccaactcactgttgtgcattaaattttgtctcagatctaatcaactttggtgtaaagtaaaaatgaggtcagaatgctcactaattcatggcttgagctgtccttataagagcaaaactgaatagttgcatatatcattgaaacatttcattgatttattttccttatttatattgatattctctttacagaagtactatagcaatatggaattctgtgttattagattcctaatcttaattatcaaatacc

SEQ ID NO: 438006 - DNA, 827 bp, Homo Sapiens
  misc_feature (485)..(485): n is a, c, g, or t
  misc_feature (563)..(563): n is a, c, g, or t
  misc_feature (569)..(569): n is a, c, g, or t
aaaagataaccacccacattttaatttagcatgagccaatttacagagcatggaaatcactttcatttccggattggcgcgtgtgcaattagcaatgcagtgtatatacaagaagccatgctgttaacagtttatctcaagtaatttggtgtcatttacaaaaggaagaaattcctgccatcagaagggacagaaggagatggaatgatcaaatcacagagaaacactaaaattactaaatctacaacagctcgccttatttttcttggacccaaactgtcagggtataaacactatttgtttcttttttaaaacatcgatagttttgctgtaaataataacactgtataaattctaacagaaaaatagaataaaatgttgataaggcactgcctcttagaacacaaacagaatattgcaaatgcatttaacaaataggggtctcaagtgacttcaccctagaagaggagggagggattctgggntggggggtgactcttcactgattcttgtatattagcaattataatgtttgtatatgcaaaactgctagcttgatttanaaacanaacaaatctttaaaatctgctgcaaatttaaataattcccaaaatgaggaattctgtagttctgtgaaaaatttttttcttcagaatactaatattttgatgcatgtgtatcaccttattttgattaaatcttttccaattttgcaaacactacagtatactgcaacacaaaagattttatctgtaaacacaaagcccttcatctaatatttgttgctattgccaatttttcaatggaaatggaccctaaaaacaacc

SEQ ID NO: 438007 - DNA, 1809 bp, Homo Sapiens
  misc_feature (384)..(384): n is a, c, g, or t
  misc_feature (1399)..(1399): n is a, c, g, or t
  misc_feature (1476)..(1476): n is a, c, g, or t
ctagccatgaagtgtagagagattcggtgggtatgggtagagggcttcacgctttgttgaaagagtgtgggggttgggggtatagagtatgtattcccaatcgttaagggcttgcaaggtaaaaggaagtgggtggaggagttaagggccatagattgtgatagaaaggtcaagtgtttgagctctaaccgatattaggaagaatacttaatgtagccaaaaatagcaacagtggacaaaatgatgcctagggaagattataattttacaagaacccgaggtaattccagagttccagataatagacttttttcgttttcgcagacattgtgtgacttggttccttcccactggtatatcaatagtacatatatttataggganaaagtgttgataaatgaccacatgttaccgcacaacaaggtctcagttgtgtggaagctcccttccaggtttaactcaagtccaaaaccgtttccctcaaaatttttagtctggttcctatagaaggttaagaacaatttggtttccattcctggtcagggtccctttgtcttcttcaccccaaggatccatcagatgaaaatcaagagaggtgaaggacagaggggattctgtctgggagggaacagagattgtatataattaaagtcacaaccatcggtaaggaggactcaggagaagctgttcaagcaaaaggaaaagtggagctcatgcaagcactcaagggagaagggaaggtcgggtacagctatagcaacaagaaggtgatcctattataagaaggtgatcctactactacaaagaaactgttgagaatatgacgtatcccagacaactactcatgtcccccaagtgccaaatccccaaaagatttgaggatgcttatttgggctcttcttattggttgattcgatgtctcttctttttcttatgcagaagacatacaggcagacccagaaagccctcatttcttgtttaattttccctaatagccccaagaaagctattactggaaagtccagctgcttgtgcaggatatctaccaatgattcactttctccttaagaatcataggcacagtccatttaggagatgagattgctaaatggcatggacaaagtggagacattataggagttccggtgagtacttgtgagatcactattggtgacttaatctctgaagtccagattattcactcttgtaacatgctagttacatcttcactgatggtgggtggaagcaatgtttcagcctcaagttctgaggtttgacaggggattgctgttgaagtaccatctgctgatcactgagtcaccatgacctcagtggtttgtcaggttgcataaggttctctttgtataatgagatttcactgagaaagattcttgctttnggaaggcattcccaatcttccttggaggtttcttcccaagcagtttcctccgccctgccacctccccgagcagcccnttcgatgactccctggtcttctgtggtgcatttcagttacaaaaagcccaaggggaatgtgtccatcgtcttgcaagtaaaaatgcttctgaagctatagttgctggtgactatggtgtgcagcctcctcctcaatactgtcagtgaactcagtgcttgtatcttcggtgtcatcccctgcagctgcaccttatctccgtaaggaattcgacggagacaaataaatgctcatctcatctcgacactctgccacacaggggttttgtttcttccccttcattctctcttttttaagctagctcacagtctttcccgggaattccggaccggtcc

SEQ ID NO: 438008 - DNA, 698 bp, Homo Sapiens
ggatcccacgtctgcaagctcattggagctacctccagaggaacaagggcccagcattcggaacctggatttctggcccaagctcatcacactcatcgtgtcaatcatagaggaagataagaattcctacacacctgttctgaaccagtttcctcaggagttgaatgtgggaaaagtcagcgcagaagtgatgtggcatttgtttgcccaagacatgaaatatgcattggaggagcatgagaaagaccacctgtgtaaaagtgctgactacatgaacctgcacttcaaggtgaagtggctccacaatgaatacgtgcgggatctgcctgtcctccaggggcaggtgcctgagtacccagcgtggtttgagcagttcgtgctacaatggctggatgagaatgaggatgtatccctggaattcctgcgtggggccctggaacgagataagaaggatggattccagcagacatcagagcatgcactcttttcctgctctgtggtggatgtcttcacacaactcaatcagagctttgagatcatccggaagctggaatgcccagaccccagcatccttgcccactacatgaggaggtttgctaagaccatcgggaaggtgctgatgcagtatgcagacatcttgtcaaaggacttcccagcctattgcacaaaggagaaactgccctgcatcctgatgaaca

SEQ ID NO: 438009 - DNA, 1887 bp, Homo Sapiens
  misc_feature (1582)..(1582): n is a, c, g, or t
gagagaaatggtggaatgacaagccacgtctggcctcttggaaatgcccaccacccttggggaagatttactggccgtttatggaaggcctgtgtatttaatatgaaacagctgctctcaacactacccaaaccttttaatagaaaacatttgccacatctagcccttctatgagctagatggaaagaggttgctgatgtatgataaagttagaaagttacacatcttgtaaattctcatttgtttaaaagaaatcatagaaaatacatgtcttctggagatgacttttggaaatggagttgttaagacggcctctggaagcgatacgtccacgtttgttaagtgggttagatgacatggagctggaagacctgagaaggaagagaagaaggttctgtgctagactggtcatatttagaagacattttcatattctctccattgttttgtgtgcattttattcctcactactgtgtatatggttgacaatgctaagcttttttgaaatgtctcttctttttagatgttctgaagtgcctgatatgttaaaattagaggtagcaaaatcacattttgtaaatacctttttgttacaattcataggaaatatttttgggggggaatggccaaatcacctgttgagtaatactcattgtgtttgtgcagtggttcaggggaggagagaggagggggaggtgcagagagctctatgccatcctgtttacagcgaggcaagatgaatcattatgtctgtgcattttgttttacttatctgtgtatatagtgtacataaaggacagacgagtcctaattgacaacatctagtctttctggatgttaaagaggttgccagtgtatgacaaaagtagagttagtaaactaatatattttgtacattttgttttacaagtcctaggaaagattgtcttctgaaaatttgatgtcttctgggttgatggagatgggaagggttctaggccagaatgttcacatttggaagactctttcaaattataactgttgttacatgtttgcagtttattcaagactgctgtatacatagtagacaaattaactccttacttgaaacatctagtctatctagatgtttagaagtgcccgatgtatgttaaatgtataggtagtaaaataccactttgtaaatatctttttgctaaaattcataggaaatgcttttggaaattgaattgtgaagccacctttgtgaacagtatagtaatgtctatacttgttcaatagtttagaggaggtaggagggatgaaattgcttaaggtaatattactagtgtgttcatactttggacattttcagacaccatttttctatatgttttgtgcattttgttttgctctgtatatagtatatataatggacaaatagtcctaatttttcaacatctagtctctagatgttaaagaggttgccagtgtatgtacaaggtagtaaaattagcatattttgtaccctgttgtgttgaaattcgtaggaaaactctgtcttctgtcaagtcttttgcataggaatttgtttgaccatctctaagcattacacgtgcctgtncttgtccactggattgaaggcagagaaggaagggaggagggaatgattcaaggccaaaatggccacatttagaagatacctcagatgataaccattgttatgtgtgtgcaattttatttaactagtgctgtgtatgtggtggacaagttatatgaaatatctagtctttctagatatttggaagtgcttgatgtatttaaaagtggtagtagaataacactttgtaaatagcttttaaaaactgatgggaaatgctgtttggaagtggaattgttgaaccacctgggaggtgtcaggggagaaga

SEQ ID NO: 438010 - DNA, 857 bp, Homo Sapiens
agggagacggttgagagcacacaagccgctttaggagcgaggttcggagccatcgctgctgcctgctgatccgcgcctagagtttgaccagccactctccagctcggctttcgcggcgccgagatgctgtcctgccgcctccagtgcgcgctggctgcgctgttccatcgtcctggccctgggctgtgtcaccggcgctccctcggaccccagactccgtcagtttctgcagaagtccctggctgctgccgcggggaagcaggtaaggagactccctcgacgtctcccggattctccagccctccctaagccttgctcctgccccattggtttggacgtaagggatgctcagtccttctaaagagtttttggtgcttttctggggtccctcaggtcccgaagctcttgagaaaattatcaaaggctagaattcccttctaactttttttttcccccatgataagcgcagtcggtcacagttcaggtgagttcttacttggcattcaagaaaattacaaaatctgggtagttgtctgggcacgaagcgacaatggcgtctatccctggtgctgaccctgggaagcgctgacccaggtgctgaaacgcagacctctgaagctgctacctcttaagcgtacctcacttccaaacgtcggggactagggcaaagggggaatctaaagaccgaacgccgtatgtcgaaaataggtgacgaagtctcgttcccctacagttgacttggtacacaatgggtaaaccaattctactatgtacctcgtgatgtgaacaattgcatttcaactgttggcacaaactttatcttaccagaacggacttatgtgtgtgatgaagagaga

SEQ ID NO: 438011 - DNA, 624 bp, Homo Sapiens
ttcaaattcacatttttcataatttcaccataattttattttgtatttacagttttcagtttctaatgcaagggtctcgctgaagacttggaggattagggaagagagatggggtgtgggggcgagggatcagaggtctgatatggacaatactagttaagaaagctaacaggatgtgaaagtcttccagaagaaattcttgcagccagctttgcgttctcggggtgccatagccgggtttgagttagcagatctctgcagctcaagcctcatttcatcctgctcagcagcctgggacagatcttcaggttccagggcatcattctccgtctggttgggttcagacagcagctctgccaagaagtacttggccagttcctgcttccccgcggcagcagccagggacttctgcagaaactgacggagtctggggtccgagggagcgccggtgacacagcccagggccaggacgatggacagcgcagccagcgcgcactggaggcggcaggacagcatctcggcgccgcgaaagccgagctggagagtggctggtcaaactctaggcgcggatcagcaggcagcagcgatggctccgaacctcgctcctaaagcggctagtccgct

SEQ ID NO: 438012 - DNA, 618 bp, Homo Sapiens
  misc_feature (407)..(407): n is a, c, g, or t
cataatttcaccataattttattttgtatttacagttttcagtttctaatgcaagggtctcgctgaagacttggaggattagggaagagagatggggtgtgggggcgagggatcagaggtctgatatggacaatactagttaagaaagctaacaggatgtgaaagtcttccagaagaaattcttgcagccagctttgcgtttctcggggtgccatagccgggtttgagttagcagatctctgcagctcaagcctcatttcatcctgctcagcagcctggggacagatcttcaggttccaggggcatcattctccgtctggttgggttcagacagcagctctgccaagaagtacttggccagttcctgtatagggcagaagggatagaaaaagagagaaagagaagtnggggaggacaatgggaaaaatttgaaaagcctaaattaaagaacagatttggtcacacacaaaatccagtttttacagctgcgcattttttgtcacatttaaaatcaatcaaggatataaaaataaggatagttgctataattaccaagttacacaaaaaggctttaagagctcaaatgtttctgcaaccctttctgtccctgtagactta

SEQ ID NO: 438013 - DNA, 349 bp, Homo Sapiens
  misc_feature (191)..(191): n is a, c, g, or t
  misc_feature (256)..(256): n is a, c, g, or t
catctttttacatcaaagtactaccaagtaaagaatttaaaaattacttgtctagtcatgatatattttcctgctgctgctgaaaaatccctgtcttattatttcatgttcctttatcattcatttgatgacactgacagcaacttgctgaacaagtttaagaatagctgatatttactgagcaacctggnctttgtactcatgcaggatacagctctcagtattgcactgcatgtaggctgtatgtgctgttccnataatgagtagaggctcatagtccctcagcccagtcctgcctgatatggcagcatatgctgtgagggagattacaaagggagtcaaaatcatg

SEQ ID NO: 438014 - DNA, 601 bp, Homo Sapiens
  misc_feature (478)..(478): n is a, c, g, or t
  misc_feature (498)..(498): n is a, c, g, or t
  misc_feature (506)..(506): n is a, c, g, or t
  misc_feature (542)..(542): n is a, c, g, or t
  misc_feature (582)..(582): n is a, c, g, or t
aagagacagggtctcactctgtcacctaggctggggtacagtggtacaatcatagctcactgcagcctcctactcccagactcaagccatcttcctaatcctcctcaagcttgaggacaggccttgttacaatgctcagtgtgtacctctccccttctccactccccttgtccacattctgggctagatccacactctattgaggaactgtctctgtattttgattcccgagtgacacagtgttggagatcctgtggctagatacacaggttatttctgcatatggctactcctcaaccttgttgcctgtcttactctggtctgagagctgaaccccacagaaataacaaggctcccctcatccctttctctgaaagattagtactagtcctaagtggttagctcccagcttcctttaggacagaaaaaagagaaggagagaagtgacacttgtttttttactcacaagcttggagtngggggtagaggttgggttgntgtagctngactttggattagaccaggtcaatccccaattaggncattctcagattttgatcctacataggttacttatcaagngtctatttataaaatgggg

SEQ ID NO: 438015 - DNA, 1058 bp, Homo Sapiens
tttttttcatcggtcttattttctgaagtaggatctcctaacaaaggaaaaatgtttgttgcaatgctctcagttgctgctgggttaaagggagcacatgtgatatatgctcctgaacgatcctttataccttctggcgtactggggaaagaagtatcatcattactactctcactatctttttcgtgattagtttgctcaaggctatctgcaaaacattttttatccactttactttccaagttgctctcgattttacctccagcagccaacatatcactatcttccttactatctttcacttcccatactcgctcaaatggtttgaagtctgcatattcctccctcataggagcttccactgcaactctcttttcattaaaactgtcttttgctttttctgaagacacaacttcatcctctttaaccaatttagtaagagctgtaggtaactcttgttgattatgaaggatgttattactaactaacttctcttcttcatctttatttttcacgattatttcttccctaggatttgctactattacggcagattctgcttttggagagacactgaacgatgatcccatttctgagtattctaattctgaaaactctgttaaatctctatctatgagtagagtttttgccttttctgagacctttttagaagcttcactgacattttcttgaagtgttccttcagtgggtaatactgttgacaaattaccaaggtattcatgttctttgaaagaagcggctgaaagaggagacagagaaggaagagaagcagcagtttcaagcaggacagatgggaaatcctcttgaccagccgaaatagtgttacctggctgctccttcaagtccatattttctgcagaggagcgtatcacaggctcagatgcagcgggaagagcaaaaagggtctcatccactgagcccgaggagcccctgcgcttgggcgcggccggggtggaggggggcgcggagagagcctgggcttgcggggtacacacgggctgtgccagggggcccacgctgggcgggggaggaggagg

SEQ ID NO: 438016 - DNA, 1278 bp, Homo Sapiens
cctggtggcactgaagcctgagaggaggatcacaattcgtaacactgttgtggagttctgctatagatggtgatgttatggagtccataggttttacaggagacctgggtaataaagagtcttttgtgggagggttactgttgggagctaacggcttggagcttctttccagggatggggacctggaatttgagtactggtagacttttcgttgttcaaaccattccttcacaaattcctgaggaaggcccacagcaatggaaattttcagcagttcatcggagttgggctccatgttcatagcatagtatgctttgagtacagacatgtggtccttgtatgggttgatggggcttgtcattcctttctcagaaagtacagatgacaagaggagggctttattatcaacaaaaactccggctttgttggggactatgttttcatgaggctgcaggaccgccttgatctcttcattcatcttacaaaggtaacgttcatgctgatgcaaagggatggggccaggaaaactttctttacagaactggcatgaaaatggagtggatatgttgtggttctcaatcattttgtcatcagtgaccaaatctattaaagtacgtagcttctctttctttatattactgatctgtctccttgagtcagtagtcaagctctggaggcaagctttggcttcattgactttttccaacgtatagtcaataatacttttagtggcaccattatgactcactaccggaagaccgacaggcggaatattaggagaagtaactccttgttcctcaggttgagagcatggatccttcatgtgataacctttcaactttgaaatttcttcagccttgcagtccatttttttgcctggaaacagtattgtccacaatctgtagaaccttttgtacctcacttaaattactattcatggtgggaaacccaagtaaaggggcttccatccctacacctaagtgctgcattggactctgagcagatggatgaactcctaaagggctggtggctccaagcccaccattcataaagggactagtgccactaaacccgtgtgtagccataagaactttatagtcattgaagtctagtggttctgttttaattttaagtaagcctgtctgttcagacatactaagtggttttccattctccaacttgtttcttaactgggtaatggctgaattagtaggagaagaagaaacagaattaggggaagaacccgtcttgatatgtttctcatcggccattacagag

SEQ ID NO: 438017 - DNA, 1034 bp, Homo Sapiens
  misc_feature (138)..(138): n is a, c, g, or t
cgaggaacccgagggaagggaggccttctcccagagatgggaggggcctggtaaggccatttaggtgaggggcgaagccagggcctgtggccagacctgggacacctggtccaaccagcacatttgtgggccacgtgngccatggggcagcagggctgggactgtcagggtcgtggcgggcactcccaaactgctggtacaggagctttttccaggacagaagaggggattcccttggacaggcgaaggactccactttcacattagtgacccgcaccagagctggcatggctgagcttgtcaaagcggaatttcaggttcgatctcggggagtttctgcttttggcatctgtgggactccggctcatgatgatcggggtggcagctgcccccaggctggggctctcgctgctcggggacgggctgtagacaaacacctcctgcttgaagggtgaggtcgtggacggctggctgcccccactgtcgccctcctccatggcctcgccctcccctgcagtgctgctgacgctgctggtgctggaggaggagcgggagatggcgcggccgttttccttcaacttcatgaagggcttctccttgttggggcagatttctggagagctgggattggatgaggtctcagactttatctcctgagaggagtgtccaccatctggggtcttgggtgtgctggatgtgctgtcacatcgtgcccggctgtcgccctggccttgtgagcccgtgtgcaggcgggggaagagccccgagcgtcgcttgatgggactccgtgactggttcttcaccgttgccgccaccactggaggcgagaaggtggtcttggtgacctccatgctgttgtgggagatgcccccgctgaggctgccagggatgcccccactgtgcgacttcttctggccgcccaccatggtctccatggagtggctgcgtacgcggatggccctccttgatttgatcgggcatctcttatctgagtcaaagatgcccctggatcccgggaattccggaccggtcca

SEQ ID NO: 438018 - DNA, 893 bp, Homo Sapiens
cgtaagggtacgcccccgttgcagcaagtccaaagatggcacccgagccgggagacatcgtgtttgcaccgactgtcgcaccacttcagaatacggtgagctcccgcccatgagaagcccgtgacccgccaccgtttatgttcaaacccgtcaaggaagaggatgatgggctcatggaagcatagcatgagacacgcggagtcgggttcgatgtcgacactacgcagtggtcggaagaagccagccagccagccctgatggtcgcacctcacccatcaatgaagacatccgctccagcggccggaacctcccccagcgctgccagtacctccagcaatgacagtaaagcagagacagtgaagaagtcggccaagaaggtgaaggaggaagcctcttcccctcttaagagtaacaaacgccagcgggagaagttggcctctgatacggaggaggctgacaggaccagctccaagaagacaaaaacgcaggagatcagcaggcccaactcgccatctgaaggtgagggagagagttcagacagtcgcagcgtcaacgatgagggtagcagtgaccccaaagacatcgaccaggacaatcgcagcacgtccccgagcatccccagcccccaggacaatgagagtgactcggactcgtcagcccagcagcagatgctgcaggcccagcccgccagccttgcaggctcccactggggtcaccccagctccctcctcagctcctccagggacccctcagctgcccacgccaggcccacgccctctgccactgcagttcccccacagggctcccccacggcctcccaggcccctaacgcagcgcaggctcccacagcgcctgttccccacacccacatccaacagcaccgcttcaccccc

SEQ ID NO: 438019 - DNA, 1404 bp, Homo Sapiens
  misc_feature (57)..(57): n is a, c, g, or t
ttggttcttccggccactgggtaggtgtggacatcgagcccccgactccgccgtgtncctcatgctatgctccccactgagcccatcatcctcttccttgacgggtttgaacataaacggtggcgggtcccacgggcttctcaatgggcgggagctcaccgtatttcttgaagtggatgcgacagtcggtgcaaagcaggatgttctcccggcctccgtggtgccaatctttggaggtggtggtgaagcagtggcggcaggcgtaccccttcagctcctgctcactgtcctcactgtcgaagtcatcttcactggctgaacttaggtccaagaattcactggacgggggtctggagggtgtgttgacgggtgtggacgcggtgcgagtcttaatcctcctgaacacggcctgcctgcggtgcctacgatgggctcgggagctggctgcttcgggggtcttcttccaatagtaatagaaggtgatcagctcccctgtttccttattgggaagcagctcctttctaattctgaagaagttcttcccgtactgcctgagtcccttaacgaagcgtttcacttcgtcctcggtccagcacttctcgatgagcttgggcacaggcttcttcaccaggcgctgcagggctttgccagcatcgtaaccgctttcatgcagtgtgttcagtgcattcagagtggtgtcatcccgagaggctgcgacacagccgtcctctgtagagcctccatcacacattcctgcaaatgccgccatgctccttgctgccctcaagtacataaggaggtcacagtcgttaactccaggcatccagaccagttcctcatgttgggtcactgtatcaccatctggagaaggaaatggttgcagatctggaagtttggcctgatgactaggaccgacacgaatctccccctgggtactgttcagcctccttgtctcagggttatatcctaatatgtagaaaaatgaatccactcgggctttaaactctctagcagcaaatatgtcagaaaaatgggagatgttacacttcgcctctaagggcagcagcatggtaagtgtcaacgtaatcagaaatgaagagctctcggttcttgatcactgggtctgtaatgacaagttctcttccagagtcattttcattatgtcgatcctgaaccaaatgctgatacacagaatctggaacctcagattgacggtagtaccatttgacgttcatgaggagatggtccctcttactccctacaggccctctcccggcttcagaaagatgctgtggtggctgtgatgccaccggcagagagcatgctggggggtcacacaaagcaggagttggagatctgcaacaggcctgggagtgtggaccagatccggagaattccggaccg

SEQ ID NO: 438020 - DNA, 883 bp, Homo Sapiens
  misc_feature (50)..(445): n is a, c, g, or t
  misc_feature (503)..(557): n is a, c, g, or t
  misc_feature (564)..(679): n is a, c, g, or t
caaaaccaaaaattttgttaaactaaatttttgtttacctgttatttagnnnnnnnnnnnnnnnnnnnnnnnnnnnnnnnnnnnnnnnnnnnnnnnnnnnnnnnnnnnnnnnnnnnnnnnnnnnnnnnnnnnnnnnnnnnnnnnnnnnnnnnnnnnnnnnnnnnnnnnnnnnnnnnnnnnnnnnnnnnnnnnnnnnnnnnnnnnnnnnnnnnnnnnnnnnnnnnnnnnnnnnnnnnnnnnnnnnnnnnnnnnnnnnnnnnnnnnnnnnnnnnnnnnnnnnnnnnnnnnnnnnnnnnnnnnnnnnnnnnnnnnnnnnnnnnnnnnnnnnnnnnnnnnnnnnnnnnnnnnnnnnnnnnnnnnnnnnnnnnnnnnnnnnnnnnnnnnnnnnnnnnnnnnnnnnnnnnnnnnnnnnnnnnnnnnnnnnnnnnnnnnnnnnnnnnnnnnnactgtgttcctttagtttctatctctgtatggcttgggtttttttaggttataattgnnnnnnnnnnnnnnnnnnnnnnnnnnnnnnnnnnnnnnnnnnnnnnnnnnnnnnntttatannnnnnnnnnnnnnnnnnnnnnnnnnnnnnnnnnnnnnnnnnnnnnnnnnnnnnnnnnnnnnnnnnnnnnnnnnnnnnnnnnnnnnnnnnnnnnnnnnnnnnnnnnnnnnnnnnnngagtatgcaataagctctcatttggaacattcagctaatttgttattttattgtatcccatttctgcttggttttgtgtgtgtctactaactgcagtgaatccccttttcatcttgggatattgtgtgaggccactgttgtgatgggtccttctggctttggtacagtttttcctttttctgggactaactggctttttcatcc

SEQ ID NO: 438021 - DNA, 1008 bp, Homo Sapiens
  misc_feature (688)..(688): n is a, c, g, or t
atgcatgtattgtgctaaacactctcccaaaacatcgtggggcctgattcttcctctttgttccaatggccctgggtgactcaagtgcccattcaatgaccaggacacagaggtcttagagagatgctccttgaggccccaggtgcgagcctgtaccctgccggagcatgaggcaggggacagggcatcgtctgtggggatagtgggggtagtgggggtagtggtcagccagatttggtgactctacttgctcaccagacgatcctacacctgccacctccgatggatccactgcctctgtgcctgcctgtactgctgatgctccagtggataactcagcatcccagcctaggcccaatgccactgaagatggacctgccccctggggacccaggagtcctaccactcagctgtccccaggagtgcccagaccctcattgcttatccaggacctaggagccctaccccgtggccttccctcatcagccgtaaatgatgatttactgctgttaccatcatcactgccttcagtgaccaagggccttccaaggtgccagctctggaacgaaggatgcccttgggaggtgatgacactcaggtacacgggtgctcaacagattgcttcctcctatcctcagacggtctttgcatgcatgcagccattggcactcccattgtgtggaagganaacagcccagggtcacacagctggtcagcagaaacatagctggtctcaaatctaaggtgcctgaccatgcctccatgagggaccgcctccaagggaggttgatcctggctttggggagcctttcctgggctgcacgaataacctccattgttcgagaccccaaactctgctcacatcttcctttccctatctctgcttgggctatgatcacggtgactctagcagcccttcatggacattatagtactctctgccattcacttttgctctaatctgacttcaagcccccacttacttgtccctcctaaacccggggagcc

SEQ ID NO: 438022 - DNA, 335 bp, Homo Sapiens
  misc_feature (11)..(11): n is a, c, g, or t
aagagtatatncctatttcatgttagtaattacctctggagagggaaatgaaagggattgggtaagacggagaagggacttcaaatcacatctgtattattttattttaaaaaaagatctccagccaatataaaaaaggttagcaactgttaattctgagtggtcagtactgagtgttataatgctcctttttttgtttatgacatttttcattaaaaatgtcctgaaaataaatgagaataacaaaaaatgtggatatatttgaaattaagattagaagcttagtattaggctgggcgcggtggctcatgcctgtaatcccagcactttgggag

SEQ ID NO: 438023 - DNA, 716 bp, Homo Sapiens
tgcttactgccaccgtccgtttcctgggttcacgcgattccagaagagagaattcttagagtcagagggaggagtagaaggaaaaagatatttaaaaagctatgcttcaagaggacatttcatgctgtcaaaatgagactgtgaatcagaaagttctcggggaactgcaaggtgctctcaactaggggtcggttccttctcagtcatggcactgactcatctccacagggttctcacctgcgggaggaaaatggaggagttgcgcctgtcagaaactgtctgtgtgattcggggaagaatatggagtatcttagtagcattccattattacttgcccctaaatacatgatgccagccccctgcacagataacctcctgcttttatagcttgaaatatatttgatctaaaccacgatttgacatcttcagagagagagaagtagataaaagtctccattccaggttggcagtagggatcctgcagaagtggctgaaatgaaatttggcctacagagaataagttctacagtcattttgtttctgcctatttcctccagattcaaaggcagattgggtcatctcggaactcatgtctcctccaggacacagcaacaacacattttcaaggaacagcctcattatttgtaaaatctgtagagtataaaacataactgctccactgacaggaggttggatttggacttaatattgtatcc

SEQ ID NO: 438024 - DNA, 1029 bp, Homo Sapiens
  misc_feature (827)..(827): n is a, c, g, or t
  misc_feature (842)..(842): n is a, c, g, or t
  misc_feature (995)..(995): n is a, c, g, or t
cccatctgcatactcttacccactccaaattggacctagcagttccccatctctactccttccaggaagccaggcccacaactcatcctggttttccctacataccacaaccactccttgtctctagccagtctttgtctctcaagggttggggttctgatttcctcttagagataggctcaccttatcttccaaggctcaccttatcttccaaggccaaggagaggtcaaggactggatctggctttgccaggtggctgaaaggacccgaaggagtaggatgcatacctgaggggctccgtagatatacagcaccaagggttcattttcagggaccacgaaccatgccttgtgccatcctttgccacccttctccatgtagtgcaggaagctgcagatgacgctgttctctgcagccactgaggcctgtttctgtggccagagacaccgggcatcaatgttgacagaaggcctagcctggctcctcctagctttaatacctcctcagtgtagggactgctattcctatctcagatgaagacgctcaagctcaggtggcaggagtgatttgtccagtgccacccagtgaatcagctagagctgagattcaaagctaggttcgtctgcctcatttgggcaacggctgctgcctctacaggccggtggaaggagtgtgcggatctcaggccattctttcttcagtcagagcattcattcctcaagccattcacacatttaggcctcatgctcttttctgtctttcatcacatccattttctacactcattgagaggtaatctagcattgtggctttaagggcgtatgtnggtggggtaagaacnccgctgtacagaccccgtccggaatggacatcgtttgattctgacggctaagccagctgttgtgcaacctgctgaccttcgtcaggccgagtgctatagctggtccgggccccattcttcgtccgttagccgtcgacccgtcctccgcctgcngctgcgagagctactttctgctccgcgggctccg

SEQ ID NO: 438025 - DNA, 467 bp, Homo Sapiens
  misc_feature (191)..(256): n is a, c, g, or t
ttaaaaacaaatctaggtatttatttaacacttaaaagagtacttactctgtgccaggaactattctaagcactttgcatatattaattcatttaattctcacatcagctctctttgctctccaagtcaatacattttcatctagagctgggattctaagccagacttcattaaccacccacatacccccnnnnnnnnnnnnnnnnnnnnnnnnnnnnnnnnnnnnnnnnnnnnnnnnnnnnnnnnnnnnnnnnnnaagcatgaggcctaaatgtgtgaatggcttgaggaatgaatgctctgactgaagaaagaatgcctgagatccgcacactccttccactggcctgtagaggcagcagccgttgcccaaatgaggcagacgaacctagctttgaatctcagctctagctgattcactgggtggcactggacaaatcactcctgccacctgagcttgagcgtct

SEQ ID NO: 438026 - DNA, 383 bp, Homo Sapiens
gatgacgctgttctctgcagccactgaggcctgtttctccaggatggacctccggcgctggggtgtatgctggctgcaggctggactgctcccaggcaccccgtgcaaggccacatagcaatcagtgcacacacggttggagcggttgttgtcatagacgaggcgggcccggaactcggagcacttcccacaaaccacatgcccgcaggccttgcagtggtgcctgcgtttggtgatagaattgaagggctcctggcagcgcatgcacatggtgacttccttttcccggatgggcgtaggtgcccgcttcccaagatccacgtttggagagttgggtggggtgtcttcatcttccctgtttgttgagttcaacagtttgaaag

SEQ ID NO: 438027 - DNA, 811 bp, Homo Sapiens
ccatacatttctacccattggcttattcagataattggttcagcctgtgctggtgtttgacctctgtattccttccatttctcaaaaatagccggttccatctcttcagtctgaataggcacgaatctgaactctgagacaagttcaggactatgctcagcaagatcatagtcaccaagttcagcttgcagattataagctgccaattgcactgctgtatcaaagggacagtctaattttccactgagaatatcttgttttaactgaagaacaaataaataccgggttagctcctcacgaaggttatttggttctgaggaataaaacttaactcgaagatgcagacaatagggtgaaccaatttttacttgctttttgatgctttttgtaccatccaaccaatgtgctacttggtgctgaatccataaatctcagaccaaaatagtcgctttcaatcaggtccaggtggtacataatctgatcaaacaactcttgtcctttggctttttttggcaagtccacactaacatcagtaccatccagaagggacacccgacacgtgatgatggacttagaatctccagctgcaggaatatgtgtggcggcgcgttgtgcttctcggagtcgttccttctctgcatgtttacgcatagaccgacgccctagtgttctacggaagaaactcagcatttttgtcactgagctggggacggcgcagccccggcgaccagagcggggaagagccgagcaaggctgagaaaggggcggctcctcgggagacgccgagaaatggcgcccacaacgagcccac

SEQ ID NO: 438028 - DNA, 1899 bp, Homo Sapiens
  misc_feature (168)..(168): n is a, c, g, or t
  misc_feature (237)..(237): n is a, c, g, or t
acatactgaattttaggggctttccagccacagtgaggctggaaactcacttaacagcttggatgagagctaacccccaaggtaccatagctaccccgtctagaagcaaaactcaatctgatctgggggtgtccttggctcagaggacactgtggggattgcttacanacagacatggtctgagactcgacaaaatgagatttctcctcccgtatccaaggcttaaagttacaaagnaaattagagttaagtcaacttccacaagagaccttcctgggctccatcatttatttcaggatgttgtcctttcccccagggccttgctgtctggtttattgtttaatttgctccttttgagaaggccccagtattgggttgggaatgggtgtggggacaagagaaagaaagagaaagtcagcattcctttccttatttttctccagagttgcccgtttgcttgcatatccagtctgcaagttctcttaacccacgtttttttgtgggagggatggccattgacagagattaaattaaaatatgaaagaacagccttattttctaaattcccaaccttctgcagacccaggagaactccagaacaggtagagttcactgttgcttccttccaacatggattaagaaaaggttctgttttagtgcaattttccccgcaaaggaaccaggaagaggtggaagaggagatcccatgttccagccccaggggtttgggaaccttctgaccttgaggtcaaggcagacatggagtctgaccttctgagcagcacatcacacttttttgaattttatctcccaggtcctttcggtgcacctgcaggcaaagtgtggggggcggaagggcagtgtgaggctgtgtttccactggatgagttgtcatacctgccacactaacacagaggagcaaaggagaagacaaggtggaaagagaatgccatcaaaagcaagagctaatggccagtggtccttaggagctgctttagccctgcgccaaagacagggagtttctggttccccaccagaattcacccttcagaaaccatgctagcaaggtgcttctctaagtgacgtcacaaatcctcttcttcggagtgaccagcccagagcctggagctctcgtgtggccccctctggcctccccatgatgtgagatgtgtgggagaaaagagggacattgatgcacatgcacacggtggagtctgatgacctggggtgagcacagctgcacgtggcaaaatgacaggtgctgtcatggcagtggctgcagccggatgccacgggaaatggacaaagtgctagaacacagggccaggggctgagccctaagggatctgaaagacgttcagcttgctggtgttcttgagcgtctggcgccgattgcagaaccagacccgcactacctcacggtcgtagttgagctccttagcaatttcagtgatctcctggcctgtgggcagtgggttcttctcaaaataggcattgagagcctctatggcctggggggtgaaggaggtgcggcgtttgcgtttcttggagggctcgcctcccacaaactccatcaggttctgctggccttccctggttccgcagttcaagcttcgtttagccacttttcccagcaccggctttagcttctgggcactcttgggtgtgatgtctagcttctcgaaccggcagatggctgactggctgtaggctggaccttccgttgcagtcagagcctgacccacctgggtctgtgtaaggcccagcgagagccgccggatcttaaagttcttggcaaactcccggatctcttctaagttgatcccatcctcatccagacttggagtatgtggcttggacaccaactggctgacggtgggggtctctgagcaggtaatt

SEQ ID NO: 438029 - DNA, 303 bp, Homo Sapiens
  misc_feature (120)..(120): n is a, c, g, or t
  misc_feature (125)..(125): n is a, c, g, or t
  misc_feature (254)..(254): n is a, c, g, or t
atgaatttttgaaatcatgcaacaaaggtgcatcccattatatcagggtgtatgtgacatctagatgacattacagtgacattaacctttatcagtttggtaagggggctttcgccaggnttctncttagtaaacctatcacttttcctgcttttttctctattctttggaaataagctacaaagcctagaatgccctagcaggtagaaggaattaaacttcacttcttgtactggggagtatctacatatgtnatttgaaattcttctgtaagaaacagttgtttctttgccctcaatttta

SEQ ID NO: 438030 - DNA, 835 bp, Homo Sapiens
ctttggccgggcgctgcttcttgtcccttctcttgggtagtccctgaatctttccacggtgtccttcgtgtccccttctctgtctctgcacatattggggcttctttggctgccggtatcctctcgctcttgctctctcgtcctgtcccttctggctgcatccctggcccccctccctggtgtgattcctctggtcctgggcccctccattgtccccctcggtgtcctgctcgtctggtagtccggatctattttccgtctgtgtgtgggtcctcggtgccgtgctgaggtcgcgtctgatctatctcccctgttccctgaaattcccccggaggtgtgtgaggtctcgtgtagccccggggccgcatgactgcctctccgagcggtagtctgtcaccgtctgtccgtctctccatcagttcctagaactcaagcacagctcccgccgatcctggggcggcgcctgcctctccacccgcagcctgcggaggcggggacttgggtgtcggcttattctgagggtgatcttttgttttccgagtttgggattcggctgcttgggaataataagaaaatcgcgtttgtacccttcttccgcctccacacgatgacgaagctgtttgtaatcggatttgtactctattcataatgcttatgctattatagacggtaataataagaaccaggtaagaaactgcttgcttcgtagttatcggttggaatgtgcagtttaaaggcgccagatcgcttctcgagatccccagggtttactttgtcatactttactggagaaaaccggtcaacgtttgtccagcgcatctgtgagcccccataa

SEQ ID NO: 438031 - DNA, 1369 bp, Homo Sapiens
tctctgattagtttatttgttctgaaatatactatatctggcattaatatagccagtcttgctttcctttggctaaggtttgcatgatatatcttttcccacccttttcatttcaacttgcctgtatcatcatatttgaagttagtctctttgtagccagtatgtagttggttcgtgtccattaacctactctgccagcctgtgtcttgcaactggtatacttaggccattgatatttaatgatattgacatggtagggcttaaatctgccattttatttttccttttctgtttgttctccctggtttcgttttctggatatgctttctttttcttaccttcctgtcatgacttgaacatctttgagaatggtgttttgccttatccatagtgcttttgagtatgtctgtttgtatagccctcttggtttttccagacattcgtatatctgtgcatctatatcttaaccacacggtatactggtgtcattgttttaccaatttgagtgaatgatagacgagttacctcccttgtaggtctctttaccctcccagtttataaccatttcaaacattttctttatggagagttagaaccacattgaatggtgctatgatttttttctgaaaccgtcaagcatagtttagaaaactcatgaggagaaggaaggcctattttgctgttttctttctttccgatgtcccaaggttccttctttaatcatttcctttccgtctagagaactccccttagcccttcttttagggtagaactgctggtcagagatgtccttagcttttcttaatctgaaactgttttgatcttctccttaatccctgaaagatgtttctgctggagagaggagtctgggctgacaatttttttctggcggcttgaaaagcactgcacaacttctttctgcctccgtggtttctgatgagaaagccatcatcgtcggaattgtttttcctttctaggtaaggtgtcacctttctctgttgctttcaatatattttctttgtctttagtttccaacattttattttttcacgtgtcttgccatagacctctttgggttttttcctatttggggttctcacagcttcttgagcctgtaggtttatgtcttttgccaactctgggtagcttttagccgtttacttctttatgttttcaggcttgtcctcttcctcttccccttccagacatagatgacaacatgaaagtgagaccttttgaggtagtttcacaggtgcctgaggttctattcactttctccccgagtctattttttccctgctaagattgtgtaatttctactttttcattggcagtggatggatttccttgctctgcaccatccattccc

SEQ ID NO: 438032 - DNA, 737 bp, Homo Sapiens
  misc_feature (709)..(709): n is a, c, g, or t
ggaagcaaaccaatttggggaacacgagaattcttaggagaaactctaagttttgtagcatttctaatatccaagttggctgtgactgcagtttttcctatagcattttctacccaacatgagtaagacccagcatcttcttcggtggttctgttgatctgcaatgtgccattttcatagatatgataccgcctgccctccaggggtttcacttcttccaccttctgccaggacacgactgcctcaggtgaagcaaagaactcgcaatgtaagaaagcactgtacccaaccactgtagcgtaattttctccatctttggtttgtatcactggacggacatccacaacatcaatattggcattggtaagggaataagttcccatggacatttgaggcttcacactggtacacagcagtatgatttggttgaaggttggttaaacctgatttccctggggaagacaacatcaccagcaaatggatgattgtcaactggggagccattgactctccacttgattgtgggttgaggttctccttcagcctcacataacaagatgccattgcttccggtgctatacacagcactctgaggcttctttgtccagcgaggaggctcttctactataacgtgaaaatcgtgagtggctgttcccaagaaattgctggctgtgcagcgataatttcctttgtcctggtaggagacatnctctatcttcaaagtcttgccataattt

SEQ ID NO: 438033 - DNA, 450 bp, Homo Sapiens
ttaacggttcaaagaactttatctggtactccaacttaaatggtattattccatttgggcaaatgaagacagactgaacccatgtgacaattcatgcaaagtaacagtgaaataaaaatacttctaatatccaaattggctgtgactgcagtttttcctatagcattttctacccaacatgagtaagacccaggcatcttcttcggtggttctgttgatctgcaatgtgccattttcataggatatggataccgcctgccctccgggggttttcacttctttccaccttctgccggggacacgactggcctcagggtggaaggcaaaggaacttcggcaatgttaaggaaaggcactgtacccaaccactgttaggcgtaattttctccatctttggtttgtatcaatgggacgggacatccacaacatcaatattgggcattggcaagg

SEQ ID NO: 438034 - DNA, 447 bp, Homo Sapiens
  misc_feature (399)..(399): n is a, c, g, or t
  misc_feature (422)..(422): n is a, c, g, or t
  misc_feature (427)..(427): n is a, c, g, or t
ggaggactaaaccacccaaaggccaggcccccactgatagaagctctagagatggaacctccaatgagcctagtcatgaaggacagaaaaagcagaggactataccatggagatcaaagtcacactgagattctgtcttctacaaaggcaggctgtacaggagaggaacagtggaggggcaggccatggaaaacagaaccacctggctagaccctaggaagccaggagaggatcaggttccaaaggggaatgctatgaaagggcagtgagacaagacctcatcctacctccctgaccagctctggcttctgctcctgcccctggccattggtgactagtgggtccaagagaagctggcgcagagggctgcgcatgagtatagggaaggaggaaggacanattttcaatcctctgcctgtagntcaanccaaatttgtggataagggg

SEQ ID NO: 438035 - DNA, 417 bp, Homo Sapiens
  misc_feature (15)..(15): n is a, c, g, or t
  misc_feature (69)..(69): n is a, c, g, or t
  misc_feature (91)..(91): n is a, c, g, or t
ccaaccctttttccncctctgtgcctgaagctgaagaggaagacccgaatgcccctttggaagggaggncgttaaaacctgcctttattanggtagaactgttgctagacgaactgaggctgaaaccccagttttgccactgactagctgggtgatctgggagaaactgcttaacttactgagccttgaatactacctcattatggcagataaaataatatatgtgaactcaccggcacagtgcacaacatgtacaagatactcaaatttttcttgaatctaaattgagcctttccaccttcccccagggaagaccatgtatcccagcaagtgaggagtatcccttgttcttaaagcctcttctcctatgcctcccttatctgtgaagaagagtactttttatggtctagttttcat

SEQ ID NO: 438036 - DNA, 671 bp, Homo Sapiens
  misc_feature (438)..(462): n is a, c, g, or t
  misc_feature (606)..(607): n is a, c, g, or t
  misc_feature (633)..(633): n is a, c, g, or t
ttttttttgccaacattctgaatgtatttattcatgtttgtatttgtggatggaaaattttttccatgctacaaagtttggttaaaaacaagttgttacaaatcaataaataattgctataactattacctattgtaacaataataaatagaaaataaacagatgcaactactttgctatacacaagactttatcctgttataaaactaatataagtgctgccacttttctttctttgagtattttcccttgagatacgatttttttattgcacgttgctttgtgcttgtcttaccagtttcaggtttgtaggcacatcgaagaattacaaacatttccatttaggaactatgatcctaccaatcaggggttattttctgccatgtgttcatttacagattacaaacataaaagaggcaaagtacaaaaattaatgcnnnnnnnnnnnnnnnnnnnnnnnnncgcgcgtgcgctcaaggctgggaatactgactggtatgaaaggcttttaactagttgtgcatcaaaatcatacacaatggccattaaaaactcacttagctatcagcatgtaaatcactgggttggttattcaaagaccagacnnacagaattccccgctactgtttccanttgggttttccagctcgtacggctccagctgacgatac

SEQ ID NO: 438037 - DNA, 578 bp, Homo Sapiens
ttattggcacacatcttaattaggttttaatgcaagtaatttgataacaactcctggccgtccgctacggaaccgtcaatgctgaaagctttttatttagctcctcttctgtccaaaccaaggcagcctccccgctgacccttgtcaaagaaccccatctgctggttgccacggtaactgaaggcgaccaattgagctgaacagagtgactcagaaataaaatctgcagccaaaggaattctgcaaagagcaataaatcattcagtaaaagggggtcctccacacactgatgagtgtttgggataatatgatggccataactcttccagctagaaggtccatgacagatcagagtgattaggcctgctggagggctcatttggtttctagtgggttccagcagcagacgagatggagcctgcccagttgtgtgccactgtgggggagaaggaatacgcggagtcaatttttaatatttgggctgcaaaattttgctttttgaggagtggcaagagaaccagtctaggcttccaacaccccttcctctatttttcaaaagtagcacacgttcacagaat

SEQ ID NO: 438038 - DNA, 1193 bp, Homo Sapiens
gcttttcagccccgtaaagagaggctgtttctttttaaagttgagggcccctcaccctttatttttgcctaaatgaagacatctattccgatcccggaaccgtttcccataaattcggcccaaaggggggaaggaaagtatcccactataagagccccgttcagggccttgaaccaatcgggaaaggtccccttccccgccagaaggcacacttgttcccaattccaggaggcgggtgcatggaccctgagccaaatgagacgccacccttccgttagcccgcggcggttccccgcccaataggaggcccgcccctgccccggtagcgtgggaggggtgggggtggcgggcggcgctgcgaagctgagggagctgcgcgcggacgagccacagcctgctacagggtgggtgcgcccgccctgcccagctcgcccgccgcctcccggctcttcttgcgcggcggcttctggatggggttcttcttccggggggtctcaggcgcgggcaagtcggtctccgccttctcagggcccggggtttcggtcgctgggggcgctcggtcgggcgaggctggcggcacgggagcgcttggctttctgtgggggcgccggcttttccctggggccctgcgcgcccagggccacctcggcgcggcccaggctgcgagtcttgccgcgcagctcagcggccaacatggaggcagcctcgggcgcgcttcgcgggggaccgccggcgtccgtgggctccaagaggccggggccagcggccccgcgctcgggccctgggcggcgagggcgcagcgagggctgtcgcctcctcgggcagcccggggggccgcggcgttgggtcgcgggtccgggggctgccgtgttcgaccgtatgcgccagatttgtcgctgggcgtccgtttcctcttgctggggcttgggcgcaggcctcggagaccctggcggcggtgggtgagggcagcacaggccagcttgcagcggcgctgtgcttgccgtggatccaggacaccttaggcttggtggcggggtcaggtggcggcggtttcctgcgctcgggcgatggcgacagcgacaggcccccaatctcgtctccgtgtagaaccacgtgcatgctatatcacagtagtgcgatggccctcgtactaaattaacatccagtgacggccctagtcatatttctttgga

SEQ ID NO: 438039 - DNA, 962 bp, Homo Sapiens
  misc_feature (77)..(77): n is a, c, g, or t
  misc_feature (106)..(106): n is a, c, g, or t
  misc_feature (121)..(121): n is a, c, g, or t
gattggaattcaaaccccaggccaaatcccttgttgaggtagggaattatgttccttccactatgactaccccaaanggcaagaaaccaaaagtgacatcccattnccaagcttcccagcntggggccatcatctcatgggataagtgaaagcaagcaaaagaattgtgctctttgtaacaccttttcccatgaaggacatagcatttcctccacgctccacataaaaagaagtaatgacctcaaggagaccttacaagtacttcacacagatatctagaggctttgtgagaggagagtgtgagctccatcccggaaacgcagtgaggttagccatccctcgtaaggtccgctcaagggacggcaggccatagaaatgaggcgcatccgtcactttcagacactggagcagtttcagagccagctgcgtttgaaaaacgtaaagaagttccgagcatttcctgtcagtaacttccatgaaattgagcagcaaggtatcaaaaagagcaatcagttctttctgaagttgttgcctgacagcagtccggatatcatctgtttcttctcgtgcctgtgactctgtcagaaccaagaggtctaacagtgggtttgcactatgtctaagaagtaattcgagaatccagtttagaagttctagtgaagaattttttctttgttcctttattaatttatttaaaaaatgtatgatatctattagcagtttctcatcttcagtgcaagcaggaagcacctgtaaaaacctgtttagtgcggtgtgccaagccaaggacttcaaggtaaccccacatggaccagggcaaccctttaaagacaatctgtcattcagaagataaaaactcatcctggtgacagcagccctaacttccctgtgggttgcagcctgaacaatggaatggaggcagtcctgcagcccactagccatgtgtgttatcttcagagtga

SEQ ID NO: 438040 - DNA, 433 bp, Homo Sapiens
tttttaaagaaggaagaggtttatttggccaggagcattggcagacttgcatcttaatagctgagatccctgaaaaagaaattcttggcctttttaaaggcttacaactctaaggggtccacgtgaaagggtcatgatatctcaagcaagcggggaacgtgactgggggctacacgcatcagctaacagagcagaaagttttgcaatgctttttcatacaatgtctggaatttacagataacacaagtagtttaggtcaggggttgatattattattattgttacttttttttaactaccagggccgggtggtgtcgccaaggtcttctggctatttatcttacttctgttttgttttgttttctaactttttgctttctctctttcctcctgtcttgtaaactatgcaaggtggggggaggagagaaagaaa

SEQ ID NO: 438041 - DNA, 752 bp, Homo Sapiens
  misc_feature (695)..(695): n is a, c, g, or t
  misc_feature (716)..(716): n is a, c, g, or t
  misc_feature (723)..(723): n is a, c, g, or t
aaattgatgtaaatctaccatgctgtttaaatgtcgaaactaaatttaccaaacttggcagatttgtaaagctaagcaggactgccaagtgttcccagtttcaagcagagagagttctaacagttcctgaaatacttgtaggaggcacctggtggtaattgcagtttcacaattcttcccaagtgcctaccttgctagctggcatgtctgtacactgatgattattacagtgatgataaagtgtcagaatagaacagtcctaaaataatgcatatcccccggaaggcaagcacattgacttcatatcggagaaccctaaggaattagtgtgaggttcttgacatcacagcgagctggttaaaccaaacaaaggaggagaggggtggaagacagaaaccacacacatatacctgcaaatgtgacttggtctgtttttttcccccatttaatcagggattgttgtctgagattctgcgtaaggaagaagaccctcggacagcctctcagtctcttctagtaaacctgagggccatgcagaatttcctcaatctgccagaagtggagcgagatcgcatctaccaggatgagagggagcggagatgaatcccaatgtgagcatggtctcctcggcctccagcagtcccagctcctcccgaacccctcaggccaaaacctcgacaccgacaacagacctncctattaaggtggacggcggncaacatnaacatcacagctgccatttatgacgagat

SEQ ID NO: 438042 - DNA, 773 bp, Homo Sapiens
tggagagactcgtaaaagacttccacgtttctgtgcaccatccccaggtgccagcctttccacaaagtgttttaacttcatggatttcctgcgcggttctgtctcaagttgggcgactaaccgcgtattccctcccccctcaagccgtgtgagaggggagccggacgtcctcgttgtcaaattctcttggctccccgctttgactgtcggtgccgccggccgccgccacgcgccaccgccgccaactgttagaccacttggcctgcgtgcacttcccgcgtgagcaagccaggatccccggtctcccagagcatctttgaatgtggggcttcggcactgggccggggctgcacgtcggggtgggagaggtaagggaagtgcaaagacccaactgggggagtccacatgtccactccgccgaggagaaacccaagattttgcacttcatttcacaactctaaagagactcacccacccgctctctcacccgaaatcactgccttgcacatgggcagagacaggtcttccggcttcaccgctccctcggctgcctgcagacctgccactgacctcggagcagcacggcaggtagcacatccccagggcaagtcctaatgggatcctccgagctcagcagtacagcgctgccagcgcagcggcgagcagcattgcgaggcagtcaggattgtcatcccagatgctgcatgtcccggcgcgtccccgctccgactccgcagctccgtacctaaagcagtgtcacactgcagactcag

SEQ ID NO: 438043 - DNA, 424 bp, Homo Sapiens
  misc_feature (60)..(60): n is a, c, g, or t
  misc_feature (95)..(95): n is a, c, g, or t
  misc_feature (128)..(128): n is a, c, g, or t
  misc_feature (397)..(397): n is a, c, g, or t
aagttccccaagtggaagttaagtccatgttttggaccccatgagggaaaatgtggtttncgaagcccataacaaaagacgccctgaaacaaaantgggttgaaactgcctccttgcctaatgctgtnccgttttgaagatcctaaatcctacttttcccatgaggcactgttttggatgaggctacagactttacagccgttaggtaagaggaagccctcccaggcgtttacattccatgaagaaagttccaagggtcttgtggcgaaagagctagttcaggaagtcactgaacataagcaggtgatctaaggcctagggccttggacagggatcttgagttcttgggagctggtggccagcatacttcgaatgcttttgtccgccagggggcagnccagacagagttattaagtcctttttg

SEQ ID NO: 438044 - DNA, 1244 bp, Homo Sapiens
  misc_feature (119)..(119): n is a, c, g, or t
  misc_feature (166)..(166): n is a, c, g, or t
  misc_feature (1147)..(1200): n is a, c, g, or t
ggtgttcctttcaaattgaccttcttatggcctccttctttaacatagtcgagaacttgtttctgagtccgaccactgaaccgaaatgatgaccccgggctaaagaggacgggcttggncttccagaaggacttgcagaaatcccgactggccatcaggaattccnaggtatcctggtacgcactattggcatctggccggagcttgatgagaaagcgcttcctcttgaagctcagcttccgcaccttggcccagttgaaggcattgatcttagtgaaaccctgaaacactagaattcccgtgttggcaacggccagattgatcttcgtgccttccctgtccttggccgggtgcaaccggattccatacatctctagccgacgggcaatctctaggagctggaaatctgattctgctggtgtttgtccaatgtggttatggtgaaattccacgattttgtcctctagtgcgtcttgctgaggtatgtatttattttttgctaagtgctctctgtccaaggcttcatcaaaatccccaatctcagattgcacaatgtgtgaaatcaagagagctgcgctggtgtcattacacgtcaacctgccttgagccaagtcctgcttcacctgcagcgcgaacaggtaccttgtgagttcttcttggagttgtgtgtggtcaggcggaaagaatttcaccacaaacttaacaacaacgtgctttggccttctaatctgtttcacaatgggttttaggagatccagccacaccgtgatctttttgtgatcaggaaactcgaggccaaaatagtcaccttccacgaggttgaggtggttgcaaactgcatccagcagcaccttcccaggagctctttgtggaacttcaaatgcctcctgggtgtcatccagcatctggattttgatggacacgagttttcctgaaggtgttgggggcggcttctgtccacgttccaaggtactgatccccgaattttccggggcccccagtcgtgatcctggggtcggcctctgctctatttctcccatgatgaaagcggcttagagaatatctccacagcgccggcggctgcggcggctccctctcccggctcgggctccgggatcggcggctcccaagcccccggcggccgagnnnnnnnnnnnnnnnnnnnnnnnnnnnnnnnnnnnnnnnnnnnnnnnnnnnnnnagcagggctggcggtggccggctgaggtccgagccatcaaaggt

SEQ ID NO: 438045 - DNA, 1066 bp, Homo Sapiens
aagtggccaacccccgttttcagaggcagcatctaacggtcataaggtagcgaggctgggtggttaatcggcacgaggattgcccgtcggctagagatgtatggaatcccggttgcacccggccaaggacagggaaggcacgaagatcaatctggccgttgccaacacgggaattctagtgtttcagggtttcactaagatcaatgccttcaactgggccaaggtgcggaagctgagcttcaagaggaagcgctttctcatcaagctccggccagatgccaatagtgcgtaccaggataccttggaattcctgatggccagtcgggatttctgcaagtccttctggaaaatctgtgttgaacatcatgccttctttagactttttgaagagcccaaaccaaagcccaagcccgtcctctttagccgggggtcatcatttcggttcagtggtcggactcagaagcaggttctcgactatgttaaaggaaggaggacataagaaggtgcagtttgaacaggaagcccagcaagattcattctataccggagccttgcttcacagcctacagacactgaattcggacgtgctggaagcagtctcagcaagagcaccagccttacatttggagaaggtgccgaatctcccgggggccagagctgccggcgaggaaaggaaccgaaggtttccgccggggagccggggtcgcacccgagccctgcgccgaggagaagccccgcgggttacaagcaggcggacggagccgcctcggcgcccacggaggaagaggaggaggtcgtaaggataggaccagcagagttaacctcagcccccgcagcaagcacaggctccctgactgggcagtcctcacctttccgagctgtcttgtgactcgcagggggagttggccctcggccacgtaacctgtttcccaacctgggcccgaaccaggaggcctccctggtcagccgttgttgattggccggctggccccgaggcgctagattaggccgcggagaaattcccggtagtcgatctacacgcgaggttcccggggaattccactca

SEQ ID NO: 438046 - DNA, 949 bp, Homo Sapiens
tcacagacagctcgaaaaggtgagactgccagtcagggagcctgtgcttggctgcggggcctgaggtttactctgctgggtcctatccttaacgacctctcctttttcctccgtggcgccgaaggcggctccgtccgcctgcttgttacccgcggggcttctcctcggcgcagggctcgggtgcgaccctggctccccggcggaaacctttggttcctttcctcgccggcagctctggccccctggagattcggcaccttctccaaatgtaaggctggtgctctgctgagactgctccagcacttccgaattcagttctgtaggctgtgaagcaaggctccggatagaatgaatcttgctgtgcttcctttcaaactgcaccttcttatgtcctccttctttaacatagtcgagaacctgcttctgagtccgaccactgaaccgaaatgatgacccccgggctaaagagggccgggcttgggctttggtttgggctcttcaaaaagtctaaagaaggcatgatgttcaacacagattttccagaaggacttgcagaaatcccgactggccatcaggaattccaaggtatcctggtacgcactattggcatctggccggagcttgatgagaaagcgcttcctcttgaagctcagcttccgcaccttggcccagttgaaggcattgatcttagtgaaaccctgaaacactagaattcccgtgttggcaacggccagattgatcttcgtgccttccctgtccttggccgggtgcaaccggattccatacatctctagccgacgggcaatctctaggagctggaaatctgattctgctggtgtttgtccaatgtggttatggtgaaattccacgattttgtcctctagtgcgtcttgctgaggtatgtatttattttttgcctcgtgccgaattcgccacccaggcctcgctc

SEQ ID NO: 438047 - DNA, 1218 bp, Homo Sapiens
  misc_feature (95)..(95): n is a, c, g, or t
  misc_feature (339)..(358): n is a, c, g, or t
  misc_feature (402)..(645): n is a, c, g, or t
  misc_feature (664)..(690): n is a, c, g, or t
ggctagagcactccgggggagttccccccgagcgcgcttgtggggggacgggcccaaacggcgcagcgtgggtttgccaccgtgggcgttccggngtgtttttgagggtcacaggcggtggcgcagattgtggttaagagcccccggttttctttgtaaaaaattccaaaaaattccaggccgggggtgtggtttgcggggccccctgttggtcccaggtttctttgggagggttggggcagggagaatagctttgaccccaggaggccgggggttgcagtgagccaaagttggggacactgcatcccagcctgggggatagagcaagactccatttcnnnnnnnnnnnnnnnnnnnncaccattaataagtaaataaataggccaggcgtggtggctaatnnnnnnnnnnnnnnnnnnnnnnnnnnnnnnnnnnnnnnnnnnnnnnnnnnnnnnnnnnnnnnnnnnnnnnnnnnnnnnnnnnnnnnnnnnnnnnnnnnnnnnnnnnnnnnnnnnnnnnnnnnnnnnnnnnnnnnnnnnnnnnnnnnnnnnnnnnnnnnnnnnnnnnnnnnnnnnnnnnnnnnnnnnnnnnnnnnnnnnnnnnnnnnnnnnnnnnnnnnnnnnnnnnnnnnnnnnnnnnnnnnnnagagcgaaactctgtctcnnnnnnnnnnnnnnnnnnnnnnnnnnncacaatacaatacagctaatatgatttacctaagaagctgttgtatgagctgaaccagaggcaaacactgtttgccagaagactcacagatccccgtattaataaggcctttatccaatggagtcctccttctatgaaatgttgaggcatttgcttcctgttcataaatttctttttccttccgtgcttctttttttgtatcctggatctctgcagtaatggctgcgtgtaaggctgactccaaccctccagcagccatcaagctgcccaccagaagatcaatcaccaatcgatgacctggacttatgctcacttcattgcctgaaactccgcagggcaggagagcagagtgcccgggcctgcttctcagcggtgggcaacagcatggaccagccgctctgcagtatggcctgggaggccgactgctcggtgctcagcacgtctgcgctgcttgccagggtcaccaccgtctgcttcaggctgttcaggaagacgtccacacctattaaggggggggctggtactaaa

SEQ ID NO: 438048 - DNA, 992 bp, Homo Sapiens
  misc_feature (94)..(207): n is a, c, g, or t
ggcctgggtggcgaattcggcacgaggaaatgatcctcccacctcagcctcctgtgttgcagggaccacatacatgtcaccatgcccggctagnnnnnnnnnnnnnnnnnnnnnnnnnnnnnnnnnnnnnnnnnnnnnnnnnnnnnnnnnnnnnnnnnnnnnnnnnnnnnnnnnnnnnnnnnnnnnnnnnnnnnnnnnnnnnnnnnntgagccaccgcgcccaggctttctggtttttggccgtgtagagctgccacaattgtgctgtgaacaagtactttagtgaacatatgttctccctttggataaacacttggagtggaatttgttaggtcctggggttagtgtgtgttcatagtttcccaaagtggctttgccatttgcatttgaaccaggacttttgtgtgtgagaattctagctccttcttgtccttacagagcagctggatgctgcgtgtgtggagccgatcacattgggttttgtgtgagccattagcagggttaaggattttagggacttcacagaaggaggctggagagcatcagcagaggcagcctagaccttggatctgtaaaaagaagacactgtttgaaactgcacaaatgagttggggtttccaacagggcaggtgggggcctgtgggtggatgggtgtggcagccacagaggctgggatagcttggcactggggtcagggctcagccaggcttgtgtgtcttcacacctggtaatgagatcacttgtaaacaatttctgtttatgaattacaggatattgaggccaaaaaagaaggacggaaggaaaaagaaatttatgaacaggaagcaaatgcctcaacatttcatagaaggaggactccattggataaagaccttattaatacggggatctgtgagtcttctggcaaacagtgtttgcctctggttcagctcatacaacagcttcttaggtaaatcatattagctgtattgtattgtgttttatttatttac

SEQ ID NO: 438049 - DNA, 827 bp, Homo Sapiens
aagtgttccctccttaaggctgcgaaagaatattcctcctccgcgggtcttcgtctgtttcgtatggaatgacagcattgtcccctttataaccctgggatgcctgatcctcctctttcttccggatgggccccagctcatcatcactccccaacgctgaagctggtccggtaactagctaaccgccccagccgggtgcatctcgtcctgtacagcactggcttgctcacgatggaaaccttgcgcccatcgctctagagagctggtgtccatttcactgtcagaaccattcccgctgccgttggactgggctttgttgatattccgaatggtgatgattttgccttgggtgctgtcatggggcacggagtatatgttttcttcttcattccttggcttcaccacagcatccatgggttcagcatagtcagaaggatcaaacccatcctgaggcagccaggggctagaagacacagacttcctctgtccatccctatggccttggtctaaataagatagatccccctttgtaatttcaaaatggacaggaggctttggtttgactggcggaggtactttgttgttcagtttactcttaaaattgctcataatgaaagacagcccatcatttccctccagttccatagagagcttagaatggtctttggacagagaaggcagtgatgtgtcttctcgaaacaggctgtaagatggctcgatatcttcttctgaatcctgcaggtttgagttgcagagcggtgatcctgcccggggggagttaaacacctcttcggtggtgctacaggcctcggcagcattatcgtaca

SEQ ID NO: 438050 - DNA, 1041 bp, Homo Sapiens
  misc_feature (31)..(31): n is a, c, g, or t
  misc_feature (883)..(883): n is a, c, g, or t
  misc_feature (972)..(972): n is a, c, g, or t
  misc_feature (984)..(984): n is a, c, g, or t
  misc_feature (1016)..(1016): n is a, c, g, or t
gtttaggtttcttggcgtgtctcctccctgnaagaagctccctgtgtatcctgtagttgagactcaagactagctgcatctttagcaaatttaatacccttcttctctgcttcttccagaagggtggagacattatctagctcattctgcagcttacttgctttctccgccagctccaccctgagcctgtcgccttcagagaccttggcatggagctcctggacctgcgcgtcgagcttcttcctcttgtgctcagactcagccttgacctgctgcaggaccttcacctcacacgccagctccttgttatctgtctccaggccctgcttgttcttctctagatttgctttgaaccgcttggcctgttccagctgctctgagagctcctccagggctgttgcgtgtctttgtctcatgtcctggatttgagcttcatggttcttagtttcctcctcaagagctttcttcagctctgccacttcttgttcacgttttgtacgtagttcctgctgggctgccgtggtgtccagcgtgtcctccagctctgttttcagagcttccagttcctcactcaagtcccttttctgcttttcggccttgttccgtgaagccttctcggattcaaagtcttcctgaagttcagcaatttgggcttgtagctctcgcacaactttaagggcattgttctttatggagtgtttcatcatcacctctggccagtgcgccctgcagctcctcctccttcttggccagctgcagcttgagctcatcaatctgcgcctgcagctctgcgatctggtcctgcaggtcggtcgtctccccgtcgagttttcttttggccttttccagttcctgacgagtcttttcttccttctttaagcgntcttctaaatctgagatcatcacttcttgcttattcctgattttggccaagtttttcgccttttcttcctcttcagccagctgagaggnacactcagcaangcgatcttccatgagtttcttttctttgatgnacttggaattttggtcctcgagaag

SEQ ID NO: 438051 - DNA, 1917 bp, Homo Sapiens
  misc_feature (8)..(9): n is a, c, g, or t
  misc_feature (12)..(12): n is a, c, g, or t
  misc_feature (16)..(16): n is a, c, g, or t
  misc_feature (23)..(23): n is a, c, g, or t
  misc_feature (29)..(29): n is a, c, g, or t
  misc_feature (32)..(33): n is a, c, g, or t
  misc_feature (35)..(35): n is a, c, g, or t
  misc_feature (49)..(49): n is a, c, g, or t
  misc_feature (51)..(51): n is a, c, g, or t
  misc_feature (57)..(57): n is a, c, g, or t
  misc_feature (69)..(69): n is a, c, g, or t
  misc_feature (72)..(72): n is a, c, g, or t
  misc_feature (77)..(77): n is a, c, g, or t
  misc_feature (83)..(83): n is a, c, g, or t
  misc_feature (85)..(86): n is a, c, g, or t
  misc_feature (115)..(115): n is a, c, g, or t
  misc_feature (414)..(414): n is a, c, g, or t
  misc_feature (486)..(486): n is a, c, g, or t
  misc_feature (490)..(490): n is a, c, g, or t
  misc_feature (492)..(492): n is a, c, g, or t
  misc_feature (651)..(651): n is a, c, g, or t
  misc_feature (1407)..(1407): n is a, c, g, or t
tttttttnnganaggncctgccngtcccnganncnagtgcatagtgcancnccgccnctgcaacctacnccnaggcncaagtnannattcttgatccttattattactaatatcnaccattgtttaaataaaaggaactttataatgaaacggttcggaatactggctcaagaacctatgtcaagatgagctgaattttggtaaattattttaggaattatgacaagctaattgaattaggcttgtgacaattagagtaatttacatgacaggtaaaactcctattaaaaatgtttagatgtttgcttctgtagatgtcactttagtaaaataccaatttagttttacttgtggcttatctagttagaacttagcagactttactgggacaagtttactgctcttgtaggagcncctctcacaagtagttgtaatgctgtagcatgatactcaggatcagtagcttgagatgttactatttttctntttntntttgacttgcagagagcctcccgtttttggatccaggcatcttttctgaatcctggttccatcagtatacctgctctcctatgaccccaaatcatagtcaatggtgcctcaaacatagcaccttaagttaaaggctgcctagtgctctgaggaaagctngctgattatcttcctgatctactcaccccaaaaggcagaaaagcaacacagtcactgctgtggtcatttgtaatgtaaagatcagttatatatatatatttgtaatgagagcaagtatatactcattatagaatcaatttaagaagtttaaaataacccagagtagaatttctatatctagtcttggtttttttcatgaatatttgcaagtaattaccattaaattcacacatgaaagattaatctgaaagatcagagaccatgttattcctgaccacgatagaactgctcctgtggtttgggacaagtaataaaacaactgcttgagttttgtttgtaaaatacataattaatatttgacctacctcaaaatgtattgaggatctgtgaaatgctaagtgcccaaaataaaatattgctgattgtctttttattaaaagtaaatttcctcattaagccaagcctgccttctgtaagtcacagtgcttaaatctcaggatttttcattaggagagacctgtcgttaaggatttgtaggtataattgcttagcctccattattggtgcttgggatagagaggttttagattttgtgttctttttttggttctgcctcaaagctcagtttattggaagacatttgtaagctattggatcatcacttgaatcaagattttgactagtgagcttaattgtccatttcttacaatttcaaagtttacagttctcaggaaagtggttaattgttaataactngtcctatcataacattaatgttggaataatttgaagcttgttgataaatacttcagtgaaaactaaagtctgaaataaattacttgttttatgtccaatagctactacatttgatagaacagttttgaggaacatttcattcttgaacgcagcatctgacatggttctcagcaagttggaatagtaaggattattggcttgtttcgatgagtggaagcggcatgtttgtagcatacaagttattcaataatcttgtgctgatgacctaaaaatatgtcttaactattcatcaaggaaagcctggtgaagcctttacttgttactacttcaacagttggaattagttgctctttttacttgatgaaacaaaactatacctctgaatatttatggatactttttactaaatcaggcttgtgttcttaatccaaattagtaaagttttatgggaggctgaaatgtaatacagtagtctcccctactgtatcctaagaactaggtagagccgag

SEQ ID NO: 438052 - DNA, 1177 bp, Homo Sapiens
  misc_feature (596)..(611): n is a, c, g, or t
  misc_feature (620)..(872): n is a, c, g, or t
  misc_feature (878)..(878): n is a, c, g, or t
gctgtgaaaactgtgttgcttttattgagattcacattttagttcaattcaaatgttagacaggggctacatgacaccttcctagtactaatataaactctggaattgcttctggctaatagaattacttagataacagagagtttatatatgtagctgagatgtgataagggtgggagccagcggagaagttagtgactaactataactcagggcaggatagggaaggcccagcataaagtgggaagagataaaaataaggaaggggagggtctcatagagcagagagaaagatgggagggggtgatgattcagcttcttatccccttattttccatgaactgtccagaatgtacaccccaccccctatacaagacgtctgccttcctccatagtcaggaagattctagccacaacttccgatctcgcaaatcaccaacagtgccctggtttgcacattcttatcctggttttaatttcctctattgtgaaacctgcagacacagagcttagttcttatgtgctgagatcatctcaacctaatctcaaagggtttccttccaatccgtcttggaaagaggtgaggcttaaataannnnnnnnnnnnnnnngagatggannnnnnnnnnnnnnnnnnnnnnnnnnnnnnnnnnnnnnnnnnnnnnnnnnnnnnnnnnnnnnnnnnnnnnnnnnnnnnnnnnnnnnnnnnnnnnnnnnnnnnnnnnnnnnnnnnnnnnnnnnnnnnnnnnnnnnnnnnnnnnnnnnnnnnnnnnnnnnnnnnnnnnnnnnnnnnnnnnnnnnnnnnnnnnnnnnnnnnnnnnnnnnnnnnnnnnnnnnnnnnnnnnnnnnnnnnnnnnnnnnnnnnnnnnnnntaacanccgcgcccggcaagaaataagtgagcttgattgtggtgactggcactgccaccaagcagctgcagaatgaatggcacttggagctcaggagcagggccttccaaggtgcctgtctacaaccatcggggcacaaggggacaagcatacagagtaggagtgcagcacgaaggtcaaataagggaaaagtgggcaactgggatgagaaggtgagcaggagacagagaccaaggggtaaaggggcaggcaggagtatatcacgcacgaaccactccgattctcaaagtaactatatggagcag

SEQ ID NO: 438053 - DNA, 387 bp, Homo Sapiens
  misc_feature (230)..(230): n is a, c, g, or t
ctccacccgacggggtggcttgtgaggggtgtatgtggggggttcttgggaaatatccaaggagtcttctcagtaaaggggccaggccaggggtgttatgagcatccgatacgcccagtccttggccttgagttgggggtcccccatagggggtctgtggagagtctgacttttttccagctcttttgctagaatccacactcccagcacgacgggtgacttggtcctanagaggggtctggagagcccccaggaagcagcccagggtcagggagaagggctcccgtgcccactcctgagggggtgagagcccgctttctcccctcctttctccttcccccaggctgggcaggagcggaagggagggggcagggccctgcctccact

SEQ ID NO: 438054 - DNA, 692 bp, Homo Sapiens
  misc_feature (42)..(42): n is a, c, g, or t
  misc_feature (85)..(85): n is a, c, g, or t
  misc_feature (113)..(113): n is a, c, g, or t
  misc_feature (135)..(135): n is a, c, g, or t
  misc_feature (168)..(168): n is a, c, g, or t
  misc_feature (171)..(171): n is a, c, g, or t
gtttaagctatataaaaaggtgaggaagcagttttgttaccnaatgaaaattattacactcataatgctgtgtaggcaacattgngattcaaatgcccagtggtcaactgggntcactcatcaactcattcccgncccagtttactcacatttcaaatttataaattnctncatgttatactattctatttagatttgcccagaattagttgaaataatgctaaacctgtcaatattttccagtaacattaagcaccatactgcatgggagagacacagtactaaaaagagttgttagtgctttatgtgagtgatatttctttcgtaatgctataaagaactacagttaaaataacaaaatattttaaagatgtcctaaaagcatctgatcccagtaataactaatggatgtcatctagagcagtgggtgttaatgaataggtatatgtcatttaagaatttttcaaatttctgtttgatatcctgcatagaattcgacaaaaaaaacacttccaagtgtgagcattttttatttcatttcccaagagtaagtaagtaactattagcccagccatctgcctcgaagtataccttaagtgaccccataaatccattcagaggcaggtactctataccatttgcagccacggccaacctaccatgccacgacgcagacgcgcctaatggtccgg

SEQ ID NO: 438055 - DNA, 1771 bp, Homo Sapiens
  misc_feature (1694)..(1731): n is a, c, g, or t
ttttgagttgggaaccgctagttcgtactcctatgttgccctggaacggtgcagactttgtttaagccgtattttctggatgccgcaagggtaattttaaaggcgatcagggcaagttagcttccagtaggaggaccagtcatctaatcgcgtgaagcaagtgtgccaaatccagctgtccacgcaatagtatcgtaagaaattctgtgaaacttctattcccttcgtgttcaggttttaaccattgtgttgatggcaacccatttacagcagaggttagccaatgttccatatatatgggaaggcaagaagcaagggaacatttgcaggagacttagcagttctctggcttctaatgactatagagcatttcgaatatggaccatgtttctatgcagaattcttcttttatgccttagacacaaagagcttgttgctgccttgggcagatatactggaattgtcctctttgagcttactttctcttttctctaaggtcaagtaaaaaatgtgagacgttttcatataccacaaaggtaatacagcaggctggagtcactctaatcaaattaggagcaattcccttgtaaaatccaccgacgccttctttcctccatgtctttgtgattacatctattacaccactgtaaaacatgtgttgatcctgaagacgagctcttacgacttgatatgggtatgttgctgcgacagcaaatattttggatagtgctgcaacagatatatattctactgtgctcaactgggcttctggtaatctattgatatgctggttgtacttcaacttcagcaattcatatgccataaactgaagggcaccatgcgatgttccaaacagcccaggaacaaatcccttatataatccacgcacaccgttcatacttatatattttcaacaagtttatcaaacattcctttatattgtcggtgtggggagttaacaacagcatcatactgtaacataaggcgagtttttgttacccataatgggtttgtaatgcagagggtcatggctccagcttcagcagcgtgagacaaggtattctgttgccttttcaccgttcaggctctttccttctgttttatatgacttgatggcattgtaaaagaaaaagtagagtccccaggataaacctgcaccccatatatttggggttactccttgataaagtccccgtagtccatcaagtttccaaatggtagtcaagcaatgtaaaattccattatatttcggtctcagttccaatccatcactcacggcgaagcggatcttcacgaggtcgagcggatgcagcgcaaggttggataagacgccgccgctcacgcccgctatcaggttctcataccggacgtggcggaataccgtgctccacgccgacgacccggacgccgactggccctggcccgtcataggctcggggcccgtcgacaccacggcgcccagggccgcggaggtgggacgcgatgcagtggccgccaccgtggcgacggtcgccccttgtgagcgcaaccccacctccgggaccaacgagaggactcttatgcccaaggcgcgtgagcgaagccggagactctagtactgagggggcaagaacggggcacagacactacgtcacgccggcaggaaagcgcgatccgctctcgacgaattcgagctcggccgatttggcctgatnnnnnnnnnnnnnnnnnnnnnnnnnnnnnnnnnnnnnnccccaccgcataaccgcggtcccctatatatctatcatca

SEQ ID NO: 438056 - DNA, 1450 bp, Homo Sapiens
  misc_feature (26)..(26): n is a, c, g, or t
  misc_feature (41)..(41): n is a, c, g, or t
  misc_feature (56)..(56): n is a, c, g, or t
  misc_feature (58)..(58): n is a, c, g, or t
  misc_feature (342)..(358): n is a, c, g, or t
tcttccaggtccttattaaaatcatntgaaagcctagtganggccagtctcctgcngnagctcagctctgtgtggactctggtccagacagaggactgggcatctccagagcctgcacagtacctgctgcacgtagggcaaggaatgagcactagaccgcctgtccccaagggagcctcagtggggcgacagggtgctctggcggactccacctcaggccctccccactgttgctgtgcattcctgtgcaggtgcatctctttcttactaactggtatttattaagggaggtgctctgtaggtctggagcctttccctcatcctttttgcgagtccccaccnnnnnnnnnnnnnnnnncttctttgaggctcactagaggacgcagaaccttgggagattgatttgcacagaactccccaccttccacttttacaatttccagtttctgattgaaaattttagggtttctccccactgcccttccctatctttccttcccctcaacaccatgaaggaaaaacacacacggcagggctttttgtagccctgaaggcaactttagacatttaaaatccagcactttaatctcttgttctctgtgaatcactatgagaagtgaatggttttaaaggctgtaatgctatgttggaaattggtttgttttgccttttattgaaaaggtaagatcatgtgattggaagaacacaactgttggcttgggaagaggactttgctgctgaagtgttttctaccttctgagtgtgtttaaggcaggatttggagggaaggaccaccttagggagagtgtctgagccacagcgtcaggatgggggaaaccacatgggatccatcaagttccagttgaacaggagcaagatcagaacttaggagggcagtgttagctgccttgttggctgtcaaggaactgcgatctagtagaaacccacttggttgtggctcaggtagaggtagatgccatacatttgagatatgcgtccataactcaaagcccaggatacagagccagtgttttctgtaactggagaccacagttaggccagcttccaatttcagagcaacgtaggaagtctatacaacagaaactcgacattgttcagtgtgtattgctgtgcagggtgcctgccccagggtagtcctagaaatcagtgagaattcccatttgtcctcagagattcaaacacagctcccttagcaactgcagtttcccatccaaacagactagggcgcctagctgacagtcttactgctggcaatagtgatagccgctgtgaaagcacagtagatgctcgtccacttgtcgaggagaatactgaattcttaccacttttgcaccactgtttaatctcttggtccttcagtttccacacctaggaagccggaacagcagcagcatccagcgccaggactggagtcatatacgaactctgg

SEQ ID NO: 438057 - DNA, 907 bp, Homo Sapiens
  misc_feature (98)..(98): n is a, c, g, or t
agtgcccattgacctttttttccctctgccccctaaaaataaggtgatgaagtaggaattccggtcctgtaaaataaaaagccatatttccaaatatncagcatcctggtgtcacagaacagacagaactgtcctagacactgtgggaaaaagatgggcactggagaggtaaaaattctatttagtgatcactcacacttgaacaatgcattcgtcattgaaggagggtgaagtgcagggggtaggggagggtggcagagttgtaattctctgtaataagggttgggaatatatactcatggatgggaaatcttaagtagctatatttattattactttttccagcaattttgcaagaggcagaagtgtgacattgaattgagtgagacgagcgtgtgggtgggttggcgaggagcccttctcctgacgcaggctgctggcttgtcaaggaatggctggttccaccgctgggccgtgtttactcttttgcttcaaggaaaagggtttcttgagggaacaactttacctccaataatgatttatttgggtccagttgagttacgtctctcctaggaaaggtgctcagtaacttgtactcatcccatggaaatcctttggaagctacaaaatcaaagacaatctggagcttgttgctggccaggaaacgccgctccaagaactcgccactgggggtccggatccgcagtttgctcacaggctcagcattttcttcctttggctcaggaggcagggcttgctctaaggacagccggatggcctcacgttcctcttcttggttttttgcgaatctgctccaaacgaaactgttctggcatctctctctcgtgagcttccctctttgctctgtcagcctcaagtaaaggcgataggcctcatcttgctctct

SEQ ID NO: 438058 - DNA, 926 bp, Homo Sapiens
tttccatttgcaagcccaggagttctccatccatttacattcattctacctgttggggttccccttgtattcccattcaaccattttcatttaggatgatcgcttttccccattaatattccagaaaaaggcggaaaactgatccgttttttgaggtccgaatggtttggtgcccacaacactgcccaaagtgtctattgcacatagtgagaaatcttgctctgttggagtcctttgtcagatcccaagcccaggttataaaattttgcttcagatatgaaacaatggattcagcacaaagcatttgtgagcagaacccgttggttaacacactttcatcatggtggaggtagatagcaagaagctttctatctcgggctttcacatagaaggcctcttgaaaagcagcttctaatgagccaataaaaaatacaggatggcaatcaccatatcttgaagaaaactctgctgtaaattgtaataaggcatctccttcattttctgcgttttctggcatcattggagattttctcaaggcagatgacgccatgccaaatacttctccatcatccaccccaaattctgtagcatcttcaaagtcatctccatcgctatcactaaccatatgaacatcggtgatttgttcttccgactgttcccgggtctgtgcaggtgaagatcttcttcccactgtaagtcgatggcagggataagagagccctgattcagcaagacacatctgcttacgactgggaatttcgaaaggatacattacatagccatgtccaaaagtggaacttgctccaggtttcccattcaattcctgcgagaggaactgtttaatctcttggtccttcagtttccacacctaggaagctggaacagcagcagcatccagcgccaggacatcccgggaattccggacc

SEQ ID NO: 438059 - DNA, 1322 bp, Homo Sapiens
  misc_feature (1282)..(1282): n is a, c, g, or t
cggccacacctaggctaggtagcgaggctgggtgtgtgaatcggcacgaggaccaccttcatcatctagtcatgctggtgccctgcaggagtcattaaatcaaaacttcatgctgatcatcacccaccgagaagtccagcgggagtacaacctgaacttctcaggaagcagtactattcaagaggtaaagagaaatgtgtatgaccttacaagtatccccgttcgccaccaattatgggagggctggccaacttctgctacagacgactcaatgtgtcttgctgaatcagggctctcttatccctgccatcgacttacagtgggaagaagatcttcacctgcacagacccgggaacagtcggaagaacaaatcaccgatgttcatatggttagtgatagcgatggagatgactttgaagatgctacagaatttggggtggatgatggagaagtatttggcatggcgtcatctgccttgagaaaatctccaatgatgccagaaaacgcagaaaatgaaggagatgccttattacaatttacagcagagttttcttcaagatatggtgattgccatcctgtattttttattggctcattagaagctgcttttcaagaggccttctatgtgaaagcccgagatagaaagcttcttgctatctacctccaccatgatgaaagtgtgttaaccaacgtgttctgctcacaaatgctttgtgctgaatccattgtttcttatctgagtcaaaattttataacctgggcttgggatctgacaaaggactccaacagagcaagatttctcactatgtgcaatagacactttggcagtgttgtggcacaaaccattcggactcaaaaaacggatcagtttccgcttttcctgattattatgggaaagcgatcatctaatgaagtgttgaatgtgatacaagggaacacaacagtagatgagttaatgatgagactcatggctgcaatggagatcttcacagcccaacaacaggaagatataaaggacgaggatgaacgtgaagccagagaaaatgtgaagagagagcaagatgaggcctatcgcctttcacttgaggctgacagagcaaagagggaagctcacgagagagagatggcagaacagtttcgtttggagcagattcgcaaagaacaagaagaggaacgtgaggccatccgggctgtccttagagcaagccctgccctcctgagccaaaaggaaagaaaatggctgagcctggtgagcaaaactgcgggatccgggacccccagntggcgagttttcttggggagcggcgtttccctggcccaga

SEQ ID NO: 438060 - DNA, 1501 bp, Homo Sapiens
  misc_feature (147)..(147): n is a, c, g, or t
  misc_feature (212)..(212): n is a, c, g, or t
  misc_feature (218)..(218): n is a, c, g, or t
  misc_feature (247)..(247): n is a, c, g, or t
  misc_feature (1276)..(1373): n is a, c, g, or t
cccaaaagcaattggtgagcaggaaccacgttggttacccccactttccatcatgggtggaggtagatagcaagaaagctttctatctcggggctttcacatagaagggcctctgaaaaagcagcttctaatgagccaataaaaatnacaggatggcaatcaccatatcttgaagaaaactctggctgtaaatttgtattaaggcatctccnttcatnttctgcgttttctggcatcattggagatnttctcaaggcagatgacgccatgccaaatacttctccatcatccaccccaaattctgtagcatcttcaaagtcatctccatcgctatcactaaccatatgaacatcggtgatttgttcttccgactgttcccgggtctgtgcaggtgaagatcttcttcccactgtaagtcgatggcagggataagagagccctgattcagcaagacacattgagtcgtctgtagcagaagttggccagccctcccataattggtggcgaacggggatacttgtaaggtcatacacatttctctttacctcttgaatagtactgcttcctgagaagttcaggttgtactcccgctggacttctcggtgggtgatgatcagcatgaagttttgatttaatgactcctgcagggcaccagcatgactagatgatgaaggtggtggcaaatctggtgtaaggacataaagactgttgttttttggcaagtgtagagattttaggaccgtactgtcttccacatctcccgtcttccagccttttaacagcattttggacacaggtatctgaagttcattttctagaatctgtttaatctctccaacagtacaggtgtcttcaagtaccacatcaacatttctgtctctgtattcaaccctgaagtccagcatccgaggttgcctttctacaatctgcctggatggcattacaggtcgaaacgctgaagaagaagaggaagtaggagctgaagctggatgacttgctggattaaatgcaggtcctggtatggtctcacctccatattcactttgtagaatgccattttcctgtggtattacaccattgatagctgccactaagtcccaattattttgttcaagcaatgtaatagcttcgtcaatgttttcaatgccagtacatgcctgaaaatccgccaggatcatctcccggtccatgttggacgccatggcggccgccgagttccgcggctccgggagcgaagcgcgcacctgggaggcagacggcacctcctgcgaccgtnnnnnnnnnnnnnnnnnnnnnnnnnnnnnnnnnnnnnnnnnnnnnnnnnnnnnnnnnnnnnnnnnnnnnnnnnnnnnnnnnnnnnnnnnnnnnnnnnntaggcgctcatgcactcggtaaccttcaggcgccccggccgcccgcctgcaacctgcggagcccgcgtcgcagcagcccggacaggaagatggtctggatgtggcctcgtgccgaatcgccacccagc

SEQ ID NO: 438061 - DNA, 1442 bp, Homo Sapiens
  misc_feature (23)..(23): n is a, c, g, or t
  misc_feature (120)..(120): n is a, c, g, or t
  misc_feature (986)..(1046): n is a, c, g, or t
  misc_feature (1075)..(1147): n is a, c, g, or t
gttgcccccgatgatccctccgnagcccgcgtctgccactccccccgccgaccggcaacacaccggcgtcggataaaccaataaactctacgccccggccgagtagacaccacggcgggnggcccaacaagcccgccgggcggcggggggcccgtatatgccacacggtggctggggtgggtggagcattgccactcagagggaacgcgtcccgacgggtggtagacgggccctccaggtaaggcgggtggggcggactcatatgcccaacgcgcggggcgggtggcgcagacaatatagtgggcgggtggcgggtggcgcgcatgttaaactaaaaccgcggcacagtggtatgtgagcgcgcaccaacgcgttgtggcaatctgtgtagcgaaaccgagaagtgagcagctcgcgcacccccaccgccacccggaatgggcgcagtagtataagaggcgggacgtggcagccgacagacgcgcagaggacgcgcggcgtgagaggcgcgggacatacccgggactgttcgcgccgcgcccaaagtcgcccgcatgtagaccgcccccacacgttagtgcggccgacacaccggcgggcgagctgacgggccggggcccgtccgagaggtgcccgggaggagatatgggcggtgctccggccccccctcgcccgcgccccgtttggccggcggccgccggggcgtgccagccgacggacggcgggcgctaagtgcgaccccacgcgcccccgctcacagctcccacccgccgcgcgacggccccctggcgggggtcgcgcagcggaacggggcggcgcataggggaggcggggccccgcctcccggacgggatggcgcaccacccgggcggtcccccgcgcgcccccgcgcacgggacacgcgatgcaacacaccgcacacgccggggcccggcgcgggggcgccgtccgccgcagccctgcgccacgaaacgggacggcccgannnnnnnnnnnnnnnnnnnnnnnnnnnnnnnnnnnnnnnnnnnnnnnnnnnnnnnnnnnnnccacgcccagactcccccccgaagcaccnnnnnnnnnnnnnnnnnnnnnnnnnnnnnnnnnnnnnnnnnnnnnnnnnnnnnnnnnnnnnnnnnnnnnnnnnccagcgagcggcgggccgccaggaggggtaacgcgtgcgtgcgatgggaaacgtaggggcgccccgcccgcccccgtccaggctgtggagccggcgtcgcagcagcccggccaggaagattggtctggatgtgggtccggtcttacagtcgcgggccaggatgagggcaggttgcgacagcgcgcacccggatgccttcagcggcgttaagcccggcgggggcggggaaaccgagcgagcgagcgggcgggcgaacgccgcggccgcccctcgtgcggaattcgccacccagccc

SEQ ID NO: 438062 - DNA, 706 bp, Homo Sapiens
gctcttcgctcggcccctctccgcctccatgtgccggatagcgggagcgctgcggaccctgctgccgctgctggcggccctgcttcaggcgtctgtagaggcttctggtgaaatcgcattatgcaagactggatttcctgaagatgtttacagtgcagtcttatcgaaggatgtgcatgaaggacagcctcttctcaatgtgaagtttagcaactgcaatggaaaaagaaaagtacaatatgagagcagtgagcctgcagattttaaggtggatgaagatggcatggtgtatgccgtgagaagctttccactctcttctgaacatgccaagttcctgatatatgcccaagacaaagagacccaggaaaagtggcaagtggcagtaaaattgagcctgaagccaaccttaactgaggagtcagtgaaggagtcagcagaagttgacgaaatagtgttcccaagacaattcagtaagcacagtggccacctacaaaggcagaagagagactgggtcatctctccaatcaacttgccagaaaactccaggggaccttttcctccaagagcttgtcaaggatcaggtctgatagcagatacacaacctttcactgcggtaccagtgtaactgggccaggagctgacagcctcaaaatggtatcttcattatcaaccccatctcgggtcagctgctcggtgacaaagcccc

SEQ ID NO: 438063 - DNA, 711 bp, Homo Sapiens
gttttttgtttttggcccatataaaaataacatattgcaactcaaagtgcatcttttaaaataaaccatcaactatctttatcaaataaaatatttacaccatttggtttctagtgaggaaagctctttcaggctatcaccatggggacgtcatctgaaaatccagttatcataggggcatcttcatcatcttcccccaggtcatccccagaggagaagattgcggaccccagcctggagctgtagtggctgttggcgaaggcggtgaagctgctctgcagcctccggtgcttcgtgtacaggatggcaaaccccacccccaggctcagcagtatcaggaataagatgggcaccaccacagcagcaacatccgtagatctggcagcctgcgttgcagatgcatctgcaccagaccccagctcatcgtacagcaggatggcaggctccccacagatctggttgccaaaaaggcatcttgcttggacggtgaacgtgtaattatgacccatcttcaggttggaaattttaaagaaattgtgagtagtatttccaaggtcagctgtgatattcatggcactaatcaaacatgtgtatctgatagcccctgctttcattactatgcttttcctttatagccaggcttttccaaatcacaagaagatgatcatattcctgtatgatttttaacggcatcagggctggtaatgaaac

SEQ ID NO: 438064 - DNA, 1195 bp, Homo Sapiens
tcccgggatccaagatggcggcagaagcagctggtgggaaatacagaagcacagtcagcaaaagcaaagacccctcggggctgctcatctctgtgatcaggactctgtctactagtgacgatgtcgaagaagggaaaatgaaaagggtcgccttgaagaagcctacgagaaatgtgaccgtgacctggatgaattgattgtacagcactacacagaattgacgacagccattcgcacataccagagcatcacagagcgcatcactaactcccgaaataaaataaagcaggtaaaagagaacctgctttcatgcaagatgctgctgcactgcaaacgggatgagcttcggaaactgtggattgaaggaattgagcataagcatgtcctgaacttgttggatgaaattgagaatatcaagcaagtgcctcaaaagctggaacagtgcatggccagcaagcactatctcagtgccactgacatgttggtgtcagcagttgagtctttggagggccccctgctccaggtggaaggactgagtgaccttcgactagagcttcacagcaagaagatgaaccttcacttggttctcatagatgaactacaccggcacctgtacatcaaatcgactagccgagttgtgcagcgtaacaaggaaaaagggaaaatcagctccctcgtgaaagatgcttctgttcctctgattgatgttacaaacctccctactcctcgaaaattccttgatacctctcactattctactgctggaagctcaagtgtgagggagataaatctgcaggacatcaaggaagatttagaattggatccagaggaaaacagcaccctgtttatgggtatcctcattaagggcttggcgaaactgaagaagatcccagaaacagttaaggcaatcatagagcgcttggagcaggagttgaagcaaattgtgaagaggtctacaacccaggtggcagacagtggctatcagcggggggagaacgttactgtggagaaccaaccaaggttgcttctagaactgctggagttactgtttgacaagtttaatgctgtagccgctgcacactctgtggtcctgggatacctgcaggacactgtagtgactccactgactcagcaggaagatatcaaactgtatgatatggcagatgtatgggtgaagatccaagatgttctacag

SEQ ID NO: 438065 - DNA, 1068 bp, Homo Sapiens
  misc_feature (276)..(276): n is a, c, g, or t
  misc_feature (333)..(334): n is a, c, g, or t
aaaaattttccattgtggccatgggaaacacccccaggggaataaccccatggtttccccctttgggggccacttattaggggagccccccaggttaagccccaagttttcaatgcccttgggccaaggacttttctgccctttagggaactgggcttggaggcttggcccgtcctcgttacaaaaacaggctggtaagttagggcttccatccaccgcccctgttggtatacaacataggccacccatgggcatgtgaactgaggtcaacacccntgcttccccgtgcagaggagggccagggtagacactgggcccccaacccagtgaaanngcattccccacccccccactactaccactaccccactacaggtgccccagcaccagcccgagccttgcctcccaccccagggtccttgagcagacctggtctggaggggaatagcagcacagagccccggcggtcaccacacaccaggaagtcacctgggggtaggaaggcactgcatgtgtgccatctctgcttgcttgggggcagcaggtaccgacaacgttccttgacaaagatggccttgccagagggtgcggctgagatctctaggcaagctactaccccgccagggcccgattgccagcaacaggagctcctcataaccacgcagggcccagctcaagctgtgcaccttcccaggaaacagggtctggtccacagcagcagttggagtgttgatggggacaaccttgacacgaccttccccattggccatagcacacaatccgaagccctcgggaccaggagctgcctccagcaggcagtaggactggaaatgtttatcctctagcagctgctcccagcacttgacctcgacgtcatagagatacagggcccctgtatcagtcactgccagcagtcgccaagagccagccagagtcacagccttgagtgtacctggcctactacgggacttgaagcagagagccgagacccccaatccccggtacccacgccctaccaagtgccgacgcgtgggtcgacgatatcccgaaattccggaccgtacagcc

SEQ ID NO: 438066 - DNA, 1587 bp, Homo Sapiens
  misc_feature (1470)..(1470): n is a, c, g, or t
agcgtgggtctctgctacctgtagctgagggtgctgttgatgggcagcgcggcgcgctgggaaggctcgtctcgcgagagttcagctcccttcttttccgtggctgcctcagcacctcgaggatcgacatggacgctctcgaggactacgtttgtgccgttttttaacctcggagcttatactcctcccagtgacgggtctggagtgcgtgggggaccggctgttggcgggtgagggtcccgatgtcctggtgtacagcttggacttttggtgggcatctgcggatgataaagcgagtgcagaacctgcttggccactatcttatccatggcttccgggtacggccagagcctaatggagaccttgacttggaggccatggtggctgtgtttggaagcaagggactccgagttgtgaaaattagctggggacagggccacttctgggagctttggcgctctggcctgtggaacatgtctgactggatttgggatgcacgctggcttgagggaaatatagccttggccctgggccacaactcagtggtgctatatgaccctgtagtagggtgcatcctgcaagaggtgccctgcacagacaggtgcaccctctcttcagcctgcctgattggagacgcctggaaggagctgaccatagtggcaggtgctgtttccaaccagctcttggtctggtacccagcaactgccttagcagacaacaaacctgtagcacctgaccgacgaatcagtgggcatgtgggcatcatcttcagcatgtcatacctggaaagcaagggattgctggctacagcttcagaagaccgaagcgttcgtatctggaaggtgggcgacctgcgagtgcctgggggtcgggtgcagaatattgggcactgctttgggcacagcgcccgtgtgtggcaggtcaagcttctagagaattaccttatcagtgcaggagaggattgtgtctgcttggtgtggagccatgaaggtgagatcctccaggcctttcggggacaccagggacgtgggatccgggccatagctgcccatgagaggcaggcctgggtgatcactgggggtgatgactcaggcattcggctgtggcacttggtagggcgtgggtaccggggattgggggtctcggctctctgcttcaagtcccgtagtaggccaggtacactcaaggctgtgactctggctggctcttggcgactgctggcagtgactgatacaggggccctgtatctctatgacgtcgaggtcaagtgctgggagcagctgctagaggataaacatttccagtcctactgcctgctggaggcagctcctggtccccgagggcttcggattgtgtgctatggccaatggggaaggtcgtgtccaggttgtccccatccacactccaactgctgctgtggaccagagcctgtttcctgggaaggtgcacagcttgagctggggcctgcgntggttattgagagctcttgttgctggcatcggggccctggcgggggtagaaccttgccctagagatctcagccggaaccctctgggaagggccatctttggtcaaggaaacgttgtc

SEQ ID NO: 438067 - DNA, 2540 bp, Homo Sapiens
  misc_feature (445)..(445): n is a, c, g, or t
  misc_feature (2168)..(2168): n is a, c, g, or t
aaggctcataatttagatttaattaacaatgtggacatctgtttagaataacaaggtaggaattcaaaacctagctgctggttatttacccattcaagtgaaaacagacagagggaggcacagttgcaaaagacctgatttcctttttaaaattgtctttcttctctacctacatgtagccagatgtcatagactaagtcaataactaaattcctcctgaagtgactggtaacgctgaggaagggaccggtctatctcagagtcactttgggtgatgctgggtggggtgtgacatctaggcaatcaggaacccagccaatgacttcacaggagatcccacctgttactttgttagggatggtctccccaaggataatagaaactgattttaagataaaaacaataaaattcttcaataaaaagcacaaaattcagtccaagagcngggggcttatgaaatgcacaaattaaagtattaagaattaaaataattaaattaaaaagctgaggccccagatttcaccctgatggttgaggtgtccagcattggaactggctgcaccatggttttgggactccatcaaggactgtggccaaaaacctgtgtggaatattgtagaaggaatttctccacatacagtgctccaccctctacatcagcttgttaaaaaggaaggctcctgggcttcgaccaggaataccgactaggaatgtctccaggcgagcccaggaatctgctggtgactcttcacatgctaaagtttgagaactgccgggtgactgccctgcatggtgagcttgattgaacgctggctaaggtttctttccacctgggcaatctctaactctaggagttgatccaggatactttcacttccttcatcatttttgaaatgcttgtttttcaaaaagccaaattcttctttgcatccatgattcccacatttagctttctctgcatctggcctaaccccacctataaaacaggcataggaactgtatttaataagcacctccttcaataacacagatgagcaaaatgcattcctcagtgtgacccgcatattccatttcctgctctgtcttgcttatttctaagaaacaagagtatgatgagagagccatcccagccttgcaaacacatctgtcactgtcttctgggtgtcagaatgaggaaaggggcacagaaaggaggttgcagaggacgggtcagggctgtccaagaagggaggcagctgggcagctggttacaggtgcagctggtgccacatggcaatctgccggcgagggtttttgagcatctcctcccagtggctgcgctcagagcccgaggtgtgcaggcccaggctgcagtggccaagcgcacagctctgccctgaatcgtcctggcccagcacttccagctccacactggaggcctgcagcaggtcgtcaggcagctcaaacatgatcatctcgttccacacggggttgatcttgtgcttagctcgtttagtctgcttcttcttcagcttccgagcctggtgcttcaaggtcaccttgacagagacatccttccccaggagctccttggactggttagagtggaggttcttggctttaatcagcaccaccaggaggcggttggcagccgggaggtagctgatggatagtaggacctctccagctcctgcagatggctccttcgctgaagtcttcagctcgccccactgggcagcccctagaggcacagatgtcccgtccaggcccaggcggagctccccggccccgctgtgacgggagaaagcggtcgcaggtcctcaaggtcagcgtcagggtggctgtggggagctcctcctccgccagggggagcaccaggccctcctcccaggtggtgtgcagtgccgcttctttagggctgtctgagcctccacagagccggtcctattggccacactcccttggacgtagcagtcacagcctccgtcgtggttgctggtcacagcttccaggcgagtcacaaacaattctgccttctgacagtcatagtccaggcagtagtggagtttgggggcctggttccaactggcagccttctctgggttccaggtctccatgacacagacatcctccaccacaccattctgagggaggatgaacagctcctctgtgacctgcctcttgaggcnactgtcattcgggggttgggggctggcaggtgcagtgggctcctccgtagacctcagtgaatagtctgcatagttgatgacctctggagccgtcacagctggcctgggtccatagatgtctgggaacttgaggagggcacggggctgaacaggttccgtggactttttaacattgaactgttgtgcagacccgagcaagctggttcgccttctccaggtcggggtcctggtcccgcggcagcagccccttcttggggtgcatgtgccgacacaggcaggtgaccccgcacaacgcgaggatgctggtggctgtgcccagcgtggcgcccagcgcgatcacaggcaccgacagcaccatggtgcccatcccgg

SEQ ID NO: 438068 - DNA, 1252 bp, Homo Sapiens
gaaattctcataattttaatgatcaatagcttctggtgggctctggatggtacagttaaacaatagacttaaagacctcccccaaagcacgtccacaccccctcggcagcgtctgcctccatcagcattccactgcccagtcggacttccacagcctcagacccccctcttgggttatggaaatccacatcttagtgtaatgagctgaaaaaccctgggtacacccgtgatctgttattttttaaaaataacaaatactaagccaaacacctgcccaggctctgctgcctcacagagtgtggcgatctgaatactctgttgtctcttgtgggccgggtggttttgcttcgctccctgttctactgaaatcatacggcatagagttcgtaaatcttctttacacagtacaccagggcggccagtgctatcgtgttgtgcagtctctttctgtgcaggtcgtccttccggaccagcaccaccggggtggaggaggtgagtgtgtgcagaggcaggcgcgacagtttataggcgtcgtactccacttggtacttgcagcaagggtcaaactgccaggagatcccatagagggtgcagcaggccaggctcagcacaccagcgggcagggaaatgtagtgggaataatctaagggcagcgccaacggggtgaagaggcaggcggtgcccgccagcacggccgtcttgtgcaggcagttgcccacggtgatccagcgggctgtctcgtcgccaatgcgagtgggctcaatcacaatgtacttgtactgggcttccagggcctgctccagctcgtactcaaactggtcttgggcattctccccattgtagatctcatgcacaatgtagcagtctgtggccgacaagctcaccattccaacaatcacggagggctctgggaggttcaggggccctgagacagtgaagccgagcagcccaagtaagacaggcagggctgtctgtgagctggtccgggctggcacacggtggcagaacacagatacctgcactgtgctttcctagatgggcaagtgtgtctcaaagacgccgacaggacaagtggcaatctgtttgatgtgctcgttgccagtgtgctgaattttggacaagaattcaggttacagctcagagtctgatgttcttcattacaaacactgttggttccctctctcgggcgctgccgccactgctgcccgggccaagacgcctccttccccaagatcccgggaattccggaccc

SEQ ID NO: 438069 - DNA, 1078 bp, Homo Sapiens
  misc_feature (68)..(68): n is a, c, g, or t
  misc_feature (82)..(82): n is a, c, g, or t
  misc_feature (85)..(85): n is a, c, g, or t
  misc_feature (87)..(87): n is a, c, g, or t
  misc_feature (94)..(97): n is a, c, g, or t
tcgccgcgcggaaccgttcgcatgcataacagctgaggctcaccgagagcacggttaggtgggtgcgngccctatggtacgntgntnctttttnnnnggaaattctccatattttttaaggatccatagcttcctgtgggcctctggatggtacagttaaaacaataggattaaaggcccttcccccaaaagcccgtccacacccccctgggcagcgtctgcctccatcagcattccactgcccagtcggacttccacagccttcagaccccccctcttgggttatggaaatccacatttttagtgtaatgagctgaaaaaccctgggtacaccccgtgatctgttattttttaaaaataacaattactaagccaaacacctgcccaggctctgctgcctcacagagtgtggcgatctgaatactctgttgtctcttgtgggccgggtggttttgcttcgctccctgttctactgaaatcatacggcatagagttcgtaaatcttctttacacagtacaccagggcggccagtgctatcgtgttgtgcagtctctttctgtgcaggtcgtccttccggaccagcaccaccggggtggaggaggtgagtgtgtgcagaggcaggcgcgacagtttataggcgtcgtactccacttggtacttgcagcaagggtcaaactgccaggagatcccatagagggtgcagcaggccaggctcagcacaccagcgggcagggaaatgtagtgggaataatctaagggcagcgccaacggggtgaagaggcaggcggtgcccgccagcacggccgtcttgtgcaggcagttgcccacggtgatccagcgggctgtctcgtcgccaatgcgagtgggctcaatcacaatgtacttgtactgggcttccagggcctgctccagctcgtactcaaactggtcttgggcattctccccattgtagatctcatgcacaatgtagcagtctgtggccgacaagctcaccctctctcgggcgctgccgccactgctgcccgggccaagacgcctccttccccaagcggccatcatcccaggaattccggaccg

SEQ ID NO: 438070 - DNA, 839 bp, Homo Sapiens
  misc_feature (222)..(222): n is a, c, g, or t
ggcggattcggaatacctcgtggtgttctcctggggggcccagggtggttttggtttccgctccccggttttcactgaaattcatacggcaatagagtttggtaaatttttctttacacagtccaacagggcggcccagtgctatcgtgttgtgcagtctcttttgtgcaggtcgtctttccggaccagcaccaccggggtgaaggaggtgagtgtttcagnaggcaggcgcgacagttatagggcgtcgtactccacttggtacttgcagcaagggtcaaactgccaggagatcccatagagggtgcagcagggcaggctcagcacaccagcgggcagggaaatgtagtgggaataatctaagggcagcgccaacggggtgaagaggcaggcggtgcccgccagcacggccgtcttgtgcaggcagttgccccacggtgatcccagcgggctgtcttgttcgccaatgggagtgggctcaatcacaatgtacttgtactgggcttccagggcctgctccagcttgtactcaaactggtcttgggcattctccccattgtagatctcatgcacaatgtagcagtctgtggccgacaagctcaccctgcactgtgctttcctagatgggcaagtgtgtctcaaagacgccgacaggacaagtggcaatctgtttgatgtgctcgttgccagtgtgctgaattttggacaagaattcaggttacagctcagagtctgatgttcttcattacaaacactgttggttccctctctcgggcgctgccgccactgctgcccgggccaagacgcctccttccccaagcggccatcttggagacccc

SEQ ID NO: 438071 - DNA, 919 bp, Homo Sapiens
  misc_feature (321)..(321): n is a, c, g, or t
atatgaaaagagatccactaatgtagattgtagagaagcccctcccccttcccctaagggtggggggctgtgtgaaagacagctggggaatcaagtacaagggggtggggacagagactatcttgccacccttaacactgcccagccacgtggggtgaaggggaaggggactgtgatgatccccatttccatgacaaccagttgcctaccccctactttggtgggaagaagggagaaggcccctatgtctccctggaggctttccccctcaagacttcaagtagtggttaacagagtcaggcctggtcatgtgagggagtnggccacggtggaaagcctaggtggaggggcagcccactcacgtcttggccttgcggcctctgtgactaacagcagggccagccagggagggaggggcgctgctgcgcaggatgcgctggtccccttggttggtggtcccaacaagccggcgggggccaggacgtcggcgtggggtcccatccccttcctcctcctcacctgaggcttcagcctcagactcctctactgaaccctcaggccccaggggactgggcgtctttacctgggtcgtggccagcgtgtaacccttgggctggagactttcagctgctgcagcaatgtcagtaatttctttctttggacctagagtagtgggccctggagtaggaggcccactgcctgcatctgcctcactctgctcttcatccctggcaagcaagtactccaccccaaaatcatcatcttcctcctcttcatctgcttggctctgtgattgggcatcctcagactcttcagactcagattcctctgatgctgaacttccacttgtttcttcctcctctgaatgttcatcttcctcatgctcactccggcctcgtgccgaaatcgccacttcagc

SEQ ID NO: 438072 - DNA, 564 bp, Homo Sapiens
  misc_feature (436)..(436): n is a, c, g, or t
  misc_feature (524)..(524): n is a, c, g, or t
gcaaagaggggaaagacgcaggggtccccaaagcccttcttcactttgtgtccccttgctgcgatcatggagagttaaagaggcttccttgggagaagagctctgccaccagggcttccccagtgtctttgggggtctgtgaaaaaaaggatcctctgaggtttactgggagggctcaaggctgaggaaatggagaggaaaattttagcagttccatcccagtgtaaggaccaaccccaaaagttaaacttgcaccacagactaaaggtcaagggcatcctgtgtttctcccctttcttccccagagtgacaagggccagttcagactgacagaaatccaacagctttcctgagctggaaatttcagaacagtctgcaagttactcccaggtgactgaaggtcaaggtgaggcccccctgcctctgcctgcgagtntcccccggtttgcatttttcttgacaccggcatttcctgaggttgagctctctggggagttctagagaatggctagtaaggctttttnagcttgcacatctcacctgccttttccctgtcttttgcct

SEQ ID NO: 438073 - DNA, 344 bp, Homo Sapiens
  misc_feature (85)..(85): n is a, c, g, or t
  misc_feature (185)..(185): n is a, c, g, or t
  misc_feature (188)..(188): n is a, c, g, or t
acccactactggctgcccatcaaaccttaaagcatgacaaccttcaaatcttggaccaccttgacccagaggcccttcaattctnaggccacctcctggtacagaaggaccctcaaacctcattccacctccttgttggactaaagggccttcaaacctgataccaacccctggttgaccatgtngancctcaaacctaaggttcccaccaagttgattatgttgtccctcaaatctcagaccagctactgactgaccatgggggccctcaaacctcattccaaccccttgctgtagcaaagggccctcaaatctgattccacctcctgggctgaccatgaggt

SEQ ID NO: 438074 - DNA, 728 bp, Homo Sapiens
  misc_feature (376)..(441): n is a, c, g, or t
  misc_feature (606)..(606): n is a, c, g, or t
  misc_feature (630)..(630): n is a, c, g, or t
  misc_feature (633)..(633): n is a, c, g, or t
  misc_feature (654)..(654): n is a, c, g, or t
  misc_feature (660)..(660): n is a, c, g, or t
  misc_feature (671)..(671): n is a, c, g, or t
  misc_feature (690)..(690): n is a, c, g, or t
  misc_feature (697)..(697): n is a, c, g, or t
  misc_feature (703)..(703): n is a, c, g, or t
atatgatctaaaaccctaaatggttatttttcctcagaatgatttgtaaatagctactggaaatattatacagtaataggagtgggtattatgcaacatcatggagaagtgaaggcataggcttattctgacataaaattccactggccagttgaatatattctattccatgtccatactctgacaatcttattgtcaacactatataaataagcttttaaacaagtcatttttcttgatcgttgtggaaggtttggagccttagaggtatgtcagaaaaaatatgttggtattctcccttgggtagggggaaatgacctttttacaagagagtgaaatttaggtcagggaaaagaccaagggccagcattgctannnnnnnnnnnnnnnnnnnnnnnnnnnnnnnnnnnnnnnnnnnnnnnnnnnnnnnnnnnnnnnnnnaacaaaggaatgagaatatgtaatacttaaataaacatgaccacgaagaatgctgttctgatttactagagaatgttcccaatttgaatttagggtgattttaaagaacagtgagaaagggcatacatccacagattcactttgtttatgcatatgtagatacanggatgcacatatacacattttcanggnctattttagatatctagacantttctnctaaataaagncatttgtgaaagggtactncagcttnattggncatcagtaaggtagcattcattacc

SEQ ID NO: 438075 - DNA, 576 bp, Homo Sapiens
  misc_feature (553)..(553): n is a, c, g, or t
taaagatgacttcaacttttattgaatgaggtctttattttttaacattacaaactaacactccctttctgaaaaggcagatcttacactcaaagacaatcttcaagcatttttttgttgttgtttaagaaattgagaggggaaatccacagtttattaacaagaagattcaaaacttcattttacagtaataatgggacaacacctaatacatttcacaatcaaaagtggttcaagctaagaatatctagaacagattttaaaatctgggaaagatgacataaactggacaattatcagtattgctcatcacaattttggctctaacagtacaggacaaatgcttgttttgcactgtgcctaagacggccccttcattaaggttcaccaggacacaggcagcatccccgcctcccagtcatttgtacaaatcattaaggcaaatctacaaaggaccagtaaggcactggggcacagcagctgactgcaggaagtctatgtaacttccggtagttaaacagcctttaatgcagacataggtgtggaaaattcngggtttggtttttttcagggtca

SEQ ID NO: 438076 - DNA, 951 bp, Homo Sapiens
tattgccatcattagaactatctgcagctgtaataaaaatctcagtgcaccaaagagatgtgccctttatccacgttaccctggttttcctttgttttctggttaacctaaacgggcttaatataaaatagtgcttatttggtgttttaattgtctgcttctataacataagctgcactgtccattggggaactgctcaccatattgcccaacctgtcttgataggtttatacatgggaggcattcagtaatattaattacctctctagaccagtgttagcaataacaaacacttgctagaattttaagactatataatcaatcactttgatgtcagttaatcctcccaacacaagattaaaggtttaaaaatctcatacgtgtacagccattagtgtctcctttcatactatattattttgttcattggcagctagatttttaggtagaacttgtgttcctttttgcaatgctcatttattttacctggacaaaaggtgctcttctgtctcttctccaaagttaatttatctcaaactatttcttgtgttaatattttccaagttcagtatgctgttctggttataagaagatcagtgtcctaatcacacactttttcattatatgaaacatcatacagagttttgtagtctgtataacaatacacagaggtagcaaaatttgtaaaagagcagactatatagtccatactgtagtaactactcaacattgccattatacgtgaaatcggctataaccaattcataaacaaatgaatttggccgtgttctagtaaaacttatttacaaaaacatgtgttaggccagatttggaccacaggctgtagatttctgacctctggcttacagcagaagtttattatgatcctggggaaggtggatatacatggaaggcagaagcgaggagatgtattccatcccatgtcatttt

SEQ ID NO: 438077 - DNA, 814 bp, Homo Sapiens
  misc_feature (781)..(781): n is a, c, g, or t
ttcctacgtctgaatgtacagtcaaatgtgtcctaagcaatctctcattgtctccatgtaaaagatatagagaagccgttagaaaaaggtggctggaacagctttatgacatacagcctgaatgaactgcctcatcatgttatatgtttgaggaaagtgtctgtttgataatttgaaattaagtttaaactgtcataaacggagagctgtacagattctgtgggagaggatactggggtaccagatactcattactaggctctccactctgctttcttcaatactctggatcggtgccctttattcatttttttcacaacttcctcccctgttgctcacattgctttacaagcttccaggattttttaattgttattttatttctttccacaatgactctcatggctgttgctatagttgctataaaaggcaaggtggggaacagacaggtgaatgagcacagaggtcatttgtaaaccgtttgtggttagtgctcctctgtttactgtctgtctgtctctctcagtgtctctgggtatgtgtctgtttacaacataaaatatatgcacacaaatctccaatttttctagagtaactattaacacagttaaaatctggaagaactctatcttttaaaggaaataccaattagcaaataaaacagttgattccccccaactctcattccccagagcttgcttaagtgtctgactttgcacacattccatcaataaaaacattgctggctcataactatgcttcactttccgcacgcgtggtncgacgatatcccgaaacttccggaccgtaccat

SEQ ID NO: 438078 - DNA, 428 bp, Homo Sapiens
  misc_feature (30)..(30): n is a, c, g, or t
  misc_feature (411)..(411): n is a, c, g, or t
gatacctttaatttcctggggcccccgtantaaaacacctcaaggctccctacaaaaaataacccctataggttttaaacttcccttcccctttccattgaaaaaaggttcccttggaaaaatcctgtcctccccattccccggggttccccttacttttagttcatacagataatttcccctgtcagatttccctcattgcattttgaactcataaaacatgcacataaaaatagcatgttacaaatttatggagaaaatgggctctgtctcttaaatttgttgactcgaaacattttgggtggggggtcttttttcgtttttagaagaaaggctttttagaaaactatgtacataatctgacttctcctccccgcattgcaacgccggaaaattaaaattttttcacantggcattttgtcaagga

SEQ ID NO: 438079 - DNA, 754 bp, Homo Sapiens
ctgtttctggagatcatgatgcttcttatctgactcaatgctggtccgcattccagtgctggaggagggtgaaacttcaatataggtcaactctgttatttttgggtctttggttagagtctttgctcacgtcattaggcatttcacgtctcaactgctgtttcctccactgtagtctgcttaagggaggttgacttggcctgttcctcctccgtctgactcctcagaaacctcgggaattggtctggttttgcctggtatataagctatgagcgagtcaggtgtcttagatgtaaacttcataactcacttcctctgaactgggtgtttctggggttaaagggcttttcccagagctgtctagaaaggatacttgctctagagtatcatcttctggactaccttggggagaaggaggttgcttgttgctgtctagttgtataaaaggtccccctggtttcttgtactgtcgttacagttcctgacgttatgatgtgtttttacacctccttgttgtatctccttgttcatagttgcgtccccacttgtacaatactgacataaacgggtaaagtttttatctctttccctccctctgtctgggctagtggtgcgagtttttccaatccatcaatgggactgtggtcgaatacatcagtagagggagattcctttcctgggctaaactctaacgatcgcgtggcgactgcgtgggtcgacgatatcccgagaacgtccggaccgtaccagtcgc

SEQ ID NO: 438080 - DNA, 508 bp, Homo Sapiens
  misc_feature (20)..(20): n is a, c, g, or t
gtgaagattcatctttattntgagaaatatcttccttccctctttcaaaaccctggctatgaggacttgctggactaagagatggctgatgcaaatctttggttggcgttggataagcttcttttccttggcgctgactcatctttcctggtgtcagaagctgagattcgtcactgtttgctacaacagttgatggcccaaggacatctttgctatcaccaagaagcgaagttcgatcaggttctccatctgccaaacctccctccataatgaaagaagataggtttatgcttctctttccattaatgtgcagccattctgtaaatctgcaaatcccgtgcggagctcccagggaggcgggacgcaaggagccggttcctccgaggtcgccgcggcgccggggtccgaggccccgtaagcgtctagtcagacccccccttctctcggccgctgtcgtcggcggcagctggggcgcgagcctggacgaagggcgctgcccagcggccgc

SEQ ID NO: 438081 - DNA, 687 bp, Homo Sapiens
  misc_feature (34)..(34): n is a, c, g, or t
tttcctcctggggttttactgtaacatgtgaccnagtgccacccaggcagcccacaatccttgtctgtgggtgagagagagagacagacccgccttacatgaaaaatcagacctgcaagaaggttatccctagttccttccctggcttgtactgacgtcatagtccctaggatgaattcaccaaggtttcgttagggggcggtcacagttttaaagtgggctttgtggaaaagttaaataaatcattttaatttaagaaacggcaggccctactttactgaaaagctgacaagtcttggtggcttttcaagtggcagagatttctaatattgtttgaccataagacaaaacaaggaactgtaacagttttcccattttccttaaactgaagtactatttataaaatactttacatttttttaaattttcaaattatagacaaacctccctaatacaaaatactaaaagtgcaatagtataaattaagagtttgcaaccacattatacaaacattacctttttattgtacagctttgataatgtgaaatattttctcacaactgtttataatgttgtgagtcatttacggtgatgtttgtctgtaactcgttccccagttattgggctacagaccacactagaaaacaactgtccacatagcagctacaaacatttaaattaaaaaaa

SEQ ID NO: 438082 - DNA, 1989 bp, Homo Sapiens
ttttttattcggttcaaacatttgcttttattgcgttatatacattctgcagctgtagaatcagaatctgggggaagccaactgagaccccgaaggcccagcaggagtccatctgaggtacagaacctgtgcttctgccatgttcctggggcaggggcattccatttccccctgatgctttttcttcctgaagagaagtccaacagactgccagcccaggtctgaaatgcaaggtgggactcctgaacacagtcggggggatggggcagaggcaaacagccctcctgtttcacctgcagacagggtgggccagagtgctatggagcagactgggttgtggaagcctcgtgtgctgaggaatcagtccctgcacacaggagcctgtgcgggggccagcacgcatcgcagcctggcagtacagcctgtgcttttccatgcctccggtgccaacaccccgcacgtgccacaccaactgctccacctaacatgctcagtggcacaggctcaggcagcaaacgtgttccaacccacctgggcagaagaggccaggccagcagaccaagtcctgtgtgtacgcgtatgtgtgtgcattcacacccatgtgcaggaagggggacgcgagatggcatgaaacacgggagaagcagaataaacatttcagcctccctctttccccggtccccgccccccacatagacaaggctttgtcttaagtggaaagcaaactgggagaacaggaggaatgaggccatctcctgagcagccagctgcaggcctggctcctctgggaacagaaatggctgtgagggacttgatgattgagtgactctgcagggaatggctgaaaaaccaagaatttccagcccggatgagcccacggggacttcatcagcagtgctttgtcccacagagagctaacttggtattttcgcaaacaggagaggactcgaggccacagaacacccattcctcttggagcctgaccccaccaacagccccatcccttccagcttgaagggatctggggctcaaggagaatatacaattagggttcaggtgacaaaatgaattacacctcaccactgccacaggtccagcaagaatgtcaggaacgctggggcaggtctatcaggcaacaggttggggtggcacaagggcgaggggcatggatcttgaagcatggcacaagacgcaagagggaaaaggggtcactgagttacatgttcacagagaatgaaggagaaggcccctggggcccaccaagctgccagccacagccccgggcggttgttaagaagcatccgcagaactgtaggggaagaacttggcggcccttgcttggggtggaggggtttgggcactccgcctcctcgctcagcttgaagaacatctcctgctcccgcttcttctggttcagatcctcttccagagccttcttgcgcggccgaagcttgtcccgccattccttcaggttctggttatggctctcatccagggccttcagtttctgggtttcgtgctctaccaggaggtggcacttttcattctgcagctactgcagctcgctcatgttgctctcacactgcgccagcatgtcccgcatctggttctcgtgtttctgctgttgctgcagccgctccaacttctgcctcttctcctcctgctgggagaactgcttgatcttctcacgctgctcagctgcgctgcccccgccgttgatgtggaggctcttcttgtacatggccatgcgcgtcttgccctcactcctctggatcttgggcagccgcgccttttcctgttgctgccgcaccttcagctgctctatcatgcgctggttgtagcgctgcatctgctcccgctccttctcatgcttgcgcagcagctcgtgccgctggaggaagtactggtctttgagctgctgcttcaccagctggtgcctctcctgcagctggtgctcttccatctcccacagggctgcttcccggtctc

SEQ ID NO: 438083 - DNA, 921 bp, Homo Sapiens
gtaactaataaaatgaagctgagagctttggaatccatgaagtgagtctaggtgtttgcacagggactctggtgccccttcttttgtgcccacagcattgcagagacacaactaagaatggctttcaccaaccaccagccctcaccccagccccagagccacaagttctctctgtgggggtggggctggagcaggtacacagagtactggatctgaagatgcagatgaggggcacagtcttgggattatgtgttggggaacttccccaccccctcggtcccaagatgagaggacagtgtttccaccttaggttcttagagtccctctgggctctttggcacttggaaagtgatccccccatttcctgccccatgagaatgggcagggggaggacttggcactggctgtgggagaggttatggctccaccaggcctctgggcactggaaaaaggaggggtgtcaccaggacaacccctactgggcatcaggttctgaaaaggaagagtgaggaactagaggctcagggacagccagtagagtgctcacagggtggtggggtttgttggaaattcctggcagggacaaggaggcaggcccagcctgacagtcagaaatccccagcgggccatcactgggaggtcatgcactgcagccggtgtttgaagaagagcagccggtgtttggccatctggctctcgtccagtgatcctgggtaacggtaccgggcgtaagtctctgctccggcatcccttgatgtccaaggcagcttcagtttggatgcatgatccaccacgacgtcggagcaggagccaacccgaagggaaccaagcccatccaagaagaattccagatgaccacgcggctgaggcgggggtcgaaaccgacctcgcgcacctgcagtccgcccgaagagtaccact

SEQ ID NO: 438084 - DNA, 307 bp, Homo Sapiens
attttccctatgccaggtaagggtttgacattgtgagccccggtgggtcgcttgcattagggttttgttgttgttgtttaaggagcctgagccgaggggagtgtgagtgccagctagctgctgtaacttaagtctcatttgcccacgattgtgactgttaaaaaggaatgataaagttgttactggttggtttttcgcggtttggggcggtggtggctctccctcactgcaaaatgaatgaatacttttcgggtcaaggttagcgtgaaaatgacagcccccttaggctgcccccttttgcactgag

SEQ ID NO: 438085 - DNA, 433 bp, Homo Sapiens
  misc_feature (388)..(388): n is a, c, g, or t
atgtctggagttatggaatagtaatgtgggaagttgtgtcttatggagagagaccctactgggagatgaccaatcaagatgtgattaaagcggtagaggaaggctatcgtctgccaagccccatggattgtcctgctgctctctatcagttaatgctggattgctggcagaaagagcgaaatagcaggcccaagtttgatgaaatagtcaacatgttggacaagctgatacgtaacccaagtagtctgaagacgctggttaatgcatcctgcagagtatctaatttattggcagaacatagcccactaggatctgggggcctacagatccagtaggtgaatggctagaggcaatcaagatgggccggtatacagagattttcatgganaatggatacagttcaatggaccctgtggctcaggtgaccttggag

SEQ ID NO: 438086 - DNA, 1154 bp, Homo Sapiens
  misc_feature (785)..(785): n is a, c, g, or t
gaatatctgccctttaatttgcatttaaaatcagtttctttaaatactttagttacaagttctgaatagtgaagacagagtagtagatgctgcaggcactcagtattgggtcccaccccttctccccttcgcgacccccagggctcaatttttgggttaagatacaaaagggcactctctactggggctggtgtgaaacgtcagcagcctcaggcctggatgcagttggatacaaagccatgaatcccagtgggtccaaggaattccaatgattgtgcccagatgcacggggaacacaccttagaaatgaggtcatccgttttaccactaggtactaacaccctcagggtggtttcctaccccagtccacgtcctccagatctgtgtcctgcagaggaagagacaaggccccgctataacgcaggaaggaacaaaaactggctcctcagcccaggtgcttacagcaacttaactggaaagctcaaggcaatgtgagtgagtctagaggagacctcccttccctagtctctaccaggctctggcccttcctcgggaccacgcttggtcccactgccatgatgtgctagaatctgctctaaggacaaggtgctagaatgaggcccagcaaccagcaaaggggttggaaagggttgctacagccccagctgtgtgagattgtgccaagacggagtcttcttggtgtcagcctatgatggagagcgtgagggcaggcctgggctctccttctatgatgattacaatgcatgacctcaggggacctctgnccctctccttccactcacacacccagatcccctggcctgtgctttctggaagaggtagaagaggcatcttgaagtcaatgacaacggagaatgaaggtgccattgaagaagcaaagcagcacctctttgcctgtgttcaatccctccacacaagtggaatcaagggagaatgtgcacagccaggacagaggctgctctgagcttgggaggcacagcatcctcctagaagtctctgcagaacaaactttcaaaagataggaacttaatcacatggtccccaggggtttctctatagtataccagcactagggaaaagcaaaatcatctttgcagagcctcgtgccgaattcgccacccaggcctcgctac

SEQ ID NO: 438087 - DNA, 748 bp, Homo Sapiens
  misc_feature (124)..(151): n is a, c, g, or t
  misc_feature (565)..(565): n is a, c, g, or t
  misc_feature (569)..(569): n is a, c, g, or t
  misc_feature (574)..(574): n is a, c, g, or t
  misc_feature (638)..(638): n is a, c, g, or t
  misc_feature (662)..(662): n is a, c, g, or t
tttcctgtttgagaatatctgccctttaatttgcatttaaaatcagtttctttaaatactttagttacaagttctgaatagtgaagacagagtagtagatgctgcaggcactcagtattggctnnnnnnnnnnnnnnnnnnnnnnnnnnnnaggcctcacttcttggcttaagatacaaaagggcactctctactggccctggtgtcaaacgtcagcagcctcaggcctggatgcagttggatacaaagccatgaatcccagtggctccaaggaattccaatgattgtgcccagatccacgggcaacacaccttagaaatgacctcatccgtttcaccactaggtactaacaccctcagggtggtttcctaccccagtccacgtcctccagatctgtgtcctgcagaggaagagacaaggccccgctataacgcaggaaggaacaaaaactgcctcctcagcccaggtgcttacagcaactttaactgaaaagctcaaggcaaatgtgagtcagtctagaggagacctcccttccctagtctctaccaggctctggcccttcctncggnaccancgcttggtcccactgccatgatgtgctagaatctgctctaagaacaagggtgctagatgaggcnccagcacccagcaaaggggttggnaaaggttgctacagccccagctgtgtgagatgtgccccagacagtctttcttgtgcagcctatgatggagagcgtgaggcaggcct

SEQ ID NO: 438088 - DNA, 396 bp, Homo Sapiens
ttttttttaggaagttgatcaaatgcttcgaccgtttatacaccaacggtcacagatgtttaaggatttgggggatctacgtgaatccagcttgtggacactgaaaatgacgttgctcttatagtgaaaaagaagcgagaatatttactgcacatcaaatagtgaagacacaccagctgaacactgagggtatttgagcttcgagttgtgaagatgatttgtgtagctagcaagcttacctcatttcccacttactttacctatttcttctaccagttttaagcaaaactctccttccatgtgactgtaaatcatctctataacctaaaggctgcttgaatgggcccgatgtttcctgacgcgtagggggagccacacacactgggggtctctttg

SEQ ID NO: 438089 - DNA, 798 bp, Homo Sapiens
  misc_feature (120)..(134): n is a, c, g, or t
  misc_feature (351)..(398): n is a, c, g, or t
  misc_feature (751)..(751): n is a, c, g, or t
  misc_feature (753)..(753): n is a, c, g, or t
agatacatagcaattaaaatagagaacaaataatggatgtttcctcaccatttgtttcatttcaaataaatataaacacatttacagcaaaagtatatggacattttctctagtttggcnnnnnnnnnnnnnnnggtcaacacatcatcagttacaaatgttaagtggtcaactagaaatctgtgtcctaggaaatataaaatacaacaaggattggtacacagaaggattacatttaactccataaaaaagctacttcagttctcacttgcattttgaaggaaaaaaatgtgtatcttccattttagactgaagcattttggtcctcatgtgtagctggctgatgaactnnnnnnnnnnnnnnnnnnnnnnnnnnnnnnnnnnnnnnnnnnnnnnnngtgtgcatgtgtatgtgcataatttttaaagagtctcattcttctttttgtacagcggttccaggtgtggaacggggtccatttgacctagaagctttggcagagggagcagacacagtattcactatgttgatttcatcatcaagcaactgggcaatcggttttacatgctaaatcacccatttctactttctgctttcactttttttgttcctttttgcagtcacacttttcactgacttggtatgaccttgactgagaagctcattttactactgatgaacaatgctgatgattctgatgttttttaaaagttagtattttgatttaagaataaattaacaaagggtagntncatactatttttgcacccagtaggcgggccagtgctagaggatcc

SEQ ID NO: 438090 - DNA, 516 bp, Homo Sapiens
  misc_feature (481)..(481): n is a, c, g, or t
gcagtcacacttttcactgacttggtatgaccttgactgagaagctcattttactactgatgaacaatgctgatgattctgatgttttttaaaagttagtattttgatttaagaataaattaacaaagggtagtttcatactatttttgcatattgtgtcaaagttttggtgcaatataattttcacctgaaatgttattagataaatttgggttcaatcacttaagtgaaaattagtcacaggcttgttatagggaacactgtgttaaacaaaaaaaggcaagttcaatttttcaattcatctgggcaactttaacagaggatcctcggaaaggaggttctgggatattcaaatgcttactatagagaggatataaatagttggactctctaaaaagattattacaggcattatttctgaagatggacacctttacctttggcttctagtgaggaagtaaacatcaaagcgagaagaagnttgaggcatttcctatctgcctcttcccttccctc

SEQ ID NO: 438091 - DNA, 311 bp, Homo Sapiens
aaaagtatgcgccactatgcccagccaaccaaagattttttgaggtgttgaaaagcaaagcatcttgagcacaccatgacagagagattatttcaagatggatgatagagaaaccgtgaaatttattatttcagtcaattttttgtaccactcatctcccaactctcataacattttgaagatgagtgtttgtcttttactagaaaccatgagaaaattagaaatgaatggaattttgtttacctaacaaacatttattgaatgccagacacataaaaatatgcataacacccttcttgttctaaaggaat

SEQ ID NO: 438092 - DNA, 466 bp, Homo Sapiens
atgcatgtagcaggcaaaggtcgtgtattactaatatcctcgcctgacctcttaggaactggggagcaactcttcccactgaagaaagagcatggctcctggctctttaccaaatctctcattttttagttctcagatgtgatttttctctctgacactccttaatccaacaccttttatccttacaggtaggccctatgggacttatgccctaaagactgtaagggctaggcagcccatatgttcgtatgttttctgttggtataactgaataccacagactgggtaatttataaaggaacagaggtttatttagctcacagttctggaggctgtgaagtccaaggtttacaggcaggtatctgttgaggggtcttctttgctgcatcatcatatggtgggaaggcgggaggggcaagcaaggcacatacaaagagggagggcaccaggggccagcccatttatt

SEQ ID NO: 438093 - DNA, 377 bp, Homo Sapiens
tggagttgcatagtcttttatttttctaaagatgaccattccatgtttaatgtcttcagagaagatctaaaaatcaaagttaacaacccatttgtcccaactctaactcttcctgggaacaattcctcattctgttacttgatttcttcctttaccacccacataaaatatgtcttactgctcacaagatcaaaagaaaacagaacaaaacattgaaacatcagaattgtttaaaacactagatttcattcaatggtccaattggacacttgctcattggaacttatttctgcttcagctctagttctttgagaaacacaagaattcctttcacccaaaatattaggcctggacacaggatgttggaagggtagctg

SEQ ID NO: 438094 - DNA, 1068 bp, Homo Sapiens
  misc_feature (102)..(102): n is a, c, g, or t
ccctggctggttgtggccagcattccagactgaaacggggaacagtggaagaaagttagcttcgggagcaaaaagtggacagctcctgtggtctgtccctcnatgcctgaccttgaatgcgggaggcccctggagggttccaggtgtcctttagtttcccaccccaccttgcttaaccttgcaaggaagaatggcatcaaaacgaggcttctcccaggatagtctctctctataaataccgtgtatatatacatacagatactcatacatacaccaatactaacccacagacaaagctgggtgcctggagcactggctagcgacatgttaacacaccagaaaaagtagtcattgttcctgctcccagaagatcaagtcatatgtcatgatctttaaacattcagggaaaattcagaagattccattaattaaaggagggaggaagatgctgtcaaaatgatgaagtacagactaagtgaaattgtaaagcaaataggaaaccggaaccattgaggcctagttgtgaagttcgatagctgtaaaccgcaatcttcagatttggatagatttttgtttttcctgttgctatggaaacttgggagtcaagcttcagacgtcaggagttctcacagacaagctaagctgaagaggctgaggagcaggactgagggcaggctgaagcgcagggcccctgccgcgttgcagtccactttggaattcctgcaggagcacacttgtaccctgagatctgtgatattcgtcatgggtggtttccctgaatctgtcaccatgatgggcaggttgtagtttgctttgttcagattttgaagaaggcttaccagggcgtgtgtattgttgatcttggagatcttccagactttatcaggaacagcttgtttgtggatttcaaatttgaaaggatctgtattcgggtgaagatccttatctgatgctcccaaaatgactacactgaggtttttggcatcatcacagacttcagctactgtggggtaaatgaacggggcattgtcattcacgtcctccagggttatcagcaaagtcccagtg

SEQ ID NO: 438095 - DNA, 307 bp, Homo Sapiens
  misc_feature (45)..(45): n is a, c, g, or t
  misc_feature (121)..(121): n is a, c, g, or t
  misc_feature (128)..(128): n is a, c, g, or t
  misc_feature (138)..(138): n is a, c, g, or t
  misc_feature (192)..(192): n is a, c, g, or t
  misc_feature (254)..(254): n is a, c, g, or t
acatgcacagtgctgatgcaaaagctcgtatcactgcacagaggnacatgccttgacatgtgattgactgagcatgcaaatactgaagagaagtcatgggttgatggggactgatgtgttnctaagtncagatacaanaaaattcaaaacctgtttcattgctcttcaggaatagttcattactctgtgttnctaggaacaatcagcctctgaagcaccttaagaagttgtgactgcaacgtgctgccattgtncaaattcatcctctgagaaattaataaggctgtcctctgagaaaccttcttcc

SEQ ID NO: 438096 - DNA, 1156 bp, Homo Sapiens
gtttttggtggtggtgtttgtttatttttttaaacccacttgtagtttgggttcagctggaaagcaggacataccgacggagggagggtggtcgcactagcggggttccgcggcagctttggcgggaagccccaggcccttgctctggggaggtaggtcctgtcgtccactcccagccggctcagggaggcggccagcccttccgtgtgagtgttccgcgcagaggaaagttgtctttctttcttctgatctgtgtcctcaaaggcccagccaatggtttcccaacacagtgccctgcagctgagggacacgactccccaggcaggcctgagagtctgtctgtctgacaaggaacacgggccggtgtctgatgccagaaaacagactgggacttggcttcttggaggcccgcgtctggggcaccccatggggctgctctggtggcggcctggctgtctgggcccccgcccctacagctgccccggcctgatctgtggtacccttcccacaccccccaccctcatccctcggagaaaataatagaataaaataaaaatcaatcagaataaataccgactcggccaacatttacatttacatggatggacaggacgatccccaaacagtgaaggtttacagactggtcaaggaaggacgaacagagagaatggggtctgagggtgcacatcccgtggagggtggcggggctcctggcctcgtctgggtgaggttgggggcctcgctggggctgcggtcccagagcttcggcaaagccaccaggccttggggagcagggctgtggcaagcaggccgcctcggagaaaaacaatgactaactcatcctgacaggcagtggggagactgagacaggatcaacatcagatggctggaccgcctcttccatgcgccaagaaccgcgggcgaggggaaagcaatgcaagccttagaaatgcaatatccagctctgcctctcatcacatacattcagaggtcaactcggacgcggccttcctcatgccacagagaggggatggacttggggagggggccagggtctgtggggcatccacttctgtcctgcagttcctgtctgagcagtctccctcgggaagctgcctcggggtctcaaattttaggcttgactgttgtttcttta

SEQ ID NO: 438097 - DNA, 2460 bp, Homo Sapiens
  misc_feature (99)..(99): n is a, c, g, or t
  misc_feature (105)..(105): n is a, c, g, or t
  misc_feature (107)..(107): n is a, c, g, or t
  misc_feature (129)..(129): n is a, c, g, or t
  misc_feature (281)..(281): n is a, c, g, or t
  misc_feature (311)..(311): n is a, c, g, or t
  misc_feature (314)..(314): n is a, c, g, or t
  misc_feature (1056)..(1149): n is a, c, g, or t
  misc_feature (2350)..(2350): n is a, c, g, or t
tagtcggcgcccgcgattgtgcgtccgcgatcacgcgtgggagggcggggtcggttacatagggcgagcttgctctcctcgcggtcgcttgacgtcagngcggancntcttcacaaagactttatgatntagtcggcgccgcgcgcggcgtgcgcgcgttatatactccccaagggctacaccaggtagcggtgtggtcctcgtgtaagccggggtgtttcttccgtagccacatctttctgctcgctcggaattagcggtacctaggggggcggctatanacaccatattcgtgtggggaggggtgcgancanggtggtggcgcgcgagaccacacttattttttcctcggcgcggcgtgaccacagggagcagtcccgtattaatctactggcgacgcgggcgctagtaccgtgtgcgggtgggggaggaatgcggctcctcggccgccgaggaatactagcgcgctatagtgcttcgcttccgagcaagaaggctggtgtgttaggcgaacggaagtcgctcctttccgccgagcgcacggcgccgcggatgaacttgtacactgctttacagcctgtttccgccacccggcgccccccgctttactttgcagccacggtggcgggccagcagggcgacgttaaataaataatagggcgcggtgggaggtatgcgagggcggcgccggtatgggataggagcgacggcccggcggggcgtctgccgaaaacggggttacgcggggaaggatgcggagccggggtggggatcagggggcgcccgaaagagtcttgttttgtcggggacataactccacggggggtgttcttaatcgacggatctggtgtacgggaaaaacacagactacaggacaggtctattgtcgcgatagcttgggccccccgccctgcaggaagatagaccggcggaatattgtggaaccaggcggggggggaccacgaaaaggggcacatgatatgtggccccgacggttggagagcatggtcccagttattttcggtaggtatcgatgtgagttgtacgttctttccnnnnnnnnnnnnnnnnnnnnnnnnnnnnnnnnnnnnnnnnnnnnnnnnnnnnnnnnnnnnnnnnnnnnnnnnnnnnnnnnnnnnnnnnnnnnnncccatgagcttcaaaacagaagaccataaattgaaggtttattttaaattacctaagtccctgaaatagaagagtaatttatttttagtattaaagagattaacaagttgtctcattattctgatttacccatattcaaaactcacctactcagaaaactgcaaacccatagttgctaacaatcctatttaaccattaagaaaggatttacaacaataaaagctatgtacataggaaatatcagagagtagaaagtgctaaccagaggtacccagaaaagctttctgtgactgaaacaatacttcctgtctaaggttcaggagtaagatgcttctttgggggctgagaaattaacatgagaaacctttggtatccaaattggatttctgagctctttgccacggcatttttggctagtctaaaacaatcatttggagaaagcaacaccaaggatgaggaggaaggaattctcaacctcggaccaatctctggccccagggttaggactgagaacaaatacactcaagggctgactttgaatggcagtgggacaacttggaaaactaatcacttagtatcaagtcaggcctgttgtgaatacccaggttggctccatcccagggcccttgtactgagaccctcagaagaatgacaggtgagaggatgatacagctagagttatgcgacttaaaggtagcaacccacaaggatggcagcagaagcccttaacagtgaccttcagatcagtgacataactccactgttagcggcagcagggctgagtaaatccctaataatttcaggttaggcaggatcttgactcatataactcatggtagaagctataggttctattctataaaatctctgtatacatccaagaggttgggatactcagagagagtggcagaacacgtggtcttcaaagatctgcttctctgtagctgggaagatcttgtcacaaattggacaattgaaacaaaggggctgcatctgctgttgctccaaggtgtgatcacaaatatcatctgctttgcagatagggcatttcttgatggagagcgggctgggggaagaactttcttggataccagaatatgggtttccataggcaagtcctggattttgtcttgcgcctccttcatctgaagtaggtacttgatacggcaaagaattaaaatccagaccccatgtactgagncatctgttctccctctcaaaagatatttttctcttcaatctctcttctgtctctgagagcatacatataatttccgtctactcagtcttttgacagtcaaagttttatcc

SEQ ID NO: 438098 - DNA, 477 bp, Homo Sapiens
tttaaccaccattgtctacacctttttaaaaattaagtttgttactaaaagtccaatgtcattcacttgtatttatgatcatcaaatggtaattagggcaacatatgtaaatgcatgcctctgaatcagattcatgcagtgataattatctgaataatttatgacattctcccaggttatttgaatggtatctttggagggcttactcaaatgaacccacaatacctccactattacagcttataggaaattacaatccactttacaggcctcaaaggttcattctgtgggcccaaagcccatgggaggggaagggatctaaaggtgctcatggtcaagttattttacttgttttttactgtctacccaatggtaaaatggaattttcttcacaggcctttactttaggggcttaaaattgggcagtttttcttgtattggccttaacttaggggggggcgtcttccgggggaaaag

SEQ ID NO: 438099 - DNA, 838 bp, Homo Sapiens
cggatgcagcgcaggtagcaatacatggctttccacataatagtacttgctgcctgccagggtgcccagctgattgaagggcagtccgatctgaggagctactgacagggcttggtagtaaaatctctcggctagcagctcggtatctacgccagctaattcattctgatatcgggacaaatcccccagatacaccagacatcggtgacatgccatctgtgcccaagtccatctccttccctgaggcagacactggcttcttgcatcctatgagggggtcagtgacatgggctccagtcgatgcagcactgcagttccagctggtagtgggactggatatagagaaggagatgctggtagaagccaataccagcaaccaggtgcgtcctgtaggcacattccaaagtgctccggctgtggatgtgctttttgttagtcttgataagctggataacttcatagtatacctttctccacagcagctcctcagcctttctcccatagtccactgggtgcaggaacataagcttgacgcagagctcacgcagcttgttcctcaggctaatgttttctggtttgaatacttcttgataagcagttttgttgcaaaggatgaggtcaagtcgatgcacagcctccaccacagcccggtaaagccgcttagtgtggaggacttttgcttcgggctcgctgctctcccctgtgggggggccttggctcatggtgcccgggtccgggggcagctcccggtcacaggcccctgccacccaccactaccgccaacactgccgtctccggccgtagccgcagccgccgccgccaccggccctgctcggcc

SEQ ID NO: 438100 - DNA, 946 bp, Homo Sapiens
aaaaatctatgagtttattccacctttcatccattgcatttgtgatgttattagttagcaagatggacactgttctttagaaaggacttatttaatattaaccacgtcatagagcaagatggcccccagtccctacaagcaagtgcaattaaaaataaaagcaaatgttactgagccctgctgaactcctgataaaaaaaattatgtttatggtacatataaatgtctcaatcatgcaaattgtcactcttgttaatgaaacaattttgtaaaaagatagtcctctaaaagggtttaatgttttttacctatctaactgtctaattagatttacacatcccgcaaggcaggggagcctgaagcttttccaaaccaaatcgtttgccactagaaactattttcagctcttcatgatttattaggaaatagtttaacccggactgtagtgtcttataaaatacaaaacgagaaaactgacacaccaaaatgaagtctgtgaaattgtcatcctcttaatattacctgtatttaaattctttcttttgcccttattaacactgatatttgaaacaactaatcatctaaaaggaagctcttaaagggctttaaatgtcaatatagtaagaatccaatgggcgcctactatttatataaaatatttcttagggcccataaatcatataataaacagtgaacccaagactacatatgagggaggcctagtagagaatttcccatgtagcctacaactaattgtatttaaattgaggagatccaaaaacaacatcacccttcaccctaaagacccttcaccttcacagggattctatccggtgctgtccacctagacccctcagagcattgaaaagcattacagtatgtataactgtcaacccttgtagacatcaatgcttctaacatgtcgacgatattcgaactatgaatg

SEQ ID NO: 438101 - DNA, 822 bp, Homo Sapiens
  misc_feature (46)..(100): n is a, c, g, or t
  misc_feature (531)..(539): n is a, c, g, or t
catgtatattacaaaaaagttcctgtaccaaagttcttattagacnnnnnnnnnnnnnnnnnnnnnnnnnnnnnnnnnnnnnnnnnnnnnnnnnnnnnnnaaattttctctcctcgtggtgactgtcatgtgattgtctcagtttctggaccaaacaaacacactaataattttaaatctgaaacagtgattgtgcctttcggctcatgtatgtacagggtgatcagaagtggtacctgttagcaaaagtgtcacgatgctgcacctctaccgaaactgatacccacgaactacggaatctaaacagactacaccctgtaactgcgtattactgtccacaatggaatctccaaagacaaaagagtatgaaatttatctgtagtgattatagccaccattttgaattaaattttacactctgcgctcaaataaattagctcaggccagacttagttgggacctgagagttaagtgctggatggtattatttcactttgatttttgataggaatttcttttattccctcatgnnnnnnnnnctttaaaaagtatttccagtgctcactcctcctcttttatcccccctccccaggcgctacacacaaatcacccccaaagtcgtgttttaaatgcacctgtatttgcttaaacgaaaatgtcagaagtatttgtcctacaagcagtctgagtggtttgtcccgcagctggtctggtgacgctggccctcgcggatgtctgcgtgtcgctcacatgtgaatgagtgaggtaattggatatgaggccttctttcttatcttcgcttctttgtttattggtccgtgt

SEQ ID NO: 438102 - DNA, 368 bp, Homo Sapiens
aaaaagagtgggaattattttttctccattcctaaagccccataaagcaatgttaattgttcccacccctctgctattctgtctcctcaggtactgtgtgcagaaatgtgattgagattcaagtcagggcctctctgcccttttccctccagaaacaaaaccaagataatttatcctgaacacggtgaaaaaaggaagggagggaggagaaaaagtccgggtctcacctgggattctctgtctcctgcaacatgaaggatttagcctgggaggaggtggtgagaactctgggagagaaaaaagaaggaaagaatagttttacccatgctgaagttaatttaaaccttcacctagagaagcaaaaaaaa

SEQ ID NO: 438103 - DNA, 804 bp, Homo Sapiens
  misc_feature (329)..(329): n is a, c, g, or t
cggtaaggcatccacccagcttggaataagactgattagttgccctggtataccccatttacgtatctgacccttgggcttaagcttctaggaaagggagcacccaaaatgggaaaactgttggtcatcgtttcttgcgttctctaggtgaaggtttaaattaacttcagcattgggtaaaactattcgtgttccttctttgtttctctccccagagttctcaccgacctcctcccaggctaaatccgttcatgttgcaaggagacagagaatcccaggtgagacccggacttgtttctcctccctcccttcctgtgtgtgtgtcaccngtgttcaggaataaattatcttggttttgtttctggagggaaaagggcagagaggccctgacttgaatctcaatcacatttctgcacacagtaccttggacagaagtcatgatgatggggcccatgactggcaacctgctgggagaggtggcctgcagtgtgtctggagtacatgggggaccccgggagcatcttctgtgtctgtggcccctggcaggcctgcatcacttggtgctatgccactatcagatccaccacaggagccatgtgctattcattccacaaggagccctttcaacagggagacatcaggcccaactggattctagccaccttggtctccagtctcctactctcaagcccatgagtgacaattcagcacaggaaatttggttctgtgagcagcatctattggcaggatgaccagcattcttgtgtgtggtttgcaaagatcttaacggagaacaatgttacc

SEQ ID NO: 438104 - DNA, 1008 bp, Homo Sapiens
  misc_feature (665)..(726): n is a, c, g, or t
  misc_feature (810)..(864): n is a, c, g, or t
  misc_feature (903)..(937): n is a, c, g, or t
  misc_feature (958)..(958): n is a, c, g, or t
caatttcagggcccgcttttttgaaccattgccccccccttttcctctggctttccctccctagtgactcgcaccttgaagttgtctactataataaggccacaggaatttcacaagcctttgatgccaacgttccattcccccccagactcatttaagccattatttatgcctgaatatttgaaggaagatgtattagttcctaggtgaaaaaacctgataactattttgtaatgatcaatatttgtataccattagtaagaaaatgatttgcacattaatgtgttaaggacttttcatattcccatattgaaacatagtgattctgtagctggcatcagctgtaccctgacttcacatgaatgcctggaggggatcatatttttaaacaggaaatcagtgtgaattaagctgagtaattaacattcagtgtacagtgagcattcttaactaaatcaagtagtcatgaaagaaagtactgttggtaaatccagaacagacatcgaaattaaatggtgaggttgaaggttgtagttaagtaccaactagtgtgagttctgggagcattttgaaatggtggaggaatgtactaaatttctgaggaattaatactgatgggaaggatgcagtaaagagtaaaaacgggggcacttgtggtttatacnnnnnnnnnnnnnnnnnnnnnnnnnnnnnnnnnnnnnnnnnnnnnnnnnnnnnnnnnnnnnnaagcctaggtaacgtggtgaaactcgtctctacaaaattacataaattagctggtgtggtggcctgcacctctagtcccagctnnnnnnnnnnnnnnnnnnnnnnnnnnnnnnnnnnnnnnnnnnnnnnnnnnnnnnnggccgaattcccgggcatatgtccgctaccgtcgactgnnnnnnnnnnnnnnnnnnnnnnnnnnnnnnnnnnncggccgcttcctcgctcactnactcctggcgctcgtcgttcgctctaagcgctaggccctatatacatgca

SEQ ID NO: 438105 - DNA, 346 bp, Homo Sapiens
catcagtacatgtctggtctaaaatataacatagctgggacaacatcattcatgagagacctgaaagctttccactgaaatcccaatcacacaatccctagaaatgtttttcccaccctaaggaaactcacttctagtaccttaaaagaactcccctttggtccaaagacaccatgttagaaagctcacaaggtagcaagatgataaaaaggcagtttcatataaaagaatgtggataagagtaagaaattcaggttttaagagccactagaagggggactggcattatctctatcacaagtaaattttgtgctgataaacactgagagcattattgatcattgta

SEQ ID NO: 438106 - DNA, 1266 bp, Homo Sapiens
  misc_feature (347)..(364): n is a, c, g, or t
  misc_feature (1033)..(1033): n is a, c, g, or t
  misc_feature (1237)..(1237): n is a, c, g, or t
gttgtttccctgaccccaccctgaagaaaagaaaaattatggcatattgaaaacagcagtatgatgtaagagaaaagatcacaaattccttgagggtgggtcttttccatactcataagcctatttataatattcagagtaatttattgacacatattaatattccctcctatcccattaattgccaaatcatcaaacatttattgagcatctactctgtgtagggtgtaagcagtactggggacttacagtgataaaagacatagttttagccttaagtgatgtactgtttcactgaagagatggaatataagaagccaagtaatttatggaattctcttctttgnnnnnnnnnnnnnnnnnnggcagtggagtcttgctctttaaatagagcaaggctagtctggaactcctgggctcatgtggtcctcccgccttagctttcagtgtagctgggactacaggtgtgaacacagcttggaaatctcttaaccatgggagttaagtctcaaaattctggtgatacaagtggttgaaacttaaaactgtatttaaaaaataggattcgtgaatttgagatagttcataagtctgcaaaaggctgtataaatacatattttacatttactattattaattttgtagtaaatttgagtacagcactctctttatctgtggaaacttcagactctcccctattactttaatttcagtgagacattattaaatataagtgggcttacacatttgttttgctttactgacaaataatacacaacttggaggcttttttttcctttctattcttcctctaaatgttcaacacttttctgattttgtgatttgaggttgtttaatagcttcctgaggctccattgagaccgtatatacgtgacacttaacagtctagccttcctcggtacataatagatatatgatggtggctttgcctgtagtaaattcatgccaaaagataggctttcagtgcctattacatatgggctttcagcctctctctacttgagggatgtanggagtttattttctggagggcctgaaccctctttttcctttaacttcccttttactcctttcctaaagcccttcctttaataaaaaactaatgccatggtccctatttgggttttcccttttttggaattcccccttttctcttttaattaatccccccagtaaggagaagtggacattggggaaaatttcctccatggcgggnttaaaaaaagaggcaacgggtcctttccc

SEQ ID NO: 438107 - DNA, 428 bp, Homo Sapiens
  misc_feature (29)..(29): n is a, c, g, or t
  misc_feature (43)..(43): n is a, c, g, or t
  misc_feature (56)..(56): n is a, c, g, or t
  misc_feature (58)..(58): n is a, c, g, or t
  misc_feature (79)..(79): n is a, c, g, or t
  misc_feature (90)..(90): n is a, c, g, or t
  misc_feature (94)..(94): n is a, c, g, or t
atggggattattaaagacatggggggatnccccaaaatacttnccccacatatctnanacttcagaggccttcctcctncagtgtgagtncctnaaatgcccactaagatttgaggaaactgcaaaggctttcccacattcaacacatacaaaaggcttctctccagtgtgagttcttatatgttgaataaggcgtgaggatgtaaggaaggatttcccacattccttacattcatagggcttgtctccactgtgagatcgtacatgcatactaaggcccgagtactgagtgaaggctttcccacattccttacatacatagggtttctctccagtgtgagttcttccatgtatctgaaatgagttggaataattgaaggctttcccacattccttacattcatatggtttctccccagtgtgggttc

SEQ ID NO: 438108 - DNA, 566 bp, Homo Sapiens
  misc_feature (483)..(483): n is a, c, g, or t
  misc_feature (487)..(487): n is a, c, g, or t
aagctagttggatgttggccctcaactgtgcaaaacaagcaaagaggaaatcaaaatgcactcactcatacacacgttcacacacgcagcttccatccagcaaatctgtgttaaatacgtttgtgtctctttcctccccaaccctttatatgtgcaaaaatattgtagtgaccgaggtacttcctcagaccgtctcccacatgtaccctttctggccttccaggtcctgtgactgacttcttgggagggaataaaatgatcaaggatagaaaagtcaagcttctccacctggtactgcacttgccaaaacctttggttatttattttttttcttcctcttccaatgcattgtttcccattttcctcttcccattaggttgctcatgtcttttccaccatctgtcctctgcgatgtcacatgatgccctgttccaaggtccaggcctcggcaggcgaccaccctgatttcctatggacaagcgncctnttcttccacccaccagctctcagcatagaaagcaagtaagtgtttgaaatgtcctggaaggctggcagggatgaaatgg

SEQ ID NO: 438109 - DNA, 365 bp, Homo Sapiens
  misc_feature (254)..(254): n is a, c, g, or t
  misc_feature (319)..(319): n is a, c, g, or t
tgtctaatttttcacctagaagcttagttgttttgccttttatatttagatcaaaggccaactgaaataaattatgtatagtgtgaagtagtagtcaaaatatatttttcccatgtgagtatccaaccaatttggttccatttctttaaaagactatcccttccctacagttctacagtgaaactttagtcataaagcaaatttccatatatgagtgggtctatttctgaaccctctattctggttgccttgtnctatttgcactgacacactctagcttttatatgaatgcttgaaaatgtgggttgtgtaagcattnctaggtttatcattggtttttgggcctaatttggtggggggccttt

SEQ ID NO: 438110 - DNA, 819 bp, Homo Sapiens
atcaggccaaatcggccgagctcgaattcgtcgagagcggagttgtgggcctcgctggcccggccgcccagtctcgcgagagttgggagtaaacagccccgaatggagtgcccaggcgtgttcgccgcggaggcgccgtcatcccgggcccgccggccctgagctcccggcggcgcagattggctcacagtggttgattgatcaaccccattggacgttggttctgtggtacaaatggagtacaggactcagtcgtcacggcctgagtgagagaagccttatttccaagatggagaagaagcggagaaagaaatgaaagcctctcttcaggctgaaccacaaaaggccatgggatttaacttttatttatgttgggcaagactgtaagatggctgatcagtaatgttgcagcttttagctgaaacaaaaattcacttttaatcaagaagaaaaaagtgtgatttgaatatatgcaattttatgatcatattcgcttgtgaccatgaagcttgtcaacatctggctgcttctgctcgtggttttgctctgtgggaagaaacatctgggcgacagactggaaaagaaatcttttgaaaaggccccatgccctggctgttcccacctgactttgaaggtggaattctcatcaacagttgtggaatatgaatatattgtggctttcaatggatactttacagccaaagctagaaattcatttatttcaagtgccctgaagagcagtgaagtagacaattggagaattatacctcgaaacaatccatccagtgactaccctagtgattttgaggtgattcagat

SEQ ID NO: 438111 - DNA, 501 bp, Homo Sapiens
tccgcgagagtcgccatttcgcttttcttgcattgcagcttcataagttgagctggaggatcttatttagaagggtgatccattcttccatttccacttcactgtctgctgccaagagataactacttttgtcctgcatcttgagctcaaaagcaaaacgcctgactttgttggttctgaacgacaccccatacaggaatcccagaaatattgatccttttggttcctttggagatcttttcatctttataaaaattcaaatttataggatccatcgccaagttgaatcaggtggaaaaatcgtctcttaaatgacctcatggtcacgctgatggcactgttcatgttgcctttgtacagccagccatgcttggtgatcccacccttctgggaaccaagggaggcagcatcctcatctttgtcgacctcctcgtcaacttcatagacatgaactggaagtttatccaacttgaccactttgttcggaagctgtcgaaactc

SEQ ID NO: 438112 - DNA, 714 bp, Homo Sapiens
atctgctatctggctgatcagcgaggcctccagagcaatctggtcagaaagaagcctcacctgctcctgctctgtcaactcagactgggagcactgctgcagggaggcaggcttcccattctcctcggtgccacctgtctccagctgtgcacgggccccgccatgggctggggccggccagtgctgcagggcttggatggcgctgacgagtgcactctccacactggccagggaggctgcgcgtgcgtcctgctcatcctcctggctggccctaggcagagatctcagttgttctcggcaattttccaggcacatcagggcctgactattcttgacctggaagtccccaagctctccaacatgcccttcaaccctcctggccctctcctgcctctcctgctccagctgggaggccagtgcgccaacctggagcaggctggcgcggagctgctcacgcagctgggcctcggtgcccgcccactggtggtgcagtgcgagcagtgcctcacggctctgaccctgctggctcttcagcctcacggtcacgtctttgagcttttcctctgtgacgtagagcttggtctccagggagtggatgatggagaggtacgtgtcagagtcgccagttgcaggcagtacactgggtgcaggctctgaggacatgctttcttccgagggtgaccggtcctggctggtgtcggaagatgtgctgct

SEQ ID NO: 438113 - DNA, 666 bp, Homo Sapiens
  misc_feature (15)..(15): n is a, c, g, or t
  misc_feature (23)..(23): n is a, c, g, or t
  misc_feature (35)..(35): n is a, c, g, or t
ttttcaaatattttngcagagcntaaatttttaanaataatatacacatcatcatgcttttaaatgtaattcattttacctttttcttgcctgttactgtccattctttgagtacttcactggcactaccttccatgaatgcttgtactgttttgtccacacagttatcaaagtgctgcaaaaccaggataatttcattgttgctcttattaggaactattgcacgtaccgcatttatcttctctttcatgttctcaaaagctcctccctgggccagtacggtattggactgcaaatcaaaaatgaatcctgatgaatccttctggttctgtttcctggacattgtcgtttcttcgatctcaaaaaatatacaagaaaagtatccttttgccttgtctgggttttgagtgtaggtatctctgatttaaaagtgggcaacggaagtgtgcagttggaagcaaaaaatacgaaatcctgctgttcgaaattctgctcactagctgttaatctcctttccttttcttgtatcaacttcttgtcaggaagtatcattgcagacattcatgtctccttttccagggagattatatgaggtaaccagggtagtcacattcatagagacagaaagtagaatattggtagccagcagctagcccaggccccccc

SEQ ID NO: 438114 - DNA, 468 bp, Homo Sapiens
agacactgtgcagcgctggaggtcttttacagatttttcaatattggaacttagctttttactggtggcgaggggaacatcttccatccccatatttgaaaactgagtttctgtggtaggtcttgaagagagatttggcagcaattcctgggttgttgagaattgtgaaatagagtgccatagtccaaagacttggtcctcaaaatcagagacaccattctgcagcatggatcctgttctatccagcgtatctagcatggcagactcgggatcctccaattctctggcatctattgaaagtgtctccaaaccttcactgagtgagtccacagactcagtgtcattgatggcaccattgacatggtagccattcataccacctttctctgaggaaggcgcagactgttcctcttgaatggaaactgatttactggaatctgggatgccgttacttggttctgcggcagg

SEQ ID NO: 438115 - DNA, 339 bp, Homo Sapiens
tggtttatcaacaacagaaatttatttctcacaattctggaggctgggaagtccaagatcaaggtgcttacagatttgttttctggtgaggacccacttcctggttcgtggatgtttgtcttctccctttcacatggcagaaggggtgatggagctctctgggtctctttatataagggcactaatcccattcatgagcgctgttactctcctgacctatcacttaccaaaagccccacctccaaataccatcacattggaaatgaggatttcaacattaggaattctgggggcacacaaaccattcagtctactgcagacattaaatagggatctagg

SEQ ID NO: 438116 - DNA, 2794 bp, Homo Sapiens
  misc_feature (1948)..(1999): n is a, c, g, or t
ttttttttcactttaatttctttattcatcaatagtatccgaaaaggaagaatcaggagttacaaaaacaagttaaatgcaatatagaagcctactaaatacaaatacaagttcacaaacacatatgcaacagaaacttgtttagattgtttcttgaagtttgactatttaaaaacataggtgtaaaggaaagacattcagactggtccacgtgggcttgttagcaggcagaggaaccctgctttccaaaaactgatatagtccagagtcacggcatgtgggaaggtttccatggacactggatcttaacagatgctatagtgtttacaaaactacacacacagagaaagcccaaggaagcctgcaggctaagccctatgcttttagagggctgaaggaaccaaacctagtttaatcctgtttgtttgctccatgcaaaactttatggaagactccccagactaggctatttagcagcttccatgaatggtcctcagatcatgtgattctacggcatagacgacagctgccctatttacacagaagctgcagaactcaagaggaatgtggatttgctcttgggagttcaatgttgcagggtagagtagtcttggatgataaccatgttctaaatgactagtgaagagacactgtggtttcttgcttttaacaaattggtgtactcttgccctcctcccatagtgtccaagggctggtaaaacctttgattaaggcgtgctgctgtgagttctccaaggcacttggacagggagctgcatttcagactgaacaagtggagtttgaagagtttttagatgggatggatacataaaagcttgaaatgctaaacaaagtggaattttctcctttcaaatgagaacaagaaaaactagaaggaattctatttttggcacaacagtttctcacagttgcctgtgcattacaacctaaataatttccttctgatggtctttaatctgctttctgcaaatgagatcttatgtcaaggatttaatctttggtattccaaatgcatctgaaacagggtagtgagtggggttaataatcacagaagtcgaaagacacaggactaactgtaaatgactgacctccccaagtcacagttttaggattaaatctccattttcttccccctgttgaatctgaaactttcttttatcctcatctctaagggaatgctttctatttccagccggaggttaaacatgaaatgcaaatatgaagacagagtggggtggttctctttcccactctcttcctgctttacccatgaggactccatatcatagcacgacctgtagggtcatcaggctgagatcaaatctggtcatcttgtttttggccatctgacatttcttgttctagtaacaagatttcatttattctatagagaagaaggaaaaatcacaggaacctatctcccctctggaccaatgatcagaaccacagaatttataacttatcaaatcaaaaggttagtgcattcttaccagctcactgaggaaactgaggtccagaaaaaagaagagacagggccaactcaccctcctagttagtcgaatgagcatattgggtaggctgggatatcctaagccctgcttggctgcccttgtcgccatccttgggaatactgatttgcctcaacttctcagaataaataaaaacaaattaatgtttggatcttgaaagttttttatgaagatgcttcttcccctggcttcggtctaaggcacccttgctcctctggcagatagtggactgctggaagctaggggggccaactatgggctgcatctagtatgtggcagggtgggggcatctgggttatttcaggcccctgcaccaggaagaacccccaaactctttccacctatgaagtggtgggactactgaaaaataattacaaaagcttaatacctagtcaagnnnnnnnnnnnnnnnnnnnnnnnnnnnnnnnnnnnnnnnnnnnnnnnnnnnntcaacttgccaaaaaaaagtgttttacagagaaatagcacctttggtaaaaagtatttttaaaatttggttaggtcgctaaggggctcaaagtatacaagtatctgcatcatttgggtgtaccctcccagaaactccatccaagtctgagggacactgggttaactagcagtatggctatgtatctagaggcagttattgggaccaagagatgcgtggatgctggaggtctgtcatgctgacggcaatggaaagaggctggaagcagagaacgttcctctccgtggagcttcccaaacctctcctccggggacaccctgctaagttctctctggcatcgtgtgcactccctgcagcctgctgacagatgcagtaaactcaaaagaggttcagatttgggtctgttcctctttcaatcgtgatgcagtttccttactagcctccagccccagagcaccatttacagtttctcttaaagcactcctagaaatgaaggctgtggcccttcccttcctagccagccaccttcatatcctttattgcaaaacaaataaacaaaataaaactcattgctatataagcaaatactggtgatttggcgactgtagcagacacttgtgtatactgaactcagcgctgaagtggagaagatgctgggatccagacactggtctgtgcctcctcattagatctctttggtgctcactctcttggtcttttcagctgtttcctgatgcttttggagctcctggacatatctggtcatctcctcctctgtctgggtctgggccccccc

SEQ ID NO: 438117 - DNA, 263 bp, Homo Sapiens
cagaaggaaattatttaggttgtaatgcacaggcaactgtgagaaactgttgtgccaaaaatagaattccttctagtttttcttgttctcatttgaaaggagaaaattccactttgtttagcatttcaagcttttatgtatccatcccatctaaaaactcttcaaactccacttgttcagtcttaaacaaacatgaagcccagacatatacataaatatgctcagggcaaaatgaatttgacagagattatgttatattatta

SEQ ID NO: 438118 - DNA, 1874 bp, Homo Sapiens
  misc_feature (26)..(26): n is a, c, g, or t
  misc_feature (426)..(456): n is a, c, g, or t
aggcagtcaaatctacgtcgtgaacngaggcctctgtgctgatgggcctctgctgctggtttccttgtgctccttgccgggttgaagtctccaacctcccctctcctccgtgaatggcacccactttagactgggtcgagtgtcccctctgggcctcagctttctccgaatccacatatcccagaggcttggggcagctgacaacaggtggctcgccattcatccatgagcccaaagatccctccaagccaggaggcagtttgtcatccaaagtcatgggactggcttcttttcatgtcaagtccttccacccccaaagatggattgagtctcaatctggttcaggtgggttctccacaccttcttcctgtggcctatctgcctaatgctagatgaacaccacacagttataaatactcaggtcannnnnnnnnnnnnnnnnnnnnnnnnnnnnnnctggtcactgttttacactttaacaaagaaaaccactagcctgcttgttctattgtttgtgccaccccgactcccatctgcctgtggtgtagctggcaggaaatgtgagccactgagtcccatggggtgcccaccctacgtggccccatcgcactggccgacagtcagtttcaaagccccctgctcatgtaggctcttgagggccttaaactccaagggcatggtatgcgggctggcctgggaggtgtagccatacttgaggctgtcataatagtggtacttgactgggttctggttctgatccagcggaaagggccagaagccgtagaggtagatttgtttgcagaaacgtgtggccagggtatacatcaagaggccggtggtgggtcttttgatgtggactttgttgttcagccagtatccgcgaacggcgtgcagcaggcgcagcgaggggtatgcagtgcgcacgttgacgtggtgcttcaggataagctcgttgacccactcaacacgctccttgccgccccgggccatgaaggcagggatccacaggatgctgccattgaggctgtgcagccgttgcagcagcttctcccgccacgtggcattgaccaagtcctcaaaggcccgctggatgaccgaggggttcatggttaccaggtctgtcttgagccccacatcccgggcatactcctgtactggggccaggttgcacctgatgacgaagctgtgggcgtcaatctcctgcccacagccgctgttcagcaagacccccgagttgcccacgatggcacaagtcccaaagtgcttattcttcagtggcgaagtcctggggaggagctcgtagaggttctgggacacattcatggtgctgtctcgatcgaagatgtaatgaataatatctccaggcttcagggttccctttaggacagaaatgtccttttcagcatccaagaactttaaaatctgcttcctgatcctcagagagagcgtctggttatgtctccatttggacgaggctggctggatgttgtgcttgatgctttcattacttctgtcaacaacagctggtgatgaggagccgtttattacaacttcagctctattagatttgctatgtaagctgttcacagctgatctgattgtacctctgcctcccgaattcccgatttcttcttcgatctctgagatgtctgcgaagatgaggaagaccacgagcagcgtgagcgcggccagcatccagctccggaactgcagctgcatggtgggttcgcgcccgccgggacccacgcgggccggcgcgaggagcaggggccggagggcgcagcggcggacgccggagcctccgcgcgccgcgcgcagctgggcagacaccctgcgctccggacgagtccgggccggcggcggcagcggcagcg

SEQ ID NO: 438119 - DNA, 425 bp, Homo Sapiens
tgtccttttcagcatccaagaactttaaaatctgcttcctgatcctcagagagagcgtctggttatgtctccatttggacgaggctggttggatgttgtgcttgatgctttcattacttctgtcaacaacagctggtgatgaggagccgtttattacaacttcagctccgatttcttcttcgatctctgagatgtctgcgaagatgaggaagaccacgagcagcgtgagcgcggccagcatccagctccggaactgcagctgcatggtgggttcgcgcccgccgggacccacgcgggccggcgcgaggagcaggggccggagggcgcagcggcggacgccggagcctccgcgcgccgcgcgcagctgggcagacaccctgcgctccggacgagtccgggccggcggcggcagcggcagcggcggc

SEQ ID NO: 438120 - DNA, 1839 bp, Homo Sapiens
  misc_feature (711)..(711): n is a, c, g, or t
  misc_feature (714)..(714): n is a, c, g, or t
  misc_feature (717)..(735): n is a, c, g, or t
  misc_feature (758)..(758): n is a, c, g, or t
  misc_feature (1350)..(1359): n is a, c, g, or t
  misc_feature (1529)..(1538): n is a, c, g, or t
gtatgtcttatgtgttcatttttttatcattgaatttattttattttaaagttatctatgtacaccaagtaaatacacacagggggttgcgcagtttggtttgtcttccacgctggcatgcaacattttggcagatgtgagtgggcaggccaggtgccccttgcagtgaccctggctctgaaagggatgcggtgaaggtggggagcaggaggaggaggaggatgtagtgtgaagcttctggtgaagggtttgcgtgtgtgttgtttcttttttatgtaagtgaattatatttcccttacatcttgctaaagagaaggctgctccctctgtgtcatctctctcctcatctgcgctacaccctcacatttccttatgtgtttttaaaagaaccatgtggtggcaacattacataaaaccccctggattcttaagtgccctgctgacagcaaatattagcctaagtccacaggcccacaggaaccttctttccaccctagtgggtctggagacagcatggcttgtctaccccaccgttgccctcttttccatgagttgcagctttagtgcagaggagccagattggacccccttcctcagaacaatggttttcaaactactccacagaatcctcagggtctcttaggactgttcaagggctcatttgctgaggagcccttgaacagtcagtcctaagagacgctgagacttctnccnccnnnnnnnnnnnnnnnnnnntgcaaactgcccagctctgcatnactttatcttttatattggggttctatgtaagatttgtttttgtaaaacatttatatatcactgctttggatttattccacactccactggtatttttccccctgcagttctccctaactgctaaaaggagctcagcaggtaaagggagcagggcctcttttccttgaaggagtcatgggccagtgcagcctgcgcttaccagctggcattcccactcagcttcctttcctgacttagaagttgggtgataggctgccctgccgctggagaatcttggtcttcctcctagaaaagactggatatcaggacaccagactttctctcctggtttggaatggctagtgacctccatccctgcagttacctagaaaaccaccttagcaccatgtggaaggaaaggaccgtctgaaactaaaacaacagtcctcttcagtatggagggtgtctgcatatgggctgagaatggctgggagaagacccctcagggtcaagccttagagcttcccacctcttgaaaatccaccctgcccctttctttaaagtgcacttaataccagatggggacattagagaaggaactctttgtggagnnnnnnnnnntgtacattggggaaaagtcaggctccagcttgaaaggaaggcaactagagagattttgccaatgagctggaagcccccaaaccaaggggtggagatgggaggagcatgccgcccagtatggaacaagaaagaaatccagctcatcacttcaacttgagggcactgtgacnnnnnnnnnnggctcagaaatttcccagcctattcacccccaaacccaaggaatcaatcattttgactacacctgcctgtaaccatctccatggacagatgagcagccattgacaggctgctgggagcagtctgcctcctccatttttcaaaatattttaaatcaactctgggttctggtcatgagctctggggcagggaatatcaaaaggagcttgaagaaaaagggaaatggtcccttgagcaacccatttctcagtccaggggagaacaggaagagggaggcaaaagctatccggagaattccggacc

SEQ ID NO: 438121 - DNA, 303 bp, Homo Sapiens
  misc_feature (53)..(53): n is a, c, g, or t
  misc_feature (219)..(219): n is a, c, g, or t
  misc_feature (263)..(263): n is a, c, g, or t
agagttatcattgaatttattttattttaaagttatctatgtacaccaagtanatacacacagggggcaccatgtgaaggcagaggtagagattagggtgatgcgtctagaagccaaggaatgccaggcacctacctgggaatgaggagagaggcatagaactgattctccttcagatccttcagaaggcacccactataaataatacaggtagttttncctgtattatgccataatagtgcttaaatagtgcttaactaggnctttcaaatgccaattcaatgcactaatttgtcaatgttt

SEQ ID NO: 438122 - DNA, 610 bp, Homo Sapiens
ttttttttagcgtttttatcaggtttattttacttgttatacacagacgatacaaacgagcaaaaaacaaaacgtttctcaatggagtgtgttcttgtataaattattcagttcacagacaaaacgaaacaaatataaaaatcacaacattagatttacagaagagccaaaatatacacacgtttagaccctgaattcctattaggaaaaatccccccatgggactgggaatctaggattgaatattgtgtatgatgcatatttcacattaatttttaaatacaaaaaagtataggtttgctacacaacattaggaaatcctactaatctatttccggggggattaatgctccttatcaaatataacaggacttagggggaaaatcagtcttacttgcattaatgctagtgttctcccaaggaagtcaaatttcagctgtttctaggtggtggggaagtcattttcaaaactaaaatgcagtaaaatatacaactcacacaattcatcttcactagactacactatagttaccaacaattcagtcatctatatcattaatagagtattcattacaaagatttacagcatataaaggtgaagggggtactg

SEQ ID NO: 438123 - DNA, 526 bp, Homo Sapiens
  misc_feature (152)..(418): n is a, c, g, or t
  misc_feature (441)..(441): n is a, c, g, or t
  misc_feature (447)..(447): n is a, c, g, or t
  misc_feature (482)..(482): n is a, c, g, or t
  misc_feature (493)..(493): n is a, c, g, or t
ttttttttactcatttatgaaacatttattgaattagacattctactaaccatttatttttacaaacagttaactaaacatcactggttttctttgataaatggtaatcttgcaaaggctcatttatagatacatcattatttcatgctgtnnnnnnnnnnnnnnnnnnnnnnnnnnnnnnnnnnnnnnnnnnnnnnnnnnnnnnnnnnnnnnnnnnnnnnnnnnnnnnnnnnnnnnnnnnnnnnnnnnnnnnnnnnnnnnnnnnnnnnnnnnnnnnnnnnnnnnnnnnnnnnnnnnnnnnnnnnnnnnnnnnnnnnnnnnnnnnnnnnnnnnnnnnnnnnnnnnnnnnnnnnnnnnnnnnnnnnnnnnnnnnnnnnnnnnnnnnnnnnnnnnnnnnnnnnnnnnnnnnnnnnnnnnnttaccaacaaggttggggccccnttcaancggggaaggccccttttgccttaaggttaggggtngggggcgaccngctttcccacatggcacttttgcaaacggctta

SEQ ID NO: 438124 - DNA, 903 bp, Homo Sapiens
  misc_feature (46)..(46): n is a, c, g, or t
accagtcttttccactcggagacacatcatgggcccatgccttaancccacggtgttcagtgccagacatctaatagaggaaagctgtttctctttccccttctccttcctacctatttaaacctctgctccctaaactccctcgtgtgtctgtgtccctaaattccccctataacaatgaaccccagggtatgtactcccagacaatgtacccacttcaaaagggctgaaagttcttttaaaaatagaggaaaggggggaaaaagtgtacttagcacctagttttgcaccacagaaggaaactggcactcacagatcctgctgaagttactggaaagggatcctggttaagactccaagagagggttcttggatctcctgcagaagaattcaggggagtccataaagtgaaagcaggttaataaagaaaggatggctactccataggcaaggacagagcatgagctgctggttggctattttttaatgattatttcttgatcatatgctaaacaaggggtggattattcatgaattttcaaggaaattctcagaactgagggttcctcccctttttagaccatatagggtaacttcctgatgttgttatggcatttgtaaactgtcatggtgctggtgggagtgtctcttagcatgtcaatgcattataactagcgtataatgagcagtgaggatgaccggaggtcactttcattcccgtcttggttttggtgggttttggctggcttctttaccacagactgttttatcagcaaggtctttgtgaccttatcttgagccaatctcctatctcatcctgtgactaagaatgcctaacttcctgggaatgcagcccagtgggtctcagcttcataacccagtccctactcaagatgagtcgcc

SEQ ID NO: 438125 - DNA, 648 bp, Homo Sapiens
  misc_feature (590)..(590): n is a, c, g, or t
ccgctacggacgcctgggttctgttctaggaatagtgcatgttttagaggctttgccagttgggatacattgttgacttgggggaggatgaaggagagaactgatgacctagacatagaaaagagtagttaactaactagatgttcttctgatctcttccatggtagacattctgagcacattggcccagttagttggtatggtgaaggggcaccgtactaacagatttggagactgaaacctaatcccatcaccaacacttagcaggtatatgatcatgggcaattcattcaattgcctgccaattatagactatatagggggaagagcactggatttggagtcaagaaacctggacacttggctccacacttccttagctgggtaactttggtcaaaccgcttggtctctcaagcctaaggttcttcagctataaaatgggaataatacttcactaactacctcacagagttgtggtaagaatataatcagataactggataaaaacactatataaactggaaagcgccgtacaaatgtgagagatcagttttattatcaaatcactgttttccactgcctcttgaancggctttattctaaccaaccattacatctttctcatcttttggagtatgggtaattga

SEQ ID NO: 438126 - DNA, 650 bp, Homo Sapiens
aaaagtgtaggatttttcccttaaaattccccaccggaagggtgttttccctcgcggttggggtcggccaacgaagaaataaccccatcgccatctggcgcggaaaatgggcctgttccgccaaggttggtaacatggtgtaggctgcctggggctccattctttaccaaaataccgtggggggggcatattccgcaattcatccccaggcgtggggattagagcctccatgcgcagaacgaggggaggagagggcccctccagtgcagaagtttatctgctatgggttcccgttgggggcaaattcctctagatgacgttgataaacaatcgtcatcctctggcgtgacctggatgccaacctccacgggattggatgcttttttcatctcgatcggtgaaggggaaggtggcttatccacagctttttctaagcagaggctgccattgcattgtttccgtttgtgctcgataaaaataagaatgtcccccaatgggaagttcatctggcactgcccacaggtgaggaggtcatgatccccttctggagctcccaacgggccgtggtctggttcatcatctgtaagaatggcttcaagaggctcggctggccgggctgtaacttcacaccgccgcgcgccgcgtctccc

SEQ ID NO: 438127 - DNA, 1296 bp, Homo Sapiens
  misc_feature (152)..(192): n is a, c, g, or t
  misc_feature (1110)..(1130): n is a, c, g, or t
  misc_feature (1178)..(1178): n is a, c, g, or t
  misc_feature (1253)..(1253): n is a, c, g, or t
gccatgacggctctcccacaattcatcttccctgcgccatctttgtattatttctaatttattttggatgtcaaaaggcactgatgaagatattttctctggagtctccttctttctaacccggctctcccgatgtgaaccgagccgtcgtnnnnnnnnnnnnnnnnnnnnnnnnnnnnnnnnnnnnnnnnnagcccaccatgtctcgccgcaagcaaggcaaaccccagcacttaagcaaacgggaattctcgcccgagcctcttgaagccattcttacagatgatgaaccagaccacggcccgttgggagctccagaaggggatcatgacctcctcacctgtgggcagtgccagatgaacttcccattgggggacattcttatttttatcgagcacaaacggaaacaatgcaatggcagcctctgcttagaaaaagctgtggataagccaccttccccttcaccaatcgagatgaaaaaagcatccaatcccgtggaggttggcatccaggtcacgccagaggatgacgattgtttatcaacgtcatctagaggaatttgccccaaacaggaacacatagcagataaacttctgcactggaggggcctctcctcccctcgttctgcacatggagctctaatccccacgcctgggatgagtgcagaatatgccccgcagggtatttgtaaagatgagcccagcagctacacatgtacaacttgcaaacagccattcaccagtgcatggtttctcttgcaacacgcacagaacactcatggattaagaatctacttagaaagcgaacacggaagtcccctgaccccgcgggttcttcacacacccccattcggcgtagtacccagagagctcaagatgtgtggcagttttcggatggaagctcgagagcccttaagttctgagaaaattttgagcccccaggggtgggggtggacgcgtgccgcccagtcgacgtcagcgtggtctgtcatcctgctagtttgtgatgttttctgacagtagcctccaagaagccgttgtgcgaagacagagtcctgcagagtccttccagcctaggcctgcagcgccattttatttatattttttaatnnnnnnnnnnnnnnnnnnnnnagacccacattggaacagtgaatcagtcccatagagagggcccgtggnccatcgctgtcatgagtgatgccctggcccttctgaaaccagccaacctaattacctgtattgtggaaatgcgcntgagtccccaaccccttgtttctatacattctatgttgtcttt

SEQ ID NO: 438128 - DNA, 641 bp, Homo Sapiens
  misc_feature (12)..(12): n is a, c, g, or t
ggcagaatatgncccgcagtattttgtaaagatgagcccagcagctacacatgtacaacttgcaaacagccattcaccagtgcatggtttctcttgcaacacgcacagaacactcatggattaagaatctacttagaaagcgaacacggaagtcccctgaccccgcgggttggtatcccttcaggactaggtgcagaatgtccttcccagccacctctccatgggattcatattgcagacaataacccctttaacctgctgagaataccaggatcagtatcgagagaggcttccggcctgggcagaagggcgctttccacccactccccccctgtttagtccaccaccgagagatcatttggacccccaccgcatagagcgcctgggggcggaagagatggccctggccacccatcacccgagtgcctttgacagggtgctgcggttgaatccaatggctatggagcctcccgccatggatttctctaggagacttagagagctggcagggaacacgtctagcccaccgctgtccccaggccggcccagccctatgcaaaggttactgcaaccattccagccaggtagcaagccgcccttcctggcgacgccccccctccctcctctgcaaggaacccacg

SEQ ID NO: 438129 - DNA, 1289 bp, Homo Sapiens
  misc_feature (288)..(288): n is a, c, g, or t
  misc_feature (551)..(841): n is a, c, g, or t
  misc_feature (1125)..(1125): n is a, c, g, or t
  misc_feature (1181)..(1181): n is a, c, g, or t
  misc_feature (1260)..(1260): n is a, c, g, or t
ggccaaccacccgtttgatagaaacagggggggaccgtctaattactggcccgtggggcgccagaatgaggtaactgcccccccgacattcgtccgcccgaagaatgcgttgggggggcagacagctctgtggccgcacacccaagagggcgtctcgccccacgctgccggccgtcgcataatctggggggtaccactcccagggcgcccaccgctgtctcaccactgggggccgttttttcacacacgccaaaggcacgcggggaaggagggtatcagttctcccanccccttgttccccccccggacccgtggaatttttgcgaggcggcacccccggtggtggctaaccccgggaactccaagtctctaggcaccccaatccttttccccatgtccccattgctttttgcggccttgagccaacccaactgtcatccttgtgtccaggggactccaatcaagccctggttgcccccccacatctccggccccaggtgggctcacgcaggtctccttaaggaaaaaaaccggggtggggtgtgagcctnnnnnnnnnnnnnnnnnnnnnnnnnnnnnnnnnnnnnnnnnnnnnnnnnnnnnnnnnnnnnnnnnnnnnnnnnnnnnnnnnnnnnnnnnnnnnnnnnnnnnnnnnnnnnnnnnnnnnnnnnnnnnnnnnnnnnnnnnnnnnnnnnnnnnnnnnnnnnnnnnnnnnnnnnnnnnnnnnnnnnnnnnnnnnnnnnnnnnnnnnnnnnnnnnnnnnnnnnnnnnnnnnnnnnnnnnnnnnnnnnnnnnnnnnnnnnnnnnnnnnnnnnnnnnnnnnnnnnnnnnnnnnnnnnnngaataaagccaaggtccctaccatggcctaaaagccctccagggccaggtcccacccctctcactccctcagctccagccagtctctgtcttactcttcactcagcccagagcactctccccacctgcatctgatcccgctggttcacttcctcaaacgataccctctcaaggagacctaccctacttgctgcaacatgcccgccaccacccagaatcccctgctccctgcaagttcccaaactcttgtcaccttttaacgtccttccttaagcttatcctgtntccctcactagagtgcaggctcctccagcaggacacagcccctaaccactgctttnctaactgctgcagggtgcctagcacacagcaggcacttttttcaggtgtgccagggtccagctacagctggtatggttncccagaggcagctgggggtgtgggggatt

SEQ ID NO: 438130 - DNA, 744 bp, Homo Sapiens
ttttgtcctgccagggaaaccaaactcaaagtttcccgtccctgtcccctcagtaagcagatgaagaggtaagggttgaccgttaagaaagccaagtttttgtggagcaaataaggtaaaattatgaaggaaagcctatagaattcccaggagagtttaaagaaaacaagtagaatactttcttagcaagggtatgggtgggcttctgagtggaggaagcaggctagaccttgggatgttccagtccaaattctgtttcggaagctccctaaatgtatgcagaggttgtgtaattgtattcatcactgttgaatgtattattggtttgatttggtttcactgctcctaagttccttttgtcttatcttgcaagcatatcactgtgagtacttaaatcattaacaactcattaaaactcttgaccattttcattttctaccaagctgaagcctgggtgtggtggaaacttgtgcaggcctgcttggctgtgccgcaactgagcagctcctagcagtttggctgtcaaaaggtcactgaataaacaaattgataggaatggcggacataatctctgcagttccttgaaaagaaggaaggggctgcaggatacaggatagtgaaggatccttctcttcaacctgaaggactcttcagcaattaacaccttgactctctttttatgccacacttttttttgtgctctcagagactctatttgtacctgggcgcttcttctttcaggag

SEQ ID NO: 438131 - DNA, 1065 bp, Homo Sapiens
  misc_feature (233)..(233): n is a, c, g, or t
tcttgtagaatttccaaaagaatgtacccacaatttcctttaaaaagttttactatcttgaggaaatagtggagggtccaagtactgaccacccagttttccaagtactttcaggtgttgcctttctagggttcacaggagcggtccaaaagggaattgctattgtgtgaaattgtggggatcactcatcaggggacattctggtagagtaagataaaacctcaatgcttcancatcaggtaaggagctagtcagtttaggaataagattcttttccaaactagctgccacctgctgagatatctgcggatgatcaggttgtataagtttgtggaataaaagcctagcagcattcatatcaacccctgaaaatctggtacctgttctatagtgatcatcattgctaacagctaaaaaacttccatttaggcaaccagaggaagaaaacgttccatctatctcattggctatctccacaggaaaccttccagaaggatagctcagccatttctgaattagagcttcattcactgtccagatctgctttgtcggattgggacatctgaagtcatctggtggcccacagttctggggactagagtaatgtgaaaagctttgatctccccctgagaaaattctttttacacagaaatattcttcagaatcaatatctggtagacactgcccattataggggtaccaatttccttttacagtaaaggggcttttcctgttgcttgttgaaccggttcccagctgcccattaccaccaagcccaaaagagtaaattcgtcctgatgaaggaacaaaagcagaagtgtgctgccgtccacaagcaatctcagtgacaatgcttcccataagttcaaaaactttccttgggtttatttcatgactggtagaattatggcccaactgaccataccctccagctccaaaagtaaacactccaccttccttggttagagcagcagtatgatcttctccacaacaaatataaactattttctgagatcttagtgactttagtaaattaggacctcgtgccgaattcgccacccaggc

SEQ ID NO: 438132 - DNA, 351 bp, Homo Sapiens
  misc_feature (194)..(244): n is a, c, g, or t
tcacacctggcacaaagacgtttttgctttattctcgcaaaagtgaacaagttgaagacttttgtattttttgactttgctagtttgtggcagagtggagaggacgggtggatatttcaaatttttttagtatagcgtaccgcaagggtttgacacggctgccagcgactctaggcttccagtctgtgtttggnnnnnnnnnnnnnnnnnnnnnnnnnnnnnnnnnnnnnnnnnnnnnnnnnnngttgttgtgctaaactcaataatgctgttctaactacagtgctcaataaaatgattaatgacaggatggggttcccctgtgcttttaccagtagcatgaccccttct

SEQ ID NO: 438133 - DNA, 250 bp, Homo Sapiens
ttttttgtttctttaatcacctgcccctactcctaacctctaataaacagtgcttggtattcactgtgttcagtaaataaaggacaatagtaaaggctgcagaataacaataagaactcctaacacccaattcacacaaggaagcagagttttcaaacccaaaaggcctcggcaatcaacactaaggagctgctgctgtcttgtaactcacaaagtactgcttaaaacaaaaaagttttttttccccgct

SEQ ID NO: 438134 - DNA, 1362 bp, Homo Sapiens
  misc_feature (59)..(59): n is a, c, g, or t
  misc_feature (70)..(70): n is a, c, g, or t
cttttgaaaacatccagcgagtcccacagtggcagaaaaaccattcaaatgtgcaagantgtgggaacgnattttacacaaattcacaatgctattccccaccagagatcccatagtggagaaaaaccatacaaatgtgtggagtgtgggaagggctacaaaaggaggttggatcttgactttcaccagcgcgtccatacaggagagaaactgtataattgtaaggaatgtgggaagagctttagtcgggccccatgtcttttgaaacatgagagactccacagtggagaaaaaccattccaatgtgaagagtgtgggaagagatttactcaaaattcacatcttcattcccatcagagagttcacactggagaaaagccatacaaatgtgagaagtgtggaaagggctacaatagtaagtttaatcttgatatgcaccagaaggtccacacaggagagagaccatacaattgtaaggaatgtgggaagagttttggctgggcctcgtgtcttttgaaacatcagagactgcacagtggggaaaaacctttcaaatgtgaagagtgtgggaaaagatttactcagaattcacagcttcattctcatcaaagagtgcacactggagaaaagccatacaaatgtgatgagtgtgggaagggcttcagctggtcctcaactcgtctgacccatcagagacgccacagcagagaaacacctctcaaatgtgagcagcatgggaagaacattgtacagaattcattctctgaagtgcaagaaaaagttcacagtgtagaaaagccatacaaatgtgaggactgtgggaagggctacaacaggcgcttgaatcttgatatgcatcagagggtccacatgggagagaaaacatggaagtgtagggagtgtgatatgtgctttagtcaggcctcaagccttcgacttcatcagaatgttcatgttggagaaaaaccttagtgatgtgatggtgcaataaagtcttcactcagtcttcatgaatgcagtctcatcattagattagcaaaacttaactcctcgaagactgtgtcttctcgcttgttccctttccaataacactcctgttatcattggaggcgtttagacttcagaaattcctgtctattcagtattttctgtcctggaccagggagagagaaggacgactctcaggataacagttcacattccccactaggcaggcgctcgtggctttgggattcgttcccagtgggcacctcggagtggcaacgcttccccctgaagaatgagattttgagcgtttttccttcagcattcggaggagtgtaatccaaatgctctgtggagtcgtacacactggctccagga

SEQ ID NO: 438135 - DNA, 2456 bp, Homo Sapiens
  misc_feature (317)..(317): n is a, c, g, or t
  misc_feature (326)..(326): n is a, c, g, or t
  misc_feature (1767)..(1777): n is a, c, g, or t
ggcctgggtggcgaattcggcacgaggattacttgtattccctctgcagtgagccgctgattgaactctgtagctctggagctagtggttccctattctatgtgtccagcgacgatgagttcattattaagacagtccaacataaagaggcggaatttctgcagaagctgcttccaggatactacatgaacctcaaccagaaccctcggactttgctgcctaaattctatggactgtactgtgtgcaggcaggtggcaagaacattcggattgtggtgatgaacaatcttttaccaagatctgtaaaaatgcatatncaaatatgnacctcaaaggctcaacctacaaacggcgggcttcccagaaagagcgagagaagcctcttcccacatttaaagacctagacttcttacaagacatccctgatggtctttttttggatgctgacatgtacaacgctctctgtaagaccctgcagcgtgactgtttggtgctgcagagcttcaagataatggattatagcctcttgatgtcaatccataatatagatcatgcacaacgagagcccttaagcagtgaaacacagtactcagttgatactcgaagaccggccccccaaaaggctctgtattccacagccatggaatccatccagggagaggctcgacggggtggtaccatggagactgatgaccatatgggtggcatccctgcccggaatagtaaaggggaaaggcttctgctttatattggcatcattgacattctacagtcttacaggtttgttaagaagttggagcactcttggaaagccctggtacatgacggagacactgtctcagtgcatcgcccaggcttctacgctgaacggttccagcgcttcatgtgcaacacagtatttaagaagattcccttgaagccttctccttccaaaaagtttcggtctggctcatctttctctcggcgagcaggctccagtggcaactcctgcattacttaccagccatcggtctctggggaacacaaggcacaagtgacaacaaaggcagaagtggagccaggcgttcaccttggtcgtcctgatgttttacctcagactccacctttggaggaaatcagtgagggctcgcctattcctgaccccagtttctcacctctagttggagagactttgcaaatgctaactacaagtacaaccttggaaaagcttgaagttgcagagtcagagttcacccattaagcgcaaagcctcagaagacctggaacaagattctgccatctctgtgatcccaagatgtcagcccttgccccagcaatgctgaattttcttctacttggtcatcaaaaaaggagtgtaatagaagtgaggggagctgctcctccatcttcttcctgaagaagaaccttctctccttcctcttcctcatgaatgggccttagtgcctcagagagttgaggaccgcagcatcccctccactccagagttgggtggtacggattttcaactggccaaccctttgcctccactattgaatttttttcagacccccattcttcatgctggaaatgggattgctggacttggcagctttctttcccctcgtctttgactaggaaccggactcttaatttcctcaggacagactagctggcacattatccctaccttagttctttctctctgactcctggaagaatactcctgtaatctctgtaaaggtttttgggggataagggtgtttaaccacctcccagctttcttcttcnnnnnnnnnnnctgaaaaaaggaaaaagcacacagcacacaatttcaagccattttcagatcagaactccagaagtgttgacaagatgcctattcgtagagttccctcagaagagccatggtgtttatgaagagaagagtagtgattgctctgccagaagcagctcctctttaaactcctcctctcttgatgaatttcttaaggctgaaggaatgaagagagtgggacagtggggtaatctttatcccttttgttaaaacaggaggcagccattgggctgggagatcatagcccttcctaggcagaatcctgttcacggccaggctatagtaattattactatttgcaattgaaatatattctggtggttttctaaatgtgaagacttaccaaatgaattttagatcattctccagaggagattttttggctcttctcatcttttccaacagggttctcctgtttgtggagctaggtacagaggggcccttctgtctgttaacagaccgtccatatctgtgagggccgcaaatatttcttaactcctggggagacgccggatctgcctgggggggctgtggcccattgctacccccgttctgccggagatggaagggggaattggccccccccgctaaaaggggggtccctgcctcccctgggggaaggcggtccgggggggcggtccct

SEQ ID NO: 438136 - DNA, 386 bp, Homo Sapiens
aggttgtatttttatttatcactttacactggtagtctctggtaggtgtactccatagaaaccaaagaattttgtacactatttctttgtacaataaaagataaagtgtgcattaggtacgcttgtacatgacaatactgtacaatatttacatttctgatatcaccatgaaattctgtattttctatatacaacattgaaaattcttcagaaacatttggactatttcttataatcacaatttagtattatagaaaaagagtttctcagtaatctcttgaccattgatcactctcatcacacagagactttgattggcttttccagcattcattatccttcctgatcaaaaaaattttgtatcactgtttcttttagcaccctgt

SEQ ID NO: 438137 - DNA, 605 bp, Homo Sapiens
taaaatgttagcttcaattagttagcccattggtacttactgtagctacacatattaaaaggcaaagtgtttctgaaggcaatttctttttaatatgcccgaatgaatgaggcttcatcctttccatattcttactctttacaggagttcaaatgcaaataagctccacctccctgcacttgtagtctaaaaagtaaaaggggcgatcaggtccatctcaaaggtcacacgtaatagcctccctgggctgatcattccctctccttgtaattgcagtatcctgagtagcagtttaattttcatcaaacatcggagtagtttagttgtttgacaggaggagaataaggctgaaagcctcaagtgaaggatcttgcagcttgtaaaagcaatttccaaaaatgaaacccattcatcgtaaacaaaaggacaaacacttgtagcagtttataatgcttttggtttaatctcaattagtctttctcccctggactagaaatccagtatagtttgccattaatttattgaatctggttttggacaatgcttctgtagtgtagctgcacgtcctggtactgtatcctctgactttattttccatgtattac

SEQ ID NO: 438138 - DNA, 342 bp, Homo Sapiens
atgaacaatggtgggctcatgacttccaaaggttggaaaattacttcttaaagttgctataatagtaagacagtagcagcaacagcatgagaccttagactgagatacaatttcatgcaaaaacaaaaactggagtgtatttgcgtgtatgtgtgttttcatgagggtgaaaggtggcgaggggtgaggacccttggctggtctgggatgtcggaaggtgcccctgctatgtgtaagagctaggactggtgatgtccaggaatcattttcagtaataaattgaagatgacagtgaagtagcagaatgaaagagacttattctcgtccacccatatggtagac

SEQ ID NO: 438139 - DNA, 265 bp, Homo Sapiens
  misc_feature (44)..(44): n is a, c, g, or t
tattttttgtatagacagggtcttgttatgttgccccgactggnctcgaacccctagtctcaagccatccccctgccttggccttccattcctctactttataccacggttattcaccaagcttgtctttgttcagtgtacttcctcatggaaaaactgaggtgatatttaccctggtttttctaccagtgtgtaactgtcgctagtaccagctcaaaaaataagaaatgaataaatgagtgatgactatcactatgttgctcag

SEQ ID NO: 438140 - DNA, 282 bp, Homo Sapiens
tacaatattcaatatttcaaacttcaaactgcattctttatcactattagactcagaactacattgttttcctgcaattgtggtttattgtaatcttaattcattttctcaaagaccattcaacacatttatactattccagtaattaccatgctacccagaaaaacaagtgaacagttttattaagaattaaatgagggtatggaatgtgatacagtacaagtaagacactgaagatgggtataatagtactacttgcacaaaaagttaaatttcacttca

SEQ ID NO: 438141 - DNA, 723 bp, Homo Sapiens
  misc_feature (18)..(18): n is a, c, g, or t
  misc_feature (584)..(584): n is a, c, g, or t
  misc_feature (589)..(589): n is a, c, g, or t
ctgtgaccgaggcttttncagagctgacaacgatgctgcctctatgccctgcacccgtccaccatctgctcccctgaacttgatttcaaatgtcaacgagacatctgtgaacttggagtggagtagccctcagaatacaggtggccgccaggacatttcctataatgtggtatgcaagaaatgtggagctggtgaccccagcaagtgccgaccctgtggaagtggggtccactacaccccacagcagaatggcttgaagacctccaaagtctccatcaacctgacctcctagctcataccaattacacctttgaaatctgggctgtgaatggagtgtccatatataaccctgacccagaccaaatcagtttctgtcactgtgaccaaccattcaagcagcaccatcatccattgctttggtccaggctaaagaagtcacatagattacagtgtggcactggctttgtctggtaccagatcggccctatggggtaatcctggtatatgaagtcaagtattatgagtaggatcagtatgagcgaagctttcgtatagttcggacagctgccaggaacacagatatnaaagncctgaaccctctcacttcctatgttttccacgtgcgagccaggacagcagctggctatggagacttcagtgagcccttggaggttacaaccaacacagtgccttcccggatcattggagatggggctaactcca

SEQ ID NO: 438142 - DNA, 3279 bp, Homo Sapiens
  misc_feature (61)..(61): n is a, c, g, or t
  misc_feature (113)..(113): n is a, c, g, or t
  misc_feature (120)..(120): n is a, c, g, or t
  misc_feature (477)..(508): n is a, c, g, or t
agttaggttgcaccttgctattaataaacctgtataaacatttccagcataaaaataggtnctttatattactaaatgtctgaagacaaaagagcaattggaaatctctgttncttgttncgtcatacataggaaggcgacgtgatgcaaattttaacacaagattttattaaagacgggcaaattggtgaggcatacctgaatttctggagatatacaaatgcgtgaggctggcatcatatgcaaatgtggctttacaaattggttttattttctagctgtatttaaagaggtgttcaaaattccctactaatcaagaagcacccctgaaaaaactatgagataagatagtgttattaatggtttgcatctaaagaccaggaaacacattagccaatacagtccacaatcggtgaaatgctgccgtgcaaattgcacgtgcatatgcatttttactatattccctcagagaccgtnnnnnnnnnnnnnnnnnnnnnnnnnnnnnnnngtgctcttagatggtggagcagaccttcccaaaccacaggtcttactcttactgggttttaaggaaattcaggaagtctccttctacccagatagctcaccccctccagttccataaccttttcccttgggattaaggccctgctctgtcatacttaaaaacaaatgtctgtgggaagaggtaactcattcctattatcaatcatttacaccttagtgtgaatgaattagtggcagtttctttcctgagaacaggatttgaaagaacaatagggagaaagtgagggtactgtggctgtctggtgggggatgggaagctgatgggatcctaagatgggtatttgtgacagcagctgaggcacaggcattgaaaacaaattttgcctacctgtaaagactctagactttgggacaatggtcctggggtaattctgagatatatgcagacagccaggggttccgtacacaaccctaccacctagaattgctactcctatttgtgagcttggatgtgtatctgtgggggaagatgagagtttagagactctggaaaatattccaagtatttccagctatgaactaccctcagacaaaggttcttccagcaccctagttgtttaaaagtgagctaatggagatggcaatatgacaatgctttctaggatccctccagggaaaattcatctctccctccctcacacccttcttagcacatatcacagtctctcttgattaagttcattttcctgtgtcagtctccccaatcacctctgagtttctggtgggcagggaatgggtcatttctgtatttgtctcactcaggatctaagagaggccgataaacatccttgaattggacagagttgtgaccaagcagcccgggcgtcacaggggcctctctcttctgatctggcccccacaaagaacagacgtcctggttgctgctggtagtggcagaattgctgcttcagtctgaagagaagccttgccagggtgtactcagattcacaaccctggttactaccgtttgtgtgatccttgaactcctacagggagtagatctggagccacggcaaaccctgggcatgtcttgcttatggttgtccccccagcagccagagtacattggtgtatgttaaatgaatcactgaacatcatttttggtgttctatgagaataggcctcccaattctaaactgtcccagaaaaacacaagccagaaaagaaaacttagcaatagtgctctgataaatgcagctgcactgtcctgaaggtaaccatttctaaaagccaaggatatgggaaaagaatgaaccacaagtgggctccagagccacagggcttcctgacttcatcactcagaaaacagacataacctatctgcttggccatctgctcccccaattctcatgggcaaaccttgtgtgcgtttctctctgaacatcagggcagtcaatggcactgctgcacagcaggctgaatgcatcaggtgcctcagttttgcctctgtttccccatccacacctcagcagttgagtgagggatttggtcttgggcagtgtgggggactccacctttgtctagggacagtcttggtagctcagactgacctccagcagcgttacaggatcagctggctccaggggagctgagaaatgtaggctgggggtcttgttgcattcttgggcttgaagccttcaggctcaatgattgagatgggagctctctaaggctgcggcagcaggaggcatttctggctaactctgctcctggactatgcttcaggtcagattacccaagaagtggaggggaggggaaaggctgaagtggctcccagaagcggctaagtaaatacaatttgcttcaattctttttgctcagcacactagttcggccctgtctaatacacagtaaccttagacaggcttgggttttaaacacaacacttctctgtccctgtcttttgcttcttactttatccactgtattaattttcctactgactcaactaaaaagatcggttcatgaatgatgcttcctcctccaataaaaataatctccatggttttcagtcttcttatagatacaaaggttttacatagttgcctggaaaagtaccaaactgctttgtccttcttgaagtaccaacaaaccatccatcgtcacatttttccatgacatcaacgatatctccatcgcggagttccaactcatcatcattctgtggtatatagctatataatgcttgatagctaaataaatcttgtgaggtttgactcctgtcgggggtgactcttcgctgctgggcttgaggttgctgtgggcttgcagtggcactgcgacttggggaggaggagaaaggcaggtccatgtaatccacagggtttttcaccagtggtcgcttgatcacatccacgtaggtgatggggaagatgccttgtcgggatgtccccgggatcctcccttcgtaccagttctcatctacctgccggagcagtgtgatcctctcaccctttctgaaggacatttctacttgtgtatcaccattaaagttaaacttagcaatagcttctccatattccaaaacctgcactggtgtcaactttttgggctgtgccttctcagcaggaggaagaagctcgatgtaggtgcgtgggaagattcccacccggccgtggtgttctccttcataccagttctgatcaatttgcttataaatgtaaacaatatctcccttctgcagaggaagctccttcagtgatcccgagaatt

SEQ ID NO: 438143 - DNA, 217 bp, Homo Sapiens
  misc_feature (96)..(96): n is a, c, g, or t
  misc_feature (104)..(104): n is a, c, g, or t
  misc_feature (123)..(123): n is a, c, g, or t
catatggaaaagcaagggacccagaatacccaaaacaaccttgaaaaagaaccaagttggacaaggtacctagaattcaaacaagaatcacacatnacatgctnaaaaaacttctagcatctnaaatacatacaagagctgtgcagggcatagacttcaaataaagccgaacactggttaatccatcagtcctatggcaagttgatcataaagcatt

SEQ ID NO: 438144 - DNA, 380 bp, Homo Sapiens
  misc_feature (127)..(127): n is a, c, g, or t
gaccgtattaaatattaagcttttactattttcccatgtactctgcaatgcataattaatgtgcattctctcatttaaattcccctaataatagacagttgagctcattgggcgtttgattatttancccaaagtcatatggctggtaagagacagggttagaactcattccattaataaatcctcctccctttttctattcacttattggcccttggtatcatatctctgtaggaaatgaatgcatcagtagtatgcacaatttgcctttttctaattccattcaggaagtgctctaattccatgtaagtacccatatgacacttaagtgcttaagtgacttactgcatacaagttgtaggaaagactgcttttaggaa

SEQ ID NO: 438145 - DNA, 849 bp, Homo Sapiens
  misc_feature (15)..(15): n is a, c, g, or t
  misc_feature (24)..(24): n is a, c, g, or t
  misc_feature (37)..(37): n is a, c, g, or t
  misc_feature (42)..(42): n is a, c, g, or t
  misc_feature (68)..(68): n is a, c, g, or t
  misc_feature (96)..(96): n is a, c, g, or t
cgggccccaaagganacaaacctnccaaaaaaacccnaaganaaaccgggcctccccaaagaccaacnaaaaggccaaatttccagccggttaaangggtaccccccaagtgcctggtaattcctaagtaaacttctgttccagaaaaaatacttgtcacttacagctaagcatatactgataaggcaacatgtagaacataatgcagagtggaatgcaactgccttttcatgtctagaagacaaggtaaaaacgaggtgtttttttgttgttgttttctgctgctggtgctcagcgcttgttcactgaaaaccacagatggtcttaaagcgtgaagccttgtgctccaacttcctagagacctaacaatttcactggtgtcttttaatgttaatgtccgtattttcccttctccacatcctacaagggcattgctcctttttaggctatccagtctgaagtacgttttcccagtggtgaacacagggccagaagtcctggacagcatgattgagttgtggtagtctgaaaagcaatggtggcaggcagtcatgatatgctcccatcgcctcttcaaaagacgcaaacgtccaaagtgacaaggcttttccaaaggtcagaaagatgaaaatgtgtcaccatggggttctccggcagagagtgggttctcagatgagattcctgggtctcctcaatgacccaccatgctctgcttgaagcactccagaagccaggcggcaggtctggggacatgcacggtgtggcctgcagacacgtgtatgtgccaggcaggatgtgccgagcatcacaaccctcccgaggcagctgccttcaaccttttcttccacc

SEQ ID NO: 438146 - DNA, 1255 bp, Homo Sapiens
  misc_feature (259)..(259): n is a, c, g, or t
  misc_feature (629)..(894): n is a, c, g, or t
  misc_feature (907)..(930): n is a, c, g, or t
  misc_feature (1223)..(1223): n is a, c, g, or t
ggcgggcaccgaaagtactcgaatcagacaatgccacgagattgtggagtctgttcgacgttgcgcttagttctgtgcgaggggtatatgtggcctccagtgtgtgagtgagtcggattggatatgaacagatcgggttgtcgggaacaggtggtggtggctgtaatcatacgattgagagtatgtgtgtcggagtgacggcgacgtgtgattgcggactatgtaaggattcagatgtgtgtcgcctcagacagtcgtnggagcagcgtttgctgctagttttataacaatttcgtcgacgcgcttatttactaggaatgtatgatctaggtgtgtcgtcctgggtaattgtgagaaggggtggggtgcgctccgattgggcctgcggtgttttttggggagaagagatcttcggtatgggacttgtgtgggggccccgtataatgggggtccgggggatagatacgacttgtggagggggtgttgtggcggaccgacaccggtttgggtcataattggcttgggcagggggtaaattgcgagagatccccgttgagtagggagttcatagtttgtgggaagccgttttcttcgccccaggtaaaagatccagccccatccgggcatgnnnnnnnnnnnnnnnnnnnnnnnnnnnnnnnnnnnnnnnnnnnnnnnnnnnnnnnnnnnnnnnnnnnnnnnnnnnnnnnnnnnnnnnnnnnnnnnnnnnnnnnnnnnnnnnnnnnnnnnnnnnnnnnnnnnnnnnnnnnnnnnnnnnnnnnnnnnnnnnnnnnnnnnnnnnnnnnnnnnnnnnnnnnnnnnnnnnnnnnnnnnnnnnnnnnnnnnnnnnnnnnnnnnnnnnnnnnnnnnnnnnnnnnnnnnnnnnnnnnnnnnnnnaaactctgtctcnnnnnnnnnnnnnnnnnnnnnnnngatacaagcccaggtaaagagagaacctgaggtgcactcagggatgacctatcaaggttattcaagaagcagttttccatccgctaacattgaattttctgctatataaacaatgacctaaaagtttagaggagaacttaattgaagtagcagatttatacagaagaagggagaagtaagcactggagataattctaaataacttaaccatttataaaagttatagtatttacagaagaattttcccaaaatacaatgcttcaaaggctctacaggaaagaagagatgcaggncaaaatggttgcatcccgggctcaagtagcag

SEQ ID NO: 438147 - DNA, 739 bp, Homo Sapiens
  misc_feature (124)..(124): n is a, c, g, or t
gcttttagaaaacaatttttatttaaaaaatcataaaaagtactggaatgaaaatacaggtaaagcatttgaaaattattttcctggcttagactgtttactggctcgattctagctctgtccnggtaaaggcctccagaaccttcacctactattatcaagtctggcctcatagggagggacttttactgtactgaaaggaagccagctgaagccgagatctgaagcgctcagcttccagttcccggaagaaaacatcatcatcattctgtgttatcatgtcctgcagctgcttgaatttccttctccatcttagatctcagctccctcttcaccttatgtaatgtctgggcctgagatttctctctggctttaagttcttgatgttcctgtgatatggcttctgccagcaatgaaaactggtccttatagtagttctccatggagtccagttcatcctggtggcgtctcctttgttcatctcgcttttctttggcatagtttcttaggtctcgtaatctttgcttttgaatgtttaaaccttcttcaaacagtttcttaaatatcatttcttcccgggtcctcattctcatcatttttgcacacaactgaactctataatcatcataatattttcgagcacgaacgatttgctgtcgattttcttttatctttgattgggtcaacctttgcctacgaatgcagtccttgaagtcttgcagtctcttgttatgttccc

SEQ ID NO: 438148 - DNA, 293 bp, Homo Sapiens
ccagtctggaaaacagtagtgcaattacgttttacttcttttaagttatatagtccaggatgtaaatagctctgtggaaagataagaagatgctctggtaaacaagaaatttttgcaagcccatgctggcttacgagtccattaaagcttgtaagtccatcgtggctttcaacaaaatgttgcatatacatcactgagaacaaagcagaaataaataggcagaaatgactgtaaactgtctcatttcaatgatttttcagtaataactggcttgcgtaagttgtctcaggggg

SEQ ID NO: 438149 - DNA, 622 bp, Homo Sapiens
agcggttagtcttctctctttcttaagcagtgataaaccttttaatgagaacaaaaaggaaataaattgctaactctgaaggaaccagtaagaaatacactgaagtatggtctgttgttttaggaataatttggttaaatggacccagagtaatatagtggaacatgcatcaccttataccatatagtaactgattcttctaagtttacttgaacagatttcagtcaggaaaaaacattgctcaattgtgttcttcaatttattcaacaaacaattgaaaataatattttaaaggacataatctcttcatatcacatcttaacaattcttgaatgagatccagtttgtccatgccttgtaagtaagtttataacctactatgctttagggcctcctgctaccttaggttgacatatatttaagaaaaataatttcatttcaatagtagcataaacattagaaacaataaatttgctggaaacatgaatgcaatctaaaccaaatgtgattttaacaattcatttctgccattaattccctccatatgtgtgaataattgagttgattttatagtgaagtaccttatgagccatacttaagggtttctgagagggactatgaa

SEQ ID NO: 438150 - DNA, 1115 bp, Homo Sapiens
  misc_feature (296)..(296): n is a, c, g, or t
taaatgtgggttaaagaatgacccttttcttagggctgggccacctggggacggtggccaggaacccccagtagaaccggtaaattactgttcctgtcttaaaagggcctcttcaaagtatttcttggccatatgggttaaagaaacttcctaaccatagcacttgagggaaggagtcctcttccctccacctgtagccacagtgtgttggcaaaccttcaagcctatcaggaggtagagggcaagatgagcgctttgtctaaaggccaaagagaacagcaccaagcgtttctacncaggcccttcttctctctttcccatgaagtctttgcccttctcccataaactttgggtcccaggagaaccttggttgctgaaggctaggctcagtcctccgcctgggagtctgaggaaatgctcttcttacctaagaaatggaagatggggcctaggaggccctgctgttgctacattcccctctgctgtgcaaactgctgtccctggccagctctcccttgctcttaacctgatacataggagctagtccttcatttccaaatgctcccctttgtggagtgcatggttggcctgacagtgtcactgaccccagggctctccttgcccctggagtacccacaggccttggtccacatctttaaatttgggagccaggtggagagaaattgtgttcatgctgcatgggaggtagagaatggaggtgactttttatccctgccacccctcattttgtttccttctctgaagcacctgcctctgagctcagttccccaaagaggcaggcgggcagccaagcaagggcaaagctctggtcggggaatgggtagaggtagggcagccccaggctcgaggactccccggttgccgtttccctcctacctcgatgctccactttcgcaggtcactggggaggcaggcccatggcacatgagggacagtgggggtgggggaagaggaagaagcaccctgtagcctttggcccacccacgaggcagggtggagggttcttcctggatccaagggtggaacctccccacgagcctgggtccatccccttggatagccctcgtgccgaattcgccacccaggcctcgctc

SEQ ID NO: 438151 - DNA, 417 bp, Homo Sapiens
ggatcccccacccagatagtaaagatgaaaacaaatgagacagttgcccaagaagcatatgaatctgaagtccagcccctggaccaggtggctgctgaagaagtagacttgccagggaaagaggatcagtctgtctcaagcagtcagagtaaggctgtagcttctggacagactcagacaggagcagttacccatgacccccctcaggattccgttcctgtcagttcagtctctcttatcccaccaccaccgcctccgaaaaatgttgcccgaatgttggcgctagcattagctgagtccgcacagcaagcctcaactcagtcattgaagagaccagggacctctcaggctgggtataccaattatgagacatagcggtggctacactgaagatatctgtccagtctactgaccgca

SEQ ID NO: 438152 - DNA, 503 bp, Homo Sapiens
  misc_feature (254)..(320): n is a, c, g, or t
gtgtgcagtttattttatgaagtgagaacttttttcaaaacaagacgctatctcccctcctcccaaacacacatatggcacaataaatcagcatttaccacttctgttcatggggaaatgcttggaaatctctctctaggttactctaggaaatgacaaagttgcccttttcaaggatatacccaaacagctagcaccaggccacttttgatctgtgatgtctacaactccagggcaaatcatcatacagatgnnnnnnnnnnnnnnnnnnnnnnnnnnnnnnnnnnnnnnnnnnnnnnnnnnnnnnnnnnnnnnnnnnncattatttttgaatagagagaagagtgttatattgagtgtcgcgcttagtgggggctaagagtcacagcttcattttaatatcccaacgagggagagaggtgtgtacatgtgctcaagagagacaccatttatattgagtctcactcaattaaagagagagagagggtattaatctaacgggg

SEQ ID NO: 438153 - DNA, 395 bp, Homo Sapiens
  misc_feature (121)..(145): n is a, c, g, or t
aatacatgctagtctaacatttcctgctctatgcctgcatctttaacaatggcccaagtgaagaaaatgctaccttttttgttaacaagacactgacttgaaacatgtacatttaaagccnnnnnnnnnnnnnnnnnnnnnnnnngtagttgggcatttaaataaggacaaggaaaaatatttttgggggcaaatcaagagcctatgagttctaagtataaagctgaagtgatttcgaatgccagcgttatatatttgcatttttcacattttacgagggagtatatgtgtatgtgtgtgcacgcatgcatgtgtatgtgttttgcttctttgtttccaatcaactaatcaaaaggataacacgttcgcgagggtaccggctcgattcgtatcgg

SEQ ID NO: 438154 - DNA, 1785 bp, Homo Sapiens
  misc_feature (1705)..(1741): n is a, c, g, or t
cccccccaaaggtttctgggttccccagccggtgttttctggagggtccattacggtgttccccttccccggggcccccaggattcagaatactttgggaagtccagagccggcggggtacaaaagggcgggcagctttcccatttccacaggggaagaaaagaaaattgttccaaaaaaccccaaatattcaccatgaccaggagttgccagtgaaggagaaggtagttgctgtagaaaaatgccacggctgcgcaaatagactgaacaaacttgaagatggcaaatgctggggcgctgtcttcagaatacagaaagcccaagatactaagcagctgggtattaaagcagctgtctccaaggcccaacagaaaactgcagagaatggcaacttctttgctggatttgatgtaagcactgctgtcagttcctttaacaggagcaatcggggcatctccaggcatgttgagaaatattagataaaaagctatgaagtgcaccaggatgcccaacagcacaactggatttctaccaaaacgattgttcttgctcagcaggccgaagaggcttccacctaaaatttctccaatgccgatgaaaatgccagaaagtccaataaggcttttctcttctgctccaaatttatttgtagcaccaatacaggttccatatacaccagagaagaaagttaattccagacctgtataagcagttgtaatactaagaaggagcatctccttggtgacacataacttaaaagactttttaaaagcatctactgcctttgtcagattgttctgggcagactcgttgacttccatgtcctggtcatcagaagactcatcttctcctaggacattttcagaatctggtttccgaatgagaaagaatagaactgtcccccacaaggctaatcaccgttagggcaataaacactgttcttcggtcactctctgatatctgagttttcccttgccaggcaaaatatatgtagagatttccaaagaacaagctagactgcagaagtgcccagaaaatcccactgtttctccctatgctgtgctcatccgaattgattgtcaggcagtttccttgtgctgtccaaagcacagcagcagcaattccaatgaaaacagaggctgtgtagaaggaccacgggaaaggctggatgaaaacggcaatgtacatgctgtaaaataaaccactggcaaacatagagagttgaggtcctacaatggcaaccactgacggtgtaatcaaatttgaagcagagaacactccatagataatagccatgctggtatatccactgccgtgaaaatctgtcctatttaagctcctgatgacagtttgcgccacatttccacaagtttgaaaggcagtgaacataaacataaaggcaactcctaaaataatgatgttgaaaagctttttagattccggggacattttggctcagctctgccggaggcagcagcccagggcagtcagctctcctcggggcgaagccactgacaatccggcagttaggatactcctaagaagcgatccgagtacggaagagcacaacccccggagaagcgccaagaatttatccgctccaggttgaggggcccacgaaggggattaaagggccaagtgccagccgcagcagccggcgcggcccgctctcgacgaattcgagctcggccgatttggcctgatnnnnnnnnnnnnnnnnnnnnnnnnnnnnnnnnnnnnncgccgccaccgcggttaatccgggtccgcaatagtagctgatcc

SEQ ID NO: 438155 - DNA, 1252 bp, Homo Sapiens
  misc_feature (374)..(374): n is a, c, g, or t
  misc_feature (1113)..(1121): n is a, c, g, or t
ctttgacaacagcagacgtgtgcatgtggagttgaatctggaaaagctcacagcccagaacataatgcagactcccccagccacagcaccttccaagtcctgagaagagtgctgattctccatctgagcacccattctcctgcaacatcaggggagaggatttcaccgtaagggtcagaccagcgtctccaaacccagctccccacctttgcctgttggtggcacttgtgggagaaggggagatgatatgaaaagagccacaacaggagtcacctggacagggtggagcttgatggaaactgacatttgtgcccattggaggcaaatgtagaatttggtatcttccgtagcgtcaggcacatgaaactctccantgcccatgacttttgacagtgacttcagagcacatctgggagacccatgtggcccaggctccacacagaggatacagaggacccaactgtataccacttcatgtgatgttggagtgctgttctgcacgcctaactttatggcttggtggatcagacaatgcccaatgtatgatggaaagctcaggttgcagggtagctaggtggcccatgcttgagcagtctccactaagtcccaggagcaagccaaaactgcttctgaaaaggagagtagttatcagcggaagatggcatgctccacagttctagggtccacactgatttgcctgtagaggcctgccagtggcttcagatagtatccctatctgccactgacacttcaagcaccattggatctcctgaaacataaagcccaagtgggagagcagcttgcacagcagcctggaccctgttgcagagcctgcttttatcctgggcttaaaactagcagctttttgggtcacttggcaaataggtcagagagtaacacactcaattgaggaatatgttgcctctaaaatccaaagaaggcctaatggtgttatgcctccttttttttgggtgtacaagggggctagaatgcaaacaacttatttccttccttttagaaggggatatctccgaccacctagacctccctagaaaatttccccctggaagtgaaaagggccccttgaattttttaataaggatattatttttnnnnnnnnntccggacaatggccaaagggttcttataatcaataaagcctctagaaaaaaaggtgtgggctacctttcttacgacggggttttccccgggtccagagcattttaagggggtccatccccatagggtgact

SEQ ID NO: 438156 - DNA, 1065 bp, Homo Sapiens
  misc_feature (132)..(132): n is a, c, g, or t
  misc_feature (141)..(141): n is a, c, g, or t
  misc_feature (160)..(160): n is a, c, g, or t
  misc_feature (179)..(179): n is a, c, g, or t
  misc_feature (202)..(202): n is a, c, g, or t
  misc_feature (428)..(428): n is a, c, g, or t
  misc_feature (1028)..(1028): n is a, c, g, or t
  misc_feature (1047)..(1047): n is a, c, g, or t
aggagatgatccataaaaatgtttagaaaggtttggtgcaagcctatcaaggtttgtccaaagttaatatgttaagggattgcaaaagacaacagccccattcacattaccccggttgagccctccctcacntagcactgngaagacttgggtttcaacnggcaccatgcacagatccntagcctgtgatccaatcacttgnaaagtctctaagacagtttaagcctgtgatgtgtgctcgtgccgaattcggcacgaggctatttcaggtcaccctggtgctggcgttcacgtgaaagactgcttatctgtatccagctgtttcagagctcaggaaggccagggggcttcagactccactgtactctgcattccaggattctctgttctctggctgtggtggcctgacacactcttcaccactgacnccacccccgcttgcacactatgccacaggaagggcaggggcttccatcacaatcactcagtactagttaccagctctgatagaattactcaccttgagtttccaagtcttgctgaaggtgcttgcgtcaaaatttgcttttatttacacgtttgagtcaattacatgcatgttttatttttgaggagtgattagcaaaatgcattaaaattttaaaatagcaattaaatatacaaaaatatagcttacaaaaaactgcgaatgtttaaaaatattctgctgcagaatttttagtgtacaaagacgtctatgaaacctgaggttcagcatttcataaacctttttttgagggagttacacaatacctagtgaggaaacccgagggccaaactacaagacgaaaaagtgccccgttcctggcaatgatgtcagaagaccaagaggcgatagttaccagcaacactctaggaagaccagctgtcaccagaagggagttcctaacacttgccacacctgctcccccgaccgggggcctgggagggaagggcagatggagaggaacggtgtgcagtgggcgtgagatgcagatccaccaggcttnggactggcaaagggagctnagaagagagtttccccaa

SEQ ID NO: 438157 - DNA, 975 bp, Homo Sapiens
  misc_feature (39)..(39): n is a, c, g, or t
  misc_feature (110)..(110): n is a, c, g, or t
  misc_feature (136)..(136): n is a, c, g, or t
  misc_feature (304)..(304): n is a, c, g, or t
  misc_feature (373)..(373): n is a, c, g, or t
  misc_feature (439)..(439): n is a, c, g, or t
cacagctgtcaggatctggaaagcaatcccagcgcttcncaatggttattcaagaatggacgggtactgatgcgatcatagagattgtctcgcacatactgcctaaagancatagctgctttctcagatgcttttntctgatgctttctggaaaggtagacaattctgtgcagaattaagcctgattttcagttcctccagctcttgtttatagctggttaaaggcaatgtgggatcctgaattgcaaaaaccttcacaacgaccaggccttctcggtgcttggctcgagcaactttaaaaaanccgagtactcccccaggcttttatcatattcaaagtcatgaatatctgaaaaataactctctacagaanaggatctgggagggagcaatgccagcaagctgatttcccataatggcaagcacctctgtggtcttnagtaaggttaggatataataccctaggcctcgggaaagtgtcaaaatcgttcagaggctcacaacgaggtcatagtagactacttcggggacgggacgggaaaacgcgtcagcagcggggaagttgtttctacgaagggtctttcttcatagacaggagatgggctgttggtggaggggcgcagaaaagtcccgatcttcaggaaccccggtggtcctgggaggagaactgggaaagctctcggggtctcagcagagagaagaagccacgctaaagagtctccacaagtaccgcgggatttgacccctccagccccctaacctgccctgggggacatgcgttcccgggcctcgtcttcctctagcgcggatcgctacacccgtccgagccctcctcgagggcctcaccaccgggcggggggagatggaacccgggagagaagtgcagaccgccagtcccaagaaaacactacacttcagctactgcagccccagcaaacgccgaactcccgggaaagcaaccggtctgacctcccc

SEQ ID NO: 438158 - DNA, 431 bp, Homo Sapiens
  misc_feature (29)..(29): n is a, c, g, or t
cctccaggaagttctttttactctcctcncccacatgcagcttctgcccttcattgaggaagtcattgtctttgaatgttggcaagtccttggccttctccttgtcgctcgcttctctggcaaccgtagaacccttgaggtcatacttgcgatgcacagtgagccgatggctgaacacgttcctggtaaccaccatgtaggtttccacaccatccacggtcaggcggtacatgcccaggaactgtgggaaaagcgtgttgccatgacactccactataaactggtggtatttctttaagatgttgtgcatctccgccacgtcctcgctggacacagtcttgatgacaaagcgccggtcgtaggtggtgaggaaacgcgtgccacaagacctgccgcccacgcactccgaataagctcctgctagatcaccg

SEQ ID NO: 438159 - DNA, 341 bp, Homo Sapiens
  misc_feature (278)..(278): n is a, c, g, or t
  misc_feature (329)..(329): n is a, c, g, or t
aaagcagcaatcatctgcatttttaccacatacacttgaataatccaaaatactgagagttgcttccctatgctcaacatccataggcccaaatttggaaaggtgaactgtagttggcttatatgctggccttaggtgctcttatgacctgtgcttagccatatttagctcactggctaagaggctgaaaagattctaccaccttcaggtgtgtggggaacatgaacaggaggctgacaaacaaggagggaagtttctattgtacctggtgagtgggntttatgaaaagaatatgggtagggctgagtcaagtgatatttgtggttttntcacttttttgg

SEQ ID NO: 438160 - DNA, 286 bp, Homo Sapiens
  misc_feature (215)..(215): n is a, c, g, or t
tatttgatagaattttctagtgaaaccatcctgacttggggttttattttggaggaattttaagttattaattccgtctccttaatagtgataggactattcagattaccttatttcatatttggtgagttttggtagcttgtgtttctcaaggaagtgatccatttcatctaagttgccaaatttatgtgtgtataataatttgtagtattccngtattatccttttgatgtctgtagggtctctagtgatatcctatgttttattcctgatattagttatttgg

SEQ ID NO: 438161 - DNA, 369 bp, Homo Sapiens
  misc_feature (97)..(97): n is a, c, g, or t
actcgagccccaggagatggagactgcaatgagcccatgaattaagccactgcactccagcctaggtgacagagcagaccctgtctcaaaacaaaanggaaaaaaagaatttctgaattttcatttttcatgaatgaaagtaaaaatcagagagaaaattttcacatatgacaatgtggattgtcatgtttaaagactctgaagttacgtagactatgagttatcatgttttcttttagcatgattctatacacctagctttaatttttgaagtctgatttaattgtgattttgacaatcagttactgaatgaggtagtccacattgcctagatatttgctgcatctggttactgattccctcgtgcca

SEQ ID NO: 438162 - DNA, 761 bp, Homo Sapiens
  misc_feature (59)..(59): n is a, c, g, or t
  misc_feature (61)..(61): n is a, c, g, or t
  misc_feature (83)..(83): n is a, c, g, or t
  misc_feature (92)..(92): n is a, c, g, or t
  misc_feature (105)..(105): n is a, c, g, or t
  misc_feature (113)..(113): n is a, c, g, or t
tcgaataacactgaggcacggaagccatagggctctgcggatgctgcatctattggtgnanaagaggaactgtggcaagtttnctgttttcnctttgactgcagnggtagaanctgaaaaagtaggtgaatataaaggagaggactcccgtggggtgtgtggagagatatcagattttggagagagcttctctccttccagactttgcactttttcagaggtgagtgaggcatataaggacatatctctgggaggagcaacatcggatagagtatcttcttggagaggagaagcgatctgagaaggggtatgagcagaagaggtggacggggaggcctctacctgagatactgagatgagctcagaaagatcattatcttgggtgtaggacggctcctccataggtggtatcttatgtgataaactggagtcctgcatgtcagaaggactgtagtccacttcagttggcccattttcagtgatgtgaagcacgcctgcacccactgtagggtgatctggagactgtcgactgaagtccatagcaagggattgctcaggagattcttggccaaattcaatagacattgaggactgttcagatctgtgatcttgaacgggtgtcctggactttgcagttttaggggagaaatctggtggagaaattgacatcggtcttgggcattcttctttagatggagacatttctgtttcctggaatgtggtaggtgtttgcacaacagacactgaaagggagtcatcta

SEQ ID NO: 438163 - DNA, 1685 bp, Homo Sapiens
  misc_feature (41)..(89): n is a, c, g, or t
cttcttttctttgggaagtacagccgcggctgtgggtgggnnnnnnnnnnnnnnnnnnnnnnnnnnnnnnnnnnnnnnnnnnnnnnnnnaaagccagggacctggaggacctcccgggccgggtggggtttgttttctgccgggtggttttggtccctgcctggtgggccgcgaaggcagctttctgggtcgttacatcttgctttcccccaggagattgttgcctttccatctcctcattttcatatacaagtcctttacaagctttacaaggtgttacagagcccccactgctgccgttctaccccctgagggggcctgagggggtccctggctgctggtctggagccaaatggcagtgccctgccccccactgaggggccgccgggcccgaggaaccagcccaatacggctctgctgtccctcattctcatgcttgggaccttcttcatagccttcttcctgcgcaagttcaggaacagccgcttcctggggggcaaggctcgtcgcatcatcggggactttggcatccccatctccatcctggtgatggtcctggtggattactccatcacagacacctacacgcagaagctgacagtgcctacagggctctcagtgacctctcccgataagcgctcgtggttcatcccacccctgggcagtgcccgtcctttcccgccgtggatgatggtggcagccgctgttcccgccctcctcgtcctcatcctgatcttcatggagacacagatcacggcgcttatcgtcagccagaaggcgcggaggctgctcaagggctccggtttccacctggacctgctcctcattggctccctgggggggctctgtgggctgtttgggttgccctggctcacggctgccacggtccgctccgtcacccatgtcaatgcgttgacagtgatgcgtactgccatcgcgcctggtgacaagccccagatccaggaggtgcgggagcagcgggtcactggtgtgctcatcgccagcctcgtgggcctgtccatcgtcatgggggctgtgctgcgtcggatcccattggctgtgctctttgggatcttcctgtacatgggggtcacgtccctgtctggtatccagctgtcccagcgtctgttgctcatcctcatgccggcaaaacaccatcctgagcagccctatgtgaccaaggtgaagacgtggcggatgcatctgttcacctgcatccagctgggctgcatcgcactgctctgggtggtcaagtccacggcggcctcactcgcctttcccttcctgctgctgctcacggtgcctctgaggcattgccttctgccccggctcttccaggacagggagctgcaggcgctggactcggaagatgctgaaccaaacttcgatgaggatggccaggatgagtacaatgagctgcacatgccagtgtgacccttgaagacagtgcccctcagagaccccaagaccttagggattgacacctgggcctcaggcagagcccagccctgggctggggggctcctcaggacccagagatgtgcctggaaccactcctgatgccatggctagagtggcccccctgacttctgcccggggtgttgacctcgcctcacctttcacagaccagaccggcacaggctttgagctcattataaccacactccttgtctcgtgtctgcctc

SEQ ID NO: 438164 - DNA, 739 bp, Homo Sapiens
  misc_feature (484)..(484): n is a, c, g, or t
taggaagaaagaaaaatgtttattacaaggaaagaaaaggagacggccagtctcagacccttctgcgttcagagagacggcagagattcgccatgcaggatgaaattaaggtcagagagccgtttacgctatgctcgggctccccgggctcttcctccctctacggctggccggcattgctggtgcgattcggaagaacgagctgcagaagtcgctcccggccgagggaagggaccgggggcggtgttgggagcgttctgcagggaggcggctggcgaagatcccgacgagggagcccccacccacctgccgcagccggatggggcagggcagggccgcgccgcagccaggcttgggggtggttgggagggacccggcggcctcgcgccccctccccccgtcagtgacattccagcggcggcgccgagcctcggcccggctgctcctccgcagcccacgcgcctacaaaagcagcggcagcggncttcccccactcagccgaatggaggcagccccgcggcccgcccggctcacctgttcgcgcgccggccccgccccgcctgaagagctgcccagctcccacccgggggtcggctgcccggggccccgctccctcccggagctccccgggtgcctcttttaccggctctcggggggtgaggggcgtgggtgcgtcgggccgaggggtgctgaaggaccgaggggcctccgcggcctccgctccacaccgttcacatcc

SEQ ID NO: 438165 - DNA, 1258 bp, Homo Sapiens
tctacccgctgcggagtgaacggtgtggagcggaggccgcggaggctcctcggtccttcagcacccctcggcccgacgcacccacgcccctcaccccccgagagccgaaaatggacccaagtggggtcaaagtgctggaaacagcagaggacatccaggagaggcggcagcaggtcctagaccgataccaccgcttcaaggaactctcaacccttaggcgtcagaagctggaagattcctatcgattccagttctttcaaagagatgctgaagagctggagaaatggatacaggaaaaacttcagattgcatctgatgagaattataaagacccaaccaacttgcagggaaagcttcagaagcatcaagcatttgaagctgaagtgcaggccaactcaggagccattgttaagctggatgaaactggaaacctgatgatctcagaagggcattttgcatctgaaaccatacggacccgtttgatggagctgcaccgccagtgggaattacttttggagaagatgcgagaaaaaggaatcaaactgctgcaggcccagaagttggtgcagtacttacgagaatgtgaggacgtgatggactggatcaatgacaaggaagcaattgttacttctgaagagctgggccaggatctggagcatgtagaggttttacagaagaaatttgaagagtttcaaacagatatggctgctcatgaagaaagagttaatgaagtgaaccagtttgctgccaaactcatacaggagcagcaccctgaggaggaactgatcaagactaagcaggatgaagtcaatgcagcctggcagcggctgaagggcctggctctgcagaggcaggggaagctctttggggcagcagaagttcagcgctttaacagggatgtggatgagactatcagttggattaaggaaaaggagcagttaatggcctctgatgattttggccgagacctggcaagtgttcaggctctgcttcggaagcacgagggtctggagagagatcttgctgctctagaagacaaggtcaaagccctgtgtgctgaggctgaccgcctgcaacagtcccaccctctgagtgcaacacagattcaagtgaagcgagaggaactgattacaaactgggagcagatccgcaccttggcggcgttggatgcagtccgagaaactgcacctgtaaattctgcagtcactttaaattataaaacgagtatttgatgtatgatcgcggcgttggatgtagt

SEQ ID NO: 438166 - DNA, 582 bp, Homo Sapiens
  misc_feature (17)..(17): n is a, c, g, or t
tctcgcatcttctccanaaagtaattcccactggcggtgcagctccatcaaacgggtccgtatggtttcagatgcaaaatgcccttctgagatcatcaggtttccagtttcatccagcttaacaatggctcctgagttggcctgcacttcagcttcaaatgcttgatgcttctgaagctttccctgcaagttggttgggtctttataattctcatcagatgcaatctgaagtttttcctgtatccatttctccagctcttcagcatctctttgaaagaactggaatcgataggaatcttccagcttctgacgcctaagggttgagagttccttgaagcggtggtatcggtctaggacctgctgccgcctctcctggatgtcctctgctgtttccagcactttgaccccacttgggtccattttctggactctgcgtttacgaaacgatgacaacatgatggaggaatgtggagtcggctctcggggggtgaggggcgtgggtgcgtcgggccgaggggtgctgaaggaccgaggagcctccgcggcctccgctccacaccgttcactccgcagcgggtagtc

SEQ ID NO: 438167 - DNA, 665 bp, Homo Sapiens
gcccgacaagcgtattctatgttttggggcgcggttttttgaccccatcaaataactttattcacacaaacgtcccttaatttacaaagcctcagtcattcatacacattaggggatccacagtgttcaaggaacttaaatataatgtatcataccaacccaagtaaaccaagtacaaaaaatattcatataaagttgttcacacgtaggtcctagattaccagcttctgtgcaaaaaaaggaaatgaagaaaaatagatttattaactagtattggaaactaactttgtgcctggcttaaaacctccctcacgctcgtctgtcccacacaaatgtttaagaagtcactgcaatgtactccccggctctgatgaaaagaagcccctggcacaaaagattccagtgcccctgaagaggctcccttcctcctgtgggctctcctagaaaaccagcgggacggcctccctgctgataccgtctataaccttagggggccctcgggcaggcaaactcatctcggtgatggctgtagatgctaacactggccaattcaatgccacacctactggttaccccttttgaggggcatttctccagacagaaggccccttgaagcctaggtagggcaggatcagagatacaacccgtgtttgtctcgaagggct

SEQ ID NO: 438168 - DNA, 967 bp, Homo Sapiens
  misc_feature (164)..(164): n is a, c, g, or t
tgaagaaataaatttttttaatgaagtgttatttgagcattctggagcatcatacaaatataggacagactgaaggaatatatgcagcttaatttgagttaacattttttgaaattttatattgcagaagttgtacgtatttactgttgtgaaattagaaaganttgataggcaaggagggtggtctacaaagcactccctagatccaccatactgagacaatgcttaatgctttgatggatttatttattttatactttctatgcatgtgcatgtattgtatacatacatgttcatggttaaatataaacagttatccttggtgttctgtttatccatttattgttatgaagtaaatccccaaagagtacatttccttttgcccgagggagtcttttgctacatactgcagtacataatgaaaactaaaaaagggggctaacttttcagccttgtgacattatggtgattcaaacagaggcttcatcaaaggcagattcagcaatgaacttggtgtgtataggtggttatgcttggcattactgcctgtaatagtatgatagggatgatttcagtgtctgccaaatgggaactggttaagtaaactgtggtacatccaaatgatgcatactgtgtagctgaaaagaatgagaaagactctgtactcacgtagaactcggatatattctgtgtgttttttaaaagggagaaggaatggtatcgtatgtgtggtatgctactttttgtgttgagagagaagggtagaataagaatatacatgtgtatttgcaaagataaattctgaaatgatatataagaaatgaattaaaagtgtttggctgtggaaggagaataagactgtgaatgggattttgccacatacttttatagacagttatatttaaaaattttctggactatatatttgtacatatgacgcttttaaaaatgagtgaatgaaggaatg

SEQ ID NO: 438169 - DNA, 1720 bp, Homo Sapiens
  misc_feature (138)..(138): n is a, c, g, or t
  misc_feature (146)..(146): n is a, c, g, or t
  misc_feature (996)..(1036): n is a, c, g, or t
ggttggatttttagattttgtcacaggaaaatcatgcttggatgctcgaggcctggcagaaccttgctggtctctgtagggtgggataagtgaagcaacattaaaccaggtgcagtccttaatttctcaggtaacatnactttagnaaaaacaattcctaatacaagttaactcctgtctggttgagcaaatggacaccatctgtatacaaacgtcagataccaagaaactcagatctttacttagtgaaaccttccactacttatgaaaagtcaaataccatttataactcatctagatcaaccagtccctagacactgatttttgggaaggatttttagagaattactgactcagatttagggcttaaagactattgagaaataggaaggtattgagagactgggtttcatcagagcggacttaagtaacctggttgatcttagaattgtcacagcaaaatcatcatgctcagatgcttggggcctggcagaaccttgctggtctctgaaggatgggataaatgaagcaacagtaaatcaggtgcactccttgatttttcaggtaacataactttagaaaaaaacaattctaatacaagtgtaaccttatcctgttaactctgtttcaaaaataattctaaaacactaagacaatgcttatcctattgcctccaaaataggattttgtattttaaatggtttaccaaaaaatgtatcttatacttttgggtaaacttttattttgttatacaaccaaaaatcttaaaactatcttagtacattaacgttttaacaggtcaacttttagtctttatgagcagttttcacaaagttttactcgacatttaaaaaatgtagttaacatactgtagatgcttcaatattgctgcttattctttgtaatcttatttggcataatataatcatgttcagagttattttaaagtaacttaaagtgaacagacgcactccctcctccccccaccctcaattnnnnnnnnnnnnnnnnnnnnnnnnnnnnnnnnnnnnnnnnntaagattaggttctaggaggagggaaaccctaatccaagtgtggggatacagaagtcagctttttgcacccattctccatgctacagaataaaatttgagactacagccaaatattttctaaaacctttcaagacgctccagtggatttctggatttgttcctttaaaatcaggatactctgcctttgcttaaggggcagcatggcaatctgatctgcagtcagtgaagaacctgcctgatcaaagcttgctttttcctgatccttggggagtgaccctgcctctggcccaggacctaaaaactgcttaggcctggccttccaacctttgctttgcttggcccccctggattaaccccccttctttggtatccccttcctccctcttgtttacccgcctctctcttttctatgcccttgccccccctgcatatcacttcattactatgaaatacccttgaatcccctgtaagcctcctgtacctcttttttgccctggtacctctttttatttctcgtcttacaggtttttccccaatccctcttaatatggccgcgggcaccttgacgcggttccctctgatgtggaggccacttttctccctcataatacaggggtccctctgaccctcttcaatttccccctgtttcattggtgccttttttgaaacttggggacccagcg

SEQ ID NO: 438170 - DNA, 402 bp, Homo Sapiens
  misc_feature (389)..(389): n is a, c, g, or t
gatttttggttgtataacaaaataaaagtttacccaaaagtataagatacattttttggtaaaccatttaaaatacaaaatcctattttggaggcaataggataagcattgtcttagtgttttagaattatttttgaaacagagttaacaggataaggttacacttgtattagaattgtttttttctaaagttatgttacctgaaaaatcaaggagtgcacctgatttactgttgcttcatttatcccatccttcagagaccaggcaaggttctgccgggccccaaggcatctgaggcatgatggattttgctgtggacaattcttaggatccacccgggggtactttaggtcccgttctggatggaaaccccagtctcttcaataccnttcctattttctt

SEQ ID NO: 438171 - DNA, 438 bp, Homo Sapiens
aaacccctaaaagtgtagtgactgtgggaaaactttcaaacaaagctcaaacctcggtcagcatcagagaattcatacaggagagaaacccttcgaatgtaatgaatgtgggaaggccttcagatggggtgctcatcttgttcagcatcagaggattcactcaggagagaagccctatgagtgtaatgagtgtgggaaggcctttagtcaaagctcatatctaagtcagcatcggagaattcacagtggagagaaaccttttatatgtaaagaatgtgggaaagcttatggatggtgctcagagctcattagacatcggagagttcatgccagaaaagagccttcccattgaattgaaggggagaacgtctccagacagaattctacatcggtctaatctactttaggactggatcccataaaagttataagttcctt

SEQ ID NO: 438172 - DNA, 498 bp, Homo Sapiens
gctgccaaaagcctttaatatgccctggatgtttgtcgttctggacagagagtcctttagccatgtgcgaatgggccaccagctggacctcagggcctctgaggagttgatggaggccacagctcttcgcatctttcaagggcacctggagactgaggagtgcgaagtctctttctgagctaagggtgaagtccacctttggggagcaggggacattattacgagatgggtttctcaggaacactgatcctttcactacctgtcctcggggcacatcctggagctgcacccccaccgatagggggacccccagatgaaccacagaaggagagaacaagagcaacctgggcttctgcagagataaggtgaagaagctggatgcccagatcagcccccagagcagcctcatggctggaggatcccagagaggttagatccgtctgtctgtctgctaccttctggccaagctaggcctcggggcagagttgactctccgct

SEQ ID NO: 438173 - DNA, 1063 bp, Homo Sapiens
gagatcccatcagcgaagctgtggggatgtttccgactcgtttcagagtcgatattggctcgcccctgatggagggcactcttcagtctccgggggacatcagagtcggtctgggatggggctgactcgctgactgaggtgggaggggtttcatcacactgtcggccctgttgctttcctcctggaggcggtggggctccccctgattgagtgaggggcttttcagattcttcagtgggttcttcactggcaaaccactccaagaggattgggattaatgaaagagggtgaaagctctgtcttggggtgcttgtattcacaagaggacacgaggcatagatcgacatcctgacgggcttctgagggggacttcttttctgccgtgtagcataggtctgaagtctcgtaggaatatgtggatgcctgaggggttctagtgattttctctgcagtctcgtaacagtatgtggaagtatcaggggttcgtgttgtctttgtagatgtctcataggaataaccttcagactcagggaaactggtaattttctcagtggtttcataagagtagctggggtccccaagtgtgtggccaccatcctcagagtcatcatagccattgctgatgtcatccagaagccttctagacctctcagtcttttcatagctgtaaccactcacttcgggggggctggtggtcttttcacttatgtcatatgagtacccaccctcttcaggggtccgtgtggtcttctcaataatttcataggaatagtcaccatcttcaggggtcttggtagttttcccaatggtctcataggagtagccactgtcacttggagattttgtggttctctctattttctcatagtaatagccacccacatctgaggtccgggtggtcttctcataagactcatagtcataatcttcttcatctggggacctggttgtttcctcaggcttttgataggcatagctaaagtcaccaggtgtcttccctccactgtccttctccaggccaggtgtggacaaatctctattcaaggctagatggtgttgcatt

SEQ ID NO: 438174 - DNA, 1122 bp, Homo Sapiens
  misc_feature (95)..(127): n is a, c, g, or t
  misc_feature (137)..(137): n is a, c, g, or t
gacccccccttttcccaaaaaaacacgggggtacgcgtaaaaccttggggccccttgaggggaattcttttagaaccggcccgcccccgaaatannnnnnnnnnnnnnnnnnnnnnnnnnnnnnnnnatttattttnttccggcaagcagatttttatttagatggaaagataaccaagcatttccttcttaggtaagtggtaaggaaatggcaaggtccagccaaggcccccagaggagtgagggacattactggctatgggaatggggtacttatgaaatctaagggttgggtctcctgatgaactctaactacccagtaagctcttctctttggcactcaatatgaccactgctggcatgaaagggtctacagtagctacttcaacttggccaacagttcttccagttctggtcgagctttgaatcgtcccttgaagtcttcttcagtgtgctccttcactgacagtctgattccttccaggaagacttgctttggattatttccaagaaaatttctgcaaacgtagcactcaaaccgctgatctgaaccactcgctcatgggtggtaagcactgagtccaggagcattttgctgccttggtcctgcaactgcaacacttctatggttttggttggcattgcataactttcctcgactttaatggagagagagttgcagaggttgtgaacatactgggcataactctctgccagggtcatatcatatgcagtcagatgaatatttaaaaccccatattcataatctgtccccaaattaatggctctcacttccacttttcccttcttcttcttgggctcttctgctttaattaagtgcttgtactttccaatgccgtgggtgggctttgtcttgtagggccgactgatacttagtagaattccacctacagaatagatgggcttctctcctgaagttctaaaccttaagagagaaaaggcttgcttaaaaatggtattgttcctcaggcacagcaccttttccaaggttccgctcatcctttgctgctgcgcggcctctagctgtgcaaaccgaagaccggaccctgcagccgcgttcccagggcgtctgaaaacactgaaggaacggccttgaccccc

SEQ ID NO: 438175 - DNA, 1150 bp, Homo Sapiens
  misc_feature (155)..(219): n is a, c, g, or t
aaaaaacatttttccaagccccggggttgttaaaagagggggccgggccctagtttataatgcgcccccctatgggggcccctttgtccaaaaaaactgggttcgggtaaacttggggcccctcgaggagtactttagaggcggcccgccttttnnnnnnnnnnnnnnnnnnnnnnnnnnnnnnnnnnnnnnnnnnnnnnnnnnnnnnnnnnnnnnnnntatacacatctgcagcagatttttattagatggaagataacaagcattacctcataggtaagtggtaagaaatggcaagtacagccaagccacagaggagtgaggacattactggctatgggaatgggtacttatgaaatctaagggttgggtctcctgatgaactctaactacccagtaagctcttctctttggcactcaatatgaccactgctggcatgaaagggtctacagtagctacttcaacttggccaacagttcttccagttctggtcgagctttgaatcgtcccttgaagtcttcttcagtgtgctccttcactgacagtctgactccttcaggaagactgctttggattatttccaagaaaatttctgcaaacgtagcactcaaaccgctgatctgaaccactcgctcatgggtggtaagcactgagtccaggagcattttgctgccttggtcctgcaactgcaacacttctatggttttggttggcattgcataactttcctcgactttaatggagagagagttgcagaggttgtgaacatactgggcataactctctgccagggtcatatcatatgcagtcagatgaatatttaaaaccccatattcataatctgtccccaaattaatggctctcacttccacttttcccttcttcttcttgggctcttctgctttaattaagtgcttgtactttccaatgccgtgggtgggctttgtcttgtagggccgactgatacttagtagaattccaccttaagagagaaaaggcttgcttaaaaatggtattgttcctcaggcacagcaccttttccaaggttccgctcatcctttgctgctgcgcggcctctagctgtgcaaccgaagaccggaccctgcagccgcgttcccagggcgtctgaaaacactgaaggaccccgct

SEQ ID NO: 438176 - DNA, 1470 bp, Homo Sapiens
  misc_feature (75)..(75): n is a, c, g, or t
  misc_feature (204)..(276): n is a, c, g, or t
  misc_feature (993)..(993): n is a, c, g, or t
  misc_feature (1150)..(1150): n is a, c, g, or t
  misc_feature (1163)..(1163): n is a, c, g, or t
  misc_feature (1167)..(1169): n is a, c, g, or t
  misc_feature (1188)..(1188): n is a, c, g, or t
  misc_feature (1190)..(1190): n is a, c, g, or t
  misc_feature (1229)..(1229): n is a, c, g, or t
  misc_feature (1263)..(1263): n is a, c, g, or t
  misc_feature (1273)..(1273): n is a, c, g, or t
  misc_feature (1314)..(1314): n is a, c, g, or t
  misc_feature (1326)..(1327): n is a, c, g, or t
  misc_feature (1329)..(1329): n is a, c, g, or t
  misc_feature (1355)..(1355): n is a, c, g, or t
  misc_feature (1371)..(1372): n is a, c, g, or t
  misc_feature (1376)..(1377): n is a, c, g, or t
  misc_feature (1465)..(1466): n is a, c, g, or t
caggtctgtagggcagagatacaagggtacagtgtaattcacacagagacattttcaatacagtttatcataagnacttcaggttctagcttatgtatagggataagtgtgtagtcttcttctttccttctgtctggtgaccccttaggggcaagaactgtgcattacttatttgtattcatccaccctccatcttttcatccnnnnnnnnnnnnnnnnnnnnnnnnnnnnnnnnnnnnnnnnnnnnnnnnnnnnnnnnnnnnnnnnnnnnnnnnngtggaggttagataagaacagagaggctttaaaagcaatcagaagactttatcatttcttgttatgaagatcaggcacgcagcaagaaaaggagactactatggtagtataggcaagaaattaaggtagcttctaaaggaggtgtttatggtagatacgagtagacaaatgtgagagatatctaaaagaaggcttagatataatagtctttcaacagtatttaccgaatgaagtaacttgtcatagaaggaaagtgtggcttataagagttcaggattgtacagatctgagtttgtctccttcaagctcttctgcttaagacctgcacggctttaggcaaattacttaacctctctaagctttagtttccttagctgtcaaatggggacatgagcaaaagggatagagtttccatggacagaatgaatcaatgcttgtaaagtgattagcacaaagtctgtcactaactgactctaaaatgctactacttacattataataaatgttaaataccattctttaaagagtgacaaatggttatttcccacacaggttggaatatcactctattaagtagaaataaactttaaattatgtccatgttttctggtacaggtggatatagggtgaaaatgcgtacagtcctcagagagtatgaccatcagtgagctcacgctgctagaacagaagggatcattgtagaacaaagcaacaganaatgcccaggtctccctgggcacggtccattgtgcattaaacattgggcaagaagttcacttagagtcatggtaattgcattacttattgatggcagcaggtaactatttcttctgccagagatttttatcttttgaggaaggggagaaagcaagangcattcagtggancaannntggttttctgcggaccctntnactgttcaggtagagaggacagggatgaaagtgtggatnatgtttaaggcacccttgaggtcctctacatganttttctttantaaccttaagttctccactagttcctagtaaaggggcaatntctaaatattgnntngaaacacccaaacagccattcttctntccacatacatacatnntaannccacagaactcttcaaagatatgactcacagctgtttaatgttccatacataatatgaactctttttgatgttcttgtttacaaaganntaaa

SEQ ID NO: 438177 - DNA, 730 bp, Homo Sapiens
  misc_feature (655)..(655): n is a, c, g, or t
cgccagcttggacgaggggggcaagctcaaacgcagggctgacagggagggatggccccacagccggctgcacagtgcccctgccaccccgcctgggcatctgcctggactatgagcggggccgggtttccttcctggatgctgtttccttccgtgggctcttggagtgccccctggactgctcagggcctgtgtgccctgccttttgcttcatcgggggtggcgcagtacagctccaggagccagtgggcactaagcctgagaggaaagtcaccattgggggcttcgccaagctggactgagccttccaggcccctcatgcagacctggggtcctcctgggccctggcccccaaacctcttggcacccggttgttaccccctggcagcttctcccccaaactctcctaccatgtggccctgctccttctcccgtgtcttgtcttccccacagttttctcttgacccaggggctctcttctgcccacctctctggatggcccccgttctctccgttgcttgttagccaggcccccacccccactgagtctgccctatgacctgcctttggcatgttacccaagccatggagagagccccttctccatccctgtcctgtgccccccaggctgattgggagggagggcacctggaanactgggcatgatctccagctctgcccttgccctgccaagctccctgccctgttgatgctgaactacagccttggg

SEQ ID NO: 438178 - DNA, 804 bp, Homo Sapiens
  misc_feature (341)..(387): n is a, c, g, or t
  misc_feature (555)..(555): n is a, c, g, or t
  misc_feature (657)..(657): n is a, c, g, or t
  misc_feature (702)..(702): n is a, c, g, or t
  misc_feature (755)..(755): n is a, c, g, or t
gagaaatcggctggttgttccactctcttcattacccacctgcatgctacaggatgtacatagccagaggatcactttggaggcatttcatttcattggcgggcgagggggcagttcttttggcctagttgaatattaggcatatctggatctagtctagccccgacctccttacaagtctttgtgctacaaagtccagcgttggtgtggtttttcaaggaaggatatagaatggtttattttggatgagaatttcattttgtgtacctgattttgtaatatcttttcctcttaagacaaggtttcactatgttgccccagctcggtctccagctccaagnnnnnnnnnnnnnnnnnnnnnnnnnnnnnnnnnnnnnnnnnnnnnnngaacgtaccattgcgcccagcccttgttttgtttttaaaagctgtcgtgttactgcttaaagtctccaaactgttattgagaacactgaccagagccctgtccatagaccagtgtttttccaagtgcagattgcaactcctttgcagagtaggttgtggagccatttnagctgactactcaccagctttcttcaaaatgtaaatggaataggatagaaaaataatgaaaaattgtaaagtgaattggatgcaaaaagggtaaatattgtngtgtcagacttttttgggtgagtgtgcatgtgttcacatactggntcacattataacatgtattgctcattatgggttgtggtcagaaaaaattcagnaaacgctgtctcagactgtccccaagttgtatttgcttataatgggact

SEQ ID NO: 438179 - DNA, 1604 bp, Homo Sapiens
  misc_feature (54)..(63): n is a, c, g, or t
  misc_feature (75)..(87): n is a, c, g, or t
  misc_feature (363)..(363): n is a, c, g, or t
  misc_feature (994)..(1006): n is a, c, g, or t
  misc_feature (1492)..(1492): n is a, c, g, or t
atagagagaaaccccccgggggggtgaaaagggaaaataaaatttcacgggggnnnnnnnnnncctttttaaagnnnnnnnnnnnnnattatgggaaggtcccttcaagggattgtggaagtgaaaacttcccgagggggccccatccttcggcgggcccttttagaagccctggggttggccggtgccctttcaggggaggcagtggaggtttattttccaaaccaaaaaccccccccaacccaacccttagacccagggtgcagaaggcaattcattacccccctcgttgggcaatgaaaacatccccgggcacggaaatagtttgatatattggggtgcccaagttttgttttcccgcanttcatcacttgttggcctgacaaagaactatcctgtcttcccaaagtcaatctcacccctgaaattagggaggggaaaaaaaatcccagtttaagcaaccaacaacaacgaaaggtcccccagtacaatacaaactacatttaaactggtcacattatataaaaagtgtgcatttaatcttcaaaatagtcaaggctctaatcaggttaggttttccatagttttaagcaggactttgtggttttagtgaagaagtcatggtgcaattgaaatcactgtaagaaataagtgacttttaaaacaaacacagacacacacactcctcttaagagtaatatatacacaacacagcagctacatgggtgttcaggcaaagggtgcatgaacgagaagccctctgctccctgcccgatgagaaagtccccagaaaggattcagcagcagcaagtctacagcacaaacatggatggcattgtccctgaaaacacacagttaggtggacctacaggagacattggagcctagacatgtgggaaagggctcagttacagtacattctactgcatacacttgaaatattacagtgtgttttttctccagactattataaataatttttcgtgctttctgnnnnnnnnnnnnnctgaaactttcaagtctgcgatgaaggtgaaccccatcttataaagcagagcttacttacattctgcaggattttggtgtggatgcatagaaggcttacctggttagtaagcctccattcctccgacctacagaaggcaacccttctgcagctccaagcagggatttctagaaaagaccaggtgtacaaaacatctaagctgtgctcttcaccacaggtggggaagtcccctgatttggtcagacacagatgaatgtctgtgtctgactgagcccagaaacagttcaattgatgggggctggaaccaccaagaaaacactcctgacctgggcaacactgtcttccagattattaatacttttgttttaaaaaaatccaaatggttttacaacccgtgacttctttccaactcaaagctgtagtttacttacaacacaaattctaaacacatagactgtatatacagattttttgaacccacaaatnaaaaataccctccctggagttgcagaatgaaggctgcagaaatggggcccggagatctgccacttttaaatggtcagtacttccctcctggctgcttctaggtgccaagggc

SEQ ID NO: 438180 - DNA, 1825 bp, Homo Sapiens
  misc_feature (1602)..(1602): n is a, c, g, or t
  misc_feature (1617)..(1617): n is a, c, g, or t
  misc_feature (1629)..(1630): n is a, c, g, or t
  misc_feature (1647)..(1648): n is a, c, g, or t
  misc_feature (1668)..(1668): n is a, c, g, or t
  misc_feature (1686)..(1686): n is a, c, g, or t
  misc_feature (1729)..(1729): n is a, c, g, or t
  misc_feature (1732)..(1732): n is a, c, g, or t
  misc_feature (1736)..(1736): n is a, c, g, or t
  misc_feature (1738)..(1738): n is a, c, g, or t
  misc_feature (1744)..(1758): n is a, c, g, or t
  misc_feature (1823)..(1823): n is a, c, g, or t
gccctgctcccgggagagggagctctcgggtcggggctagggaaggctgaccccgctcggcccgggtgaaagggcggtgacggcactgggtggggccgagctccagggctggctgctgggctgctaagggaactgtgagccgctcagagccgcgcgcctcccgggcggggcggggccggccgtgggagtccgcgcgtgcccgcgccgagctgcctgctccggcggcttcgctgctagctcgcggcgacgtcgggccgattttcccaggatgacagagctgaggcagagggtggcccatgagccggttgcgccacccgaggacaaggagtcagagtcagaagcaaaggtagatggagagactgcatcggacagtgagagccgggcagaatccgcacccctgccagtctctgcagatgataccccggaggtcctcaatagggccctttccaacttgtcttcaagatggaagaactggtgggtgagaggcatcctgactttggccatgattgcatttttcttcatcatcatttacctgggaccaatggttttgatgataatcgtgatgtgcgttcagattaagtgtttccatgagataatcactattggctacaacgtctaccactcatatgatctgccctggttcaggacgctcagctggtactttctcctgtgtgtaaactatttcttctatggtgagacagtgacggattacttcttcaccctggtccagagagaagagcctttgcggattctcagtaaataccaccggttcatttcctttactctctatctaataggattctgcatgtttgtactgagtctggtcaagaagcattatcgactgcagttctacatgtttggctggacccatgtgacattgctgattgttgtaacacagtcacatcttgttatccacaagctatttgaaggaatgatctggttcattgtccccatatcttgtgtgatctgtaatgacatcatggcctatatgtttggctttttctttggtcggaccccactcatcaagctgtccccgaagaagacctgggaaggcttcattgggggcttctttgctactgtggtgtttggccttctgctgtcctatgtgatgtccgggtacagatgctttgtctgccctgtggagtacaaccatgacaccaacagcttcactgtggactgtgagccctcggacctgtttcgcctgcaggagaacaacattcctggggtgatccagtcagtcattggctgggtatgtgccactcacaggggaaaacggtccggatgtaccccttccagattcacagcatcgctctctccacctttgcctcgctcattggcccctttggaggattcttcgcaagtggattcaaacgagcctttaaaatcaaagactttgccaataccattcctggccatggaggcatcatggatcgctttgactgccagtatctgatggccacctttgtcaatgtatacatcgccagttttatcagaggccctaacccaagcaaactgattcagcagttcctgactttacggccagatcagcagctccacatcttcaacacgccgcggtctcatctgatcgacaaagggatgctnacacccaccacagangacgagctaggnnccacccacgcgcgcccnngagaacacgcgaacagaacngacgccaggggcaggtcnccaaggcaagcccagctggtgtgacttagacaatgacgaggcntcnaccnantcgtcnnnnnnnnnnnnnnntggagggtattttttatttgtgggttcaacaaaatctgtatatacacgtctatgtgtttagaatntg

SEQ ID NO: 438181 - DNA, 1957 bp, Homo Sapiens
  misc_feature (459)..(475): n is a, c, g, or t
  misc_feature (1800)..(1800): n is a, c, g, or t
atatatttgcgacggttatgaaagaggcgtagcgccttttctacggggtctggaaagctggggtgattttgtgaaaagggcaccggggtggtcctaaaatcattaatagatttggacctcgtcccccccgacgagggagggggaaggacccctgtggtttatgttcaagaccacaagattaaatgttcggtgttttgagaaaaggccccggaaaccagtttccaattgattggggggggtggaaccccccaaaggaaaaccccttcctgggccctggggcaaccacgtttttcccagatttattaattcctttggttttaaaaaaaattccaaatggtttttacaaccccgggctttctttccaactcaaaggctgtagtttacttacaacccaaatttttaaacacatagactgtatatacagattttttgaaccccacaaataaaaaataccttccnnnnnnnnnnnnnnnnngacagtgagttgaagcctcgtcattgtctaagtcacaccagctgggcttgccttggagacctgcccctgctcagttctgttcctgttctcctggccctgggtggcccctactcgtcctctgtggtggatgtcagcatccctttgtcgatcagatgagaccgcagcgtgttgaagatgtggagctgctgatctggccgtaaagtcaggaactgctgaatcagtttgcttgggttagggcctctgataaaactggcgatgtatacattgacaaaggtggccatcagatactggcagtcaaagcgatccatgatgcctccatggccaggaatggtattggcaaagtctttgattttaaaggctcgtttgaatccacttgcgaagaatcctccaaaggggccaatgagcgaggcaaaggtggagagagcgatgctgtgaatctggaaggggtacatccggaccgttttccagccaatgactgactggatcaccccaggaatgttgtactcctgcaggcgaaacaggtccgagggctcacagtccacagtgaagctgttggtgtcattgttgtactccacagggcagacaaagcatctgtacccggacatcacataggacagcagaaggccaaacaccacagtagcaaagaagcccccaatgaagccttcccaggtcttcttcggggacagcttgatgagtggggtccgaccaaagaaaaagccaaacatataggccatgatgtcattacagatcacacaagatatggggacaatgaaccagatcattccttcaaataggttgtggataacaagatgtgactgtgttacaacaatcagcaatgtcacatgggtccagccaaacatgtagaactgcagtcgataatgcttcttgaccagactcagtacaaacatgcagaatcctattagatagagagtaaaggaaatgaaccggtggtatttactgagaatccgcaaaggctcttctctctggaccagggtgaagaagtaatccgtcactgtctcaccatagaagaaatagtttacacacaggagaaagtaccagctgagcgtcctgaaccagggcagatcatatgagtggtagacgttgtagccaatagtgattatctcatggaaacacttaatctgaacgcacatcacgattatcatcaaaaccattggtcccaggtaaatgatgatgaagaaaaatgcaatcatggccaaagtcaggatgcctctcacccaccagttcttccatcttgtcctcgggtggcgcaaccggctcatgggccaccctctgcctcagctctgtcatcctgggaaaatcggccngacgtcgccgcgagctagcagcgaagccgccggagcaggcagctcggcgcgggcacgcgcggactcccacggccggccccgccccgcccgggaggcgcgcggctctgagcggctcacagttcccttagcagcccagcagccagccctggagctcggc

SEQ ID NO: 438182 - DNA, 1062 bp, Homo Sapiens
  misc_feature (10)..(11): n is a, c, g, or t
  misc_feature (128)..(144): n is a, c, g, or t
  misc_feature (251)..(252): n is a, c, g, or t
  misc_feature (301)..(301): n is a, c, g, or t
  misc_feature (917)..(917): n is a, c, g, or t
  misc_feature (956)..(956): n is a, c, g, or t
  misc_feature (974)..(974): n is a, c, g, or t
  misc_feature (976)..(976): n is a, c, g, or t
  misc_feature (1006)..(1006): n is a, c, g, or t
  misc_feature (1032)..(1032): n is a, c, g, or t
  misc_feature (1056)..(1056): n is a, c, g, or t
aaaatcaaannggttacagcccgtgacttctttccaactcaaagctgtagtttacttacaacacaaattctaaacacatagactgtatatacagattttttgaacccacaaataaaaaataccctccnnnnnnnnnnnnnnnnngacagtgagttgaagcctcgtcattgtctaagtcacaccagctgggcttgccttggagacctgcccctgctcagttctgttccttgttctcctggctttgtggtggnncccctactcgtcctctgtggtggatgtcagcatccctttgtcgatcagnttgaaattgcagggtggttggggatgtgtggggtgctggtttggccgttaagtcaggaactgctgaatcagtttgcttgggttagggcctctgataaaactggcgatgtatacattgacaaaggtggccatcagatactggcagtcaaagcgatccatgatgcctccatggccaggaatggtattggcaaagtctttgattttaaaggctcgtttgaatccacttgcgaagaatcctccaaaggggccaatgagcgaggcaaaggtggagagagcgatgctgtgaatctggaaggggtacatccggaccgttttccagccaatgactgactggatcaccccaggaatgttgtactcctgcaggcgaaacaggttcgagggctcacagtccacagtgaagctgttggtgtcattgttgtactccacagggcagacaaagcatctgtacccggacatcacataggacagcagaaggccaaacaccacagtagcaaagaagcccccaatgaagccttcccaggtcttcttcggggacagcttgatgagtggggtccgaccaaagaaaaagccaaacatataggccatgatgtcattacagatcacacaagatatggggncaatgaaccagatcattccttcaaataggttgtggatanaagatgtgactgtgttananaatcagcaatgtcacatgggtccagccaancatgtagactgcagtcgatatgcttnttgacagactcagtacaacatgcngatcct

SEQ ID NO: 438183 - DNA, 900 bp, Homo Sapiens
tctcaaaatataatacattaacagacaatgatatagctctaccaaacattcacacgcaggcaacagaataagcctttgggtttaccaaggacattttacagtcaaagggccacctgccctccttccttccctgactacattctcagggaagcttttccttgcagacacttcgttgcaaggtcagctttctctctcagcacgttggcttcgtcggcgcttctgtgggcctgtgcgttctttagcaagaagtggctgatgaaaagcttcaaaccctcacgtaacacccccagctttgggttgtcagatactcttgtgaaaattaaactgaggtcttcaacttctgtttccattaataggatacttaatacttttcgtaaaaaacccggactctgggtttggtccaattccctgaattcaacttacctttaagatggaaagggaaagcgattttgtcttcaacaagtgggcccccaggatggacgcaaattagagaaattcgtaggtggcaagttttccaagtcccgaaatttgtcccatatgctgaactggaaagtcatctgaaatctcctttcatattcacagaatttgctagccaggaaagcatagaagggattgtaagttttctcttgaaggcagcaatccatgagaacgtgaatgatttctctctcctgctgatccttaagtccaagcttcagaagcttttcaaaagcatccaaaaaatcttcacttgtcattattgtgcagaatatgtttctccggatgtctgtgttcatcctctgcttccgggcgagttctaggatctttgaactgaccgtccccacaagctgcttctgcaggtgcgtatggtgactgttgtcgatcatcggggccccactccaggcggaccccacaatccacccc

SEQ ID NO: 438184 - DNA, 1241 bp, Homo Sapiens
ttttttttaagtgcgaagattttattaggcggtacaattccaaggtggtaagggtgaaaggaaaggcgaaggcaggcaaatacattattgagctgaaaacaactttacattcaaggacagcttccagacaagccatgtagaaccagcatgccttgggactgtgtggatggcagggagacgagtttctatgctgaccacttcatgctttctgccccctttggggaaagtatgcctcacggacctctaactctcccacttctctgggggcagcacctgacccctcccggcaactgctaggcaagagcattctgttccttcaaatttctcacctgagtctgagtcagagcatcccatcatcagagcctctgtcagggaggcagtgctgaagcatgaccttcacctgggggaggctgtcgggagatggcactggaggccaggcctctaccctaagcgagaggtgcaggccggggtggaggtggacggtgggacagagtaaatccggggaagcacatcaaccgggtctggtagggcatagccttcttggacttgagccattcctactgctgatgtccactgcttctcaatcgagaaacagcacggattcagctctcagattttgtaaactgtgattttctcccttattcctcaacaaccacctagccacgaccttctttaactcttcccccaaccccgaaacttttgaggaaatgacttttcttataatttgaatgttaataaaccgtacccatttagaaactacagtttgatgatttggggcgactgtatacgtcatgttgccgccgctcctattaagatatgaaattgtcccaccactgccccaaagttcccccgctcctgtgcattccattctgtcctgttccactcctttcccaggcaactgctttgcatcgccactgttgcttcttctagaatgtcctataaatggacatcagaccgactatggctttttgggttcttccccccacagcatcgtgtttttcagctccacccacgtggttttgggtattaatcctatggtagaactagctagatgctggagaactcattatgcgccggtaggtaattttaacctgcatcgtctcatctctattctgtcacaatagaggaaactgaggcacgcccggcgtgtgggcgtgtgagggggcaccgggccgacttccgcccgtcagtaggcctggacctgctggcacccgctgtcaaatcccgggaattccggaccc

SEQ ID NO: 438185 - DNA, 426 bp, Homo Sapiens
gctaccatttggttggacgaaggactgagagcaaaatgtattgattatctttatgtggaccatgacaaattgattttttaattgagacttcctattttcagggagttcagtgtctcgtaggaaaatagtaaattttgaaaaactttaaaatgttcatgccactgatcatgggaccacatgattgttgataagggaaggtaggacaggaggaagttcaagaattctcagggcagtccaaagcagaaggaaagggtggcatttcatttatgtatctgactgccatcttaactgtgttctctgtgaattgcctccaacaatatggagataattcaaaacaagcattaacaagatatagacagtgttttggagaagaagcaaaatagggtcctgacgtgcaaatcgtcgtccacccaatggagccggcta

SEQ ID NO: 438186 - DNA, 381 bp, Homo Sapiens
agcccctgtctggtgttgctgatttgggcaagaggcttctcttctttgaccccaagtctaaaatagctaagctagagattctccaggggccagggctcagagaaactgttcctgttgctgataatgatgtgccatccaagaacaggggtaccccaagtccctgccgaagtagcctgtaagtgctatgagtcataaatagagtgaccaatcactcctggttttcctcggacacagaacttttggttttaagactgtgatgggccaggagtgctggctcacacctgtaatacccagaactttgggagggccagggcagaaggattgcttgagaccaggagtttgagacaagcttgggcaacatagcaagaccttgtctctatt

SEQ ID NO: 438187 - DNA, 1405 bp, Homo Sapiens
  misc_feature (238)..(295): n is a, c, g, or t
  misc_feature (310)..(365): n is a, c, g, or t
taaaattcaatttatttctttataaagacatgatgtatttgttcactgaacaagggtagaaactgcttaaccatccccaatttcatttctctctgttatgctataaattagatgagttacctctgctaaggttacattctatggttaagttactttttactcgtctcaagtgtcaacatcaccagtacctatttctgcaaggatggaaatattctatatctgtacttttcagccattnnnnnnnnnnnnnnnnnnnnnnnnnnnnnnnnnnnnnnnnnnnnnnnnnnnnnnnnnnttcttaattaatttnnnnnnnnnnnnnnnnnnnnnnnnnnnnnnnnnnnnnnnnnnnnnnnnnnnnnnnncatcgactggactaacgaagtggtttcctaacttaaaccagaacttaaatttcaataaaaaatttaaaacgtttttatgaacttccaataggatcgcagtattacttttagtacctgttgactctaaaacttctaaattacagctcatctacatacaattgaaaaatagcaatatctgtatgtgtgagatatgactggttctagatgatgcctggaggccccatggacttacagagacccttccagtgatttctgaggtacctgggaatctgtggccaataaattggtagtcactgaatctgtgagtttttttggaatatcgggctgcataaaatctgacagcttgattgagaaaaagcggggcagggtgccatttcattcagttaaggtcctgtattcattccgtttaataaacgtttgtgtctgtctatgatgtgctagccactgtgccagaaaatggatatagctatggtctgattgacagaggaaatccaaactagtatcttccgtgccatgcaataagagctacattgcaaggctgcagagggtgctactggagcacagaagtgagtcaaaggcttcccacagacacacacacgagcggaaacaaagtctttatatatcaccatatgtcaaggaacactggccgggagttaggagagctgggcactaggaacgctttgaaactgaatagctgtgtgatttcagaggttatatttgcttgtctactatattttactgccgaacttgtactgtttctctcccttttcttcttggtgggaaaagcacaatttggggtcaacagattcggctcaggtctaagtcgcctgccgggaccacgtcgccaggaaacgacgtctccccgacaccttccctcccagtccgggctctctgcagggattcatcccgtcactctcccaacgaccctcgggcacacctcaggcagatgcgaaatatgccgctcctggggagcaaagatgacccggaggaccgggggagtaccttcccacatcccgggaattccggaccggtaccagcct

SEQ ID NO: 438188 - DNA, 1491 bp, Homo Sapiens
  misc_feature (360)..(434): n is a, c, g, or t
  misc_feature (482)..(520): n is a, c, g, or t
  misc_feature (1412)..(1448): n is a, c, g, or t
ccccggttaagaccagggggttattcgccagtggcgagccgcgccatggttaaccagggtttatccgaagcgggggttgttagccggaggcttccgaagtttttggaaggggtggcttagcttccgggttccattagaggaaccagtttttggttttttggcgttggggggaagccaagttcccttcgggaaaaagagttggtagttttggatccgggcaaacagagcgccggcgggtggcgggggttttttgtttgcaagcagcagtttacttccagaaaaaaaggatcttcaagaagaccctttggtccccaaaaaaaagccccctccttaggcgggttaaattcccgggtactgcannnnnnnnnnnnnnnnnnnnnnnnnnnnnnnnnnnnnnnnnnnnnnnnnnnnnnnnnnnnnnnnnnnnnnnnnnnacccctttgtacaagaaaaggtgggtcaggaaacagctatgaccatgnnnnnnnnnnnnnnnnnnnnnnnnnnnnnnnnnnnnnnngcctcgagggtggttttttttgtgttgtgtgtgatcctttacgttttacagtctttaattaagcacataaaactgtactatttaatatatttctccatgaactttttgtgaaattcagatcgcagtgtgtcatttacaaatcttttgtctttcttctggtcatctacaccttttgcacagttcttgaagacaacgtcatcatcccaccttcttttaactttgaagttggcctgaggctgggatgggccagtgagattaaggagagggtttccgctcagaatgttttccatacgaatcctctcttcttcagctttttgttcttgttccttcctggcctgctcttcagctctttcttttttaattttttccagttctgcaagaagagctgcagtatcatcatcatcactttcttcttcaaaatcttcatcttcctcatctgttagagggtcatctgcatcaaggttggcggcaggaatctggtctaaccgtggcttttttgacactgaagaggaggttgtatgttctcgggttggacgatccctatttttctctcttgcagcagctctctctctttcttccaactctctcctgaagtcacggttacgaacctcttcaggggcatcctgagtagtctgtctgtattttatctttgtatgagagggtaggtctctgcttgaatactgctttgaaagttggctcaaatcaccttctccttttccccttccacctctggcaggttcaaaggttggcctggctgctgttgtcatcttttatgactggccgaggtccgatgcagcaggctccgaagatcatacagacgccattaccactcttggctcccagaaacctctccgctctcgacgaattcgagctcggccgatttggcctgatnnnnnnnnnnnnnnnnnnnnnnnnnnnnnnnnnnnnncgccgccccgcgtgaactccaggcgccctatagtgagtcgata

SEQ ID NO: 438189 - DNA, 897 bp, Homo Sapiens
  misc_feature (13)..(13): n is a, c, g, or t
ttatgaatttccngcagtttccattaaaaacccctccacagaaaatgaaagaagatggatttggaaactccctgttttccaagtcaaagtacctaacagctagagggaacatatttttgctgccatgatttggcatattacttaaaattgatgtactgtagaaaccaggattgttggtgagatatgacagaaattggctttatactgtaaggagccaacacatctgttatcaaaaaatttcccttcttctttgtccagaggatattttagctgcaattcttgaatcaggaaatgaaactttactcagtttcatagagcaatcaagggaacgctatgacaatgcaggcttatttgcctggtatgcccatgctaattcagcagctgctatttttgactgagcattggtgtcttttggggaaacaaaggtatttttgattggtttagaagcattcacctgtcccatcttacttgtgagatttgccctccatatgtgcttgcacatccccttctccaccatgtccaatctcaaatttttttctgtatattatgtagtatgctctgttttggttatttaccttcctagttcagtagtatgtgtccttccatccatcatccaaaattacatagtcgtttagccttcttcttcagtgatggggtcatggttgcattggtattataaccattctcattatctgacctcttagaaaacatggtcacaatattcacaatgttaaaaaattaaactagcactatcttgttacaaagcacaccaattaatccacaggcaaagtcgaagatgaactattaataatcattatatacacttaagccacatcactttgaatgatgcaacgatggatggatgaccattctgaactacaaattatggttgccaat

SEQ ID NO: 438190 - DNA, 1598 bp, Homo Sapiens
  misc_feature (314)..(322): n is a, c, g, or t
  misc_feature (1557)..(1557): n is a, c, g, or t
ttttagatatgttgcttttattcaaaagaataaaatgcttgacaaactctttaatcacaaggtttgaaccaaaccaccagtcttctacaacaactctgtgaggtaggtatctgcatagccacaagggatccacatagtcctttcttcccttgtacctctcaaacactgagaattgtagtagttgaaaccactgttctagtgggcagttagaacagttgttttccccgtcttgttccccacagagctgcccaagttattatctgctcctggggttggaccatctgttttatgacagttatggatattgttgtttnnnnnnnnntccaaattgttactttgatttatatgatctaactctgaatcacggaagtattactatgatgttcaaaactctgattgactctacttgctttaaaaactctcagatcccttctgcatttatcatcagagatcggtaaagatgacaacaagcaggtctaaagttctgagatgttagcacatacccttttcacaatttaggaagctttaagatcatttagtatttttttatgttacaaaatttggtacaatacacctctttcaggaaagtcttagtagtacttccaaatattataattattgtaaccagaattgtgacacttggagcagaatgcatgcacacaaaataaaatcctgtcaaaaaatgacatcaccattcccccacaccaaatgtgtaattggtaggaaatgcatttccagtctggtacatggcagtgtgacaaactcctactcactcgcttttcaagttggtgactgcagctgaaatgtttttctgtgatgtatgccacccttttacctatttgatttggaagtgtagaattcggattcatgtcatctccacagacctttcctcttaggagtgcctaagctgtcttactctgatggaggtataatgtagcacgaaagacttccaaagaaccagtttctctcttgctgttcctcttaacaactttccacgtctatctaaacatttctatgcaggagtcctacctaagaaattttggtgtaatgcccactttgatcagttatttgttgtatgacttcattcaaaaacactttcatcaatagcatggggattgtatctatgaaagggaagttggtgtcctgcgttcctcacaaaattatccaaaggataaaatgaaaagtatgtgagaaacctgctttaattataatgtgctatgtttaagcattattgtttttctctatgacaagcaacagctctgtcctaggtccaaattagaaaaacacatattgatatttcattcagaatctcattaattggtagctgatctgattagctagagagaatgtgacagattttctccttatctcccagtctgcatatagtgaagctcactaataaattaatggatgatattaatagcagtgatctcagatgacaatgctaacactgactcctgggcatcccctcacatcctgctgtcatacattcactaatgagcaacgccagctgaagtgagtaagatctcccagtaccatgtggtactgagtcttctnagatacattcacttgtttggctcaagacatgaatctgagct

SEQ ID NO: 438191 - DNA, 411 bp, Homo Sapiens
gtaggcagtacaggatctcgtgttgatttgctgtggttacccagtgtcttctctacatggcataaagcggcaaagcccaccattaggtgaggcggtcccgagttgaggtagagtggggcagaggaagatggcagtgaatatcaaacagtagaccgccatcaacttctaacagccagtacacacactgtttcattttgaggtaacgttcagttttgcattttgtttaaatattgaaggcctagacaaagaactagaaagaaaaaagcagtttccaggcccatccatattgtaatttttctttatctgcagatattgcctgtagtctaaagatctctttggaagacaaagcattggctatatatcttttgccttttccatgcatctaaatctactcggaaagtgggtccgagc

SEQ ID NO: 438192 - DNA, 1241 bp, Homo Sapiens
  misc_feature (1193)..(1193): n is a, c, g, or t
  misc_feature (1195)..(1195): n is a, c, g, or t
tgggaccccctgggcaaaacaccccaagcctggcttcccgtaaaatcaatactcttggtatccggcgttctcgagttatgcgggacacgaaggacctgccctgcccacgcgaagcatcgactcctcccgtcggcattagtgaattcgagcctgaaggacgctcctggtggcccacgtgcggtaggcggagcaatataactggatgcagttcccggtctggcccaccggccccacctccgaataacaacatgtgctggactccccagggcgaaggcgcctggaaggtggggcatggctacacctggcgctccatccgcgggcaacaggcggatgcctggggggacaggaaaccgaggcggatccaagagaggagtggagaagggcagatcccctcctccgctcaagacttcccaccacactctctcccacgtccacgaggcctcggggtcgctgccctcccgtcccggctgggggccgctccccagcccgccaaagaggaggatgcagttggggccgaccccattttaagcaaagctacaatatagaaacatttggatttacaaggaacgtgggtgactatttgctttacattagcattcttcactctacaaaacgattcacctactatgtatgatgttcctccagatcccagggagaggaaatggtgggggtgtgcgatttaatttcagaaaatttcggtatgggcaaaaggcgacccgtctactgcagcaagcagaatgctcagctcaaggggaagccgttcgaaggaaaatggttcccaaatgccaatggtctccccacgccctggatgtggggaccctatccagagtccccttcttctctttggggtgtcacaggcccatccagagtggaactgggggctaagaccacggccacagactgtgggggcctggcgccactggcggtagttctgggaatgtcaggcccaggctcgtggacccccaggattggaggctttgtcaccagctgggtcttgtatcaataccaggaccagcgtggggatgagagggcttaagcagggatcagcctgaaatctgccgtctccaaggggaagccagttttagtctcatcagtggccgaggcagagaaaccacagcttctttgtgtgtgggaacctcagaactcacagaatcctggtcttttccctgcctcctttccctgcactgtgagtnantcgggcagaaggagctgctcccggggaccagggagtggggaagggt

SEQ ID NO: 438193 - DNA, 1628 bp, Homo Sapiens
aatactcagctcggtaccctctctccacactggtgagaagcatatgagtgtgaattccgcctaaaggctttgccacacatattgcactggtatggcttctccccagtatgaattttgtgatgttcaaggaggctgcagctctggctgaaggtcttcccacagtcatcacactcatagggcttctccccagtgtgggttctctggtgtttgataaggtttgagctgtgactgaaggccttaccacattcttcacactcatatggcttctcaccagtgtggactctctgatgaatgacaagggcagagctcccaatgaaggtctttgccacagtcttcacattcgtagggtttctcaccagtgtggattctcctgtgtttagtcaggcctgaactttgagcaaaactctttccacattcatggcaataatgtcgcctactccctatggcatttttctgctttctttgtaacctgccctcctgttcaccagcttctgcacatgtaggaatctgggcaatgtcttctctcaggtggcacgatatcttcccatgctccttttctggaagctcctcagctggaggcaagtccctgctcttagtctgtttttcatcacctagggagaccaggctgccatggttctcctgcttttcatctctacagagattcccctgagatgaatcctgctgtgtccattcaggggtgagggtcagggccacatcttccactttcaacaacccctgggactctggagtaagcctagaagctaccactttatcttctctgcagcatcctccatgggcaagctcggggacctggagaactctatcttgtaaaggctgggatcccacagattcatgcttgagcagagccttcattagctgaaattggctactttgtgaccctggggctggtgtcaatagtgccatcttgcaacagagcagttcttgcccctggtcaacacctgaaacctgcggcgccggctcatccagctgcctctccaaatactccaatagcaccaccacctcctccccgctctctggatgctgctcccgcacccagctctgcagattccccggcaggatggtcaggaactgctccagcaccagcagctccaggatctgctccttgctgtgcatctcaggctgcagccactgtcggcagagctctcggagccgactcagcgcctcgcgggggcctgcagcctccgggtagcggaagcctcggaagcgctggcgggagcgttcggggccccgagcagggctgcagggtgctctcacctccgccgtcaaggcggaggcttcctccttctccaccttcacggtcaggagccccgtctggtcttctgcagactgggcgtccagggctgcgttttttctcggttctctagccattctgacccaaggcagtactcgggtctcactctagttgcgacctgtatatcttcagaggattctggaagggtggtaaattttccagtagaactgcaagtggtccccctcctgtcatgcccaggggcccaggacaccccctgaggcgcagctgcacagatctctcttatagtccgtgcctttgcagggtcgtcctctgcaccccactcagaatcccacagtaagttcacatccgaaaattc

SEQ ID NO: 438194 - DNA, 455 bp, Homo Sapiens
  misc_feature (328)..(328): n is a, c, g, or t
tttttttgccccacttgctcctttattaactgttcttcctgtagtgtgtatttgggatccactgggaatcatagaaaggaatcagtgctaggatctgttgggattgcaccctgagggatgtggctttggcttctctatcaacctttctgttcccttgtgctataggagttaagtccctttgatgccccctacagtggattatagctatggcctgtggcaggtgtattgtttacaatagctgaagaatttcaggcccatgctttatgggggagggttttgctagctagtagtcccctttctttctagattgcagcataagcgtgaaccnccaaggaatgccatatttagaatctgtatagatgttaagctttttattttgtcccaaaattaatgctcgggtaagagcaatgatttcagccttttgtgctgatgtgccaaggggcagtggctgggct

SEQ ID NO: 438195 - DNA, 1080 bp, Homo Sapiens
  misc_feature (994)..(994): n is a, c, g, or t
  misc_feature (1006)..(1006): n is a, c, g, or t
  misc_feature (1023)..(1023): n is a, c, g, or t
gtaccggtccggaattcccgggatcgggcgtcgccggcgccgtgtgacttcgggctgtgggctcgctcgcggctcttcggccatggttttctcaaacaatgatgaaggccttattaacaaaaagttacccaaagaacttctgttaagaatattttccttcttggatatagtaactttgtgccgatgtgcacagatttccaaggcttggaacatcttagccctggatggaagcaactggcaaagaatagatctttttaactttcaaacagatgtagagggtcgagtggtggaaaatatctcgaagcgatgcggtggattcctgaggaagctcagcttgcgaggctgcattggtgttggggattcctccttgaagacctttgcacagaactgccgaaacattgaacatttgaacctcaatggatgcacaaaaatcactgacagcacgtgttatagccttagcagattctgttccaagctgaaacatctggatctgacctcctgtgtgtctattacaaacagctccttgaaggggatcagtgagggctgccgaaacctggagtacctgaacctctcttggtgtgatcagatcacgaaggatggcatcgaggcactggtgcgaggttgtcgaggcctgaaagccctgctcctgaggggctgcacacagttagaagatgaagctctgaaacacattcagaattactgccatgagcttgtgagcctcaacttgcagtcctgctcacgtatcacggatgaaggtgtggtgcagatatgcaggggctgtcaccggctacaggctctctgcctttcgggttgcagcaacctcacagatgcctctcttacagccctgggtttgaactgtccgcgactgcaaattttggaggctgcccgatgctcccatttgactgacgcaggttttacacttttagctcggaattgccacgaattgggagaagatggatcttgaaggattgcatcctgataaccgacagcacantcattccagctntccattcactgttcctnaaactgcaagccctgagcctgttcccattgtggaactcattcacagttgatgggggt

SEQ ID NO: 438196 - DNA, 1073 bp, Homo Sapiens
  misc_feature (735)..(735): n is a, c, g, or t
  misc_feature (933)..(933): n is a, c, g, or t
  misc_feature (935)..(935): n is a, c, g, or t
  misc_feature (944)..(945): n is a, c, g, or t
  misc_feature (958)..(958): n is a, c, g, or t
  misc_feature (972)..(972): n is a, c, g, or t
  misc_feature (991)..(992): n is a, c, g, or t
  misc_feature (997)..(997): n is a, c, g, or t
  misc_feature (999)..(1000): n is a, c, g, or t
  misc_feature (1003)..(1003): n is a, c, g, or t
  misc_feature (1017)..(1017): n is a, c, g, or t
  misc_feature (1024)..(1025): n is a, c, g, or t
  misc_feature (1032)..(1032): n is a, c, g, or t
  misc_feature (1035)..(1035): n is a, c, g, or t
  misc_feature (1041)..(1041): n is a, c, g, or t
  misc_feature (1045)..(1045): n is a, c, g, or t
  misc_feature (1058)..(1058): n is a, c, g, or t
  misc_feature (1063)..(1063): n is a, c, g, or t
  misc_feature (1066)..(1066): n is a, c, g, or t
  misc_feature (1068)..(1068): n is a, c, g, or t
ccttgtactcctacgacttactccctccttgtctccacccactcctccatgagaaccgagttgggaatttccacgggaagtcgggggtggcggggagaaacagggtagaaataaagagcgcatccttgagagggggtaggttctaggacaagggtggggctcaaaggccttgtctccacgacaacacaaacacagacttcaggcacagactacaaccacctgacccctgaccctgtgactgcaggatgttcaacacgccccctctccctccctccatgtgcaatctactctgtggagcaggggcttcagtgtacccatcagagggaaaggaagggtttagttctggaaataccttgggggggaggggttgagtagtagaatgggcgggtgatggtgaaactgtggttccccttccagaatatatacaagtccacagagataaaggaagacagtaagtgtggtgggagatcacccgggggccacagcgcccttgcatcgtgctccttattccctttcccgaaagctaccccaccccagtagcctgccccttcagtttgctcctccacctccaccgaagcccatctccaccttgtggactctgggtggggaccagacacgtctgctggacgggggcgtggccgcactcgcttcgtcgccgctgcccccgcccactccgggagactctctcttggacggcaaggatggccccgtgggagtcccaggcccaggtacggncccgaccccgcccaggcggtgccggcgctcacagtgtcctcggtggcgcatgaagctgtctcgccacatgaacttcttggcgcagactccgcactcgtagggcttgagacctgtgtgcgtcttcatgtgctcagtcagatggtgcttcatcttgaacttttttgttgcacacgggggagtgaaacgggcgacattgangngcatgttcnngtgcggtcccgcntgctcttggtgggnaaaggcttccacaatggcnnacaanannttnttcccgccccatgncagtccnncagggcnccnccaagntacnggcacaccaggtncccangangngcccc

SEQ ID NO: 438197 - DNA, 347 bp, Homo Sapiens
  misc_feature (294)..(294): n is a, c, g, or t
cttgatatcgaattcctgagacattagagagagagataggaggtagggtgatgctatttatacaggatggtcaggagaagccacctctggtaaagtgacatttgagaagacccctgaaggaggggggttgagtcatgtggacatcttgaggaagagtttgctggcacagggaactgcaagggcaaagtccccaagtactggggctgggggcagtgactgaggagatgtgtagctagaaatggatagcccttctacactgtggttgaggattggcttttacatggggaaataggnagatattaaaagtttctgagcaaaggagggacatagtttgccttctattgtag

SEQ ID NO: 438198 - DNA, 678 bp, Homo Sapiens
  misc_feature (618)..(618): n is a, c, g, or t
  misc_feature (649)..(649): n is a, c, g, or t
ggacctgaaatctcagaaagatgttttcaagttaaggaaataaaagcaccataaaccaatattaaatgacttatagtaatttagaaatataaaatttagtatttgtgatgcagaataatttccttctgaaactccaagatgtgtgagcattatcaaagccatttagaacagttacccagctgtgggaaagcatttccagaacagccaagaaaattccccaggagaaatccatttgcaaaggcaagtcacacccaattttgtagacctcacccaaattatacagtatggcaaaaacaaacaaacaaacctttaagtacagtagttccaaaacacactgctaaagttatgaaataattgtggatcatttcaagtaaaaattattaaaggagcaataattaaccacaagggggcatatatatatatactccttagattccagcagaaagactagttttaagtagtaacatgcacgttgaagtattctacattttcagtcacttaaactttcctctctcagatggctacaactttttaatattcgaggtttattttatatctaagtaaaaggattccagaatactcctgccctgcaaaacagtagtgttttagaagcctctnggaagtgttgctgtttaccctttagcaaagngattcaagagctattagttgtaataatac

SEQ ID NO: 438199 - DNA, 927 bp, Homo Sapiens
agatcaagattatgtcagttacataggttggttttaattcttatctaaaggtgtcgagtactttcaaaagagctatattccgagttgcctacaaaatcttttgttttattatagagtggaatggatcaagacaaattaggttttattaatgaaacagttcattccccaccggcgcatttcttgtgaacctaagaaaagcgaggggctgagcgatcgtttgtcgtggtcttcttcagtttcacgccccttcggatggcgttcagcatgtcttctccttgtggagtatcccttgggctcaggtctgcagggtcactctctggaatctggcctggggagacagtggcacttgggggttcccgttcctggtcttcagcttcactttctggaattgcctgtctgtgctcctcagggatactgggcttcgggcctggaagtggagggttaacggaagcttggccgctccacattgaggagggcatgctggtgacaccttgggggccctcacccacagatggcgactcaggggtgtgctccccccgctcttctggcccatctggaggggctggcaacacccctgggaggtctgggacggttggggtcttgacagggatcacgggtgtcttgatggggatgggaccagctccaatggttccccggcggacagaaggcttggtggaaggggtccgtcggatagttgcaaccctggagtgaccatagcaggtcccagggtggtggggaggccagcagttgaggctggacgcttggcttggaacatccgtcggtaggactggctgatgtcgctgtttcttggaatggtggaggacttgtcgaacttcctgctgatctgcctcctggtcaccacttacagagacataatcataatctgaaacttgggaagggatggtgtcctcagagcagcagggggtc

SEQ ID NO: 438200 - DNA, 1681 bp, Homo Sapiens
tttaggggaaataggggggcgggcaggggaaaggagcccccttccaagttgcccccggggagccttgggttttttgagggccagggaaggcttaaggaagtctggaggagggggcccaggggttggcctgtttgccgccgggcgctccttgtgggatgggcccgggaccccatgcagtcgccgttgaggggcggatactgcagctcccccccgggttttcccgccattttttggagctggggctgcattctcccgctcaattcagtgtttctgtcaccggcagattggtcacctcatgcaccaggaagtcttccctgcatgcactgctggggcaggttacgcagctgctccatggtctcatacatgccttggcaggagcgcagcttctccactgagcccagcgtgtggcgcagcaggaccagggccacccggaagatgatcttaacgccttcacagaaaaacatgtcccagacacgcagcaccgacgcccagggcagggtgcgggcgaagatgcacatgaaccactccgtcatgtagagcacagggtcaatgcgctgccgccgcaggtggcgatgcgccagcggggaggcccggcgcaggagtgcaaaaaagatctccccgtccagctgaatggcctccagccctgcactgtagtaacctgggaggtacttgtcgcagatctgcaccaggcaccaaaaggcttgctccgcaggcatgtgcatgagcaggaccgcagccacgggggcctgggcctggcagtaaccctcgtcaggccggtagatggtgtaggccttcaggattcggtacaggtcctgttgcccatgcccccctcgagcagcaaacatctcgtggaaagggaactggcggtgcaggtccttctcaatcacatccagccacttggggtccccaggagcccgttccagctcctcaaactttcctgggttctgctccagaagttccttgctattagacaggtactgccaggccttggctctgagagaggaggggatccccttccggcagcgcagcttcaccttctggaatcgccggtgacagccacttatccccagttactgaacatgtccagccatttgagctcccgctgccgagccacgtccacgggaatggagctctctaggctgcccgagtactggctgcccccaaggaagccatacttgtccgtcttgcgcagggccagcccgtttatctctgaatctgagcccatggagctcacatcatccgccaaggactccaaggtcccagacatgaggctcacggagtccaagtaactcagcgtgtccggggcctgccctcgaggcccagagatgccaggtcccaggctggacgtggagcccaggtcttgagagttttcagcaggctccggagctggggtcacggtcacgacagctaccggagcctcacaagtcccagaggggcctgtgccagggcctgaggggtcctcaggagcctgtcctgctgatgctgatgttgctgcggcagctccatgcccacctgtcacttgtcctgatgcactccgtcgcagctcactctctgaggccactgtggttcccggcttgggggcaagcgggggtttggcgctcagggcgccacccaggcctcgctaccttagaccgttatagtactgccgtcgttttacaacctgcttgttgacaattgacca

SEQ ID NO: 438201 - DNA, 932 bp, Homo Sapiens
ccgctcctttttcctgtttttctcggttcccttttcctgttcctctcggctctttctcctgggctgtggccgctccttttcccggtcccttttcctggtttctcccgctccttctcctgttttcggcgctcccttctcctgcttccgggtctcctggctggaaccaaggggggtgtattgcccagtgggtgagggaagggatggatgcagtccgctcagcaggtgaccagcaggccctggggcagggcccagcactggctctgcggacggggggcggcgggggacggggcccctgccagctgcccgggagcttcggctcttgaggccagggaggctgaggaggctggaggaggggcccaggggtggctgttgccgccggcgctcctcgtggatggcccgggacccatgcagtcgccgtgagggccgatactgcagctccccccgcgtttcccgccacttcttgagctgggctgcattctcccgctcaatcagtgcttctgtcaccggcagattggtcacctcatgcaccaggaagtcttcctgcatgcactgctggggcaggttacgcagctgctccatggtctcatacatgccttggcaggagcgcagcttctccactgagcccagcgtgtggcgcagcaggaccagggccacccggaagatgatcttaacgccttcacagaaaaacatgtcccagacacgcagcaccgacgcccagggcagggtgcgggcgaagatgcacatgaaccactccgtcatgtagagcacagggtcaatgcgctgccgccgcaggtggcgatgcgccagcggggaggcccggcgcaggagtgcaaaaaagatctccccgtccagctgaatggcctccagccctgcactgtagtaacctgggaggtacttgtcgcagatccctcgtgccgaattcgccacccagc

SEQ ID NO: 438202 - DNA, 1013 bp, Homo Sapiens
  misc_feature (661)..(661): n is a, c, g, or t
  misc_feature (806)..(806): n is a, c, g, or t
  misc_feature (814)..(814): n is a, c, g, or t
  misc_feature (856)..(856): n is a, c, g, or t
  misc_feature (946)..(946): n is a, c, g, or t
ttaagaattcagagaatctatggaagacggctctgcttgccgtgaagcaaagaaaccggggaccttctccagaacctctgaagttgatgttaggtccagctaatgttcgtcctctaaaaagaaagtggaattctctctcagttataccagtgctcaattccagtagctacactaaagaatgtggaaaaaaagagatgagtctttctgattgtctgaatagaagtggatcatttccactagaacaacttcaaagcttcccccaacttttacagaacatccattgcttagagctgccttctcagatgggctcagtgctaaacaactctctgctgcttcactacattaactgtgtcagagatgagccagtcttgctgaggttttattactggttgagtcaaacattacaagaagaatgtatttggtacaaggtgaataattatgaacatggaaaagaatttaccaacttcctggataccatcatcagggcagagtgcttcttacaagaggggttttattcctgtgaagcattcctgtataagagccttcctctctgggatggcctttgttgtcggtcacagttccttcagcttgtgagctggattccttttagtagcttctctgaggtgaaaccacttctttttgaccatctagcgcagctctntctttacatcaaccatttatttcaagtgtagtgttcttcagagtctgaaagagctattgcagaattggctgttgtggctttctatggacattcacatgaaacctgttacaaacagtcctctagagacaacttttgggtggatccnatgaactnctgtgtctaaactgattcacctatggtagggtggctatccanctactgcaatgcgcttggagagcaacaatactttcttgctgcactttattttggatttctatgagaaggtgtgtgacatatatataaatnataaccttccattagtgggtattgtttcctcctggggatccttctattctgcactcctcagcctggg

SEQ ID NO: 438203 - DNA, 388 bp, Homo Sapiens
  misc_feature (79)..(79): n is a, c, g, or t
attaaatctgagttttgtttgagcatctttcaacatgtaccatatttatgacaattctcttccataggatctatctgtnctgcaacaagtattgatcttacagtaaaatttttcacaaattcattagattctatgtctctttttctggtaggaatttttgtgcaggtagctatctcttgccctagattattctccttgtttagctgctgattcttaaactggcctctagatttccagatttcttccggtacagactttctctttgcaagttcttccatctctaatctttgagattaatcttcttttgaaatgtcctgctgctctactcttgtatgtcttggccccacgttcaagcttcccatctagcaaaaccagggtttctaatatt

SEQ ID NO: 438204 - DNA, 388 bp, Homo Sapiens
  misc_feature (27)..(27): n is a, c, g, or t
  misc_feature (133)..(142): n is a, c, g, or t
tctgcctcaagcctgtgtgtatttagnctatattttaaagcacttgataggaaaaggcgtatgcaaggtttttccaaaccatttttctgtttgtttgtttgataactgacaaccatttaagagtataatgagnnnnnnnnnnggaacaaactccctctcaaaactattgacctgctcatcccaaaccatgtatatgttgatggatggatgtgtgtttttgtggatatatggatttataccgtgcacagagtgatacaagcagtgttccatgcccacctgcaaagattggagggtataacactgtagtcattcagcccaggttcctcttaggaaattaacctttcaatttaaagctctctttccttgcctctccctctttccaaactct

SEQ ID NO: 438205 - DNA, 1469 bp, Homo Sapiens
  misc_feature (890)..(901): n is a, c, g, or t
caggatatgtttatttttccttttttgtttgaactacacactgttaaactaaaagtattgaatttattttgttttgttttttaacagaagctttgatatcagctgcagatcactcaatacatggccgagacaaatctacattggccggaagcagctctagatgagcctcttggctagacttagtccctccttattagtgattggcgattcaggccatgtcatagggcctttcagacaaaaggttcttatcccagtcagctggccaaaacattaactttggatttcttaccctgctacagcatcttctagaaaggcagcaagataatattgtggcagtgcacagataacatcagggtagacttgactggagaaaaccaaattctgcgcttgctcctgtgtgcccccatccagctgtgcatgcacacacaggacacctttctagtatgaagaacttgcatcatgtctgccctctattgagcacccccttctagaaatacttccaagtattagcatgtgaactgttgactccaccctggtgctttctgctaggaaagcacacttaacgcatccagtgtagtaattgaacttgttctactgccatggtcatatgcagtgggattgcataaggagcattatcctagctctgaagataccatggagtagaattccccaccccctgtcttacatccaccctggccctgtaaattcttttttcctttgttgcgtcaacgaccctagccggagactcaagctgccccctgtggtaagtgccttctcgtctttctggtgtgattcaggactttaggggtcagtaaagaccgaggagcctttattgtaataagaaacagacataatgccccttcttcacaagccctgtaacaacagctaannnnnnnnnnnngatctccccttctcccttgaaattaatccagtctgggcaatagatgcagtttgaccctttggatgtaacttacattcttttttattaattattcttttctacaatcaccccaattatccttgggggaggcgttggaggacctgaaatttttacccgaacctaggttcttcggcgcttggcaaccaatggggctacagagaagcatctaagcctagtcacagagcgagcgtgagtggggacttctcactgccacggacccttgatgcatgctccccgcgcttcagtggtcccgtgtcagaaggctgagttttcgaaaggaggccgtcaaaaataaatgtaaagagacggtatcggctgcagctggttctcaaaggagagggagtgtgcatcggactggtacaaacagagaatgtttttaattatttatatccacaaatttgtgtttatctaggatattttctgaatatctttgtaaaatgcagattttttctacaatacagtatgaatcttatgtaaatcctattgtttattaataggtttccattaggtttgtttacactaccttcct

SEQ ID NO: 438206 - DNA, 480 bp, Homo Sapiens
ggggaaatgaactgcctttatttttttatttcccatccagaaaccccagtgtgatggtggaagcagcatgaaaacaacatctccccaggcctcgcagtagaggcgaagggaacagggctgcccatgtgcctgtctctaaagacgccaccctcaggttgatgtcacctgtgggagaccgggtccacctacagacaccaggtgatggtccaccaggccccaagctccagcctgctgagttcccaagacccaggcttcattaaatagcttcgtacaaaaacccaagggtgtccctccagctggtaaaaaattgggcaatttctacttggaggtctgctgtgggggtggacctcaccttggagatgtctttccagaataaaactaagccctactcaggaaaaatggtgatgaaaggcagctcacagacatgcacgactaataatcttattgaaaagggaggagctcaggcacacaggaggacaa

SEQ ID NO: 438207 - DNA, 598 bp, Homo Sapiens
tgccctcagctctcttttgatgtcatccaactgaggttcaggttgaggggttatctttgcaagggagaagttttgggtcctactggaggcttcgttggagctctgaatggcataggtggtggagttgtcgctttgctgtgacgtctgtggaggacgagtgggctgtctgttccattcgggcctggattttactgctgccctccagctagggatatgtggcagtgtaattgtgacttcatctcctttgccaacttgaagctctccttcacaggaagtgtctatagatgctggtttaaaatcatcacgaatagtgtggaaggaggcccgcggccgcttctcgaagctctccccgagcctcaggcaatgttcctcgcggtccagcagcgggtttgcggtcccattcatggccccgcacctgcctcgcacccagatcggcgctctcccggtgcagccgcgatccgagcttctggcgctggcgtctgggaggactgtgcttccgggccaccgctctggaagacaaggagagccgagccggcacccacccgggtccagaagcaagttctctcctctgcgtgggggtgagagaggaagccccgct

SEQ ID NO: 438208 - DNA, 2096 bp, Homo Sapiens
  misc_feature (21)..(21): n is a, c, g, or t
  misc_feature (88)..(88): n is a, c, g, or t
  misc_feature (128)..(128): n is a, c, g, or t
  misc_feature (133)..(252): n is a, c, g, or t
  misc_feature (258)..(258): n is a, c, g, or t
cactcttgtccccaggctggnagtgcattggcacgatctctgctcactgcaacctctgcctcccaagttcaagcgattctggtgcctnagcctccgagtagctgggattacaggtgtgcaccaccgcncctgnnnnnnnnnnnnnnnnnnnnnnnnnnnnnnnnnnnnnnnnnnnnnnnnnnnnnnnnnnnnnnnnnnnnnnnnnnnnnnnnnnnnnnnnnnnnnnnnnnnnnnnnnnnnnnnnnnnnnnnntgagcngccgcgcccggccagatgtacatttttaactggacctccaggtgactcttagcatgtttaggtttgaggagcactgacctgggaccctgggcaagtcgagtcaaataactccagcgtgcctcacggtcctcaacctgtcgcatggtgataatgcctacttgaaaaggtcgttgtgataattcaatgagataatgtattccagcacttagcacagtgcctggtacataggagatgttccatattcatctcctgatggtggaccttctttcgggaagtttaaattttttttccactctcaaaaacgcctcttggttttgaacttgaagctgttgcagtgctggagtcggacagtagagggcactctcggcattgccatcgcggagagcaagatacgcgggatggaggctgcgtgggtccggacttcgtgtgtgcaggtgctgcgggccggctcctgggcacccacccagctcattcgccgagcggctcccctcctggggttgagtgtcctgggcctgagtctgcagcctcagccatctgttccccaacttgatctcccactgctagttacaaacaaatcgcccggcttgtgcaaacctcctgggctcagtccccagtcccgcggggccgctagacgttgatgaaggatccctggtcgccgttggccgtctcgggctccacacagcgccctttcctccgtgtaaccctgcggttccggtggaatttggcatagcagcgcagcccttccacacacatgcagtcatcgaagcatttgttgttgaggcctcggttgtggggtgtgcagagatgctcccgcaggtcgcagcaagtccctggcaggcagtcttggtgatggtcgcatggttccccttcggctggtgatgtttcgttaccatcactggagagtttaccgcggtgtttctctttcttctttgcagagggccaaccatcaggttttaagtcttcataatcggtccagtcgaacaaggccatgtccagcgtgggcatcacctccccgtcagacctgggctgtgcctgctggggccgcagggaggtgacgggcaggatcagggactcttctgtggcaggtgctgcctcaaaggtggtgagaaagaacatggtgggcgccaggctggtggaggattcctccatggctgcatccagcacctgggcttcggagagctctgccttcttcatcagggagctgggacctcggaccaaggctcggccttggtgcagcctcaacctgtccctgcgtctcttgtgctccctgctgcgtttcctggtcctctcccaacctggaggtcggttctccttctcggggtagggcaatgccagtcccaggagcaggtccttgtcctgcagcaggcctgcaggactctgctcaggcagcagcccctcagcctctggcagcctggaggcctgcctggtggcggtgaccacagccccatcctgggcctggctgggcaggcctgggccccactccttcttgcccgggccccgccggcggtggtggctggcctgaggcgtccacagcgctgggcctgggaggtcaatgtgattctcagggaggttccgggcaggggtcccaggtgcaagggcgcctgccaggctcagctccaggggcagcaggaggacgaggaacagcatgggagcggtgtggatggcaggcccagccattggctcctccctgtccggccggcgggtagggggaggaggggctcggggccgagcgcccgcgggagccgagcgcagccgagggcgagccgcggaacggggccggcgtggagaggtgcgcgggcagccggaggatgtgcccgggatcccgggaattccggacc

SEQ ID NO: 438209 - DNA, 444 bp, Homo Sapiens
  misc_feature (391)..(401): n is a, c, g, or t
gcttctgctctttttaattagacagataaaattagcaaggagattaaggtaaaaggagaaatttaaaataattaaatgttaggtggaatttacaaaagtgaattgaacaatgaggtacaataaggaatgtaaagagaaacacagacacatttgaaacattcctcggatgccacacggcttaagccagtccataggtaaagcaagaattctcccttgtcacttcttgaattgcagattccagtgatgtgaaagaacattctccagaaacactttccttctccttttcttgagatgttatcaggaataattaatcagtcagtatcattccaggatggcccacactgcatccaattcaaaccactcacctgtttcctgtctgaatttgcaaacnnnnnnnnnnncctttcattgtatttttctccctctcctctcttcccattgagc

SEQ ID NO: 438210 - DNA, 1137 bp, Homo Sapiens
tttttggaccccttctcacggggggggtgccaagtacccggccaaggggcggtttcaaataaggaagggtttcttgttgggttcccccgccacctttggggtttggcccccttaggaatgttaagaaaagttgcgggccgggccaagcgccagggccggaaagttgctttcccccgtggcgctgtggcgcccaaggtgggcccccaggaagggcccttgccgcaggggcgttggaagggtggaggcggaaagcgcttgggagtagaagcacgttaggagttggtgaaggtaggggtcggtgggtgttctgccccgaagaactcctcgtaccaacagggggctcttactgtttggaaggaatttgttggggatgactgaaaacatatgcaactcctgcttcttaaggtcttctaagtctgggagctgtctggtcgtgaactcaatcctagttgtgatgctgttgataattaatttaatgcttggatagtccttcatgtatgaaatattatttacagaggattggtggtgatgctcctttgtgtcacttgggttttcgctgtccatcaagctggggttgctggggaagcctccgtaatggaaaggtgatgagatcagaagctcttggtgggccccagaaaggatgtaagaagccattaccaaggtcattattatcagtccaaaaacgaggctacatcgcttcccctttttgaagcgcaaaaacccaccccagttttcgttcccttcagtcctcacttcgagaacagcaagcaagttcatctgcttactgtccacacgaaacagaattttgttttctcctttgcaacgtggggcacgcctggtgaccgtgatgggggcccccttggcagttgacctgctgcttgtgtgcgccgtcgggtaacagctgtatgcagcaattaatgcagtgcctcatggtagtgccagtgccctgggctgctggcttaccgagccatgggtgggccccccacgagtctggatgtccgcaagtcgtgctagaaaaccttaagaatgccttgtgatcacagaagatggatggaaagcacaaatacaaaaataagcagacaccacagcactagagaaagagggtgcacattctttggttcagctccgaaagaaaac

SEQ ID NO: 438211 - DNA, 1116 bp, Homo Sapiens
  misc_feature (12)..(12): n is a, c, g, or t
gcatcgtatctnctttaagaaaaacacttcttcaaaatcctacactatgaaaaactgtcttcaggaattgtttatttggtccgttgatctagtgaggctgagttcttaaatctttcacccccaagttaaaaattggagcaacaaaacaaaactccagcaaggcataaataagatattaaagtgcatatatacaataccagaaaagtttagattgggaacagcaaaaatttctagtgcaaaaactgcttttgccagcaaagctccctctctggaatcaaagggctacagtaaaagttaaaattggaacaggtttaagcaatgtctgtctttagtcacaagttaatatatgtgcatgcaccaatggcccaaactatgttcagtcttgcaaaagaagacagttcagaaacagtcagaatttcccaatctgaggcagtgctttttccatgtttcccatgaacaagttcctcagatgtgtcatcagctgcaaggggagacaaaaaacccaaagaacatgtgttgcaatatgcttgcaacttgtggaaagagtattcaacacacagttactttatcttggtttgtcttgagtctcttaattcttcttttgagcctgactttgactctatatacaacattttgtgcttttggatctgaacagagactgggcattgtccacaggaattaatttccttgggctatatgaccatggccttttgaatatttgatttatccttttgaaattcataataaaatagtttttgatttttcagtacaatcacacagatcagggattattagtactggtattattctttcttcaaggatccaagttgaaagctcttaagaggacatccaggtcaccaagattagccgcctggaagagttctggttggtccatcagagagagcgcaattctgagggcagcccagatattcccagagattgcaggatgaggaacttgctgctgattcctgctctttctttgcaaactgagggcagtgagaaaatttctgaccgcttctctgtaggcgcccaggttgatgcagcttattcctaggttgtatctggaccggatgaatcctggctgaatctccagtgctcgcgtataggcctccacgg

SEQ ID NO: 438212 - DNA, 423 bp, Homo Sapiens
gctcggtacccatcacgatgtccgttagaaagaggaaatgcatgtttgttgaggttttcaaatatccctagtttactctgttcttcctgtttataagcaagccgcaagttcctcatatccttgcacactatctctataccacaggaattgtctccatggctctgtgctcacaatcttctccactctgctgatcactccaaggggaacatcaaggataaaatgcgggtccctctcgacatttttgaagtacagcttaaagtccgtcactgtcagggttccactcactgctcccataaatgggcagatatacatgacatggaatgggcagtattttaacaggtgatgtttgaaggctacagggtgtggaagatgctataccagttgaagatgggggcctgttcgaaaattgcatttactaaggta

SEQ ID NO: 438213 - DNA, 817 bp, Homo Sapiens
  misc_feature (44)..(159): n is a, c, g, or t
  misc_feature (190)..(317): n is a, c, g, or t
  misc_feature (597)..(653): n is a, c, g, or t
  misc_feature (795)..(795): n is a, c, g, or t
  misc_feature (805)..(805): n is a, c, g, or t
tctcgtattaagaatacaaattcgcccggcatggtgcacatgcnnnnnnnnnnnnnnnnnnnnnnnnnnnnnnnnnnnnnnnnnnnnnnnnnnnnnnnnnnnnnnnnnnnnnnnnnnnnnnnnnnnnnnnnnnnnnnnnnnnnnnnnnnnnnnnnnnnngaaactccgtctcaaaagaaacataaaaaannnnnnnnnnnnnnnnnnnnnnnnnnnnnnnnnnnnnnnnnnnnnnnnnnnnnnnnnnnnnnnnnnnnnnnnnnnnnnnnnnnnnnnnnnnnnnnnnnnnnnnnnnnnnnnnnnnnnnnnnnnnnnnnctgttaatgtcaaaaaaatagctgctgcttctttaaagagtttaaaaattgatcggttcaatggcaaagctacacaacaactctggagtagaaggaaagaactctctttatagtacaacctctttccagcatactgccatcagctagtagaggcaactgcaaacaaatggtaggagttgcccaggaaggtatttgggctggacaaagtgatagcaaccctccagaccctggctccttataaatgtatagcaattcattcatacaaactgcacagaggttnnnnnnnnnnnnnnnnnnnnnnnnnnnnnnnnnnnnnnnnnnnnnnnnnnnnnnnnntttcctggctctctactaacagtaaaatgtgctgagcccaaattttctgctctaacatgggtcccacggacctatcagtctgctctggggtgctgacctgctgggtcctgagcagcgcgacgcgctggtcgacgatatccantacgccgggncgtaccagctgg

SEQ ID NO: 438214 - DNA, 864 bp, Homo Sapiens
  misc_feature (782)..(818): n is a, c, g, or t
tttcagaactgcatcttatcattttccgaataaagcacaaagtgctcaaaatcagagtttaatctcttcctctaatattcgactatctttcggtagcattcatgtatttttagttaacataacgattggtttagttttggcttatttaaagcatttagcacttgctgtttcagatgtcagatgtcccctgtgagcttcttccttgaggcagcctgctctataggacaggtgagcccagcgggagccagcccactgctgacccgaaccctctagtccttgtcacaaaaagaggctgggacctgatggtggttctcttcctgacttttcctggtggtccttctgacttggagtggcctggcaatttcggtggcgtgacagccggaatgctgccactaaaattcctctctgggcaccatgagcggctgacagggcacgcggagaaaacgattcgcttctcccaggattggtggagcgaccgctgttggacgaatgtggtcgtccctggatgtctgagcaaagagacactgccatggcggccgccggtcagcgtataaggtctgttagggagacccgaagccctgcaccaggaacgcagtttggctcgcccagcccaccctgcagggctggctctccaggcgctgggtccggggagaagaggacagctgccccgccgcaccgcgcatccttccatccactgtggtacatggcgctgccccggtctccaacgtcgcgccaccccttccgctctcgacgaattcgagctcggccgatttggcctgatnnnnnnnnnnnnnnnnnnnnnnnnnnnnnnnnnnnnncggccgccccgcggtaaactccaggtcccctataggagtcgtaaca

SEQ ID NO: 438215 - DNA, 1390 bp, Homo Sapiens
  misc_feature (845)..(1096): n is a, c, g, or t
  misc_feature (1121)..(1319): n is a, c, g, or t
ggcctgggtggcgaattcggcacgaggggccattgggggaattgcagccagatctgtgctttctgctggtgtctggccggaccggaaatccagtgggtcgacctgtgaagtacaacatcgttggagttgggaatctgattggtcctcaggtttacatcaccacaaatggggctgtctacatcctgtttggctttggaaatatacaagctgtcgcactgcgggacatttttgttcaggcccaaaatcgagacagctcaccaccttctctgcagatagaagagccagaatgggaaaagcgaagatccatcaacctgtctgagctcattgatgtttacagtgatggtgttgaactactccagatggtgaaggcaccagattccaactgcagcaaccttctgattacaaccagacaaagccttgtgctgcttcgggggcaaaatctgacaccttactgggcattgagacttcaaggcctgcgcagccagcctactcctggatatttcactgatgatcagacattagacttccttctgcagatacaggatggagttgggatgaaaaagatgatggttgtggatggtgactctggctccattgtttggagttaccgtgctccgtgtcacatgaaagaaacgccagccacctcagcagttacttcagaccagaagtctgtcttcctcttctggggccgaagggctgtcagctgcatctcccaattccgatatcatcctaggaactgagccgcccagccttcaccacctttacctcctgcatcctgcgttcccctccatccttctggatctggccaacaccaccggcacagtgaccggcttcagaggggtctnnnnnnnnnnnnnnnnnnnnnnnnnnnnnnnnnnnnnnnnnnnnnnnnnnnnnnnnnnnnnnnnnnnnnnnnnnnnnnnnnnnnnnnnnnnnnnnnnnnnnnnnnnnnnnnnnnnnnnnnnnnnnnnnnnnnnnnnnnnnnnnnnnnnnnnnnnnnnnnnnnnnnnnnnnnnnnnnnnnnnnnnnnnnnnnnnnnnnnnnnnnnnnnnnnnnnnnnnnnnnnnnnnnnnnnnnnnnnnnnnnnnnnnnnnnnatgagccaccatgccaggtcccctnnnnnnnnnnnnnnnnnnnnnnnnnnnnnnnnnnnnnnnnnnnnnnnnnnnnnnnnnnnnnnnnnnnnnnnnnnnnnnnnnnnnnnnnnnnnnnnnnnnnnnnnnnnnnnnnnnnnnnnnnnnnnnnnnnnnnnnnnnnnnnnnnnnnnnnnnnnnnnnnnnnnnnnnnnnnnnnnnnnnnnnnnnnnnnnnnnnnnnnggtactatatgacccaggcattccactttctgagtatttacctgagcagcaactgaaacggataggatcca

SEQ ID NO: 438216 - DNA, 288 bp, Homo Sapiens
  misc_feature (39)..(39): n is a, c, g, or t
gtaacagttggagaaagctatcggtctcgttcaaccctnggacactccagatctcattggagccagggttccagttctcatgcaagtcggccacaggagccacggaaccgcagtaggatttctactgttatacagcccttgaggcagaatgcagcagaagttgtggaccttaccgttgatgaagatggtaaattgaagtagtaacagtagaaaattatgaaaggagtttgataaaaggaaatctcttaatatgctagaaactcctcctgcttactggtaatatattat

SEQ ID NO: 438217 - DNA, 1914 bp, Homo Sapiens
  misc_feature (65)..(65): n is a, c, g, or t
  misc_feature (1392)..(1392): n is a, c, g, or t
cagatgagaccaggccttgacagtgggggcaagtcctaccaacctgcacagcacatccagcaggncaactgtggctcagcaggtgccaaatggagcccatgggcagaagatgcccacagcgttccagatgtgtgtggtctgagagataaaaggacacagaacaagatgactgtgcaaatagccaagtggtggcagaagttctgcatttccaagagatgatccactcaataatttgacgatactagttggccaacatgctcagagaaaacagactatccacaactgagcctcattctctctcagatcaatccatgtgctggaaactattttctgcacaagcaaaatcaaatgagaaaaaaaacaggtcccaaactaaagtagccagcaaggttggaaaatcttgtccaaaatcatctgtgatgtgggggaagttttatttgttttatgtttttgctactacgggtgcttttattgcaacagtgacttctttcctgtggactctgagatcttatcaagtctgaacagcagggttgagaagagtcctgaatgccgcctgttgcttacccaagtccccgtgaggccaatcagtgtcatctgctgaggatggagatggggccgaaggagctattcaggggtgaggcaggccgctccctgaccgaggggcctcctccacagcctgctgcctgccgcctgccgcctccagcctggctgagcacattggacagtctgctgactcaaggagatggggaggggagctggtggtctacactgaaaaggggccggctaagtcagcttcagtggagagaggaacaaaccaggaaagccatggaggaggcagctcaggctggctgcccatgtgcagagaatggcacactggctccgcagacagcaagtgcacagagaggctgtggggtgttattattcaggcttggactcttcctgcctccaattcatttcttgctgatgacccggcagctacatgcacgggttccaacagtcagtccctcagcccaagcactctgtggtgctgagcagccatcagggtaagcagagtccggggctcagagtccgttggtgtcgatagctgtcacagaagcaggtgttgaggaacgcgatgtggttgccgaggtcttgtcgagggctgggctgggcacgctgcagtcggcggacctggcagaggagcccctgcctacaggaagcagcggccggccctggccgtgggggctctggccatgcaggttctgaccacagaggcggtggtgccgctcccagtccttgtgctggcagaaagagccacagtatcgcgcgatattgcagccactgcatgtctcgctggctttgcggccacagttccagcagttctccgtggactcctcttgcctcattgaatgnacgaggaaagcatccctcctgcggcctgccgcttgacatccgctatggtttgctccattcgtgctctctctgttgcaatcacttcaaaggctttctgctctgcctcagcgacggccttctgtacttctgacatggcctgaattttcaccttattcacagcttcttctgtttttttccaaaactccacaggtacgtatcctgtacctggcctgctgttgaactctctctgagaatcattgctgagagaatctgcactcccagggctgtgctgcctggagaccaactcggtccccgttttcctcagctctgtgttttcattgtaccgtcttttccagtagttgagttcttcacgatctgattcctgacagcgccgcagaactgccatagagcgccttgttttctctaccatttccataatgcaattcagcgcatggtcaagatgtttccattcatcagcccattccctttctgtcaaacgatgatctaccaactcatcttgatagcctccatttagaccaagac

SEQ ID NO: 438218 - DNA, 425 bp, Homo Sapiens
  misc_feature (43)..(133): n is a, c, g, or t
gccaggcactgtggctcacacctgtgatccaggcactttgagnnnnnnnnnnnnnnnnnnnnnnnnnnnnnnnnnnnnnnnnnnnnnnnnnnnnnnnnnnnnnnnnnnnnnnnnnnnnnnnnnnnnnnnnnnntaaatgagctcatttggtgtcatgatgtgaattttgccttaataaacttttacaaggagagcgctaagtccaaagcccttgttttatacagagaaggccacagaggccccaagagggtcatggctgcccaagtgtgattcttgggttgctgagtgccgatgtcccctccggcccctgctcccccatccccatcctcttcgccgcagccttctgagggatgcccaagaagttccagggtgagaacaccaagtcggcagcggcccgggcacggagggcagaggccaaggcggcc

SEQ ID NO: 438219 - DNA, 1168 bp, Homo Sapiens
  misc_feature (43)..(60): n is a, c, g, or t
  misc_feature (1081)..(1113): n is a, c, g, or t
caaggtagcgaggcctgggtggcgaattcggcacgaggcgagnnnnnnnnnnnnnnnnnngcctcaccgcagccttgccgccacctttattgggcactcagccctgaggctctacacacacgcgccgggggatgggaggggatggggtgtcactcggggcagggaccctctggcgggaggacgggtggctggtgataagagcatggccccagggcccggcgccttggcccccggaacgctctgtgaccctcgcagctgacctggcctaagggcgtgcagagtcgtgacctggaccacccgtgggtgaactggctccccaagttctgggctcacttgggggcattgaagggcacggcccgctggttcatggggttgtcaggagagcggagccactccttcttgagcagctgtttcagctgcgacagccgcatgttggggttctcttgtttgagccgcggcagctgggcttcctcaaaggctgtgaaggctgcccgcatgcgtctttctgggtgccggtcggccgcctcctccgccacgctgagcactgcaatggcgtcctcgatggtgcgcgcctccacgctgccctcctccagcacgcggcggttcacgttctcctccagcggcacctccagatggctcttggctttctcggctgtgtccggggcctccctgagctgatggtctcggcgcagcgtgtcctcgatctgggcccgggtgaccttgctggacgtggccacccgcggcgccttgccgcccttgagcttggagtcctcctcctccagtaggcgctgcgtctccttcttacgttccagctggtcgaggcgccgcttctccttctcctccttgcgctgctccttcctcatgacgtgtttgtcgtcgtccttccagtaggcatcctccagctccttctgcttcttggcatcagcggccgccttggcctctgccctacgtgcccgggccgctgccgacttggtgttctcaccctggaacttcttgggcatccctcagcaggcttcttaccccagcgccggcccggtcgcccgctctcgacgaattcgagctcggccgatttggcctgatnnnnnnnnnnnnnnnnnnnnnnnnnnnnnnnnnatgcgccgccaccgcgatgagctccaggttcgccctatagtgatcgtatacatct

SEQ ID NO: 438220 - DNA, 1420 bp, Homo Sapiens
  misc_feature (1293)..(1353): n is a, c, g, or t
catctgcagcaggtcgtgatcaccgactcctgggcagtggttagatgaacaggttggctccctctggagcgtgccgtcgtgggcgtccagcaggaggcatactgtgcggtgtcagaagattcgtggtttacagagtgggagcgcagcagcagcatattgctggatacccgagtaggcggtgagtgaggccatccatggtgctcggcggtgccagttggaaagcccactgctgcccaggccaccatgttaaagcagccattccgtgccagaagagccaacattgaggccagccgttgctccagctaatgtctgcagggctccaagtgaggctatggggttgacagaattactgctgctagagctaggtgaggaccctgaactagtgagcacgctgaggggactgctggatgtagtgagagcattggtaccacttggtgtgttctgagctgcactagctgcagcagctagtgcagccaaattctgtaactgcattgcattcaaccctcccattgggtggaggctgctcagggtgttgaggttcccagaggaggcagtctgctgaaggagctgcaaataaagtgctaaatactggggtccaagagtatttagaccagcaaggtttccccacacagatgctgcgctgatttgctgcatctgctgctggagctgctgggccattctcttctgttctttgtccttctgtgtatcagccaattttaccaccatgggtgatgagcaaccctccatggtctgtgcttggtgcattgccttgatagccgtctgtgccatggctcttgttgtaaaagtcacaaatgcacaacctcggctcaggccatcaggtccccgcaatatccggcattcttccatctgtccaaacgaagagaacatgactcggatgtcattttcagtgcacttcttggaaatcatacccataaacagcttcctgtcttccactgcattgttcttctcactgtcagcaggtttcatctgtatagggtgatgcatccctgggaggactttcatgttgtgaagagcattctgagcttctaatgcagctttacgggtgtaaaatgtaacaacacagcaccctttgctctgaggcgggttttggctcctatcccttaggacgttgatttcatacacagcaccatactgttcgaagagttcccgcaagtccttttcagaccaggtccttggaacctggcccacaaacatcttgatagcatcaagatctggttggtctgggtggtccagggtgccgttcattttctttgagcagcggctgcacctgannnnnnnnnnnnnnnnnnnnnnnnnnnnnnnnnnnnnnnnnnnnnnnnnnnnnnnnnnnnnaggccgaatcccgggggagcctccgcgtcccgccgccgctgccgctgccgccagagcagaacccgct

SEQ ID NO: 438221 - DNA, 472 bp, Homo Sapiens
  misc_feature (42)..(42): n is a, c, g, or t
  misc_feature (362)..(362): n is a, c, g, or t
aaaaactcctgcctgtgtccagaaaaatcctggttgtaacanaagtgggggaaccgccagcaagcaagcatattgcctggaatacccgaattaggccctgagtgaggggcctcccatggtgctccccggtgcccattggaaaggccactgctgccccaggccaccatttaaagcagccattcctgccaaagagccaacattgaggccagccgttgctccagctaatgtctgcagggctccaagtgaggctatggggttgacagaattactgctgctagagctaggtgaggaccctgaactagtgagcacgctgaggggactgctggatgtagtgagagcattggtaccacttggtgtgttcntgaactgactagctgcagcagctagtgcagccaaattctgtaactgcattgcattcaaccctacaacatccaaagcaagagattagccagcagataagggtgcttcatat

SEQ ID NO: 438222 - DNA, 848 bp, Homo Sapiens
  misc_feature (414)..(425): n is a, c, g, or t
aataaaaactaaactagcaataaaatgggataagtgattttattggggggaccctgattaaaataatttgggtttggaaccttaaccttgcaacactgctaaggttaactcctatgaatgttgtaaatgaaacacgtccagggttggggactgagggatcagagatgttacatgagccatccatttcttcacagtgtctcagagatctgaactcttttccacacttaaagttaggtcatgatactggatctaattgacagcagaggtcctctgtctggtgtgagacacccctttctctattagtgcttcttttcttttggctactcgtgtggtaggtagaaaccaagtttgtgatgttcaggagatgtacacacctctaagccactagtaatcaagtgttttaaaaagtagttnnnnnnnnnnnngggaaagctcaaattaacataatcaaaatgtttttaaaataaatctatgtaatgagaggtgaccagcaagcctgtatctatgccagagtgtggtagaagagaagaaggcactctcactgaattttataagtatactgaagtcacctaacctcttagtagacatggctcttgccaaagaataccacggaaagagctcttctcttccatgacatcctcaccatatcctgttcttaggtcactgccaaccaataaagcaaagctcccagcaagttgacaaaaagaagggggaggtctgggggaaaaggggaggagacgaaggacaagagcagaacaacaggaaccccttctatttgcccaagacaaagagactttccaaatcactgcagttgtcacaattacacacctggaggaatcaatgcaccc

SEQ ID NO: 438223 - DNA, 2658 bp, Homo Sapiens
  misc_feature (631)..(631): n is a, c, g, or t
  misc_feature (1174)..(1174): n is a, c, g, or t
tgacattcagtcatgattgttttaaagttttattgtagactttgctgttggatacaaaatgaaggcatacaactgtcacaggcagggcagtaagtacaaagtctaagctgtaaaaaccgtttgaaaatataaactcgtttttggaatacatgtgtcaaaggctgcccatgttaatacctttggtataaaacggtaacgattcccttgacaaacccatccatcacctgacgcacattcacatctcctggtaactactctacctagtctagtctcaaccacccctgtcagtcacgactcactcctgttcctttgcaggtgcagaggagcctgggaggtaggtcactgagaacacccgtcctacataggcgctgcgcccagccgggctccagcaggggccacctgtgccccacaagcacacgtccccacccacagtcacacatatcccttaaacaaacatgaacacagacacaaaccagacccaaagttatctatctacccgcacatcctcaacctgttcactgctggccactctacactgtgtaaaaatcagaggcaaagacaagggggtctgtgtttatagcagggaagctcccctggggctggtggtgtgaagggtgtccctgcctggatngccaggctgggaggacaaagggtatgggccacactgaatttctaagcaaaatgacttagaaagttagcccagcttcatggggaaggaggctgaagaggagcgggatcccagggaggggtagtttatgagctatgcctgtcacagggtcagatggccttcctggagtggagtcgggtcaatcaggagaacaactggacggggctggagttggggaaagaaccagaaacagagctggacacttactgccatggaaagttctgctcctacgcagacatatggggtcccagtgagcaccaggccaaagaccagcccaaggtggcaaaaggcttgatccctaaacaaagccttgcacccaaagttgcactggtctcaacgatttagacgctcattcagccatatttccactgccacaagctgcaattatcaacaagctctaggcccaaagccacatggcagaaagcacgtctagcaaagcagtggggattgtgcccgggccaaacacacaggaaccaggagtggacctgctggggctggaggattatnaaataggaagcagggagcttagatacctctggtggcctccaactgcaggacaactctccagaattgtcaaactgaacccttaagggagtgtcaccccaaaaagccccacataggaagtcgacacccacaaaaataaatattgcaaacaaaagttctcacatacacttcacactcattcatacttttcctctgagaaccgagaaagcctggctccaaagagtctcagattctcatgaaaagtagagatcttagacacagcttgttcaacgacaggggtcatacgcctgggtcaagacaatcaatttgccttgtcaagcaataccaaaataatcatctggcttgttacaaaagtatctccaggctccaagggaagcagaaggggcccggcagcctgcaacaggaatctgggtgtagcacggcagggagtgggggcggtgagaggagggcggctcggtctcttgcctgctcactggtggaggtgggcccggtcatcagggcgcttgatgtggatcctccgcacgcgctcgatctcctcccgctcctcgtcctcgtccaggtggtgggaagcgccccgccgccccgcctgtggcctccaggagcgcattgtcaggtccccggccatcctgggcctcatacagcaaaatgttcagggtctcctcataaatccgggcttcgggaaactccaccttggtctgtttcttctcagtggcatagacgatggaggtacaacagacttcagcaatcttccggccctgaccataaaaggaccagcagcagatttcatccccaataacatcctttatgaacaggacccttccgttaaagcgcagagacagcttatcaaacagttcaatgtttttcaacatattgtcgtcagaattgctggtatatgagtatttgttgttacttctgttgtagagcaacttcacggctggcttatttgaagtcgctataagtttttgttcttccttggatgaggtgatcacagggaccttgcagaaaggctcataagtatctttgttttgtagggccgcctggcactcttccaccaggccttggactaggtagtacttggcttctgctagcagctcctcgatctcccggcggctctcgggtaaaggcaccgccccgtctcgaaggtagttgagtatcgtaccaaagtgcttcccacagcggtcaatgaggatccagccttcactgtcggtgagcacttccatgcgcccgctgaacatggccttcagcatggtgtcctgcttggtcagcgtctgcatggtggtatagtagagggctccacccacattcagcttcacgtatttggagctggggctcgtgcccttgaaggaagtggtgcgggtagcagccgctggcaccgctgagctcaccacactttctcctgacatctcttccatgaaaagtcggaggacgcaggagtctccctcgtgccgatttcaacccagcctcgtacctagccgtagttctgcctt

SEQ ID NO: 438224 - DNA, 562 bp, Homo Sapiens
  misc_feature (64)..(64): n is a, c, g, or t
  misc_feature (74)..(74): n is a, c, g, or t
  misc_feature (542)..(542): n is a, c, g, or t
ggagtaccctctgtccaaagcacagaccgtgactgcctctgcctcctccgggaatgatcagagnctgaaggagnccgctgccaacgggggcagtggtcctagggcccctgtaggctccatcaacgccaggaccaccagtgacatcgccaaggagctggaggagcagttctacacactggtcccctttggccggaacgaacttctctcccctctaaaggacagtgatgagatcaggtctctctgggttaaaatcgacctgaccctcctgtccaggatcccagaacacctgccccaggagccaggggtattgagcgcccctgccaccaaggactctgagagcgcaccgcccagccacacctcggacacacctgcagaaaaggctttgccaaaatccaagaggaaacgcaagtgtgacaacgaagacgactacagggagatcaagaagtcccagggagagaaaggcagctcttcaagactggcccctccaccagtaatactttgtctgcaaccactgcacatgacatcacagtgtggcatcgatnacccggggatccttagatca

SEQ ID NO: 438225 - DNA, 811 bp, Homo Sapiens
  misc_feature (735)..(735): n is a, c, g, or t
cttagctcaaggagaaccagaatttttttgacagccacaaacaagaatacaggtatcttggatttcagacacattctgtttcttcataaaaattttacttaaaatctgtaacgctagatattgactatccttagttgagtcactgaggtttaaacacaatggtaagtcttaaagtctgctatttacagagcattgaatctgtaccaatttgcaatagaaagccttcagtatgcaagaagtttgcatgggtattaagaacacagcctaaataaggcatttgatctaatctgcaggaagaattttcttccccaaaacagaattataaaagcttactttaaacaggaggcagaataattcttttaggaaaccatttcattctgtttctactaacctataccatctgagaattctaggaagaataataaaatctcgtgtattccacagcaaacttacataccataaagacagaattcctaaacatcttggagccgtctgtctctcccatatgatggctgtctgtatatttttacttggggtgctgctttattggctttgaaaacactgtcagataagctcagtaatatgttaccatgggataaaaatatgtatccctgcctaagaataacttgtgcatttgttatggaaatttaattcatatggtgtttacagtactacttttgtaacttccagactttctaaaacattctgcttaaaaaccatatgccatgtatgctntaaccttaaactgcatacacatgtagtgatacctaggctgcatttagatcaccgtgtgctcaggccaggtgtgaat

SEQ ID NO: 438226 - DNA, 912 bp, Homo Sapiens
cctcacaacaattctatgaaattagctggggagatactgtccttatttttcacagctgaagaaaccaaagcttgggaagtttgtgacttctctgagatcacagctggtgatagaaggagctgggacacgcgcttgggttgactggcttctggttttggttctctggcttctagtgctggaagaagccctctctttcccttctctttcctcagtagcatctgactcttttcataagcaaacagctgtataaacaaagcccccattttggtcaagcacagggtgaatgtgatattgttcccacaaccttattctccactcaacagccacctggctttggggaagaggccgccttcaggtgacagtgcagctgtccaggtggccgtgcactgaaccaggctgagggagacaaaaaccccgcagacccgcctgcctttcagcgtccagttaactgcagaagtttaggctcacctcaaagatgtctagtttttccaagttacaatacagcagtttcctacagaacacccccttcctcaattgccaaggggccgcatcgcacggcatcaggccaccactgcaggccagcagattccaccccaggaacggtcatgaactcagcctttgtctcaacgaggggcgtaacatttccttacagtcaagccccatcaactagaagtgcttattacttttaggattaaaaaagtaataacagactttgacttaatactctgtcttttcagaggcaaagtgggtggggtagagggggacgcttttacacattagaagtacaaaacagcatcctggaaacttttgacccgatggaataatggtccattcccagtgccgatatgggctgtgtggaccgaggggctggctgcgaagattggccagcaggattcatggtgaactttccca

SEQ ID NO: 438227 - DNA, 762 bp, Homo Sapiens
  misc_feature (314)..(314): n is a, c, g, or t
aaaccagtttctgtttgtgaactggggagtaaaactttactttgacagatttcttttctccaggtttttaaaattaggtttaaaattaaatgtcgagagaggccctccataaatcctgttgaactctgcagtggatgagcactgtttctgaagacttgaaattctagtgttctcaaatctatctttgccaccttactcaagttaaaccttgatactaacttatctacaaacactgaagggttggaatataaagccagaggaataaactgaacatagacaggaacatcctgcaaggattttctaaagtaatctcnttcttcctgaggagcagtttgtattagtaagtggaaatttcaagtgccggggtgagctaagtatggaaggccaggagagctcagcagtgatttttgatattatatttttttgaaggtctgtatttacttcaaatatagcactcaatctatgacctgaattttcctttattcctgtccatcccttgaacaggctttgatgcaaatcccagtcagcatcccacatatcttcctgcatggctacaccaggctgcactttgggttcagatttggatagaaaaggcaagccaacatagcaatgatccccacactgtagtccaggatcaaaataaatgtttgcaatctttgatttttttcctggctccaagtcttccttattgccccgtaatcgtttatagtaaaatcgcacatcttctgacaaagatcgtatttgctgtatttttaccttccc

SEQ ID NO: 438228 - DNA, 1062 bp, Homo Sapiens
  misc_feature (69)..(69): n is a, c, g, or t
aaaacaccaactggattgggaaataatatactgagaggagtgaaattgcatcaattaatgctgagtggnctaatatatttaatatcctttgtatacaaagtaaaactccaccattcgtgaaaggaaatccttaggcccaactttcagttaacaaaaacagaaatgactttgacccagggtgcttcctgaagaatgagaactatccagggctttacaactgcagaattgtaattatgctctgtgcaattgttgagcaaaggttttgccttgctggataaaaagtcttgtttgtttcgagacatgaaatccccatgtcttaaaagaactaaggcttatagaaaagcagatgggttttctctcaggaaggactgccccattgacctttgccttctcttccaagtcagacagacttctcgcttgccatgggcatttttttactacatagtcagactactggggctacttatagagaccttgtaaaagtactcgtgattttcacgttcttggaggaccaaacaaaaatctgtttctcctccaaaaatggacttacctcctttgcacacaaaagctaaactcctcagcatgaaattgtttgagttattactttaccaagttgtgagcttcttgaatcctccagagtcgcagattccatccctgagttggttgtggtttcactgtttctattggctattctccctgaatttttcattttgttctttgcagggctcgaattatttgtggaaaacaataatatatatgggtgtggattttttatctttatagatgctatatttacaataaatgtttgttttataagaccaattagaattaatgttttcgatccttaaaagggaacacaagtcctgaattttggttgctatagaagaaaaaactattgcttacgtaagaaaggacataaaagccccacttttttcccgttttggaaattatattgccgaaaagaaaattggcttattgaactaatggttaaaagggggattaacccatttcgccttatttatttgtttctgaacccttaatcacactttatagacccggcat

SEQ ID NO: 438229 - DNA, 1501 bp, Homo Sapiens
  misc_feature (592)..(592): n is a, c, g, or t
  misc_feature (594)..(594): n is a, c, g, or t
gccccatggcaaagcgaagaagtcctgtcctgaacttggaaagaagaaaggccaaaggtcaaatggggcagtcccttccctgaagagaaaaccccatcctgcttttcctataagccttagttccttttaagacatggggatttcatgtctcgaaacaaacaagactttttatccagcaaggcaaaacctttgctcaacaattgcacagagcataattacaattctgcagttgtaaagccctggatagttctcattcttcaggaagcaccctgggtcaaagtcatttctgtttttgttaactgaaagttgggtctaaggatttccttttacgaatggtggagttttactttgtatacaaaggatattaaatatattagccactcagattaattgatgaatttcactcctctcagtatattatttccaaccagttggtgcttttcagtgcggggtttcaaactttgattaccaagggacaagattcttgaaggaatttattccaatatgattaactaaattccaagaagtcttatgttgagattcaatgatttcttggtgtcagtcctctggccctacctttccctgacttttntntaaactatattttcctccattgttcacactgcttagggaacactttcaatcctatgagatttctggggacaatgttttctctgaaacaggaaccagaaagcaaatttttaaaatttcaagatcctgctagagacacaggcaaacaccacatttaaatatatgtttaattatgtttaatatatggtccattatattaaaactgagggaacaaacggtgctgacatggcagacatttatttcaatggagaagttcctcccatgaaaccaagaccttgtcctcatgataaagtggagacaataagaaagccaggtatataattaaggcctgtgacatgccatggggatctgttcctgaaggtaatactaacatccaacttctaacaacatccaacttaactcctacttttctcttcctgtatatctttaaattagcatgcgcttttctaaagccacacacttaagtgtgtgactgcctcttcaatttttggggaatgcttattattaaagatgataccctttattcttgaactaagaagaccaaactgttaagagaaatacctgattgtcaataaattgatgctgcataggaatatggctcaccttccctatattttactagctaccttcttggatgagaatttgttttctctcctatgtcagaatctgctataaacactcttaaccatccccaagctgaatttttccttgtatcaagtctaaactgcaaaatcatgaaagaaggctgtgataagcttctaaaacaaacaataaaatcccttagaagaaattgaagaaattaacaatgctacttagatctttctccccggacgcgtgggtcgacgatatcccggggaattccggaccggacagcctgcttttacaacaacggttctatatgcaataaggc

SEQ ID NO: 438230 - DNA, 853 bp, Homo Sapiens
  misc_feature (50)..(92): n is a, c, g, or t
cccttgatgcacagtctgggggcccacttgccttcagcttcccaaattgnnnnnnnnnnnnnnnnnnnnnnnnnnnnnnnnnnnnnnnnnnncggcttcaagcacggactgggggttgggggactgaatcctgacccaaggtcgattgtgaatccggctcttagcccagctctagccctggctccagtcccagccacagcccggtttttgggcttggccattctcttcttggtctggtctctccccctggtgtatttgtagacacagtaccaggcaccagcccctatcactatccccgccgctacacagccagcatcccgaacgcggctcatggtgcagctggggttattcactgatccagggcgtggaactggattgcttaaggttaagggatgcctgctcgtccgggtgaggctcttcagtttaggcttacaagttctgctgaggcttaggcagggcctgggatcaagagcagtttgcttttttccactgtagctgcagttgcacagagcccaaaaggaagacagaccctccaaagattcaaggctgtttctccttacttcagttcagttagagcttcatcctaaggacagaccgaattccttttccaggactgaaaagacggggggtgaacggctgtgtgggccggaggtgtctggaaagcagtctccctgctggccttctatgcgctgccacgtttatttctcttccctcctcctctcaaaacaggacggaatgtggggtgcgggcctgcccgaatctgggggaattttctcctcctcctcctcgcctgggttaaacgcacggcagcgagctgcgcaatagatcccaagaattccggaccggtccagcc

SEQ ID NO: 438231 - DNA, 2537 bp, Homo Sapiens
  misc_feature (1648)..(1648): n is a, c, g, or t
ttttttgccagtggttaaaaagaaatctttattttacaaaattaaaaacataaatagtatttacaagcatcttaaataccagcttataatacttgacattttctaatcatttcaaattgagtttcccataagcttttaaaatgcaagaccattcattcacttgagtgagttaccagtttttacttccaccaatccaaagtgggttttggtttttgaaattgtccatactgtagtcattcaaaaaaatacaatatgcttttgaaatgactagctttaaagaaaaaagtcctgagcttcctaccccagttgtgggatattactccaaaacaactcaagaacccaaattatcttactgcctgattaaatgtaaccactctagctttttaaagacacattcctgttactcacattaatccatctccctcacgtttcaggtttgctggaaggaaaagtagagaaataatggagtagagaagtgggagaatccagatgaccatctgaaatcacattactgaaaatacaacagacatgacccaaaaatctgatcttactagtttccttcaggatcaaatcccaggatattttattgtacaaaaatttcaaatgatttcagatgatgcatatgtgacagcaaacctgaatggcacaatggaacacagacttaaaagatgcttcagtggtcaacactcattctggagttctcatgaatgaagggtagacagattcagtaaaattgtttgcttttcagtttcattatctggtcttcaaatttcagcacagagcaattcatttccatatagtaatatgtaaagagagactacaaaagtgtgaggaaagcaaatgtcctcgagaagggtcagaaaaggaaaggaagactcagtatctacaacccattacctaagaacaccattttgttccattttccctggaagccctcacagctcagctgagaatcagagtaagaatcttcattatcagagattagcaacaaatttaaaagaaaaagaatgacaacaggtaagagttatatacattttactactttgtttcagacttgtcctgatatttaaaaaggtgtcaaatgagccatggatgctggtggcaggaggcaaccagagaggagaggctcgagtatgaggaatggggaagacttactttaccaacttcagagcaaactcctctcttctgggtctaaaactcaaaacatcttttgtcttcagtaaaaccaaagtctttctgctcaatgcagatggtaggtacagtgtgctcaaaagaagcattttctcttggggaagataagtacacagtcagcacagtaagcaccactctgggatcaggcccaccctgcagagcctggcgccatcactgctgcatgttgttgataatcgccaggatgctcatcttctcctgggcagagtccacatcctcattctgcttctgggccactcctgtgcctaagccatagagccgcccacagtacttggcatcatcaatgctgtcctcaaaaaacaactctttcatcctaaagaaagccattcctgtcagcagtgagtctgagcctgcctggtgctgccttccaatcctctgcaaatccaactgatcagcaacttcctgaagacctcccttaagatttttgcagctcttcatncaggtatttcacatcataaatggatgggaagaaaaggttcagaatatggaagaattcatgttcctcttctggcaaacgagaatctgtaagcaactttaccatatagccaaaatcatagccactatgaaatgaaagccatttgacattgtcacagagaaccactcctgatgtcataagcagctctgcaaagtgcagtgtgtcaatcccttcctcttcatgcttctgaaactgtagtcctgagttagcaaggagatctatggaatcctgggagtacatgtcctctgtaaggttaaatttgaaattgaactgccaagtattgattccagaaggatactctcccttctcatttgtgaatgtaaggcccagctggataatttttaaaaggtcaacattgcaccgcagaagctgatattggtaatctatggaactacgaaattcaccaattggtcgcaccacaacacctggaaattctgtgtccatggcaatataactgtaactgagcacgatttctcggatcttcctcatctcttcttctagattactggcccacacttcacagataacctggctattctccacaagtgctgcaggcatcctgaagaaacctgagaagtcgtcttcagctaactagttttacagtgcaagccagacaatgtttggtctgatcgggaccgacagggcccgcgaagcgctggctggcgggctgacgagctggcgggctggcgggctgactccccgacggcggcgacggcagccctggcccggagctcttttccctctaccccggatctgctcctagaaccgaacgagccagcgaggtgagcgcccccgtgcccagagcggtcttacgtgcctcccaccaaacaaccggacggcaccaccctccgct

SEQ ID NO: 438232 - DNA, 1981 bp, Homo Sapiens
  misc_feature (695)..(739): n is a, c, g, or t
  misc_feature (1477)..(1485): n is a, c, g, or t
ttgtacaaaacctgaaatatttttacttttttaaaactttgatctaagttgccttagacctcatggactcgatacaagagtaatatgaattgggaaataaaacactttaatagccacgataaactttgttagaaatgtacatgttgccaaaataataataataaaattaaaaaaaagagagagagagaacagcttgatgtccaggttagattatataaatgttcaacaagggcagggtaaaggaaactttaaaaacaccagttctgaataagcctggggccccgtgagactccccctctcccacccagtctcgggccctagggactgcgttccctccaaacaggacaagtgggagtggataaggcctccaccaagctgcctctcccagtggacaaaaacatccaggtaatgggtatataaacaaagctcataagaaatgtacaaatataaaaagctacaaacattaataaattacagcatcacaaaacacggaaacacttcacaaggtgctagtaaaataactgtatcccccaatcccctcatcatacaaggaaaacaaagagctggtattaaagttgaagattcatcttcaaaatgtgtctgaaatagatcttttgtgtactatttgcttctgtaaagacagagtgtaaggctgcacagacatcacttgtttttcaggcaataccttagttctnnnnnnnnnnnnnnnnnnnnnnnnnnnnnnnnnnnnnnnnnnnnngcatcagaacccaactgtccatctgactcagcaaaaaactcgtataaatgttaatgaagaactctatagaaagaaattcctaaagatacttttactcttataaaaaagaagttatttaaaaagctatttacacgctacattctatgaaaaatatgcttcaggaaatacatctaaaattaaaatacaggattgcctgagaaacaaatccagcccctccgtgtcgatggtggacacaccatccaggtacgacccatgcaggcgacaccacacgctgacacgggagaacagagaagtgccgaccgtaagtcctcgggccgcctggccactgtccctgcccctgcccctgccctgccagtccccagggcaggggtgccttggctgagaagtgcttctccagagtgtggccagcagggcaagacggtccctgccacatggcttagcctgggcctcccagaccccaagatgtggctgagcccttgccctttcctgggaccccacaatggctcccctgcccgctaacacaccaacccagctgccagtcttagctgccccccagaaatgctcctgggcattcaggctgaacacccaccatcctgctgccacctgccaaccagaaagctcggggcagacccttcctcacccgccgagcactgtctggacttggctgagaatcactcaggaagagaaggggggacataaacatcccacttgctcctcctctttctgtgttctttgccnnnnnnnnnaagcccctggaggctgccagcctgtggccagctctgactctggggctggtgagcattggctcactctgtcttccttgaaggactcatgctctcagcagagctgcagaggccctgcaatcacacccacgctcagggggcctgaaggctgtccttaaagtggaataagcggtcctcaaacttgcagggccgcttttctgggacagatcactcttagcaacttgagaaaagacgtccattttcaaattgaggggccacgctgggctcgctctgccggctgaagggacagacgcttgttggggagatggcagccgggaagaggcaaggccctccctggtgaggcagctcggcaccctcctgggaggcagatgttttcgcggggctccgggggtcctgagcggagcagaaggatcctggctttccaaatcttaaaggagtagtttcccgttccgatgaattttcaaaattttcccaagcctctgcttggcggtcgcatccc

SEQ ID NO: 438233 - DNA, 910 bp, Homo Sapiens
  misc_feature (74)..(75): n is a, c, g, or t
  misc_feature (79)..(80): n is a, c, g, or t
  misc_feature (87)..(88): n is a, c, g, or t
  misc_feature (91)..(92): n is a, c, g, or t
  misc_feature (96)..(96): n is a, c, g, or t
  misc_feature (98)..(100): n is a, c, g, or t
  misc_feature (103)..(106): n is a, c, g, or t
  misc_feature (108)..(109): n is a, c, g, or t
  misc_feature (112)..(117): n is a, c, g, or t
  misc_feature (603)..(611): n is a, c, g, or t
aggaaacccggaactggtggagggacttggagggggccctgaaaatggaagcctttggggaaccgggaaatctnnaaannccccccnnccnntttngnnnccnnnngnnccnnnnnnaaaagacgtgacctgtcggaccagtcgggacagagaagtgcccgacccgtaagtccctcgggccgcctggccactgtccctgcccctgcccctgccctgccagtcccagggcaggggtgccttggctgagaagtgcttctccagagtgtagccagcagggcaagacggtccctgccacatggcttagcctgggcctcccagaccccaagatgtggctgagcccttgccctttcctggggaccccacaatggctcccctgcccgctaacacaccaacccagctgccagtcttagctgccccccagaaatgctcctgggcattcaggctgaacacccaccatcctgctgccacctgccaaccagaaagctcggggcagacccttcctcacccgccgagcactgtctggacttggctgagaatcactcaggaagagaaggggggacataaacatcccacttgctcctcctctttctgtgttctttgccnnnnnnnnnaagcccctggaggctgccagcctgtggccagctctgactctggggctggtgcgcattggctcactttttcttccttgaaggactcatgctctcagcagagctgcagaggccctgcaatcacacccacgctcagggggcctgaaggctgtccttaaagtggaataagcggtcctcaaacttgcagggccgcttttctgggacagatcactcttagcaacttgagaaaagacgtccattttcaaattgaggggccacgctgggctcgctctgccatcccgggaatccggaccggtccagcc

SEQ ID NO: 438234 - DNA, 912 bp, Homo Sapiens
  misc_feature (872)..(872): n is a, c, g, or t
  misc_feature (884)..(884): n is a, c, g, or t
tcctctggcaactgttcatagtttttccagctcctttaggaatatgttattatgaaattcgtagatttcttgcatgtttccgaagatgatgagttctttgtttacgatgccacggtggaatctcttccacagccactggtcaatttcccacaggtacgtatccatacattcccggaggtctcttacataagccttttcagtttgaatgagctcagccattatgaactctttcctgcgggcagatttccgcttctcttcattaagttcatgagcagcatctcgaagtttcacctctgagccagggatactggctggaatgatatctagctggagacttttactcgatttgttggaatctgaagaaatccccagggctttttccaaagaggtcctgtacttctccatccgcagagagaaatctctgtacctcttatccacagcagtaacacatttttttatctctgccgcatgggcatgccctttttcacaaaagccatcagccagctgtatcaatagcttcactctctctttggtttgctttgcagttatctggaactcctcgtgctctttcaggagctcctgggtgtgctgtatactggagcccgtggaggtgtgtgtggaaaggtagaactcgccattgtcatggatccattccaaagcctgcttggcactcctctcaaagaccacgtactgctgacactggtccagccgtctcttcctcatggtccagtaatgcaataccctgttctcccgttggaagagttcattcaagatatttttcacttgctgttcaggagctttgatgtgcgtcaccattcctggcatgttcacgcttgttcctgtgcaggtatttcaggaagacgtctgcattnctccgagcaagnggtgcaagccttcaggaatgcctccttt

SEQ ID NO: 438235 - DNA, 518 bp, Homo Sapiens
gggtgccatgtgacttcaaagcacacacagaagcatgtctgtccaaatgacattctcttcacttttccagtgaatcctggtagattctgaaagactggcttactctttcctgcgggcagatttccgcttctcttcattaagttcatgagcagcatctcgaagtttcacctctgagccagggatactggctggaatgatatctagctggagacttttactcgatttgttggaatctgaagaaatccccagggctttttccaaagaggtcctgtacttctccatccgcagagagaaatctctgtacctcttatccacagcagtaacacatttttttatctctgccgcatgggcatgccctttttcaccaaagccatcagccagctgtatcaatagcttcactctctctttggtttgcctgcgaaaaacaacaggaaagtattgtgaggcaaatgaatccgactgccagaaacctgaaacacagtggcgacttgactccacttctgagccctgtggaaaca

SEQ ID NO: 438236 - DNA, 423 bp, Homo Sapiens
tcatccagtgggtcaatgtcactcttctctgggatgaacttgaggagctgctccagcatgtccttagcaaggtcctcctgctcatccatcttcaagatggcctgccggatctcctcgttagaaagcttcaacttggaaagaaggatgatgcagttttgggccctccggccatcaatgaccgacagctctttgaccttgcgggaagccaggtatatgtcttcagtggagcccagctctttctggtgcctctggtaggctgaaaacattttttcaaaatcctctaggtccaggatccgaaatacctgcatgtcatctatctcattccatacggtgccagggacacgctcctcattcagcttcacccagttgaaggacttcagtgggtgagaaggctgggggacacgctttttcctgagtgggacg

SEQ ID NO: 438237 - DNA, 1029 bp, Homo Sapiens
  misc_feature (465)..(479): n is a, c, g, or t
  misc_feature (918)..(957): n is a, c, g, or t
  misc_feature (959)..(959): n is a, c, g, or t
  misc_feature (973)..(973): n is a, c, g, or t
gtacctggccacccttggggtgcggaggcgacacatctctcttttcccaagagaccatgcagagaggcgggcatgcatggggccacgtgaagcacacgatggcagggggagcccaggggtgacagagtctccgttggggacaggggacagcaaaggctgacagggacaggagctccctgggggtggggaacagctcttttaccggggtggactggagagggcgggttagcagcctcccattcaagtctaaaaggtgccgagagaaagagcttgggccttagtggagcaaggggatcttaatccctcctcctccagcctgagccccacctcgtgagggagttggagacatttggaaatcagaaacgcacagtggtgggtgggggagtgggcagacagacagacagacgagagagcattagcatagagaatccattacgaaaaagcaattaatttttccaaggaggnnnnnnnnnnnnnnncttctttttgttgtctgtttgtttcctttaaaaaaataacaataatactaccactaacccgacagctgactggtttatacagtactacacgccaggtgggggcgggagggcggtggggtcgggcgggggggacggtcaaagacttcataaataagaggcgggtcccagacccgcaatttgtcaacatgtcttaaataggtgcattatttaaatcttatgtacaacaagaatcactttgcatagcaatggtgaggacacaggacgggtgcagtgatgtgactgggtcttcttgtcccaagggcggggggcgagttcgcagctcagctcggagcctctaggaagaaagcatccttcgtccggcccgcaatggtggcatcggagttgacttttcccacacgacggcatcaaacacaaaggcaaagaaaatccacaaagggtnnnnnnnnnnnnnnnnnnnnnnnnnnnnnnnnnnnnnnnngntgatgctcctcttnttgctacaaagtccactttagatcaggtcaaaggttcccaattacggagctaaaag

SEQ ID NO: 438238 - DNA, 1092 bp, Homo Sapiens
gtgattttcccctttcccaccaatggcatcactgtcacccaaaacaataataattcaccatgttttaaaggtgaagttcattgtcctcaacagcttcaaaatcatataaagctctcactttccgtgcaaccttattatttaactgaatttctgaagatggatataaggattttgtttctgtgtgttgctgtttctgttcttgcagcgataattcaatagctttagctatgtcttcatcctctttgtttttgttcgatgacgtaccattcttggcagcagctgagacagtctgagaacctgctggaggaaaagtaattccttcttctttcatagatttaatagttgcagatatcagactaaactgagggtccttctgaaattcttctgaccactccaccattaaagatttcagtttttcacatactttaggatgtgccttatttttaatcacagcacgtacttctgttgcaaaattcacgggaacatacttctaaatgaaatatctttccacagtttgccacacaagccccaagaagagttagtgcttgcagagcaacatgtggaaccttatgatttacccttttcattatggcttttaggcaatctttcgctccattaggagtacttccaactttgtcacatatgtccataataagactccaatcttctgtagtgttgtactcattcgtggctttttccacgtcttgctcgaaggggttggcggtgaacaaaggcatctcgccggcgcccgagccctagtcgctgctgtctagctgacactcagcaactgctacccgccgggtgacccgcggccgcggctccctagaccgctccgcttcggcctccgtccctgcacttccgccaccgcacctgcccggctcttgcctgacaggccggctcggagtccacccttcgatcccgcgctcctgtcccaacttttctcccggggcgagatccctccgaccatgggcgtcctcccaaggcctttgtcgctgcccctgtcccagacttttgtatgggtcaggcggccgctacggccacctttccagcgctaggaccccggctagccacgaagccggggaccttcccgct

SEQ ID NO: 438239 - DNA, 334 bp, Homo Sapiens
  misc_feature (292)..(292): n is a, c, g, or t
ggaaataaaggtgacatgaactaactattcaatcatgaatggtagaaaaaaatgaaaatgtaacgagatgggatccgggtcaaagtcaggggaggtatagttgaagatattgaaggagtcattatgataccaaagaaaatggaaagaagtggtatccagataggttatccttggagagtatccagggatgtctcttttcctaagaccttagagaaggaaaggatggctgataatatagggaaaagttgacatggaaggattaaataatttttttgaggaattcacgtaaggnatgataatctgaattttcagggctaggctcagaagcagaaat

SEQ ID NO: 438240 - DNA, 468 bp, Homo Sapiens
  misc_feature (19)..(19): n is a, c, g, or t
  misc_feature (33)..(33): n is a, c, g, or t
tttctggcttcctttcttnggttttggattaantccaacagtttatttgtaagccctgcagcagatttctttgataatttagcttttactgaatctcttgccaatgaagaaagctatttcatcgagtgatttatcactttcaaattcattgtgtgagctggaaatattattttatatgagagctatagcaaaataatctgtataaacaaggaatgtgttagcttaaactggatcattttactttttggcatcatgcatctgtactgtaccaaaagtgtttatatgtctgcaaattaaaggtatatattttcgataatttctttctcacttttagcattttatatttgaacatgggcttgttatttcactgaagtgcctgtcatttgtttgtttttagggttaaatgtgggtaacctgtagtattctgctatactaaagtttatattaaatgaattcattactcaaaaa

SEQ ID NO: 438241 - DNA, 1099 bp, Homo Sapiens
ttcctgttgttgtgccacttccaggatacgggaataataagggggtttcttttcccttttaagctttttaaaggaaacattttacttaggcagcacggaatcagtttcttcaaaggtccctttcggaggatcatttaagttagcaccattttcccattggactgtccacttttaaattcaaggttatcatcatccggtggttcttgttcaagcacagcagcctgatcttcaatcatgggcaagggtccagtcagggtcttgatgtgattttctttatcattcagaacttggtctgcgtgtactttggagtcttcaaatgttattttctgtttattaagtccactcacttctcctttccatacttcagcttcttgctgaaaaagctgtttatggcttgtctgaagttgagaattttcattcaaagcatcttttattgctatagcccgtcgttcttcactcattttaaatgtcttgcagatgattttggcttcagctatttgtgatttgagggattttgactcatcttctagagactgtatactttttgaaatatccgccatcaattcatcttgttgagaatgtttagatttctcttcttttaagtctttttctagacagaggatttcatcctcaagttcagaattggacctgttcagcttttcacaggttgcctccaaacttcgtgcttcttctgctgccgccttctcaaagctggcatcctctaaagatgactctacttcatagccttcatactctttttgaataaggctaaacttttcaagtagtttacatttttcttcaattagtccagaaagcgttgcaccaagtttttgctctcttcccacgtaaagccgactcctaaccgatctaaaacttctccacaaaaaaaggagaacaacaaaaaatccaataacagctgcacataccaccagttccgatggaaaaccataaggattctcatctggtctcatactctcaggtagtgctgccacaactctgcgtagctcctccaggaccagccccaggtagggctgaggggtagcaccaggctcctccatagcgtcgaggctgctctggcggtcaccgcagtaacactgcc

SEQ ID NO: 438242 - DNA, 1078 bp, Homo Sapiens
tgggttatctatgggccctttgccatcccccgtcattcaatgcccgttatcatactccgtatggttttccacagcattggcgcccatgtttcattctttaaacagccttccgtccagattctgagggaccttgcctgtatcattaggaacttgttcgcatcgaacttgggagttctcccaaagggtgacctttccggtttattaaagttcactcacgtgttcctttcccatacttcagctttctcgcacaacctgtttctggcttttcctgaagttgagaatgtttcattcaaggcatcttttattgctatcttcagtcgttcttcattcatttgaaatatcttgaaggtcattttggcttcagctacttgtgatttgagggattttgactcatcttctagagactgtatcctttttgaaatatccgccatcaattcatcttgttcagaatgtttggatttctcttcttttaactctttttctagacagagtatttcatcctcaagttcagaattggacctgttcagcttttcacaggttgcctccaaactttgtgcttctgttgcctccttctcaaagctggcatcctttaaagatgactctacttcatagccttcatactctttttgaacaaggctaaatttttcaagtagtttacttttttcttcaattagtccagaaagcattagagcaagctttttctctcgtcccacataaagccgactcctaaccgatctaaaacttctccacaaaaaaaagagaacagcaaaaaatccaacaacagctgcacatatcaccaattcccatggaaaaccataaagattagaatctggtctcataccttcaggcagtgctgccacaaccctgcgtagctcctccaggagcagccccaaatacggttgaggggtagccccgggctcctccatagcgccaaagctgctctcgtggtcgccacagtaaccccggcctgtcggggccacaataaacggcggagaacacacagccttcggtccggaacccgaaatcccgggaattccggaccggtaccagcttcgttgtttttcttgcgtggtggtta

SEQ ID NO: 438243 - DNA, 728 bp, Homo Sapiens
ttctccattctgaaaaacgtctcctgccacattcattctaccaggattaaaaggtcctactccagtcttggtctgtgaagttaaagatggggtgtatgtttgtatattaacacccacaattacttgactgcagtccgttagagacatctcccaagttggtattctgcagtgatgttacatgtgtaatcattaagttcatatctcgcccgtcagtattttctaattggccatcattcacagagcttacacctgtttctaaagttgtaacattagcaatctgaatttcagagtctggttctgtggtgataccactattacccattcctgcatttaccttacttcttgaaaaactggaagtggagaaatccacatcattggttctgtttttagtctcaggaggtcttcgttcaataaaattggaggaatttttctcttgcccttgatttgtttccatgtcctcttcatcatcaatgacaattgtctcacttacacttcccttctgagatgccaactcttttgaggaaggagtaattttggaatcatttccttgtagttcttcattttttgatgatgtaaatgttatggttctttgatcagctaccactggtacagaaggtgggggaggttgtacaggttcgataaaaacaacatcatcatcatcttccactgacgagttctgaaactcatttagtggtccagctaatcctttagtgtctagatgtaatctc

SEQ ID NO: 438244 - DNA, 584 bp, Homo Sapiens
  misc_feature (26)..(26): n is a, c, g, or t
  misc_feature (55)..(55): n is a, c, g, or t
  misc_feature (63)..(63): n is a, c, g, or t
  misc_feature (87)..(87): n is a, c, g, or t
  misc_feature (92)..(92): n is a, c, g, or t
  misc_feature (531)..(531): n is a, c, g, or t
aatttaatgtccttaatccctctccngcaattcctccagccctctccccttggangcctaagnaaagttgaacgaaatctttggcanaaacnggaacttgtaatccccccatgccttgaacatccaagttgggaaatgtagtaaacattcgccccacattgttgaattgcagtcacgatagaaagcagggtattagcgcacagcatttttaattgccaaggaaaattttattttagctttgcattaacatattctaaataatcctttcacttaatgcaatcagattcctgtgacaagccaaatacttgtttttttgcgtgtgtgtgtttccccttcacttttcattgtatgcccttcagaaaaatctgagaagtgggcttccatttttgaaaaacaggacttccttagtaccatagatacgtagattgcaattttgcttttcctgcagcattactgaccttgtgaaatgatgcctatgtatacgtcattaatctatttggcttaacttttaatatctagggaatgctaggnaatacaaggaatttttttaaaaggaatttggcttaaaggcttcaaaactcact

SEQ ID NO: 438245 - DNA, 1727 bp, Homo Sapiens
  misc_feature (43)..(44): n is a, c, g, or t
  misc_feature (54)..(54): n is a, c, g, or t
  misc_feature (1073)..(1090): n is a, c, g, or t
atttggtaacaaatggcttgtgtctgatgcataataaatagannctaatgatgnctatgtagctcttccagagttttaaaggcaaatttatattggcttacagttaacatgcaaattcattcaacaaagcaacgcaaaaatgtattgtagtagtcattcatttttatcaacattcaagaaagatctagacagcagcacgactctcctatgtcggaaccacattataacattgggcacaactgaagtcagatcatacctggtaaaataccctcttgctaattcatcctctagagtcagttcagacttccagcacgatacatgaacaatagcgattaatactgtggtacaaaggtaaatatagacaagagtttggtgtgctagcatacagagttttaaaaatggtgacaaatgaaaccaaacgtcttgccctgttctctcctctccctttgtgagccctggaattctcatggtctcactgaaacattctattttgggaactgaatccaatgatcctagcactgaaattgctccctgggagggaaatttggccacaagggaacattgtacccatttgagaaagggcactgagggaaacattgtggtgtgcaaaagaatggtttgctactagaggcgttcatggaaaatgtgatctttaaaaatatttaactttatcccaaggagtggtatactgtggctcaaattttatttcattatttttggttggattaatgaaacgtgcacaccatcaccatcactcttaattcttcttccaccaaataagacacttgttaggataagaaagagattttactaaagctgacggtgattgagagtcattcagtattcaaagttcctaaagaatcattggttctcttaaagggataaaaaagtaggaaaggctttgttcaaactcctctagtaaacaagtattacttcaactgatacaatggctacatgacatcaaagtactataaattatcaaaactatcgtacagaaaaattacaaattcgttgcaaaatacattatactgctaccattaagaaaaaagtgctttttgttttcctttctttcnnnnnnnnnnnnnnnnnngccagaaaagtattctttcaatatagaaaatcctacatgttaccctgcatgtggctaggatatatcataacggagtttgtactgagtccttctgatttgctggatgaagggctgaaaaatataataatgacttattaaagccgtgctccaagtgaccacaccggctgtcagtggagagatgcctgtttaagacacaagaagatgccctggtctgttgaaccctgccggtcatcacgctgtcccaccaattggctggtctagaatgcacaggccttttgcatgttctgtgtttccttttgttctcctgaattattctcatgtcctcatctagctttgccacctacacgaatcctctgctcagtgatgcctgtattgtctcatgagggggacgatgcaagacggtggacctgctagttttaagaatggatgtccgaggagttcctgggctgttgctctctgagagggctccctcaccaacatcaagtctaggaatccccggagcactgaagaaaccttgtgtaggtccttcactcttggaggtaaactgtcccggatcctccgcatcgcctggaggggaggctcattgaagtaggggggctcgccatcaatcatttatcccgggaattccggaccggta

SEQ ID NO: 438246 - DNA, 292 bp, Homo Sapiens
  misc_feature (109)..(117): n is a, c, g, or t
attttcccacaaaatactattttctccaaattaagagagagagagataaaagtaattttaatatgactagatattgggtatgttttggtttcaaatgtaccatgaaccnnnnnnnnngtaacaggaattctcataatggctttcttcatagtcctatacttacaatttttatgtaaaatattaaagtattaatataaatatgtgagaataaaaacaatctaaatccagaaaatggcagtcctaaatgttcatgagacagattgtattaatttaaccaggactatgtagaagt

SEQ ID NO: 438247 - DNA, 619 bp, Homo Sapiens
  misc_feature (566)..(566): n is a, c, g, or t
  misc_feature (608)..(608): n is a, c, g, or t
gaaaaggcaaacatttatttttatttgcaaatgcagtttctgccaatagttagtgctcacaaaaccttttaagctacagtaacttttggtaaactcaatgaatactttaaaaaatacccgatggtaagaaaattacagaaaaatttccattacactgtcgaaaatgtttggaatccaaaatccactattttctgcaatagtttttaatgtttattctggtttaaaaaagattttctttttcttttctttctacttctacatagtccgggttaaattaatacaatctgtctcatgaacatttagggactgccattttctggatttagattgttttttattctcacatatttatattaatgctttaatattttacataaaacattgatttgctgttttatgaagcaaaatcatagatcatatttatggaggcatttccagtttgaaagaaaactgaaaatctaatcagtagaaggtcattttatgccttttttcctttttaggcagtgataaataattaggcaacctattaattacaaaaattcttaattatggcttaggggcaaccngaggcgctatcacaaattttaaattcatatttgtttacaggnatgtggaaatg

SEQ ID NO: 438248 - DNA, 1008 bp, Homo Sapiens
  misc_feature (32)..(32): n is a, c, g, or t
  misc_feature (47)..(47): n is a, c, g, or t
  misc_feature (84)..(84): n is a, c, g, or t
  misc_feature (163)..(164): n is a, c, g, or t
aaaaagtctgggcaatgcaaccatctgctggncgggtccctggctgnagttgaatcaacatccatgaacccctccttaattggnctgccttgcaagtaactcggccccggtccccctttgttaaggatgcaaccatcccatccaccacctgcaccgtgtcgtnncacctgcagctgcagggacacatcccccaccgcgtccaccagctccgtgaagaagtcggcaatctccgcacagtcctgcaggaacacgtagcggtcctggcggttggttgaagtaggagtcactcaggtttgcaccgctcaagatgacgctgttgtcgaagaggtacaccttaatgtgctggaggccgatggtctcgttgaagcgctcagggatgaggagccgaagcagcccacggaggtgcggcgtgtgaaagagggagactcggacctgctctgggaacctccgcaggagtgggagcagcattgtgcgggagttcttccggcctcgtgagccccgcgtgaagtctaagagaatggagaccttgagatttgaaggaaactttgcttggagtgacttttctagagtactttccaggcagtccaccagctcctgttccaaaggacctgtccccaggtagagggatgccatcacgacccgcctcttggctactcttatctgccccttcatgagctcgaaaaactctgccggggaagaaagcaccctaacgtgagaactggagactccaaattctggaaccaggtttctgatccactggaaccggtgcacgccttctggacacaggcagcaaggtggggaggtgacctggggaacagctggggacagcaagggagccaataacagccatggtgacctcctgcgctggcggtcccggttcctgccgaggcggtcggacaggcgtcccaggagcgcggccagccctgggcggccaggcaggaggcccagcagtcgcctccagaacacgggtcccgccgcagctgccgccgccaccgccatggagactcg

SEQ ID NO: 438249 - DNA, 682 bp, Homo Sapiens
  misc_feature (134)..(265): n is a, c, g, or t
  misc_feature (270)..(270): n is a, c, g, or t
  misc_feature (424)..(424): n is a, c, g, or t
  misc_feature (454)..(454): n is a, c, g, or t
  misc_feature (474)..(474): n is a, c, g, or t
  misc_feature (601)..(601): n is a, c, g, or t
aagagacagggtctcattctgtcatcctggctggactgcaatggtgtgatcacaactcactgcagccttgaactcctggactcaagcaatcctcccacctcagcctcctgagcagttaggactacagatgggtnnnnnnnnnnnnnnnnnnnnnnnnnnnnnnnnnnnnnnnnnnnnnnnnnnnnnnnnnnnnnnnnnnnnnnnnnnnnnnnnnnnnnnnnnnnnnnnnnnnnnnnnnnnnnnnnnnnnnnnnnnnnnnnnnnnnatganccaccatgcccagcctagagaaatttgttaaaataacaaaactggaagacttactaccaaatttcaagacttcctctaaagctataattaagacaatgtggaactactgagaagacaaatagattgatgaaacagatcatttcagaagtatacncatgataaataattgatttttgcaaaaggngccaataacaacgtaagggngaaaatgaaagacatctcccaaaactggtgtcactatgggtcaataatatgggggaaaatataattcaacctttacctcctccattatccataataaaaacatgaaatagatctaacagtaaaaggnaaaaatacactatagctatagaaaacatggaagaaattctatgtaagctcagcatagaataaataatacttcttagaacat

SEQ ID NO: 438250 - DNA, 837 bp, Homo Sapiens
  misc_feature (52)..(159): n is a, c, g, or t
  misc_feature (643)..(669): n is a, c, g, or t
agacttttgggtatagaatcttttttttgagaagaggtctcactccgtcatnnnnnnnnnnnnnnnnnnnnnnnnnnnnnnnnnnnnnnnnnnnnnnnnnnnnnnnnnnnnnnnnnnnnnnnnnnnnnnnnnnnnnnnnnnnnnnnnnnnnnnnnnnnnactgtgcccagctgggatatagaatctaagagttgattgtggaaaacacgtgaatctattgcgcgcatttgtcatttagcaagatggcagcagtccagctgttctttgcagctggagatgaacttttaaaaatccccttcacacttaatgtactgaccgagacagaagtacctgaaaacagctgtgcatggcaggcccggcaatagcttctgacccacagcacccgcgcctcagaagctacggtcacaacttaaaggagtccagggacttgctgcaggctggggggcactgggtggttctcaccagcaggctgcggggcactgtgttctcattggccaaaaacatccttttgctctgtctcgttctttacacagagttcactgacttgaagtatactcagttaaaatcggggctggaggtgcagacggtgtctgaccggaggatgtggccgtgcccgccgagcactcttgatctgagctgaccnnnnnnnnnnnnnnnnnnnnnnnnnnnccttcacctaagacctctgcagcagacctggacagacaggcccctcccgcctgtccatcgctctagctgctaatacaggctggctgtggaatccttcaccgtctcagctggtatcagccccagcctgccttgtgccatatctcagcttggatctctgctagagtcccc

SEQ ID NO: 438251 - DNA, 490 bp, Homo Sapiens
gcggcgggcaccgtgatctccgcaccgagaagagctccccttgccctctagtcgaagctcccgagtgctcggagcacgctcacccctcgcgaacacacccctgcagccgaagcagcccctgaagcccgcagcgcctgcaacaggtccggggcagtgggggaaacttacagcagtggcgactggccgcaacgcacaactgagttctagcgacggtcacgggcaaggaggcgacgaaccggtcgtctcagcccagggaagcggtggcgaatgccccggagaaaggagggccagccggggagaggactgcgccccgaacgatggctcgcggaccggctaccgatggcgttcgcctccgtctgtcgtccccacgccgcggacccggtgtccaggacccgcagagcgtctccggagcgcgtcacggtagggcagagcaagcctgccactgcaggcgccgcggaaggaggcgggctgtgcgctcgggggagggagc

SEQ ID NO: 438252 - DNA, 693 bp, Homo Sapiens
tcctggccttctctttcaggccaccactgaacatggcctcaaagtagcgactgcatgcagccagcactgcccggtggcaagggaaggtcctatttccggcatggagaaggacgtcagtgaagagacgctgctggcgtaaaagattcaggtgagtgaggacgctgtcagcgtaggaggacttgtgaaacagatagatgttaatggagccgctgctggccctggacttgcggttctcatgcacactgactgacattttgcttccactcagcagtggcgactggccgcaacgcacaactgagttctagcgacggtcacgggcaaggaggcgacgaaccggtcgtctcagcccagggaagcggtggcgaatgccccggagaaaggagggccagccggggagaggactgcgccccgaacgatggctcgcggaccggctaccgatggcgttcgcctccgtctgtcgtccccacgccgcggacccggtgtccaggacccgcagagcgtctccggagcgcgtcacggtagggcagagcaagcctgccactgcaggcgccgcggaaggaggcgggctgtgcgctcgggggagggagctagaaagcgccttgtgtgccggcggccgccaggcgtctggaccgggtctccgcagcgccaccgccgcaccgcctcctctccggctgccagagcagtcagcccgct

SEQ ID NO: 438253 - DNA, 430 bp, Homo Sapiens
  misc_feature (37)..(37): n is a, c, g, or t
  misc_feature (55)..(55): n is a, c, g, or t
  misc_feature (219)..(219): n is a, c, g, or t
ccaaaaactcctgggtggaagggaaattgtccaaaanttgaccctcactgccccnggcctcccctttccaggcccccccactgaaacatggccctcaaagtaccgactgcatgcagcccagcacctgcccggtggcaagggaaggtccctatttccggcatggagaaggacgtcagtgaagagacgctgctggcgtaaaagattcaggtgagtgagganctgtcagcgtaggaggacttgtgaaacagatagatgttaatggagccgctgctggccctggacttgcggttctcatgcacactgactgacattttgcttccactcagcagtggcgactggccgcaacgcacaactgagttctagcgacggtcacgggcaaggaggcgacgaaccggtcgtctcagcccagggaagcggtggcgaatgcccc

SEQ ID NO: 438254 - DNA, 248 bp, Homo Sapiens
  misc_feature (146)..(146): n is a, c, g, or t
  misc_feature (229)..(229): n is a, c, g, or t
taatagtgataataataatagtcatttattttaagtctacatgctgagatgccagaacaagtaaaattggattatagattcaagcagtatgtaggtatactttcataaactgaatactgatgtaattttggatgattaaaaacagncttttagtaggtgttcaaaaatctggataattcctttcatgtcatttcaaacatttaggtggcctgtctttgtttttttaggntataacttgcaaacattca

SEQ ID NO: 438255 - DNA, 636 bp, Homo Sapiens
gggttacactgatcttgttccactgattactctctctgacgagtccatcacctgcaacttaaatgaacaagcttacatcccattttgagtgaagattttgaggtttttaatttaaaggctgtgtacagttatacttttttatacacctgttcatttctacttaaattatggcacagattgatgcgcaccagtcttgaggaaacgatctccctattcccttaccctgttactcagccacgccgtgtgtaggcttagcctcaggtggcagatgtttgaggaaaggaattatgccaggaaggtgggaccgggttatggtcgggtttctattgggaatgctctttgtgcttttgggcatctgaatggaagctttacatagaaccttaggtagaactcccccaaatcgccatatttaaaaattattttcactctattcttgcttaaaactgtactcttttgcaaattaacaattttatcactgattcagagttactgtcatgtctcagtgtctatctggatatattatttgatattcagagaatcttaagcactcgtctactgttttaatgagatttaacagcttttaaacagtgagttcgttggtaactgcttgaagtctgtggcatcaagcacacgttt

SEQ ID NO: 438256 - DNA, 2667 bp, Homo Sapiens
  misc_feature (60)..(60): n is a, c, g, or t
  misc_feature (65)..(65): n is a, c, g, or t
agtgcctttagaatcccctgaaatatccaaaataataataatacggaatagaacactganaacangaacagtcctaatcctaaaagcatcctttaccaggatgcatttgccttgaaaaggttagttctcctttttaactctgaaatcaagtgataaaattgttaatttgcaaaagagtacagttttaagcaagaatagagtgaaaataatttttaaatatggcgatttgggggagttctacctaaggttctatgtaaagcttccattcagatgcccaaaagcacaaagagcattcccaatagaaacccgaccataacccggtcccaccttcctggcataattcctttcctcaaacatctgccacctgaggctaagcctacacacggcgtggctgagtaacagggtaagggaatagggagatcgtttcctcaagactggtgcgcatcaatctgtgccataatttaagtagaaatgaacaggtgtataaaaaagtataactgtacacagcctttaaattaaaaacctcaaaatcttcactcaaaatgggatgtaagcttgttcatttaagttgcaggtgatggactcgtcagagagagtaatcagtggaacaagatcagtgtaacccaccattgactcggaaaggagagacaaagtcaagaacatagagatctatgataggccaacaggcacagtgggcggggaggggcggctatttctgttgttctgcgtcttcctgcgctcagatccctccagctgcactcggaaaggtgccgagtcccaggcgaaatgaccagctcatctgccttccaggaacaccatgaagccaagagcaatggaaccatcatctcttgcaggaaaaggagtggatgcccacgtggctggctgaggctcctgggcccgccgcctccgtccccccgctggcctgtccccgactcatcactggatcgcctccacataatttgccgggtataggccaacttgcccgttgtccaagcgtcccttgcaccagccctgctcatcctcgtcctccatcttggtcagctcatccccagccttgaagctcagctcatcatgctcctgcccctcatagtcatacagggcccggactcgcacttccgtccccgaggtggcgtcgtcgtcgaatggattcgagtccccattggcatccgtggaggagaaggggttgttagactcatcgtctgaccagtcggtgggatagctctgggtcttctcgtagctgctcacatttttggccttagtgtcgtccttctcactgacggtgctgcccgtgtcgtcctcatcctcgaaggggttgtagctggactgtgactgcgcagactgggcggggttgctcgggacattaagggtgctgctgggcttactcggcagagactggtcgcctgtctggttgatgcccgtcagggtgacgccgtcagtggccttcttcttctctctccggctgagggttcgattcaggtctgcggaccactcctcaaactgcggccagttcatggccatgcccggcccgtgattggctcggaaccacctcaggtcctccactgcatcagctgctctgatgctctgctccaggtcatggtaaatggctttgtagccagccacattggacaggtctaggtgcttctgaacctccagcagaacctcccggaagaagcgaaggcgtttctcctcgaactgctggcactgctcaaacacctgctccatgttctccatgtactggggtgtgccctggtcgagttccttcagggacttctcatacttctctttggtcttaagaacatcttgcttgcacttttctattttgtcttgcaatttcttgagctgttcagggttgagggatgggtctgccttgctgttggcttctcgtgagatagccagcttctcctctttgcacgctgcatggtgggctttctttgctgcttctacctctttcagcttcttggcccagggcttctgtgccttccgaaagccgtcctcagcttccttggtctccttgaagccgcccatcatctgcttgtgaaaggcttccttctgccagttcttgatcttctcgaagtcatcgttcatcagtgaggccttcacctcgaggtgcagctcgctcaccctctctgcctcggacatgaaggccatccaggccttctccacggtcccgtactggggccctttctccacgagctgcctccagcgccgggcccactcagtgagctgctgcgcatacgccttctcgatgcgcgcccgctcatgcaggcagttcatgaggtcgctgcacaggcggtggccatcgtcgatccgcttcacagtccgcttgtagttcccgacctcccagaagctgtcgctggacacttctactccaacggaatcatcatatgtgacagacattttttcaaaggctgagggagcagcaaagtatacttagtcaggggtcaacttcgaacgctcaaaatctgtagacaaacctcccaatccgtcgcacactccgttcaggctgccacggcgtctccagacccagctccggccgggctcccgctaccgcttttgctccggcagcactgcccagtccctgcccagacccctgcggccgcttctgccgccagccgcgaccgcacccacgctctcagacgaattcgagctcggccgatttggcctgat

SEQ ID NO: 438257 - DNA, 1787 bp, Homo Sapiens
  misc_feature (148)..(156): n is a, c, g, or t
tttttattttcaacataatttactacaggtctctgaagtgtatataaaatgttttagtgcaacatcttacaaatagttttcctttaaaaaaacagaaacaaatcaacagctctctacatcatgcatgggtagttttcttaccccatcnnnnnnnnncctcaataattaacgcagagaaaccattgtttgaaaagaatatgaaaacttgctacagaaacacccggtgaaagagggtgtggtcatattcatgtcctagaatgcgcctagcacagtgtagtttttcataaatgcaacattgtagacatagatgaatccagagtattcagcagttttcctccgtctcagaagactaaagctccagtagacaatgcgcaatgaggtctcacagccactggagggcaccattaccatccatctgacatcgcatttccatagaaatggccaaagaaagaaggtcctggggtttttcatagaaagctcaaaaagttcaacctttgatgctatcccccagcccaatacaaaatacacagaaaaagcaattattaaaatactggcttcggtttctttttttcctttcaaatttcctacaattgctttacatatttgtgtgcagcacctacttctttatcgccgtgaactgaaatctaagatttcaaactgaaatcttagttacacatcctagtcccagccagcgctgtggcaacctcccatttagacagaggaaacgccagtcatcttccctcattgactcagcctataaagtaggagtcagcaaattcccactgaaagcccacatctctgaaataaagaaatggggcaaaagaccttcttttttcatgactgagccgctcctgtacctctaatgtgttgatgcagcataataaatgagaatcagcatgtcaggcaacagcaggattaaggtggtggtgcctgcacacactgtctcacaggagggtacggtatacttgggggagaaaaggcaggtctgtgtgtctgtcagaaaatggctgagcaatcgccaccatgctcccctcagctgggaatcagcaaagtatctgccgagcagcccaggccacctgcattacctgcagaccccttgaaggatcagcacagacactggcctggggaatcccatggcctcccctgcagtctgctcgttctcagaacagggcttcactggaatcttttatcagacttagttccagaatccctgatgactttttccaaactgtgaccccctcttgggattcaggatgtaagttcccagagtaaaggagatggcatgcttggccagaaaaatatgggaaagcaagggtataagaacatcttcataaagggagcaaaaggaaatatttgcaattgatgatgccctaagaaggacaagcagcacctggcccaacagtgtaaaggaacagggtgacaccagccatcatggggctcaaggggcgttaaaataaaaagccaccataacaatgaacaaccaaacaacctagaaccacaagagagatcaagaaagggaaaggaaaaatcccacagacaatgccttgtgatcacagtctgctgagactaggcaaacagaaaggatgacaaagggctgcgtctggactgcccccaggctgatattcttatggcagtgagaggcagggagagaaaaatgaataaggaagacatcactataattaaggaaaatctaattggaaggaagaagaaaaacctagtcttcacacctccagggaggtagatatactctgcactctccaaccctcgtgccgaaatcgccacccagg

SEQ ID NO: 438258 - DNA, 1137 bp, Homo Sapiens
ttgttttaaatgcctttttataaaaccaatgcacctttccccatattataatcatacaaattttaaaaagccgttatttactttcttggaaaaaaggtggccagccgttgttttttgattgggagcatgtgtatttcctgggagttcactttctttaactttatgctccggtttttgatgggtttcctaaggggctctgcatttcccatggactcttccccttggctgttgatgtcatagccctgaagcacggagtcttctcttttgaaggagaagtttttggtggacaccccctgagagggcttttgatcttgccacagaatatggtaggcacagcatcttcgacagagacaatgaccttggccgcctgggactcgcccaccatctcaatgttattttcagccttgacttcgccgctggggtggttgggctggctgagcatctcggtagcagcatcactgctgctgatgtgactatccatcatggctggggcctcatgggacgtggcaggggcaaaagaaatttccatgccactgggaagtttctccatcactgtgtgacctgagctgtccactgatgcaccactgtcatacagtgtctcagggggaggctcggatttccggtgggctgccactgacaggtctagggctgcatcttcctggaagattggtggactgacttcaccagccttgagccagggcactgacttcatggagagatccagggcctcgttctcacttcccatcttaatgaccgtgtggcggctgagctggaagtactccttaggctggaggatgtcaaagggcttcagttcatctttttccagaggggtctgggtgcctttaaaggggtgcaggccgaaggaagatggtggcttggggaaactggagctgaacttggattcagaactctgaggcaccgggatggggatgggaatagggactggcacaggcaaggggacgattacaggatacggcaccaagagggtggctggtgggaccaggggggacaagggggagctaaaaggctgtgggggcacaggggcatagccaggaggaggctgacagggtgggggcccgagagtgccctgggagggaaacaaattcttgagcacagcttcaaatggcaaagtgggct

SEQ ID NO: 438259 - DNA, 462 bp, Homo Sapiens
  misc_feature (301)..(345): n is a, c, g, or t
acttctaaaaatatttcccctaaaaaagaatccactcatctaattttaaagaaaatatacttcttacacaagacaatccaaactgatgcaaaatatttattccaagttagttattttatgcagtagtttccccctcgagacttgtgataaccacatcttttaaatctgtaaataatgttatcaaaataatcttaatctttgaaatctcacaaaaatttatattttacaatccaccctgaatatcaaggctgcaagaataacacaacatttcctatatccaaatattttacagctgtacccnnnnnnnnnnnnnnnnnnnnnnnnnnnnnnnnnnnnnnnnnnnnncccacatatgcttggttaagggctaaagttacccgagcagccaaaaataaaatttgcattgacaatgattgcttgatcacaggggtgagtgccccagggcttgtagtagaagctgtt

SEQ ID NO: 438260 - DNA, 341 bp, Homo Sapiens
  misc_feature (75)..(75): n is a, c, g, or t
  misc_feature (88)..(88): n is a, c, g, or t
ttatattattaacctttggttcaacattaccacttactactctactctcagaaatttctttcaagcattcacctntcaaatatatttngggtttattatcttttccatttatttgaaatgtacttgttctctgtcctttcttttcagactctcgattttcattattctttttgtcagtggtattttttagctttatttgatcactacatttattaactggtctctcctctaatttcttctgctgacttggtttttttacccattacctggatgtttttgtccactgggagaggcagctgtggagcctatccactcccactgtccgaggttggaccagctca

SEQ ID NO: 438261 - DNA, 2571 bp, Homo Sapiens
tttttttactttttatagtgtttattaaatcaaggaccggttagatagatgatgggctaggcaggtgggggaagacagagctcactgccctgtggggtctctgtggggccagcccctgatgcccatgtggccactgatgcccagcttcccccaacaccccaacacaggcccaggacaatattacaaaagtgaacaaatgcaacctttttctgcttttacaaatgacatgtctccatccccggccagcaggggtaggggaggccggttgaaagtgacactccgttaaaaaggcaacaacttttataaaatgaagactaaggaaacagcccagggttcggaagctgagatgctaccctgggggtagaagcatagacatgggtcgggcagaccttgtctcctttcacggcattcctgggagggtaagaagggctgtcgtgctcagggccagtggggactgaatccaggaggccccttggagatcccagccagatgaggctccagaactgcagcaactccttggggcagcatctagaggatgctcaggggaaaatgggtaggtttccagtctggatgctgggggaccccaacccagggtgagaaactggctaggctggaaccaatgtgccctaagcttccagaggctccgaagggcagagtgacttagcccatgccgcacagctggtcagaggcccagagtcccacttgtgaggctcttgcctgtcctgctgctgctactcctgtgctaatggggaacaggcaagggcagcaaggggagcccaggcggggagggtggggcttattagaggagacaagaaagtgcattgggtccgggctgggaggcaggaggctgtgctccagtcatgccactgcccgcaggaacttagattagcctttttctttctcaaggcctcagtttccccatctgtcacatgagaagggtggacttgattctttgcaattccttctaccattaaggttctagggaaatagaaaaggatgaagcgggcctcatggcctcatggcaaagaaagggctatgttagaaaagaaactcgcccctgagtgactgggccatgggcccaaggggacactcagcccagtggacctgaactctgccctgcagcagggggtcccacccaccctctgcccattgcgggtcaggccggcccaggcatgagggaaggcacttgggggataagtggggaagggaagcaggaggggacccgagtctggtttggcatcgaagtccctctgctcatggtttggggaagcaacgtagacaaaggggtgagactttgctcctaggtgtggctcccaggtccaaagcctctcctaggcccacaactcctgtggtgacgctgccacataggcctgcgggctccccactggtgttggcacattgaacataagttactcgggacctgaggcagcccaggacagcagtctgttatgtggccctgggccacaccatttgtcacaagatggtggggcccctggcagcagattcccgggtgtctacgcagtgcagggccaccttggggctggagccaggcctccgggggtaggtgccctcccgcaccaggcgccggcaccgcacatcctggcccacgctgacgctctgcagtgccgggaggtggaggagcagcgcctcaggcaagggcaccaggttggtgcccgaaaggtcccagctcctgcagggagctcaggcctgaaaacacctcagctcctgcccagttaagcttggggttgcccgacaggtccaggacctgcaggcccggtagctcacggaagccactgggcgccagctcagggagcctctgcaggctggccagagacaggtgtgtaaggcctcccagccccgcgaaggcacccggaccaatgacagctagagggttcccatccaggctcaggtagcgcaggggcaagtctcggaggttgggcacggcatggagccggttccaggccaggttcaggctctgaatggtgggcgcaggcaggccggccctcgtggggtggggcacgaggcggtgaatgaggttgtgggagaggtccacgtgtagtgcccggccctgactgtgcgtcgtgaaggcagacactgagacctcccggagctggttgtggctaaggttcacgtcgctcaggggtgagctggtgaagctctcggctggcagggctgtcaggccattgtggctgaggtcaagcgactccaggtagcgaaggcgggagaaggcagtgggtgagatgctgtgtgagcaggttgtggctgagatccaggccagccaacgtcgtgtagcccggccccgccaacactgactcattcaccatctccagccggttggaggacaggtccaagtgggctgtgtccagagggatgggcaccggcatgatgtgggggcccaggccgctacaatccacccgagtcaggctgaagctgtcgaaaaggccgaaggtctccacctcgcattggcacccggggaagcatggccgggttgtctgggccccactcacggccagcagcagcagcaggggccacggcatggtgggggctggaagcctgcgccacagccgcctc

SEQ ID NO: 438262 - DNA, 627 bp, Homo Sapiens
  misc_feature (118)..(118): n is a, c, g, or t
aatgcttttgtttgccttgaaatccccatatttaaatacaggggggtaaaattgttttccccactagtgagcatgggcttaaaaaggtagagacacactgctctgggtatttttggtnaagcatgagtcgctcagctgggttctctattcctggatacctgcaggtggtgctatggtaaatgcacagcattgaggttgcttctttcggacctcaggctaagcctggcttttaaacaacggtctcatcattcacagccactcagtccccttcttcacacagagctttcagattggtcaaccttgaagtaataaccaacaaggatgatgaaaccatgatcatactttcccagcttatggaaggggcctttcagagggctgctgaagtcagcacacagagtcactgtagctgctgaaatgctgttactttaatatatctcgtttggtgtaccgttttgtacggaattagtcactgttatgtgggaaggtgcaactgaaaatgcaagtagctgtccttagcgaggatgctcacagtgggccaacagacccaggagggcttgacacagaatgccagggtttgaagcagaatggcagaacaggacatcaagccagagctacaccaggctgact

SEQ ID NO: 438263 - DNA, 698 bp, Homo Sapiens
acctttggattgatctgcttttttttgatacctttacttttcaggatgaaggcgcggggtttctggatccgactgagggactggagaaggctacgggggtcctcgccctgccagggcaatcctttgatgctcttgatcatttggttatgcaaatcgcggtaaagtttttccgaaggggtgctggctcctcttggcagctcttctgggtgactttgggcaccagggctgctcatacctgcagccttttcggccctctcggcccgcaggcgtccggcctcccgaagcactgccatggcccggatagcagcccggagcacggcctcatcggaacacggccacggggtccatgccgatgagctcccgcacgtaggagctgtcactgccccgcagcagggccacgatgtctggccgcatgtagtccatgttcttctcccggaagtccttgatctgatatttcaccttccctgcgaagtgctggatgatgaaagctggctccatgaccggggtgcccatgaagtacttattgtcctcatgttgctgtttgaactggccagcaaggtctggctcgtggcgtgagggaagatgctctcctcgtcccacacgtagaagaggcccgtacgtttactgctgatgagatggatgcaggcgacattgactgtgtagcacgtgtagtgccacgatgatccctctcgctgata

SEQ ID NO: 438264 - DNA, 855 bp, Homo Sapiens
  misc_feature (153)..(194): n is a, c, g, or t
gctcctcttcctcgtcactggaggaatcctcactgctagaactcttccgggtaggggtggtagctgctttcactggggccttggccacaacttgctttttaggtacagtcttcttgggggtggctgctgccttctcttcctctgagtcatcannnnnnnnnnnnnnnnnnnnnnnnnnnnnnnnnnnnnnnnnnttaccattggctattttaggtgctgctcgagctggtttgggaggggctttagtctgagctttaactgtcacaggtgttatctttggcttctggttctttggtggctcatcctcggagcttgagtcagaatcagaatcagagctcttggccttcttaggaggagctttggctgccttggcttggggcttaactcccttctggacaggctgtttcttttggtcctcctcatcatcatcatcactggactcttcactgctgctactctctgatgctttggctgcagccttcccaggaggcagaccgactcgcttggcaggtacagcagccttctttgctggaggcccttgaacttcctcctcctcctcgctgctgtcctcactgtcactggatgaggccttcttcttagctttcttagccactggtccatttgcctgtaactttcgctctgggaccttggcagacttgagccagaagctatagatgtctaagagggaagaggcattggcatcctgctgtgtagctcctgtcgctttggcgaacttattggccacctctgagagttggttatcgcgcaggaagccgagcacgaggggatacaggtcgctgggaaccacgcggcgaatgccggcgtccgcctcgtgccgaattcgccactcaggcc

SEQ ID NO: 438265 - DNA, 861 bp, Homo Sapiens
  misc_feature (153)..(194): n is a, c, g, or t
gctcctcttcctcgtcactggaggaatcctcactgctagaactcttccgggtaggggtggtagctgctttcactggggccttggccacaacttgctttttaggtacagtcttcttgggggtggctgctgccttctcctcctctgagtcatcannnnnnnnnnnnnnnnnnnnnnnnnnnnnnnnnnnnnnnnnnttaccattggctattttaggtgctgctcgagctggtttgggaggggctttagtctgagctttaactgtcacaggtgttatctttggcttctggttctttggtggctcatcctcggagcttgagtcagaatcagaatcagagctcttggccttcttaggaggagctttggctgccttggcttggggcttaactcccttctggacaggctgtttcttttggtcctcctcatcatcatcatcactggactcttcactgctgctactctctgatgctttggctgcagccttcccaggaggcagaccgactcgcttggcaggtacagcagccttctttgctggaggcccttgaacttcctcctcctcctcgctgctgtcctcactgtcactggatgaggccttcttcttagctttcttagccactggtccatttgcctgtaactttcgctctgggaccttggcagacttgagccagaagctatagatgtctaagagggaagaggcattggcatcctgctgtgtagctcctgtcgctttggcgaacttattggccacctctgagagttggttatcgcgcaggaagccgagcacgaggggatacaggtcgctgggaaccacgcggcgaatgccggcgtccgccatcctccaggcaatacgcgtcactacccgct

SEQ ID NO: 438266 - DNA, 958 bp, Homo Sapiens
ctttcaccaacaggccccatttttggtggtttgtggggtgctgtcaaagttagtttgactggaaaaaacacgcttcaacaatttccctttagaactttatagggtgtttccacatacaggtttttctttcccttccagcaggtcccacaggtgaatggaggcatgttcatactgttcattcaacctcaagctcatgtcccgttcagggtctactagcttatagaattcatccaacaatgacaactcctcttcggacaatattggcactccattcaaaccttgtttcaggtcagtccgcacttcatcatctcccaatttgtccaaaacatactgtagctcaagtacagtttttaaacgtttctgttcagcttcttctctcataagctgctcccgacgtgctgtcttctttattgttttctgaatatcttgacttagtgccatgaaactcctctgtaattcttttgcaaactccaaattatttgtgacttcctggtacttagaaacggcatccagctgatcttgattaagcctttcccctttgttcattcgttcctggtaatcatcaagcttaccctttttcttctccaggttccgaagtttcttgtcgatcaccccgagaatctgcttcatggcctcggtctggacagcgccggtgccggttgcggggtgctgagaagccggcgcggcggccccggctcccgcggccgcctcactcccggaggaacccgacggcggtggcggtccggacgacttgctgccgctcccgctgtggctggtggccgagggcatcgtgcgcgcgcggaggccgctggaaatcacgagtgggcagctgagggggcaagggtggcggtcccttccgggcagtgtcgcgcgctccgtgggcgcaggccgcttcgccctgtcccgctgcaccgagagccgctccctcgtgccgaattcgccacccaggcctcgctcc

SEQ ID NO: 438267 - DNA, 1906 bp, Homo Sapiens
  misc_feature (62)..(377): n is a, c, g, or t
  misc_feature (418)..(576): n is a, c, g, or t
  misc_feature (608)..(698): n is a, c, g, or t
  misc_feature (1872)..(1872): n is a, c, g, or t
  misc_feature (1874)..(1874): n is a, c, g, or t
gcgcggcggcgccggtggggacgaggattgggaggcgcggcggggcgagttaaggcggcgcnnnnnnnnnnnnnnnnnnnnnnnnnnnnnnnnnnnnnnnnnnnnnnnnnnnnnnnnnnnnnnnnnnnnnnnnnnnnnnnnnnnnnnnnnnnnnnnnnnnnnnnnnnnnnnnnnnnnnnnnnnnnnnnnnnnnnnnnnnnnnnnnnnnnnnnnnnnnnnnnnnnnnnnnnnnnnnnnnnnnnnnnnnnnnnnnnnnnnnnnnnnnnnnnnnnnnnnnnnnnnnnnnnnnnnnnnnnnnnnnnnnnnnnnnnnnnnnnnnnnnnnnnnnnnnnnnnnnnnnnnnnnnnnnnnnnnnnnnnnnnnnnnnnnnnnnnnnncgggtgaggacgagcggaggcgggtggcgggggaacaggcnnnnnnnnnnnnnnnnnnnnnnnnnnnnnnnnnnnnnnnnnnnnnnnnnnnnnnnnnnnnnnnnnnnnnnnnnnnnnnnnnnnnnnnnnnnnnnnnnnnnnnnnnnnnnnnnnnnnnnnnnnnnnnnnnnnnnnnnnnnnnnnnnnnnnnnnnnnnnnnataggtcgcggaaaccgagccggagtcgaaannnnnnnnnnnnnnnnnnnnnnnnnnnnnnnnnnnnnnnnnnnnnnnnnnnnnnnnnnnnnnnnnnnnnnnnnnnnnnnnnnnnnnnnnnnactcatcggcgtgctccttttcgccgctggtgaagggtgtttgtggcatgggcggtctatttacatgctcggttgattcagcttcgctgttgctcagtgtactcttctgctggctcaggtttcagcttcaggtacctggtcttcaactgcaggtgctgaggctgcctcttcttcctcacacagcccattctggtggttgtgggtgctgtcaaagtagtttgactgaaaaacacgctcaacaatttcctttagaactttataggtggttccacatacaggtttttccttcccttccagcaggtcccacaggtgaatggaggcatgttcatactgttcattcaacctcaagctcatgtcccgttcagggtctactagcttatagaattcatccaacaatgacaactcctcttcggacaatattggcactccattcaaaccttgtttcaggtcagtccgcacttcatcatctcccaatttgtccaaaacatactgtagctcaagtacagtttttaaacgtttctgttcagcttcttctctcataagctgctcccgacgtgctgtcttctttattgttttctgaatatcttgacttagtgccatgaaactcctctgtaattcttttgcaaactccaaattatttgtgacttcctggtacttagaaacggcatccagctgatcttgattaagcctttcccctttgttcattcgttcctggtaatcatcaagcttaccctttttcttctccaggttccgaagtttcttgtcgatcaccccgagaatctgcttcatggcctcggtctggacagcgccggtgccggttgcggggtgctgagaagccggcgcggcggccccggctcccgcggccgcctcactcccggaggaacccgacggcggtggcggtccggacgacttgctgccgctcccgctgtggctggtggccgagggcatcttcagaccgcaaggagagagaagaaagcgggaggattgtaaaacgacggccagtcaaggatgacaggacgagcggccgagacgccccgcatcttcgacgtacttcgagcctcggccgactgttggcactgattccagtaacattcgatataaatgtatgttatacagtcgtgatcacagtccagcacagccgtcggtaggagcgtccgagtgccccgctattctncngctctgaccatgcatgtccctgtgcgactacg

SEQ ID NO: 438268 - DNA, 618 bp, Homo Sapiens
gtcagacatttaaaataaaaagcaattgaaccgggtagccaaacttaggcaaaaggaataaatatttggcaacattttgactttaactgccaatctgagattagtttcttcagaaatttggaagctgcaaaacgttgcctttcttattccatgaaaggcagggcaggcaaaggtaagaaaactgctgagtgggctccttgtaccagcaccaaccagcagcccttgacagcatagatgggatgagtgtaagggctatccttagcataagggaaagacggttataagctgagaagattgaaagaagaatggagccacaaagagaatagcataaataacaagaaggaaacatgaagaacaagcacttaagatattaactttcagtctttctccatttcttgatgtctaatgaggcaaaataactgggcaaggaccaccaagatgaagaagttaaataaaatgtcacaatgaaattgaggtgcaataatacaactgttgactgactttccaaaaccacggtgatcggtagagtatcatcaatgttaccgaggattttgtttctgcctcattataactcacttccatgtattttgtcagtatagtacgtatatttaagcaccc

SEQ ID NO: 438269 - DNA, 563 bp, Homo Sapiens
cagcagcattctcacaagggtttggggaacagggagccaatactgtctgacaattcttgcctgtgtatggcagcacacagtggcaagtgtagccacttatgtcatcaaagcaggttccttggttcaggcatggatttgaggcacattcatcaatattcacctggcagttatagcctttaaagcccttcttgcaagtacacctgtatccattcaccagattgtcacaagttcctccattctggcatggattcgaaaggcaatcatttttgtccacttcacagttgatgccaacccagcctgcatcacagagacacttatatccactgagacctccagtacagtttccatggatgcagggattgctcaggcattcgttcacctgtgggtagcagctggggtgatggggtccctcggggcatatacagcggaaaccattcacaccgttgatacatagttgcacccttgcgacagggattgggggcacactcatcaatgtcaatgttacatctctggcctgtgaaatcctggtgagcagacacaactgtagcgattaattgccatcc

SEQ ID NO: 438270 - DNA, 496 bp, Homo Sapiens
agacactaaagtgcaaagaagagcccttcctagagagcatggaacaacagttttctgaattgaagaaaacactttctagtgttcagaataaagtccaagaagctcttcagagagcaagcacagctttaagtaatgagcagcaagccagacgtgactgtcaggaacaagctaaaatagctgtggaagctcagaataagtatgagagagaattgatgctgcatgctgctgatgttgaagctctacaagctgcgaaggagcaggtttcaaaaatggcatcagtccgtcagcatttggaagaaacaacacagaaagcagaatcacagttgttggagtgtaaagcatcttgggaggaaagagagagaatgttaaaggatgaagtttccaaatgtgtatgtcgctgtgaagatctggagaaacaaaacagattacttcatgatcagatcgaaaaattaagtgacaaggtcgttgcctctgtgaaggaaggtgtacaaggtcc

SEQ ID NO: 438271 - DNA, 1588 bp, Homo Sapiens
  misc_feature (823)..(869): n is a, c, g, or t
cgtaagcttctcggcgcacagcttctccccacatgcttctcttctccagtgcaaatgggggtgggttgggcctgtctccctgtgcaccagcctcttgggggtccagaggagagaatgtgggggtgtcagggctgatgagggcaatgggggccatcgtgggacccgccctgccccccaccccgggaatccacgggaggacggaagatttggccgccgctgccgcaccaggcagctattgggagcctggggatgcaggcccttccggggcagagccattgggtatcggaggaggcgtgagggcctgggcactctggctttggggaagccccaagggctctgggctcttctccccttctgtggtctgggggggctggtgggccccggaggctgggacagaggtagaggggtctctggttgcactgtccgaggagctgggggcagaacggatcccgtggaaggtggcctgaaggtccccgatgctaaccaaggcctggcaaggggctgagggctccgtgactttgctgccttctgtggcttcctgaggtgctgaggggggtgtggggtcctgagacctgagctgcagggcgtcacgggcaggagggctggccaggctctgagtggggaggccctggggcacactgaggggcccctgtggggctggaggcccagtgtgcagctcttcctccccggagactcgggggctggtcggggcatctgtaggcactgggtcaaaggtggctgtccagctggggcctggaggctgagggccagggctggggtaggacagaggggtggcccctccacgggctgcacagccaatgcnnnnnnnnnnnnnnnnnnnnnnnnnnnnnnnnnnnnnnnnnnnnnnnctgtctgtgctgcctccactccggacaccaggtggctggcccagacgggcccccctggccagctggttgccctggcaggcgccatcttctccatcagactcccctgagccctgggcctcttcctcgtcctcctcttcctcatcatcatcaaactgctggatgcggtccttgtagcatatctcaagtaggttggcgttggggttctcatcgtcagcattgagggagaaggtgatgttggctgtcttgtcaaaaggtgcgttcacactctcctcctgctccccaaactcctcatcattgaagccgaagtggtcaatgaaggcagaggtcatgcgctgcatctggaagtccatgaaggcctgctgcagcacagcctcctcagggaagttgaactccttgagccggtcgtcctcatcgtcactggaggagtgtaggtggtgggtgttcaccaggtccaccatgttcttcttgttggtctccgccaggggccccgatacgaaggcttcccactgctcctgctgctcgctgggcagctccttcagcagctgccgcagctgctctgcattgggccccttctccgtgttctgcaccagggcaccggccactcttgtcaggtgacccatgtagcctttccgagggcctcccgcacactgtacacggtcgttctcctcccaggacgtcaggatccgctccaccaggcggcactgctgcagcagatgttc

SEQ ID NO: 438272 - DNA, 441 bp, Homo Sapiens
  misc_feature (15)..(15): n is a, c, g, or t
tggtatacttttgtntttttttctacttgttagttgtattagtatcaaatggcataataaagttactttgtttgccatttcccactcatctgaaaatcacaaaaagcatttatttctaagatttatatccactgaccttttccccaaagttattttcctgttacttgtatttcatctttgcccttatttctttaatatttgtattagaattagcttgctcttgtttccttcacggcaaatgtgttacattgcccactgggtggcttctgcgggtgcccctacccacccctcgtcttggagcagagaagtcctgttagcctaggcagcatagtggctgctgtcagtgcgaggagttgtgcttctctagcatggtctgtgatgtcatctggacataattaattagactaatccgaatagaggaccaagacagccctgcctgcg

SEQ ID NO: 438273 - DNA, 935 bp, Homo Sapiens
  misc_feature (41)..(41): n is a, c, g, or t
  misc_feature (56)..(56): n is a, c, g, or t
  misc_feature (90)..(90): n is a, c, g, or t
ccatgccagctcgcctccagctcttcatccggttgtccttnagtccagctgggacncagtgccgtgcgtggtctgtgcctccttgcttgngccgcagctcccacttctcacgctccagcaggtccttctccttggccagcgctttgaccgcatcctcgctctccttgcggtgctgctcatagttgcggatgaagtctcggagctgctcctcgcggctctccagtgtggcatacagctgctgcatctggctcaccaggtctgtcttctcgccctttaagcgcttccgatcagctttcatggcctgcaaggcttctttggctctggctagctcctgctccttctgggccagctggaccctgagctcggtggccgagaggacctcagaggacttgccgccctgcgactcctccaggtccttcgccaacatctccttcatctgccggagaaggtgaacttcctcctggagccgcgacacttcttcccgcaggagcacttgcgctccaagctgggggttctccatgttcgtcgccgccgagtcccccgccgccgaggcgctggccgcggctcccgggcccgggccggggccgccgccgccgctcagttccgccagtctccggttggtggccgtgagttcggctcgcaggttggtcacctcctggctggccgactggaccgccccatcgatgcggagcgcgagctgcttattgtcttccatcatgctcaggattttggcctgggggcgagagaggtgacaaagagctgcatgatgcgcggggggcgcgcggccgggcacccccggctctacctgttgtgtcctccgcggcccggcttcgcccgcgccccgacccccaggcaccggcagcgccggttcctccggcacaggaatgacagcggcgcctccagccctagccgcggcggtggcgaggcggcggggg

SEQ ID NO: 438274 - DNA, 1062 bp, Homo Sapiens
  misc_feature (222)..(222): n is a, c, g, or t
  misc_feature (326)..(326): n is a, c, g, or t
gggttaaacccccggaaaccccctttaacccgggatgtttttttccaccccagggttcttcccgcccattcaggggggaatgttaggtttccccttggttcctgggttttgggaaaaaagccgggaaaaagggaaagtaggtggtccaacctttctgtctcttttcaggaaaaaaggagccctgttggggtccaacatgtaattcctcgtgtggtaactganccgtaggtgatattccccgcccagcggcaggggctccttgctgtgttggaaggggtgctcgaagaccacggcggccagcacgctggacgagcagttgtcgtacntaatgtagtcctcaaagtccttctcggagggaaagccgcgcactcgcatgttgatcacaagtgccctgcgcactgtctcagtgacggtcttggcagcagtcactgtgagaagggatgtaggcaagctcccaggtgtctcctggcggagggaaggtgaagaacagaggcagctcctggatggactggcccgggtagatggtggcgttgggcacattttccagactgaatcttcaacgcggagccacgatgaggatcccaagaaaacaagcatatggcaggtaagagttccaggaccgtcaccaggaccttccgcttctgcagggtgtagttcttccagaggaggagcgccagctgcctgagcacagccatcgtcttgctgaaagggacgcccagtgctgctagagaagtaggtggtctgagtaagttcaagtaggcgctgcaacccgcaggaaataggagaaacgtgctctgaaaactgagtgtaaagagggcgaggtgtgcagacgtggctgctctgtcctggagaggcagggaaggcgatggaggaggggcagtctagagagcccctggtgctggtccactcgctacaactgcaggcagagaggagtccttcccgctcagcgtccttcatgtgcggaaaagcctccttgactcacagtggaagagtttcaggttcagttgctcagctccacactcatggctgggtcccagaagagatcccgggaattccggaccg

SEQ ID NO: 438275 - DNA, 1131 bp, Homo Sapiens
  misc_feature (886)..(886): n is a, c, g, or t
  misc_feature (961)..(961): n is a, c, g, or t
  misc_feature (1105)..(1106): n is a, c, g, or t
ttttgagaccgggcaagaggggcgggactggtgcggccgagtgacagttgaccggttttaaccaagtgactggttctagccacgttatgtgcggcccagccatgttccctgccggtcctccgtggcccagagtccgagtcgtgcaggtgctgtgggccctgctggcagtgctcctggcgtcgtggaggctgtgggcgatcaaggatttccaggaatgcacctggcaggttgtcctgaacgagtttaagagggtaggcgagagtggtgtgagcgacagcttctttgagcaagagcccgtggacacagtgagcagcttgtttcacatgctggtggactcacccatcgacccgagcgagaaatacctgggcttcccttactacctgaagatcaactactcctgcgaggaaaagccctctgaggacctggtgcgcatgggccacctgacggggctaaagcccctggtgctggtcaccttccagtccccagtcaacttctaccgctggaagatagagcagctgcagatccagatggaggctgcccccttccgcagcaaagagccatgcatggcagaagaagtgtgtagcatgagctggtacacgcccatgcccatcaagaaaggcagtgtggtcatgcgtgtggacatcagcagcaatggcctggggaccttcattccagataaaaggttccagatgaatatcaacggcttcctgaagagagaccgggacaataacatccaattcactgtgggagaggagctcttcaacctgatgccccagtactttgtgggtgtctcatcgaggcccttgtggcacactgtggaccagtcacctgtgcttatcctgggagagcattcccaatgagaagtacgtcctgatgactgacaccnagcttcaaggacttctctctcgtggagctgagcattgacagttgcttggttgggctccttctactgcccccattnctgggcttccccgccccatctatgacacctattgccacccaagagcacccctctttcatttcgggagaaccaagctggcctactaattttacaggcacctattacccacctcctatgagaaaaaacccccggagagtggccaanntgggattctgggccccgggccaaag

SEQ ID NO: 438276 - DNA, 863 bp, Homo Sapiens
ggcagttcctgggcccgttgaaaatacccgtcccatctttcaacaggaggacagaaacaccggggattccttgcagggcttaacccatcccttacattctgtacagttatggaatttcagtacatgtcttgcagttttcactgcatttccggcaaagatttttcttggtatcctgatatgacccatcagggcagtgagtaacacagctgttggtttcttcattcagaaagtatccatatttgcaggacatgcattggtcaccatggctcccaaagcaggactcacagttgggggcacacttcctgcagcgcttcttgtcggcgtggtagtggccaggggggcagctggagacacagatcctggtattgtttttcagcttgtagtagtagtgcaaacagtcattgcagtggtctggtcctggcccgtcacagccaacctcactgcactcagggtcgcagggacctgcataatcctctgtgccatagtcgtctgtggggtcttcaactcggctatagcggaaccgttccactttcggaaattcattggttggtgaatatggctgcacggaggtgccgtagaggaccaaagaccattctttcaatttacctggagtcttaaagttccttagctgagagggagtatcataaacttcaaggacccagtcaccagcagctctttctccccagcaatgaatggtcatgaactcccagtttttgaatccttccatggagtgatcaaatagcctgttggccaaaagctgagacctagttccagagggcgaggtcaggtagatggccaggtctcctctcctggggtgggtgatggtgatgcgcacaacgacgtgctccaggtagttgacatgg

SEQ ID NO: 438277 - DNA, 946 bp, Homo Sapiens
  misc_feature (49)..(92): n is a, c, g, or t
  misc_feature (102)..(139): n is a, c, g, or t
  misc_feature (856)..(857): n is a, c, g, or t
  misc_feature (900)..(900): n is a, c, g, or t
  misc_feature (912)..(912): n is a, c, g, or t
  misc_feature (924)..(924): n is a, c, g, or t
tccatttaagttctgacaaaacagttcaccatctccctgcacaaacttnnnnnnnnnnnnnnnnnnnnnnnnnnnnnnnnnnnnnnnnnnnngtggcttgcnnnnnnnnnnnnnnnnnnnnnnnnnnnnnnnnnnnnnnaataatatggaataatctataagtctacaggaacaaagaaatctaagatggctgctcagccttgaaatgtacatgttttgcagcaaagttgttgaagaaccttccgttggcacagattgttctttttcacaagcatacagaagcctccttccgcccaggactcttccgttgcatccttgcaaatggctcccatttgacacattcctaagtctaagagatacccactagggcagcttgtacagttcttgaatcctgggccattgcacggtcaaacaactgatatcacattttttgcaggatttgtatccattctctgaagagtggtcaaagtaatagctgatactacagctctgcacgcatcttcccatcctcccatggaagtagccctctgtgcagttaatgcacccatcagctcctgccccagcacaagttggcgcagaagcggtgggcagggctggcagtcctggccgttggaataccgtccagtcttcacaggagacagagcaccgggatccctgcagggttaacccatccctacattctgtacagttatggaattcagtacatgtcttcagttttcactgcatttccggcaaagatttttcttggtatcctgatatgacccatcagggcagtgagtaacacagctgttggtttcttcattcagaaagtatccatatttgcaggacatgcattggtcaccatggctcccaaagnnggactcacagttgggggcacacttcctgcagcgcttcttgtgngcgtggtagtgnccaggggggcanctggagacacagatcgctggcc

SEQ ID NO: 438278 - DNA, 1229 bp, Homo Sapiens
tggactgccaggaccctcggtccgtttgctggtactggcacccagaggatcgtggatcctgcagaggcactgggacttataggcacttcgattcttcagaggttcagggactatacgaccttgattccttggacgactgtaggactgtgggggcccttgatccttaactagtacttgggagcatgggggtcttagattcttcacggactcggggaccacaggacctgtgattcctctacaggtcgccgacaatctagcagaatcgtgaacctgttcgcactgctctgggactaccacatcgttgatcctgtgacgtgggccctgagaccacgtaaactttcgattctttacaggctcagagaccatggaactttgattctttatgggtgctgtgcccatgcgcactgttcatccttgcggatcgactctgggaccatgggatcttgactccttgataggtcgctgagcaccatagggacctctcatccgttgacaggtgctagggatctatgggaccgttcaccctttgacaggtgactggtgactattgggaccattgatccattgacaaggtgctgagaccatgggacctctagatccttgacagattgctgagatccatgggaccattcatccttgacaggatgccatgggaccactaggacgctttgattccttcacacggctcaggaatccataggaccgttgatcctctgtacgagactctggtaccacagagccttgatccttgactttctgctggaagcataggactttgattctttggaggaactgggaccgagggaccttggtccttgactggtgctgagataacagggctttcattctttaaaggctcagggaccgtgtgatcttgatccttgactggtaatgggatcatgggacctagatcctttggaggccctgggaccacagaaccttgcttcttcagaggctcttgcaccataggaccttgacctttcagaaggcctgggaccacagaaccttgatccttgtctggctctgtggctacaggaccttgagtcttacttgaatcactgacgggttgagccaggctctctttcgcctcagcctgtttattgttcatctctttgctttgctccttgtcgtctggcttggtggtactcgggccctccgcgctctttttcttggcagcctggcctgacaccgcctgcttgtctttggcctatcctcgtgggcatagggcc

SEQ ID NO: 438279 - DNA, 1573 bp, Homo Sapiens
  misc_feature (441)..(451): n is a, c, g, or t
tttttttgtttaatatttcttcaaattttgtcaattgctgaagcccaggctgagcttctgtggcacatgacgattctctgaatttttgaaaagaacacatgtacctaaagttcaaaatcgaccagtgacacagatcttggggatctgggaggaggagaccccacagacacttccaagcactgccgggagattcgtttcgcctctcagacctgcctgccttgctcatcagcatgcagtcagagtgccaggggagggcacagccagcggcaacgcttcctggtgctccaggggctgccctcaggaggaggcctgccactcagtctgtgaagcaggattcttccatcaaaagaagccaaaccaaagagctcctggaacactcaggaccaaggcagatgagaagcctctaattaattttgtggccttttttggtttgttggtttnnnnnnnnnnngttggggggagggagagagagagaagagtaaaaggaaagtgcagggaaatttactctttcgcctcagccagtttattgttcatctctttgctttgctccttgtcgtctggcttggtggtactcgggccctccgcgctctttttcttggcagcctggcctgacaccgcctgcttgtctttggccttcctcgtgggcttatggctcgctgaggtcttttttggtttggaactctgaacactaggtttttccacctttgggggttccttgaagggttcgctgtagaggctgcgtattcttctgcgatcaatgaccttattgtcagctgttgttggcttgctggcctctcctttgaactgagcactgtagctggtctcatgaaccatcttatcatctgggggcttgtactggggcttggcctttattggtttcacaggcttgatgtccgtccatgccctgaattcattcctgtaggagctgctcactgcactcgccacctcctcgcggatttgccggttgagggcgtccgccgcggcgcgccccctgccagcctcggggccggtggcctggacctgggcctgggccgcgggcagcggcgtctgctcgtgccccaggccctcggcgcggcgcaccatccaggcaggcccggccttcctgtcgcgtgtcgcgctcgtccgccccggacgcctttccggccgccaggccacccgctccgccgggggccgcctcctgctcccgggcctcagcggcggcctgcactggccagcgctcctggctctgcggccggcgcttgggcgccccgagaatgggcgccgacgcctgggaggccgcagagatctgcacgggcttggggatccacgggtggtccccgcggcgcggcagcggccaggcgcggaagtccttctggtactgggtctcgcgctcgaagggagcgtcggagggctggtattcgctgcgcggccggcagctgggctcgggccgctgcaccttccaggctcggtaatcctgccgcatcaccgagtccggcggggccggaggtggacccggagcccaggcccgggcccaggcccgctccggccggggcccagccgccggctcgcgctcgccggtaggcccccccgctcc

SEQ ID NO: 438280 - DNA, 330 bp, Homo Sapiens
  misc_feature (19)..(19): n is a, c, g, or t
  misc_feature (25)..(25): n is a, c, g, or t
  misc_feature (40)..(40): n is a, c, g, or t
  misc_feature (103)..(103): n is a, c, g, or t
  misc_feature (108)..(108): n is a, c, g, or t
atagctgggaagttctganatcttnactccagatcgagcntctgctattagctgacgagctctctctctcagctgccgacgtcgctcttcatcttgctgctgnactanttttgatgaaatgatctgcatgatttaaagtggttctatcagcatctggattagactccgtctgcctcagggaagcatgttttttcttagcaaggtctagatctctactatatgagtatccaagtttagaagtaggagataaacttgtttttttgataggagattctggatctgatctgcattctaaggatctggaattctctaatttttctttctccaagt

SEQ ID NO: 438281 - DNA, 569 bp, Homo Sapiens
  misc_feature (538)..(538): n is a, c, g, or t
  misc_feature (544)..(544): n is a, c, g, or t
attaaaaaatatatttattaatttttacacctgctgcatagcacaagactattaacactataactcactgaatgtacaataaatgttcacatttaaataacaggatagggtcaacattttcaaccagtgggtcagctttagcatctcatgaagtgctttttagacctagatatcttaagagtttttttgaaaggatacttccaagtcagaaaacaagaagatcaaaacaataggtttttccagaataacaggaattttacatgatgaaatgtctatttctgtcggtacaaatcaacgataaaaacaaaatctacatccaacctactccaaaatactcacactggactgaatgaagtctacagtgtcaatgtgtcttgagagaggccacaatatccacactggctacatacatgttttccaaattaagttttctgatggctcatcatttgccatctcttcaaatccaggtccttttaaaaatctatgaccttggaatgaatgtgccagaatacctgtatcctggaagtccatgcgaatnttggcntcgactgccatccgccatctgctgg

SEQ ID NO: 438282 - DNA, 448 bp, Homo Sapiens
  misc_feature (403)..(403): n is a, c, g, or t
  misc_feature (417)..(417): n is a, c, g, or t
  misc_feature (426)..(426): n is a, c, g, or t
tttttttattaaaaaatatatttattaatttttacacctgctgcatagcacaagactattaacactataactcactgaatgtacaataaatgttcacatttaaataacaggatagggtcaacattttcaaccagtgggtcagctttagcatctcatgaagtgctttttagacctagatatcttaagagtttttttgaaaggatacttccaagtcagtaaaacaagaaggatcaaaacaatagggtttttccagaataacagggaattttacatggatggaaatgtctatttctgtcgggtacaaatcaacggttaaaaacaaaatctacatccaacctacttcccaaaatacttcacactggggactggaatggaggtcttacggtggtccatgtgttcttgngggggggcccccantatccacangggcttacatactgtttttccc

SEQ ID NO: 438283 - DNA, 1158 bp, Homo Sapiens
  misc_feature (1093)..(1093): n is a, c, g, or t
  misc_feature (1128)..(1128): n is a, c, g, or t
  misc_feature (1141)..(1141): n is a, c, g, or t
ctatgggacagttaaacagagagtattggagagcaccccagctgagtcatctgaaggcttggaccccaaggatgccactgacccagtttataaaactgtcacttcaagtacagaaaagggcttgattgtgtactgtgtcacctcacccaagaaggacgataggtatagggagccacctcccactcctccaggatatttggggatttctttagcggacctaaaggaaggaccccacacacacctaaaacctccagattatagtgtggcagtgcagaggtcaaagatgatgcataacagcctctctagactgccaccagcttctctcagtagcaacctcgtggcctgtgttccatcgaagattgtaactcagcctcagaggcataatttgcagccattccatcctaaactaggagatgtgactgatgcagatagcgaagaggatgaaaatgaacaagtttcagcagtctagcctttggatgacctatttgaaaaccactgaaagtcgtggaggaatgggcaagaaccacctcatgattctgcaggccattgctaacgaacagctcattgctacaaccagtccagaggttttattccctctactccgagcaatgaaatagacctgagttatgcttcctttcatttaatttctgcagataaatagtttcctgagcaatggatgctatgcctggataccagtctccactttgcacgccggaactgccttgggaccacagttacagaaaaaatgtaaactcagagtgatccttgtgtatattgctatagatttttctttaacaagctattttaaagataatggcattattatttccaagccatagcttgggctgaaggacaaattgaaattgtctgccaataccaaggatattcttgtatatttgaaaaataacttattatttgaattgttgtggttttgtttgtatttgagagctcttgttagctgatattcatgtttgaggtcataaaattgtctctggtctgaccaaacagaagtcatctttacagaggtgatatggcttgatctacacagaggatgtggacttggatcctgtaggcaccaatgccaatgtagggnctcagtttgaggggaaattagggaaggccctttgncagtttgagggtnttagggaacccgctggg

SEQ ID NO: 438284 - DNA, 628 bp, Homo Sapiens
  misc_feature (18)..(18): n is a, c, g, or t
  misc_feature (48)..(48): n is a, c, g, or t
  misc_feature (125)..(166): n is a, c, g, or t
tgtgtggtcagaaggagnctttagccccagaaaggaaacacctctgcnttcctgcctaactaaacaggcagtgatggtctcttctccatctggagaaagcttgggttgagcagagaaccagaggnnnnnnnnnnnnnnnnnnnnnnnnnnnnnnnnnnnnnnnnnnggctgctggcccctcttgcctggtgggctccagcagcaatggcaacagatgaagaggagtgtgatgatcaccaagagtggcaggcccaggaggactcccaggcagatggtgttgtagatgccttcttggtgtttggtcaagatggtgtcccagatagagctgaagaaggcactgattctctccatggtgcttggctagattagggccagagaaccctctcggcttacaagcaggtcctgagctcaaaaggatgcaaccttgaccacttgtaatttattcctcttccagctttgggtttgggcatgccactgacagcacctccacacacagcagcaaaatggccagccagcttggggagcctccttccacgttacttcttgctttgcgttgtcaggggatctcggccagaactgcttttcctgaggtcacgttcaacgtagtaaacaatcgctgaacacccgc

SEQ ID NO: 438285 - DNA, 782 bp, Homo Sapiens
  misc_feature (57)..(57): n is a, c, g, or t
caggtgtacaccttcttttacagaactgtgatgatctttctgggttctcttctttgnccaggttgagatcttcgtgacccaacattcaaaaaaggtacgcctctttccacccaggtgtctgcctttcaaaatcagcaaaggctgggtgtaaagtctgttcctcgaggcaaaattcgaggatccagagttcgcattggcaatttgggttggttgatcttgtcaagaaccacatcactgataggaggcaggccctctggtttttgtatacaggcaggcatgaactggaagtccagcagaaactccctgtcatactgcttcttaccttcagtatcagtaggcttccaggattctggtttaaatggaaatgtaaccccatcaccagaactatctgtggagcctgaattagcatctattccttcaccctcagaaacactctcagcaccattacgtactggctcagcttcttctccattttcttccacagctttcactttttttaggtcagaggggtctctttcaggatgaaacccctggctcattttatcttgttcagattcaagtactttgtcaatggaaagctcctcttcagctttaagctccaattctgcctctaacatctcttcagtggttcgggtccgatcttttggtttcttccatgtctttggtacagttatagctatttgagctgggacagggctccttcttgaatttaagttttgagaatccaaaatctcttctgtttgcccatctgcttctacctctattttgttctgaatctcttc

SEQ ID NO: 438286 - DNA, 942 bp, Homo Sapiens
  misc_feature (621)..(671): n is a, c, g, or t
tattccttcaccctcagaaacactctcagcaccattacgtactggctcagcttcttctccattttcttccacagctttcactttttttaggtcagaggggtctctttcaggatgaaacccctggctcattttatcttgttcagattcaagtactttgtcaatggaaagctcctcttcagctttaagctccaattctgcctctaacatctcttcagtggttcgggtccgatcttttggtttcttccatgtctttggtacagttatagctatttgagcttggaggcattttgtatatttggaaattctcatttgcatttttagacaatggagtaactcttttgcaggttgtactagaacacaaacacaccactgaagaaaccagactaggaatttcagcattcattcgatgtttctgggacaggtctccttcttgaatttaagttttgagaatccaaaatctcttctgtttgcccatctgcttctacctctattttgttctgaatctcttttgcatctttactaaggcaagttcttatgctctcgtcctcctctaggactctctggactgtgatggcagcactcggagaactaacagtagtggcagcagcaggaacaatgacnnnnnnnnnnnnnnnnnnnnnnnnnnnnnnnnnnnnnnnnnnnnnnnnnnnaggaactgtggaaggggtgatgggagctgggatacactccagtttcatttcttctgggggattttcgagaatctccaattcaagagtcaatggcaatacttcctgttttactatttccacaatgctctccgtggctgataatttttcgctaactccatttatttcattaattaggttagtactagaaaccagtggaatatcattaggtgctacactacagggtttcttgcatatatcatcatcattttcatttgttggtaaagggtctgat

SEQ ID NO: 438287 - DNA, 1222 bp, Homo Sapiens
  misc_feature (86)..(86): n is a, c, g, or t
agttcgacggagactctctgggactgtgatggagcactcggagaactaagagtagtggcagcagcaggaccaatgactggagtgtngagtaggagaagctggagtagttggaggagttgtagtaaaggaaggaactgtggaaggggtgatgggagctgggatacactccagtttcatttcttctgggggattttcgagaatctccaattcaagagtcaatggcaatacttcctgttttactatttccacaatgctctccgtggctgataatttttcgctaactccatttatttcattaattaggttagtactagaaaccagtggaatatcattaggtgctacactacagggtttcttgcatatatcatcatcattttcatttgttggtaaagggtctgatgtttctgtgcaagatgtgaggctgggtataggaattgtgtcttctcttggggatgagagttcacatctgtcatctatagcagtggtgaatattggttggctactaagagcagaagaggtgggggctgcaattgtacttcgagcaacagaagaaacagtggtaggtgatggaggcagaggaagctctgctatggatactattgcagtagtttcagatgtctggccttcttgttctttcttctctccactgaggactagcctaaggactggggaaggagactttaacactggatctggttttggcttctcctcttgcttctggtcgctagctgcagtgacaggggtgctggcagcaagatgagcgctctccacagtcccataaaccacagggctgtgctcggggacctggctgggcagctgaggaggagtaggtgtggacgtgggtcttcctatgggtggagtaggatttctgctgccacctccagacataatctcctctgttatgtctttacctccctggtttggatcccgaattcttatagtttttttctctctcttggctggaggcggctgttgctgcgtaggcactatgataggtgctgactgatacaccggctgacttgggtaaaaaggcgttccataagcattggggaagtccccaggtcctggtccaggataaaaaggacctggccccggtggttgaactggatattgttgggggggcccaacataaggagggccactatgacggtactgtggtatacagtactgaggctcctggggcactgggtacggcatgggcagatgtaacacatcacgataa

SEQ ID NO: 438288 - DNA, 505 bp, Homo Sapiens
  misc_feature (22)..(22): n is a, c, g, or t
  misc_feature (34)..(34): n is a, c, g, or t
  misc_feature (50)..(50): n is a, c, g, or t
actcaatccttgcgaaaacaantgtaagcccccngtaacctccatagcgnaacaatgccttaatgtgaaaccctcaactgccccattgccttgaaaaccgtgaagttgtttgggaaaagctttgggtgtaaatatccaattcccatccttcaaacccagcccaagctgaaggctttggtatgcccctcctgcatggcaccctaagactggcagttacccccggctctcctagcctgactctctggatacacccggatgactggagggacattcacttggaagatgtgagtctgatagacttgttcatagccatctgcatagcaggtgtaattgccaacgtgagttgtggtaaccttagtaatatacaaggacccatcatctccaaagtcattgatgtcttccaaatctaaattatttagaataatattgttccttttccagataatgggaggtctcagggttccttgaatggcacagctcagaacagcactttgtcccacagttg

SEQ ID NO: 438289 - DNA, 812 bp, Homo Sapiens
atggatatcagagtacagaaatcatacatataactcatttccctctgctataacggtaggttactgtgtaatcaatttgtttcatatcaagtggaccaataatgcttatgttgtttaagcgtgcctttccaataactgtttttgaaaattgaacttgggcagtgatgttttcaactttcgacagagtaatagttattgtttgttatatttagtgtgtttgtgatatttaaataaattgtacggcttctgaccatcataactgacataggcttgattttacaccaatgtatttcacgtcgatagagcgagggaaaaggaaaaacacagccaatccagaaaggagtagacagacaaacacagaagccatcacatacagctttgttcttcttggccttaatctctgatcactatatggaatcaatgccaccagttggttttcttgccccctaggaattcttcctgttccctgacaagtagggcaggtgacactatctcttcctgtaaattccacatatggaaactgagagacatctccatttcttccatcttcattatggacttcactattaaccagtccattcctcatgttttcagatgtgactccatcataagcatcttctttgcttgaatgcaaaggcaaatgagaaagagactttcccatgtcggcacgcggggcgctgcgcagtcccgggctgcttcggcgcggacagggccgaggacagggtcgtggagtccacagtcccgggagccggggggtggagcgaccggcctggagcgcgcggccgccgtagagctccagtaggccaacaggc

SEQ ID NO: 438290 - DNA, 1088 bp, Homo Sapiens
  misc_feature (216)..(216): n is a, c, g, or t
cataaaaatttgctttcctccagggaaaactggaaaggcttaacctattttaaggacccccttttttcctcccctaggtggaggggggccaacccaccatatatccccccggttttggtttccagaaataggccaccccccctttctgccccgagaaggcttaaccatcccccttgaaggaggttaagttcacactcggaaaaggatcaacccaanccagctttttcccacacaaaagcagttctcagtgtgaggggtttaggggacaggaccattcggggtaggctgtgttggtagcagacggcttctcagggcagggtggggttcgtcttgatctcaaaggccaggtttgccacaacatacccctcatggtattacagcaacacagagaacataagcaaggcatcttagcaccttctcatctgcaaaaacacaccttctacttacactggtagtattttaattggtgttactgacaaaccttgcttccagtgcaggggcaattgaagctagctgaccctaacagtcattgggtcacagacaccaacaaggttccagagcaacgccaggaaaggagcgaagcagaggaatttaggaaaggcaatttattctcttttaaagtaggtatgactattctctccaacaatttcttctgagagtcagcaagaattctgtaatccagtgaagatgcagctgaccttttgaagccatgttttgataaagcaggtaacagtaaagttcctcaaggctgtctaagcttaccttctcacttagttgtccatatcttgccatctgtataaggtaattctctactgctttagttttttcaggctttacaagtgctaagttacttaacctggcccgggccgactgatccagaacttgggctaagatactgtttctcatttctgcttccctgtgctttgcttcctgttgggccgcatcaccaggatccccgtgtttggcctgcagctcggccagcctctgtctcctcagcgcctcaagctcctcgtccgccatggctcggcgtcagcgctggagcagccgcggtcactctcgcagcccctcggcgcgagatcccgggaatt

SEQ ID NO: 438291 - DNA, 800 bp, Homo Sapiens; identical to SEQ ID NO: 123839
  misc_feature (154)..(154): n is a, c, g, or t
  misc_feature (162)..(215): n is a, c, g, or t
  misc_feature (219)..(219): n is a, c, g, or t
  misc_feature (222)..(222): n is a, c, g, or t

SEQ ID NO: 438292 - DNA, 518 bp, Homo Sapiens
aactatggcttacatttattttaaatttcactaaatacaaatcttgattgtcatgccagttttagatcttattaattttcagaatggataaattcaaataatcataaattacggtaactttttattataccaaggtgttctaatgccatcatatgaagacagatgcttcaaacaacctgcattaaattatatttttaataaaattaaaatctatttttaacctatttgtagtcacaaaccgaaaacgtgtcgtctttaccttagagctaaaggcttactttatgcatacggtatatttaatagtctacaaatcaaagatttaaacagtcccttaaaaattccatatattctcataccaactcatctacatagaaatgaaaatctctattgttctcacaaaccattaccatgagttcactataacaactggatcaatatggcttgcctttcaaagttaaagaatcagaaaggggcctgtaagaagtcatttagcccaattccctcaccctgtgtgtttt

SEQ ID NO: 438293 - DNA, 1144 bp, Homo Sapiens
  misc_feature (160)..(198): n is a, c, g, or t
ttttccctttggggaacaccgcttttggcccaggttccactttacccttatggggcccccgcgccgcccaaaagggaaaggttcttagaaaagctttttggagggcccgagggccgccccaaaaggtttttttatgtttttgggaataatctgctggaannnnnnnnnnnnnnnnnnnnnnnnnnnnnnnnnnnnnnnctatccaggaattttaattcggttaggtgtgggaactagtttcttgagtcaacccctttaattgtttctctggcattgtcaataataaaaattttgaagtcccactcggtaaaattagtgtaaacattcacatatttaatagtacctttaaaataagcattactacatttaaaatggttccaaaatgaatctataaatggtaatataaattaaaaaatacgaacttaaagtgaataaatttttaaccttagctatggtataaataatggtaaatgtatagtgtacctttgagtcattaaaatgtcttaaaagataacagcttgttaccagaacattagaaaccatagccatgattctcaagcgttaacaatctacatttgatattttcttggccactgcattcttcaatgaataataatttccagaattccattccatgttgttttccaatagatcttttcacactcgatgttgaatacatggctctttgcagatgaataaaacaagtgcattcagtttagagatccattttgcgaaggctcattcgactgaaggaatctctgtggcaggtgacaggcaatactgccttgtataactgagggatctttctgttgatcagtggctgtagggcctctttaaggcgatgatagtttctctccagttccctttgatactccttttgatccggcccaattaagctcttattttttcttaaggcatcttcacaccttttagtaaaatctttaaagcagagtcgcagtttattatgatgtctgaagagctttgggtcactaggtatttcagacagaaaagagctgggcaacttccaagggcccctgattcactgtggtgcctacagatccctggagtaccatctgaagcattttggggtctgcgggatcctgatgtgttgcaaatgccaactcctgtgtctttttctctgaat

SEQ ID NO: 438294 - DNA, 1693 bp, Homo Sapiens
ggtccggaattctccggattgcgcccgccgccggccccactcgcggcccatgtcctccgcgccgcgctcgcccaccccgcggccccgcaggatgaagaaggacgagtcgttcctgggcaagctgggcggcaccctggccaggaagcggagggcgcgcgaggtgagtgacctgcaggaagaaggcaagaatgccatcaactcaccgatgtcccccgccctggcggatgttcaccctgaagacacccagctcgaggagaacgaggagcgcacgatgattgaccccacttccaaggaagaccccaagttcaaggaactggtcaaggtcctcctcgactggattaatgacgtgctggtggaggagaggatcattgtgaagcagctggaggaagacctgtatgacggccaggtgctgcagaagctcttggaaaaactggcagggtgcaagctgaatgtggctgaggtgacacagtccgaaatagggcagaaacagaagctgcagacggtgctggaagcagtacatgacctgctgcggccccgaggctgggcgctccggtggagcgtggactcaattcacgggaagaacctggtggccatcctccacctgctggtctctctggccatgcacttcagggcccccatccgccttcctgagcatgtaacggtgcaggtggtggtcgtgcggaaacgggaaggcctgctgcattccagccacatctcggaggagctgaccacaactacagagatgatgatgggccggttcgagcgggatgccttcgacacgctgttcgaccacgccccggataagctcagcgtggtgaagaagtctctcatcacttttgtgaacaagcacctgaacaagctgaatttggaggtgacggaactggagacccagtttgcagatggcgtgtacctggttctgctcatgggccttctggaagactactttgttcctctccaccacttctacctgactccggaaagcttcgatcagaaggtccacaatgtgtccttcgcctttgagctgatgctggacggaggcctcaagaaacccaaggctcgtcctgaagacgtggttaacttggacctcaaatccaccctgagggttctttacaacctgttcaccaagtacaagaacgtggagtgacgggggagctgtggatggtggcaggagtgtcccagcaagaaaggcggcatccgtctgtgccctgtgcctttccagggagccaggcgccatgggcttctggtccaagctgtgttgactgtcatccccaccccacccctacctcacgcctgccccaccccctgcctcttttggttgttgttcttaatctcctctccatgtagttcccagtgggcaagagcctttgaaaatgcaggattctaaacactcgtgcttgcgtttgaagcctcgcgtcactcagtcgcgtgggatgatgagtccgttgttgtctgccttggccgaaagatgaaaaaaagcctgaaccccaacccccagctggttgagagcaccctgcattttgcctcatggtgcagttagcgatcacaggccttcagaagtacaacatcagctcagcaggaacgccggctccccgaggacccaggcttgacgattcaccggggatctcctgggctgggctctccttggaagtgaggccttttattaaaaataaaagggttttgcagtttgaaaaac

SEQ ID NO: 438295 - DNA, 950 bp, Homo Sapiens
  misc_feature (34)..(34): n is a, c, g, or t
  misc_feature (423)..(423): n is a, c, g, or t
  misc_feature (427)..(427): n is a, c, g, or t
  misc_feature (434)..(434): n is a, c, g, or t
  misc_feature (436)..(436): n is a, c, g, or t
  misc_feature (438)..(438): n is a, c, g, or t
  misc_feature (450)..(450): n is a, c, g, or t
  misc_feature (455)..(455): n is a, c, g, or t
  misc_feature (457)..(457): n is a, c, g, or t
  misc_feature (459)..(459): n is a, c, g, or t
  misc_feature (461)..(461): n is a, c, g, or t
  misc_feature (463)..(463): n is a, c, g, or t
  misc_feature (467)..(467): n is a, c, g, or t
  misc_feature (492)..(493): n is a, c, g, or t
  misc_feature (497)..(497): n is a, c, g, or t
  misc_feature (514)..(514): n is a, c, g, or t
  misc_feature (528)..(528): n is a, c, g, or t
  misc_feature (552)..(552): n is a, c, g, or t
  misc_feature (554)..(554): n is a, c, g, or t
  misc_feature (564)..(566): n is a, c, g, or t
  misc_feature (584)..(584): n is a, c, g, or t
  misc_feature (593)..(593): n is a, c, g, or t
  misc_feature (595)..(595): n is a, c, g, or t
  misc_feature (601)..(601): n is a, c, g, or t
  misc_feature (606)..(606): n is a, c, g, or t
  misc_feature (609)..(613): n is a, c, g, or t
  misc_feature (622)..(622): n is a, c, g, or t
  misc_feature (625)..(625): n is a, c, g, or t
  misc_feature (646)..(646): n is a, c, g, or t
  misc_feature (668)..(668): n is a, c, g, or t
  misc_feature (685)..(685): n is a, c, g, or t
  misc_feature (697)..(697): n is a, c, g, or t
  misc_feature (700)..(700): n is a, c, g, or t
  misc_feature (713)..(713): n is a, c, g, or t
  misc_feature (717)..(718): n is a, c, g, or t
  misc_feature (721)..(721): n is a, c, g, or t
  misc_feature (753)..(753): n is a, c, g, or t
  misc_feature (809)..(809): n is a, c, g, or t
  misc_feature (820)..(824): n is a, c, g, or t
  misc_feature (827)..(829): n is a, c, g, or t
  misc_feature (833)..(835): n is a, c, g, or t
caaaagcaaggagatgagttgaaagacagttttnctttaagtcatcagtatgggatgtcagcagaacaaaaattaaaaagattaattttccttttgatctaaaacttccttagtttgagcagtaggtgctacaaaattatttacatatcttagtatcatagttaaatgtaatgtgtttaggagaggaaaacaaaagatacatttgctttaaattcattaagaaattttcaaattcactttgtagcccatgctgatagaattgggctgtgttggtacatttgaaacactgtttatgttgcttgaaacacttatttatttaatcgccgatgtgatgatgcctatggccgagatcaaatatagctaggattgggctagactacttaattggttacttaaactatgggaagaagcatattattgtgncaancagttgngngngtatgtgtatanacaanananananatanaaataaagttattttttctttgggnnaatntattataagtatgtaanacttggctagtttngtttgtatatgtcataaaatgttntnttatgatatnnnagtgacagttaaagaggnatcaaggtnanttgtgnagaantannnnntgatatatngtnatgtttgttgtgaatattttntctaactgcacagtagaaaaanaaaaacaactgagtctntattttaatgtnacncagattggggaanacanngcngagctaaggggacaaaatgactgagggagcantctcccacggccagtgcactgatcattttagtatggtggtgctttgtacggttatntatttaaaacnnnnncannncaannnaatacatgggttcatgctcttcccttgggtaatagaaacagtttctctctatgcataatcttgttgatagttaaatttgcgtattgcttttcttgtcttgttatataaaatcttt

SEQ ID NO: 438296 - DNA, 539 bp, Homo Sapiens
  misc_feature (163)..(185): n is a, c, g, or t
  misc_feature (515)..(515): n is a, c, g, or t
cacgagaataaccataacgttttattaccattaagactaaacttgtattgaaaagattttatataacaagacaagaaaagcaatagcaaatttaactatcaactagattatgcatagcgagtaactgtttctattacccagggaagagcatgaacccttgtannnnnnnnnnnnnnnnnnnnnnnaaatatataaccgtacaaagcacaaacatactaaaatgatcagtgcactggacgtgggagagtgctccctcagtcattttgttcccttagctctgttttgttttccccaatctgagttacattaaaataaagactcagttgtttttatttttctactgtgcagtaagaaaaaatattcacaacaaacatgacaatatatcaaagaatagttctacacaagttaccttgatacctctttaactgtcacttaaatatcataagaaaacattttaagacatatacaaacaaaactagccaagtgttacaacttataataaattaacccaaggnaaaaataactttatatatatatat

SEQ ID NO: 438297 - DNA, 1912 bp, Homo Sapiens
cacaggccccaagaaccccaggtggaaggagggctgagtggcagcgcctttatttgtgggggccttcaaggtagggtcgtggggggcagcggggaggaagagccgagaaactgtgtgaccggggcctcaggtggtgggcattgggggctcctcttgcagatgcccattggcatcaccggtgcagccattggtggcagcgggtaccggtcctttcttgttcaacatagggtaggtggcagccacgggtccaactcgcttgaggctgggccctgggcgctccattttgtgttccaggagcatgtggttctgtggcgggagccccacgcaggccctgaggatgttctcgatgcagctgcgctggcggaaaagcgcattgaccaccgggctgccgggcggcactagtggcgccttgaagaggaagctgagcagggacagcacggggtggaaggtctgcggctcggggtccatgtcagtgcagaagctcacgcgctggcacagctcggtcagcagcgctaggtccagcatgatgggtgcggccagcagcgagtcctcacacgtgttgtgcagcaccagtgtgttggttccgcccagcatcagctccgaggtatactcatccagcgcgcgcttgctgtcacccacgtacggcacatacttgatgaccacgcagtggtcaggctcttcgccgggcgtatagagcactgggttgctctgcaccatgtcgtccaccacgttgctcttggacacctccttagagcggaactgcaatggcgccgataggttctccccatcgttgttgcccaggtggttgtaactcacgatggacatggtcttgaggccggagccaatgaggaagtccacaagcacggacttgactttggtctggcctgacttgaagtcatctccgcccacaaaaacccggtgctgccacgcgagctcaagagctccgggcaccagggtgttctgcggagacccattgaggaaggcacagccctccaggatgctggccacggcgaagagcgtggagggcgacacctccagaccgagctcaatggtgcgcagcaggttctcggctgtgtcgttgaggcctggaatcacctcacagaagcgctccgtgttcgccgtccacagcactatgactttgtccagccccgcgctagaccggaagtctcggatgtccctgcggatctgctccagctgctgcgcacgcgagcctgggatgaggttgtccgcgcgcgcgctctggttggccgcgatgaattcggggatgtaaacagaaggccggggccgcagggcctccatgtgcggccacagttgctcctgcagcccccagtccagcaccttcgcgcgccgcatcgcctcggccaggttcagcgacgagatgtcccagccatcgaacacgaggtcgttgggcgccaccatgggcagcaccgcgctgaagggtacgaacacctcctggccctcggcgtccaggcccaggctcacggtgcccgcctgagtcagcgagccgtagtagttggcctccttgcggccgctgcgcgtgggccaggacaaacgcagtcgattggccagcaccgcggcggtgagtgtggagccgttgttcccgccccagccgacaagcatgaccccgagccggggcacctgccgggcggtccggaaggtgaagcgcgtggacgtggggtgcaccttgagaacgccaccctcgcggctgacgcgcgtcgtccggtactcgtattgcgcctcgatggcctcggggccgtagaccacgtccgggctctcgacgaagaactgggcggcggcctccatcgcggcgggcggcgcagagtcgactcaggcagcggcggcggacagcgcgggctctcgggcgcgcgacctccggagaaaagcgcctcgttctgagtacgccacccaggcc

SEQ ID NO: 438298 - DNA, 653 bp, Homo Sapiens
agcgggcgcgcgcgctgtccgccgccgctgcctgagtcgactctgcgccgcccgccgcgatggaggccgccgcccagttcttcgtcgagagcccggacgtggtctacggccccgaggccatcgaggcgcaatacgagtaccggacgacgcgcgtcagccgcgagggtggcgttctcaaggtgcaccccacgtccacgcgcttcaccttccggaccgcccggcaggtgccccggctcggggtcatgcttgtcggctggggcgggaacaacggctccacactcaccgccgcggtgctggccaatcgactgcgtttgtcctggcccacgcgcagcggccgcaaggaggccaactactacggctcgctgactcaggcgggcaccgtgagcctgggcctggacgccgagggccaggaggtgttcgtacccttcagcgcggtgctgcccatggtggcgcccaacgacctcgtgttcgatggtgggcggagccctgggccggggtggggctgggatgggagatggggtctggaggggcccaggatccgggcagggccgacgtgtgacgggtcccacccagggctgggacatctcgtcgctgaacctggccgaggcgatgcggcgcgcgaaggtgctggactgggggctgcaggagcaact

SEQ ID NO: 438299 - DNA, 494 bp, Homo Sapiens
gggccctcccgcggcggcgggcgctcggcaggtctgaacccgcgtgggtgtaggcgctgagggtcgacctggcactgcggaggccgggcgagctgcagccctgggggcgccaatagcccagcaagggcccatcccgtccaaggacggaggagctgggcgggaggcgggcccggacgcccgcgcgttccaggtcctgctcgcggctctgcagctccagctccagacggcttctccgctccccgcgggcgaagttctgggacgcacggaggaccgaccactgagcctccgccggccgctcggccatgcaaaagaggtgcgcaccctcattgagccgggcgggcaggtgctccaggctgtgatcttctccgggcagctgcgagtaatcctccgcttgggcgctctccactgcctggtccttgtcctctgggccgtgggggcgggtggggggcaacgccagcaaggggttgggccggttcaggaggcctggggttggg

SEQ ID NO: 438300 - DNA, 2023 bp, Homo Sapiens
tttgggctgcagcatttattacatgtgctttggcgaaaataaataattcttcacacacatatttcagcaggccatgaaaaacggggagggaagggcagctgcaaagttcccaggagtaaaggggcgggggaggtgctcgggcagcacaggggagggaagattaaggcacaggtgcgcggggcctcagcggcccaggggaggggtgtggaaacctcccctctcagtgcagctggtgagtggctggcgagggggcccacggcaaagacccctcttggcaactgtgagtcccctcatctcactgcgcagtggtaatggaggcgtctcaggcagggttcctcgagagggtcggggtctcacagccccagggccccgatcacgggccgggcctcgggagcaggggtgctcagcaagggggcaggcccggccggctggtgctgcggggatgctgggtccgcgggggcgggagccgggtcggcgggtgcgcgcatgcgcagagcttcgggcgggaaggccacgttggtgcagaagaggccgagcagcagctggcgctggcactcctcccacttggccagcgcgtcccccagcgagaggttgttgcgcatccagccgggcagtgcctctctgtaggcggcgcaggacagcggcacggacggcagcgactggacgcggcgcagctccacctgctccggcagcctggagggcaggtgcctgcccagcttcctcttggcgcgcatcaccaggtactggcagatgctgcccgtctgctccttcatccaccggatgtcctcgggaacgtcgggcagccactccagcaagcggatggtgaaggacagagcgctctccagcggcagcgtgtagggcaccatcatggccgtggccagacgcacaggcagcatgttggagagggtggtcagcaggtccgtgggctccacgcaggcctccagcagggcctcattgagccgggcgggcaggtgctccaggatgtgatcttctccgggcagctgcgagtaatcctccgcttgggcgctctccactgcctggtccttgtcctctgggccgtgggggcgggcggggggcaacgccagcaaggggttgggccggttcaggaggccgttccgctgcagaaagcgcaggccatcccggtatccctgcttgcacatctctcgcagcaccaggggctccggcgggaagagggccttggagaggcggtagaggttgcgcaggttgaactggatgctggtgttggtgacccgcagctcgtggatgttggtggagctgtcctgcggacagatgtcactctcgcccgagaagggggacactgtgatggtgttcttaagctcatagagtggcaggttgtctgaaatgccaccatccacgtagcgcaccccctggagggagggagggatgagcccacagtacacggggatgaaaccgctgcagacattggcctggatgagctcgtccttggagttgaagtgggatataatgacattctcgccgtctgacacgcgggtcagggagatgcccaggcgcccactggcatgctcatggctatcagcaggcaggaccttcagcaggaaactgcggatgatctttaccaggttgaaggaggggtgcagggggcccaggaaccgcttccgggcctctttagatacctcaatgaacttggcaccagcctcacccaggcagaccccggtgaccagcgccgtggccgtgagcgccccggccgaggcgccgtagatgtgcgtggcgttggccaccaggaagggcgcgtgctcgcggaggcaggaggccacgccgacgtagtagacgccgaggaagccgcagcccgcgaacgagatgttccacgtcttctcgcggggaaacatcgcggcggcggccgccgggccccgggttccgtgggcggccaggcctctgtgagccgcctgctcgccgctcgctcgctggagccgggggccgggcaggtcccgctgcggctctagctcggggtccccgctggcggaggcgaagaagctactccgct

SEQ ID NO: 438301 - DNA, 942 bp, Homo Sapiens
cccccatacaagaaaacattcagattttccagtgatatcgggatcatcttgagggtcacatccaacattcatgcttctcaaatctccatacaggaagatatgactattggctctttcaggctgcagagtaaaatcaactctgaatccactgaggctgtccagcagtccagtgatgggccctgcactgagctctggattcacaggctcagacacttgcagcagcagagactcatacctgtgtaatatgtctccaaaagcctggagtagctccacatctgctttatggcacatttgcttcagatcctcatacattcctcttaaaagctccctggaatgttccattctggctttgctttcattgagttgctgaaaaatgtcctcgccctcctttcgcagcctttccaagtgatgttgctcttcttcatggagaaatgcaggcatcttctgatattcagctctgattgcttctatccttaaactcacataatccttccagcatctggttcttgtggtttccatgttcagatttctgagattttcacaagctttttcccataaagactgcattttctgtaaaagcttctcctggtgttcctcagcagccaactcaatgggacagtgtctgtgatcccggtgctcctgagagctggagcacagcaaacagagcaggctcctgtccacttcacagaacatcttctttgtctccctgtgagtgccacacatttgctcctcagagctcaggaatagccagagactgacttttctagcaagagaagccatcttcttgaaatgaatgttggttttgaggtttatctgcccgttgactttgtgcattcagagcactggacaagaaatgggctgtctttccagttgaggtagaaacaaggcctgcaaaagctgtgcccctcgtgccgaattcgccacccaggcctcgctacctta

SEQ ID NO: 438302 - DNA, 324 bp, Homo Sapiens
  misc_feature (23)..(23): n is a, c, g, or t
acaggcacagagtaacataatantaaataatacaagttgctatcttaatcaaatggatgaagctaatagaaaagcactaaatataattgataagcactaaatgaacatatgagcaggcatattaaatatattaaatatgttcctcagatccttttccaagaagtagtaattaatcaatacatgaagatatgcttgcatgttatattatatacacatgatttacagcagctgtagctgtttgttgagggtgtcctatgtgctaggtgtgttaaatgtaatgtatacttgttataactttttcttcactacatatactatttatta

SEQ ID NO: 438303 - DNA, 963 bp, Homo Sapiens
  misc_feature (875)..(875): n is a, c, g, or t
  misc_feature (881)..(881): n is a, c, g, or t
  misc_feature (919)..(919): n is a, c, g, or t
  misc_feature (926)..(926): n is a, c, g, or t
aacattgaaatgtatttttattgatcgataagttatgtaacattagtatgatacaaagcaagtttgatatgacaatggcaaacacataattataatattgtttattttccttagatgttatatttaacatatttacataaaagaccaagatgtaggcaaaagcttcagtaatttgacttcattgagtgctttcagtaaacaataggtttctccagcaaacatcttattgccttaattgaacctccttgaaaaaggaaaaccacacactttgtaatgtaaatgttaattgtagtagacaatggttctaggtaaatagcacccctggacatgaagtaaatgaaaggaatacaggcacttaacaatgaaaggttgtttgcacaaacagtgcttcaaatgtaaataaacaagggtcttctcaacggtcactacagtaggtaaaactctggcacgtgtacagcatgccaagattgagaatttatgtactaatagtctctcagactttctaactgaaactaacagtggtttaacaggcttctccagtctgaagtcatataaggaattgaagctacaaaggaaattgtactacttttaaagaaaaattgtatatttgggattgtcaataatctaggccacgtggaagataacaggctattttggatattttctaattgcaatggttatatttctgtgtaaatgcctatacaaatgtttgcttggtgacatatggaaaacttaaggacttttatgaaaaggcgacaatggggacctccaaagcgccaaagtttctgctaggcatagtgttatttttagattacattaaaatggctatttagacccatctagctgagactattccaaaacaaactttttatcanattgtnatcataatcaactttctacaggctaatgactttatagntttactnctagtgtatatctactagcacaattggacccagttcc

SEQ ID NO: 438304 - DNA, 894 bp, Homo Sapiens
gtagcagggcatggccgacaggcttggaatatgagaatgaggacagctgtagagcctgaggtgtggtgtatcgaactgtccatcaggtctaagatggaatacccggctcagtactcatttggttaaaggtgacattgtcaataagatgggaagttacactctcctgcagatttgcagttgaatgtaggtcaggttatgtcaggacaagagcatggagacggtctgagcaaagtggaagtgatgttgcagcgtcggcccttacgccgtattaccgttccaggtttcttaatttctaggttgctatgagaaaggacgcttcctgacaagatgcttttcccttccacaaagtcctcaggattaccctgtttccttgattttcacaccatgcagatcttgtgtggggttaactacaggatcgggagccaaatgctgctttggggagagagacttgctgggacaggggttttcctggcaattgcttgtggcatattgatgtggttctcccacccctaggacttgacatgcccagctgttctcctgtgactgacatgtgggcagtagatacaatggtgtccccttggctggtatctttgtggagcagagcactggaggaggatgataactttttgttgaaatttagaaaatgtggatcttgttatacttgctgttcccttttcttctgccatctttatcttctgctagagagttttcttttccttcaatgtcttttgctgtttcagatacaggcagcgacaagctcccagaaggtttctgtcaacaggcatagagacagggcgtgcttgcaaactgcgtgtggtcctcctcagcacgccatcttgatctcttgtggcctcggacacagaatcctttatctccaccatttcttggaagccc

SEQ ID NO: 438305 - DNA, 431 bp, Homo Sapiens
ctttgaatgaatataaagagtttattcggtgcgtatttgggtatacaacaacaaatattaaacaacttttttaaactttttgtgcacaggacagaaaactgcctgtacatgctatgtccacttttggaacacagatttttaacaattatgaatgcacaaaatcttacatatcatgcaactctatgccaagaacccaactttcttccatgcaacagatatgaagatctaaatggaaacctagctaagtcttaaacacttttccagtagcaagtataatatatgttgttgagggaaaaccagtcttaacaattccttgtacacaatattcatgtgccaaatacaatgacaggaagactcatacatatacagataagacatttcttattttaacaacacaaaagacaacatcacagttccacagttcctgtctt

SEQ ID NO: 438306 - DNA, 451 bp, Homo Sapiens
  misc_feature (383)..(383): n is a, c, g, or t
  misc_feature (393)..(393): n is a, c, g, or t
  misc_feature (423)..(423): n is a, c, g, or t
ctttgaatgaatataaagagtttattcggtgcgtatttgggtatacaacaacaaatattaaacaacttttttaaactttttgtgcacaggacagaaaactgcctgtacatgctatgtccacttttggaacacagatttttaacaattatgaatgcacaaaatcttacatatcatgcaactctatgccaaggaacccaactttcttccatggcaacagatatgaaggatctaaatgggaaacctaggctaagtcttaaacacttttccagtaggcaaggtataatatatggttgttgaggggaaaaccagttctttaacaattccttggtacacaatattcatggtggcccaattacaatggacggggagggcttcattacatnttacagttanggacattttcttatttttaacaacacaaanggacaacttcacgttccacgttcccgtt

SEQ ID NO: 438307 - DNA, 328 bp, Homo Sapiens
  misc_feature (21)..(21): n is a, c, g, or t
  misc_feature (238)..(238): n is a, c, g, or t
  misc_feature (270)..(270): n is a, c, g, or t
  misc_feature (287)..(287): n is a, c, g, or t
  misc_feature (290)..(290): n is a, c, g, or t
  misc_feature (309)..(309): n is a, c, g, or t
actctcagatattttattttncttagtctgacattaggttatgagaagtacaaaagatccacaagtacaaaaaaatctgtatagctttgcggtagttgaaaaaaatgcaagagaacaaaaaaattttttgagtaatattcatctctgcagatctgagtgacagtccgcttgaaacaccgctgtaaaagtggtaaaaaatgatttcattgtgattatgttaaaatttttgatgtctctnttacttgttttaggggaatctggtcttcctgncatttatacctggatangtncctttccctgtaatttttnctgaaaggctccaatttcc

SEQ ID NO: 438308 - DNA, 956 bp, Homo Sapiens
aggagaattcaaagccaacatgggcctgaggtaccttttcggaaagtaataattatggagtcaatttcttcagtgaaatggcccatttcagaaaatctgttccctgtaaccaattctggatagtctgtgcccttcacgaattagtttagtgtcatcgcaagtatgcaaattaatggctacagggcttttcatacccctaataatccctgtaattagtaatccctttttaagcatcgtatgaaagcattcctgatggagtttctctttaatttccgaataatgaataaattcatgtcttcttttttggcttgatagccaggttagaggtttaccaattttagtgacattttttaaagaaccagattttagtttttgctgattttctcctactggtttcctggtctcaatgtagctgatttctggtctaagttttattattttctttcttctgcttgttttaggctgatattgcacttcttactccagttttctaaggtggaagcttcgactattgatttcaaatcttttttcttttctaatctatgcattcaatgttataagtttctgtgaagcagtgatttcattgcatcccacattttgataggttatattttcatttagttacaaataatttaaatttcccttgagatttctgctttgacttatgtgttatttggaagtgtatttttattctccaaatatttagagatttgcagctgtctttatgttattaaatttaattccattgaagtttaatttcattataatcaagaccatattttatatgatgtctatgattttaattttcttgagatgtcttttatagtccagaatatagtcttggtgaatagaccatgtgaatttgtaaagaatgtgcattctgctgttgttcatgaagtattctatgaatgtaaattagattcagttgtttgatggcattgttacataggtcaact

SEQ ID NO: 438309 - DNA, 696 bp, Homo Sapiens
  misc_feature (567)..(567): n is a, c, g, or t
  misc_feature (683)..(683): n is a, c, g, or t
cctgttaaaagaattcagtgactttttgcttgagaaaattcatagcgaatattctttgttggatgaaaaacagggcagtgatgccaactgagaacatttttcttttcagttctgggactgactttgagagagaaggaacaccttgtgctctcatggtgcgctgctcacatcctaagcttagtatcttttctgagagagagaaacatgtggtttttccagtttgggcctattctgacaagactctgctgttgagtttataggctgattaaaggggacagagggaactctgtaattatactcatacttgaacatggctatatatcatgtttgagaaatttccttgtattaaagaaaataaccaagctgggtctatgttctgttttgcctgcgtgccactatgtgagaaaatgtatgttcctttcctgcttcagctgttgtttactttgtacagaattttctactcctttgaaaacgaccatttttctgactcttaatggtttggtgagagtctgagaaaggctttggctttaagaactttcctggtggtttaagtcaagcttgagaganaaagtcattgttctccctgtcctcatacttcccttttcagcttccttataaagatgggtagttatgacctgcactctagctaagtttatcccaacagtcttgaactacttgtcaanatttatgttttcc

SEQ ID NO: 438310 - DNA, 368 bp, Homo Sapiens
gtcacaaagaccgcaaaatttagctgtttattaggttgcaagtctctccttctctccctgctttctctttcttctttttctccccacaaatcctctcaaaacacatacaaaaagagaaaactagaagcaagattgggtcaaacatgaagaacacagaaagcatattaaatagctagctttaaagggctctttttcagtttgaacaaaagtaaaacgttctcaaaagcaaaaacaggaaaacagagcttccacccagattgtggcaacttaatgaggaggaggttaggtggctggataaacccattgtggaatctattataaagtgacaggtttttcaaggcaagggaaattcaatcagttgggggttg

SEQ ID NO: 438311 - DNA, 1349 bp, Homo Sapiens
  misc_feature (127)..(127): n is a, c, g, or t
  misc_feature (1045)..(1045): n is a, c, g, or t
cctgaagttaaggttttcattagcaagggatattttgtgagtaaaatttgaaattctatggcacatcagagcatttgatgttgagtttttaccatgtttcttctttcacctgtccagccatataagncaaatcactctgttcactcttgatatcccagtctgtatctgtttctgaatcactggagtaaatgtcaaagagaaaggaagttctagcccacaattcctctgtctgagtagttgcattacacagtctttttccaaacgctttcactttggcttgaatacccacactacggtgccggggccttttcaaagaaatttgtgtacttttatgcactgggccttcttcacagtgagtaggtactgaagtgacagtattagatggattatcagcatggggttgggtttgcacaagttcattttcacacgtaatctgtgaagctgcagcctgcttcccagctcgggggcgtgtacaggagactggacctggggcagcctcagaatgcctggctgcctggagctctcctcgcgtgtccaggcggcctgcttggtctccctcctctcccctcttaggtgccggggcgggcacccggtgcagggtgggcacggcgcctgccaccagcctcaggcgctgggagaagcgcaggttcttctggataaccgaagagacgtcaaaacaggctggggcaaagtggtcagagcagatgaccgagcggtcattgcctccgtaccagtcggcgcggcaaccccgcacgaagcggtcccagagcagccgcacggcccggtccttgggaaagcggaacagcgacttcccagacttggtggtgttgccgcagtgggcggccacacaacgggccggcatggcggccgtcttcggtgcgcgggagccgggttccctggaccttcgcccttgggcacgctcctcgcagcggcctcggcgaggcaagtcctcccctcctcacctgtccactccgggtcgggattgtttccttccctacctctggtcaccggaagtggcgatctggggcccccaatgggagggctntttgatatcttcctcctcctcctccctgcgctgctccccaggagccagtggacacaagcagagggatacaaatttcgcgcgggcagcgctgaggtgggccgtaaagaagaacggaccggaagtggtggtggttatagcaaccagtgtggccagcctcttccccagcttatcctcctcccaatactcccgctctgtttttatgaggctgggaaaatagaacgaggaagtggtgacgcactgggctctcacgaatacaactagaagctgcaacgactgtgtggctctatcgattcgggagagatcc

SEQ ID NO: 438312 - DNA, 244 bp, Homo Sapiens
  misc_feature (157)..(157): n is a, c, g, or t
  misc_feature (195)..(195): n is a, c, g, or t
gcgtcgcggcgccgggtcagcgagcggtaaggcttcctctccttcacgtccatgcgctccggcccgcgctcctccacatccacaaacagggtcctcgccgcactcagggccgagtggtctggctccatgtcagcacgttctaaagagtcagcaatgnccgtgggccctgcagccctctctccaaggccattggancctggaggatggtgcgggatcttttctaccgaccaagtgtctgagagat

SEQ ID NO: 438313 - DNA, 488 bp, Homo Sapiens
aagagctaatagaaaggctaggaccaaacctatacgctggaatggaattgccattccattccagcgtaacagcttttatgatgggaggataggaaaaaatgtagtgaatatactgggtaaatggattgggaaattttatcctgtgatagaggctgccaacctccacaaagccaacagtctaggaaaagaagttctatttgtctggttaacccaaggccagattatgaacacctggctcgaggccagtagcaccttcctgatggcagtaatgaggacaaggcaaataaagagccgctattggcaccattgctcacatacccaccctcccacgtctaaacctaacttcagcaatcttgctaagggaatcatctcaccactgagtttttagtggatcccatcatcttttctagaaaagcatgcaaatttgtaagacacatatccagcactacctctctgtgaccagagagaggtacgctggaatggaatgg

SEQ ID NO: 438314 - DNA, 584 bp, Homo Sapiens
ttttttaatatttaaaacaattttattcatgaaaatatgctgtacaatgcactctacacagcctcgacacggcacacacgcacacgcacactctgacggcacggccacggtacactgcctacgatacgcgccggggacgccgcgcccaccgcccgtcccggccggacacttataaatatgggagaagggccagaactggcgcggagaaaggggcgtcggggttgggggtggacggggctgaggcccgctggagaagctgagaccagtactagggggtgggggcggttgaagagagggactgacttcgacggtggaggggagaagcgagggccggcagggatgggagggggagactgaactgtgggggtggcggtcgtcggagggcgatttgggggtggagggctgctcagggtggatggatataggtaggtgtgagttttccgcagagggttgctggcttcgggtgggtgagactaagaccagtgggaaagtgtgtcaagtgggaatcagatccgtgtttggggtgggcgcggggtcacggctaggcctccgcaaatgaaactgaagatttgtaacgctcctgg

SEQ ID NO: 438315 - DNA, 907 bp, Homo Sapiens
  misc_feature (42)..(73): n is a, c, g, or t
gctctatcacttgattaagtgggaggtggtcaaatattttgnnnnnnnnnnnnnnnnnnnnnnnnnnnnnnnnctgttatgcctggcttactaagagtcttgtgagagactgagaagttgattttgttcatatccaatctgtaaatgccgaagtcaggggaagtaatgtccctgaaataaacgggttcatgccatctagggacaataaatggttttcttgttgtaacttctggttaatatcagtaccttgatgtcatcaccgtgatgacaaagagaagagttattgttgatcttcttggttttggtctgtctcttttcttaggataaagaaaaacttccaaactagaaaaacaggccctggttcccttagtttgcacttgaacccaatatgttgccttgtacatacttggtccctgtcacattgactgcttgggaggcttccagggagaagtatgagaccctgaggggtgagaatgggcagctagcaagaacatggaaattctgcttggcactacagtcataaatagaaaacactgtgtgtgctcaggggagcaggggatgccactgaagaaactcaagggaatgtgtatttgaaggaaatgcaaaaactaagtatttaggcaaaatgaaattatgcctttgatgactaaaagggcactaggaaaggttgtgtctactaacttcagccctaatcagaacagatgcctagaaggagcatttttgtgacaacttcatagtgattagaatcagtggagaactccatcttagtggcaggaatataatgaaactacccacgcaagaacatggttgaatcacatttgcttgacttagggcaaagtacgaaggagagacaaaagggttctcttggaaacaagaagagtgactcacagaagtgcgcctgggtgcc

SEQ ID NO: 438316 - DNA, 1311 bp, Homo Sapiens
gggcaaaccaaggtttgtatattcatccattgcattcaattcccctctatccaatgcgcgtttcgggcttaaccatgatacctgttttgtaactaagatgttctgtatttcacccggcagatctcgtgagcccatccccacgtatatggagctaaacttccaggaaaagtaaaaagatgcctgcttgatttgccccacaagatgaaaattttctttattcccacagtatttttgtttgcaaattatgactgagagatttagttcaaaaggaccatgacgttagaattgacccccacacccctagaactacgtctagactactactaattataactaagtcattttaagtggcaggtgggtatcttaaaggtggtctgttctcatcgtttcaccacaccaagttctgagtacattcttctatggaccaacatgaatttgctgggtttctcttttttgtaaatgagcatgttatgatacacataattgcattatgatgcaggatgacataatacataagacgatgttttcaagctggttttataagtacttatctcacatccacagagagttggtttgccatgtgatgcaatgtgtcccacatagacatgaaccaaaaccatacagtcactaccccacagggggacagtgatttttcaaaatgaagctttaaacacaacaaatcgtggacagacacgttgataggaaagagccttgaatataggcaccagtgccccagttcaacaatatccatccaatgtaataaagtttgaggaaccaaatatacactatattctggatgtaattacaaaattctgccatgggaaaactagaacacaagtagggcaaaagcactttttatgatttttttttttgctatatctttggagcatgaaattagcagaaagggaagatgttggtatgtccctaaaatatcttactttttgattgcttggacacttttatcactagatttggatccaaattctatcctcctattaacccttacttctcaacaaaaatgaatctctgtgaaagtcttgatgaacctgctttggaagaagatgcaataattcacacaaggagtccattcattggttctcgccttgcacaaagggtggactctgtctcaaacacttcaaatttctagagatgaaatccagaaagaaaaagtactgaggcgactgtttccactattgatctcttttcaactcacttcaagttgtgggtttttgttgtggggggaaattattgcttgtgaaacccaattaactgaggaagggccccagtctgcagcaggttgttgcacatggg

SEQ ID NO: 438317 - DNA, 1369 bp, Homo Sapiens
  misc_feature (56)..(114): n is a, c, g, or t
  misc_feature (204)..(204): n is a, c, g, or t
  misc_feature (395)..(403): n is a, c, g, or t
  misc_feature (622)..(652): n is a, c, g, or t
acaaaaaaggagcgtaaaggtgaaaaaacaaaagagggctggtaaagaagaaatannnnnnnnnnnnnnnnnnnnnnnnnnnnnnnnnnnnnnnnnnnnnnnnnnnnnnnnnnnataaatggggaggagcgcgtatatactcacaaaccccacggatgggcgctcgcagcggggcggaacgacttacacgtgggtatcgacaanaaacggtcgccaatgctgctgtgtcataatctagcgaggggtgaacacataaggaaattatggaagaagtgtaggctgaggacaacaataggtagatagggcaccgtagagattgtttcaccgtggcgaaaataggccagaagggggaatcgcttctggtatccacggctggaaatccttttagaaggccnnnnnnnnncattaaagtatatgaaataaagtgtcgcacaggggccgcatcgttaagaacccgggaggggaaggtgtccgcccaatgggtgggggggaaaatggcggggagggcaaaatcatgggaaaggaaaggctgtcccctaataaccccacaccagggggggagaaaaataccgtgaaaaggtaggaatcccgattgggcgggagcggttgagggtccttaaannnnnnnnnnnnnnnnnnnnnnnnnnnnnnnaccagcgtcaaataggggtatagggagagggaggggaaatggtacaggccggggtgtgctatgaggggaagaggaggcgggggcacgcctcctcaaggggatttcctctttctggtcccggggttccggaacccccgtttcggagggcagctgaggaattctgtctggagatgcggaggcacgtgccaagttgtctggctcagcctggatccgggaagccacagactcaactgggaattcgggaccctccaggtcagggtgctgcagaggaatgtgcctggcagatgggggctgctcagccctgctgggtcagtcttagcctccccatccttgtagaggggaacatctgaggccacagattttgcatccttagcaacccctgcttgttctgactcctgttttttgtacagattccttctggctctggttcggagatctggccgagagcgtttcttaaaatgcccatctcgctgtcgggtggctggaccacgctgtatacgcactgattctcctgggacacacaagccacttttgatttcagcctcctcctggcccacgttctgctgcaatgactcttctttggtcaaacccagcttctgtccatagtagtcttcaaagaacttttctttccattgttccaccttcttttcctatcccgggaattccggaccggaagcaagacggcgtcagcggcggtatgctcaccaagggggggcc

SEQ ID NO: 438318 - DNA, 1025 bp, Homo Sapiens
  misc_feature (726)..(726): n is a, c, g, or t
  misc_feature (904)..(904): n is a, c, g, or t
  misc_feature (951)..(951): n is a, c, g, or t
  misc_feature (960)..(960): n is a, c, g, or t
ggcaggatggtgcatcgcccttgttaggggccggttgggtcagtgggtcacgtccgctgggggcagtgtggcattgggcgtcccggggtcttttcctggggccaacattggggactttggggtattgggcggtatgcctaggggaggcagtgcgcgtcgcggacgcgtggcatgaaccggtgccgggttgggtcgaaaattgcaagcgagcgtcaggggagctaaccgagagaaaaaaggagggttgcattgtcgaagagggaccaaatggtcaaggtccccagtgtcggcccacgctgttggggccggctgtcgctcgttcctcgggcacttgtggttttctgctggggctttgggtgtcctgcttgccgcattcctgatgtgagaactgcgtgccgccagcgcgtgccggggcgtccgtgcagcggccaccatcggagagccggaccgccagtgggagaaagagaaggcctcggagggcccgacgtgtcggacacttgccgccctctcctcagccatcttgttagtgggcagaggcagcttccggtgcacatgcccccgccccttagccctctcgtgccagcaccgtagggggcaggtgtcggagttctgtctgggcctattcgggtccgagttcggaatttcaggttcaaggcccagttcctcggattgttcctgcgcaaacttcagtttcccttccaggcacgggcaatgtaaataatgatnagcctccctcatctctggcggctgggtattatggctggggaaggggctcattcgattcgttgaagcattattcagtggactccctgagctggcacctgggagatcgtcccatcccagggtcccgagtgtcaggtttggctagggtctgggggagaggtggtcctcccttctccctgcnggggcgcggtgaggagcgggcctgctcctccggggagttctgcccgnttcttcccntcttcttcctgagaagtggcggggttgggggcacttcgaggtcgccttggggcgaggtggtcgtg

SEQ ID NO: 438319 - DNA, 2735 bp, Homo Sapiens
  misc_feature (93)..(93): n is a, c, g, or t
  misc_feature (186)..(186): n is a, c, g, or t
  misc_feature (293)..(307): n is a, c, g, or t
  misc_feature (454)..(465): n is a, c, g, or t
  misc_feature (633)..(635): n is a, c, g, or t
  misc_feature (638)..(639): n is a, c, g, or t
  misc_feature (642)..(645): n is a, c, g, or t
  misc_feature (647)..(649): n is a, c, g, or t
  misc_feature (652)..(652): n is a, c, g, or t
  misc_feature (654)..(658): n is a, c, g, or t
cgagagattggtattttgttaaggacacgggttgtggtttgttggcccaccaggggggcggaaaggaattattattgtatttgtaccggcganaggggagtaggaaacaaagagaggttggtgatttaatacctcgcccttggcgggaagctttcacatgtgttttatcaaagaggcggcggtgtntttaggggagagggttgggtgctcccataggggggggcgaaggaggaaagtgcatttggagaagattccgacccccccctttttctcatgaaataaaatggtcaccnnnnnnnnnnnnnnnaaatatttttgaattgtgggggggtcgcgggttaggggaaatccccgtgtgtggtaaagattccccgtaaaaatgccccctgagaggaacttccctttggggggattttttttcaaaaaaccttctcgtggtttcccccccgggggnnnnnnnnnnnnggggggggaattcccaagccctttgtgtccagggccccgggtttttccttgggaaacccaggttatggggcccaggttccctctttcccttatgtggggcccggcgcggcccaaaaggaatgggtttagaaaagctttctcgagggcccgagggcggccggacaaggnnnttnnttnnnngnnnttntnnnnngttttactcaaatggtttttattttcctatctgacatttctaacaaaacgccaggtagacggagttaaaaagaatccaccgcacgaaaggtaaacaaagcagaccctcagaaactccctggcaaggatgttcccctccccagattggcccagtttcaccagcaactggtctcagctcagccttatgcctttccactgacaccccccacccctccacattctcgtgattcagaccaggaacttctcggctgattgtgtccgtgtgtctgagggaggggcacgctggaacctgggaacctactgggcacctctaatgcagatgagaaaaacttgagaatgtgaaagtagatcagtccccgctcccacccgaaggtgcagagacgcgggacattaaccagcagcacgcgggggtgaagtaactcaggccactctcctccccactgcccagggcgggtgcacgccccaggacctcctccccaggccccacaacccacgcaaggcgacaggaagctccccacgcctgccccatgacgcaacgatgaccgcttatacaagtatgtcagcggagggggaaggggagtgcctggaattctccgaggttggaaacgcaaaaccaactcttgaaaaaccttgaaagggccagcacagcccacagtacaaaatgaagtccgaccctgaggagatctgttaaaaacacctagcctacggaaacgtaaaacactacacccaagcctcccttctcccagttcagaaggagagcgaaaggttcacgtcccaggccactaagaccggcacctgtgggcgcaggtctttgcggaaggcgcccgcgcccccggctcagattcctcggtgccgtccctgcacactgaaggcgatggttccccggggacagagtccctctccgggcctttcagcagcccgggcggcggcttcatctccacgtttttcgcgggcgcttcccccaggatggagggggttggcctcgcctcaggtctgcgccctcgggccgacggttcgacgcgcgctctgggctccggcagcgccgctcggggtcctcagaaggccaccacggcccgcacgagcacgttgagcatgctgtccgccgggcggcaagcgggctttgcctcgcacgcgggcggcgccgtcggaggggccgcggggctgcagttcaggaggccggagaagcgcctctgcaggacgcgggccaggttgggaaaggcgccctccgcttgcgccggagggggctgcaggcgatcggcgacttcggatgacgctccctcctcttcttccttttcttccagacgggctttcttgctcgggaccagtccagcgtccccgccgtcgctcaggctgctgctgcgtcgtttgcggctgactttggcggggcgcggggcacagcaggcggaggtctcctcggctgtcggcgcctcctgcgtgtccattggctccggaaacgggtgctcaccgtcgggggtcgctgtctcggccgtggactcggcttctcggggcgggtgcaggcgagggtcagaggggagggcggccggcaacgacacctcgggctcgagggcctccaccttggccgagaggtagagctcccgggcgctgcgcatgaccagcgacagctgcagactccggtgcagccgcaggccaccgcgctgcatgcgggagtgatacatcttccacaccgacagggtcatgatgcgctgtgcctctttctgcacttccatggcgactcgacggcgacagcggcgggggctcccgggagggacagaacaggcagcaggtgcactccggacaacgggctcgctcacgcctctctacacaaaccaacccacgcagtgacactgctaggacgctctgcccaggcgcccgccacccaggcccttttatacccccagtgacgtcactgagacaccccgcccaaccgaaggacgcatccgggctttccaactcgtcgcggccaaacactcattgcccgtgcctggaagggaaactgaagttgcgcaggaacaatccgaggaactgggccttgaacgaaaattccgaactcggacccgaaatttgaaaaattccggacc

SEQ ID NO: 438320 - DNA, 362 bp, Homo Sapiens
ggaaggtttttaatgcatgaagtatacttgtgatcctggaggttggaaaagattcagtaaagataaagtttggcaaaaatgattctctccctaggatttggggatatgtaaatcaaaccaaaggcacattctgcagctcacagcaaccttcattttttgtcctagattgagttatctatcaagaatcattcattccctctcagcccttgcaactgtttcctatgactttggacttggccatgcaacttgctttggccaatacaatgtgagttaatgtgctttaagtgcatgtaattaggtcagtccctccctccttgagcttcaactctccaccatgaggacaacattgccctccttcctgg

SEQ ID NO: 438321 - DNA, 660 bp, Homo Sapiens
atatgggggaaggaaattcgccaaaggccacttaggttccaagggcccagggggttcttccctaagggaaaacaaggttatcgggcccatgttcccctttacccttactgggggcccgcggcgcccaaacgaatgggtttagaaaagcttttttgagggccgaaggcggcccgacaaggtcaaatttgagttgcatgggtgtgatttgggaaaaataggctttattttaaccagtggtattgtctgacatcctatacggcataactgattacagccaagttcatgaatacaaataaaatagcaatttccctcattctctcttttgttttctgttcagagaaatcaggagatgggagcattatgctcagaaaccgaagagctcttccaagagctccagcttagagtccaggcttccagagcatgcagcctcctaacacgtatgtggtcacatgtgcaaagacctttattacaaaatattcagagcagtatttctgtaggaaatcacacgagcatttacaaccaaacatggctgataaaattcatcttgctgtggatggtgaggatttgaactgcaataaaggagatgaggcctttactttaaaggttcactttccttgaaagggggagagtcccgggtgagagggaatcgccatcagtctg

SEQ ID NO: 438322 - DNA, 268 bp, Homo Sapiens
  misc_feature (208)..(208): n is a, c, g, or t
  misc_feature (227)..(227): n is a, c, g, or t
cggtatgctggtttactagcaagaagattggcttcttttccagtatgcaatccaaaatgtggaactgagtcacagggccaaagcccccttttcctcacgtgaagcaactcagtaagatggcggtgcagtgaagcctgttcccacacacctcggcactgatggagcagtctccaaaggaaggctgaaaggacagcaggtggttgccttngggtccttccttcccatanctttagagtgccatttttcagcaatgggtaatagcatcaac

SEQ ID NO: 438323 - DNA, 485 bp, Homo Sapiens
  misc_feature (36)..(36): n is a, c, g, or t
ccagttggagagtagcagcactggggaaaaaaaatncctaacgtgacaaagtgctgtaaattagcctcagagaaatacaatggacagatgcaaagaaatctatctcatgtgatttgagttatgccactgagcagaagacatgaaaatccttatttcttggcaatgtttacctgtaagtttttacctactcctggcgtatttacagtttagggtgaaaagaatttgaaaagcaaaaattgcaaggaaacattacaatccaagtaattgcagcactagactaatagatcagtgtctgaggaggcgatcagataggcagaagaacagctctctaaatcctcccttcggacacagtggagttcctcgctgtcttttgaaggcttcataccaatccctccttcctcggcagcaggggctacttctctccctctctcccaaaggcgaagtgagaacactcagagcacctctttccactctcagtcatggcc

SEQ ID NO: 438324 - DNA, 568 bp, Homo Sapiens
  misc_feature (466)..(466): n is a, c, g, or t
  misc_feature (498)..(498): n is a, c, g, or t
  misc_feature (504)..(504): n is a, c, g, or t
  misc_feature (530)..(530): n is a, c, g, or t
  misc_feature (541)..(541): n is a, c, g, or t
tgtatcgccttccctctgccctcccctattggggttggggtcttagtctgagagcgagtgagagccacagtcatacactctgtgggccccatctgcgttgtaaggcccattgtgccagtaggaagagtcacagactgtctgtagggaattaatctcggacgcggaggagttggcatctcgtctcttggaccgctttcggttcctcaggataaacacgagcatgcccaccacggtgaaggcggaggtgacaaacaccagcagcagtcccgggaccaacaccgagatggacaccctgctggtgtctaggtaggagttggagtgcgtcccggtctccgccaacccagtgctgtttttactgtgcgaagttaacgtgggcgagatcctagcgtacagctgagggcagatctcgtcattggagaggagcatgaaatcctttctaaagaagttcaccggcgtctcacacttnaggtcgctcatcagcacttcggaacccaagcnttctgnccacttgcttgaaaggcacaattgtncaggagcactnccaggggtttccgtggagggtctatct

SEQ ID NO: 438325 - DNA, 1072 bp, Homo Sapiens
  misc_feature (143)..(143): n is a, c, g, or t
  misc_feature (733)..(743): n is a, c, g, or t
aggcccagccccccttttttccaggtaaaggttctttccattggggcccaaggattctcccgcatggaggtttgatttggcccctgggggacttttggctaaagactattaggtttgcctttccaacttagatgttcctgagnccaagcagaggggaccattgccaatcccctttccatgcctggtgtttttcccccatgtaagtcttcttttgaaattaaccggatgtgtctcctttggaacagccccataccaaaagagaactactgatctgagcataggaaagtagaggctctaccacttttcagttgaaaaagcaagactttctctgtgtttctgaaacaaggcataatgttgtcacagaatcagagatccagtctcacttttccacaaatctccaaatctccagtcttatcttgtgtgctctaatggtttggttcaatccctttccaactcttgttttcaaagcatggggcctgagtgttctccactcctcctaagaaaggagcttgggtggaagggaccatgctgacctcctccatcagagggctcttccagtagtattctcggatgcaacctccatttctcagttaccattatttcctgtatcagctttgtccttcctggagggatgcacagtgatccggcccaccactgttgttgtcttgtgcttctgctctttcctatggtttcaggttattttctgggtttcccctattcttcttttatttcnnnnnnnnnnnatatttgctttcctttctactgcttttagatttgcaggagatgcaagtttcagctcaatgtttggcttctctcaatatggaaatttcagaaggacagaggagaggagggaggaagaagaaagtatactcctccagaatttcagtgatctgttgtggcagtccagtggaaggaaggtcttttgaggtcacttagaagcatctttttgggacatccttttgggatctctgtaggctaggcatctcatatcttgagactcacccccagcctccaagcctctctccatttctctaacctatgcattttcctcgtgccgaattcgccacccagg

SEQ ID NO: 438326 - DNA, 464 bp, Homo Sapiens
ccaccgcaagaatcaaaactttgtggctcaagaggaagagccaatgtgtgaggagttgggaggggttaactttttcagaaaaataaaacaaaaatggttagaaaacgtttaacacagacattaagcaggagtagaatgtgtgagcctgcatgttttagaaaaggcaggatggtgacactagtgaggcggtcctctcgctctaaaatgcataggttagagaaatggagagaggcttggaggctgggggtgagtctcaagatatgagatgcctagcctacagagatcccaaaaggatgtcccaaaaagatgcttctaagtgacctcaaaagaccttccttccactggactgccacaacagatcactgaaattctggaggagtagtactttcttcttcctccctcctctcctctgtccttctgaaatttccatattgagagaagccaaacatgagctgaaacttgca

SEQ ID NO: 438327 - DNA, 549 bp, Homo Sapiens
taaaactcttgcaagcccttttaattgattaggaatgaactctagatgcccaaaatgattggaccgtgaacagtaatacaactatttctaaaaacaattaacttttgctggccaaaaaagaaacgtttgattgcatgaaaatgtgtttaaaacatctatattcttgtcaaatataaatgaaattaactttattatagaaatcattctgaggatttctagggaagacaaatacttacattttgacataaaacaaattggattatatcgaagacacactctaccttttagctatcaactttttttcttccttgaatttatatcttacccttttttgcacataaacttcatctgttaacaacctttggaaaaccaacagatatttctgacataaatctagtgcatgttgttccaggtttaattatatgcaaaggaatgatacaaacttggaacatcagtccataaactatgaacagatgggtagaagtattcgatatatcttgataaaactcttaaattcgtggcaaagcttgttgatcatggttttctttt

SEQ ID NO: 438328 - DNA, 854 bp, Homo Sapiens
gagagataggttttctttctctcagcatctccacccaaccagcagaaaaccggtctctgaggttccaccaaaatatggaacttgattttggacactttgacgaaagagataagacatccaggaacatgcgaggctcccggatgaatgggttgcctagccccactcacagcgcccactgtagcttctaccgaaccagaaccttgcaggcactgagtaatgagaagaaagccaagaaggtacgtttctaccgcaatggggaccgctacttcaaggggattgtgtacgctgtgtcctctgaccgttttcgcagctttgacgccttgctggctgacctgacgcgatctctgtctgacaacatcaacctgcctcagggagtgcgttacatttacaccattgatggatccaggaagatcggaagcatggatgaactggaggaaggggaaagctatgtctgttcctcagacaacttctttaaaaaggtggagtacaccaagaatgtcaatcccaactggtctgtcaacgtaaaaacatctgccaatatgaaagccccccagtccttggctagcagcaacagtgcacaggccagggagaacaaggactttgtgcgccccaagctggttaccatcatccgcagtggggtgaagcctcggaaggctgtgcgtgtgcttctgaacaagaagacagcccactcttttgagcaagtcctcactgatatcacagaagccatcaaactggagaccggggttgtcaaaaaactctacactctggatgggaaaccaggtaacttgtctccatgatttcttggtgatgatgatgtgttcatggcctgaggtcctgacacattcgcttgctca

SEQ ID NO: 438329 - DNA, 1122 bp, Homo Sapiens
atccagactttattggacacgctccgcgcagggcccgggcccggcggtgagggcggctccatccaggaagtctcagcaacaggaacccacaaggcgacactctagctaaggttatagatagctgggagacaagggccgctccgcagacgcaggaacaggccagatctttataaataaacatccagtaaagagaaatgacaattctaaatcatccgcatacacagagcactctagggggtggggcgccgggggcctggaggggcgatgagtgggcccagatgtccacggcacggggcgggcgggggcaaggccggggaaacagacgatgggcactaggacactgcgcatgtacaagaccaactactgggggcggcggccccgtgcgtatgtgtcaggctgttcgttctggaatgaggaggggtggtctttacataatattctgtggctggtgggctcggagagggtctactttgtggagaggatgagggcgacgatgagaccgtagaggccgagcacctcggcgaagatgagaatcaggatcatgcccacgaatagtcggggctgctgggcggtgccccgcacgccagcgtcccccacgatgccgatggcaaagccggctgccaggccgctcaggcccacgctcaggccggcgcccagctggaggaagctcttgtagaggctgatgtcgtcattcagggagttggcgatgaggactgccaccaccaggccgtagatggcgatgatgccagccatgaccactgggatgatggacttcatgatctgctccggccgcatgacagacatggccgcaatgccggtaccgctcttggctgtgccataggcagcgcccagggcgctgaagaccatggcggccgaggcgcccatgacggcgaaaaacgaagcatactcggggccgctcttggactcggacatgtctgcgggtggggagggggcaagctctgcgggccgaggcggtggcggaggcgggggcgaggacgggccgggcacgaaggtttgcgggcgggcggcggcgaaggcgatccggcccgtcagccgctgcgctctaaataccagcaccgcagaacaaaatggcgatcccgggaattccggaccggtccagcc

SEQ ID NO: 438330 - DNA, 1881 bp, Homo Sapiens
  misc_feature (190)..(203): n is a, c, g, or t
  misc_feature (713)..(713): n is a, c, g, or t
  misc_feature (715)..(715): n is a, c, g, or t
  misc_feature (719)..(777): n is a, c, g, or t
  misc_feature (1391)..(1391): n is a, c, g, or t
  misc_feature (1756)..(1817): n is a, c, g, or t
aaaaatgggtgtgacgtgggaacacttttgaaaaggcgccaaattttcctatggtcaccaatggcacgggggtgcataagtgttaagggtttacccgccttcacgggggggaggctgtttgtcacattttttcaaatcgccaggggggaaccctttgtggaaaatttggggtaaaaggagggatagaggnnnnnnnnnnnnnnaggggtggtgaggggccctaaagaatttttcaaacaacaaggcccctggggattttcttaaattcctccacaataaacaccaaaccatggttgtagaatccccttcaggttcccccggtgggataaaataatttttgcaatacccccccaggaggcccgggaaaggtaaaaaacttcttcaaagccattcacccccgttatggcaggctccacctttttcaccccttgggacccctttaaaacattttattttttgaccccctttgagtcctcttaaacctctgctaggtacaaacggtccaacctatctcatcttcacaagagtgtgtgggttccaattatcacacctctcccaagaaattcagttttcccccgcccaagatcgttgtaggcccccaggggtcagcgctctaggggtgtaacacgacgcgcgactcagggtgcacgattatacaaggaacccggtgtacgcgtaatctttgacccatataggtgatattctaataaccntncccnnnnnnnnnnnnnnnnnnnnnnnnnnnnnnnnnnnnnnnnnnnnnnnnnnnnnnnnnnncacatccaagaactttattggacacagctccgcgcagggccacgggcccggcggtgagggcggctccatccaggaagtctcagcaacaggaacccacaaggcgacactctagctaaggttatagatagctgggagacaagggccgctccgcagacgcaggaacaggccagatctttataaataaacatccagtaaagagaaatgacaattctaaatcatccgcatacacagagcactctagggggtggggcgccgggggcctggaggggcgatgagtgggcccagatgtccacggcacggggcgggcgggggcaaggccggggaaacagacgatgggcactaggacactgcgcatgtacaagaccaactactgggggcggcggccccgtgcgtatgtgtcaggctgttcgttctggaatgaggaggggtggtctttacataatattctgtggctggtgggctcggagagggtctactttgtggagaggatgagggcgacgatgagaccgtagaggccgagcacctcggcgaagatgagaatcaggatcatgcccacgtatagtcgggttctgctggtcggtgccccgcacgccagcgtcccccacgatgccgantggcaaagccggctgccaggccgctcaggcccacgctcaggccggcgcccagctggaggaagctcttgtagaggctgatgtcgtcattcagggagttggcgatgaggactgccaccaccaggccgtagatggcgatgatgccagccatgaccactgggatgatggacttcatgatctgctccggccgcatgacagacatggccgcaatgccggtaccgctcttggctgtgccataggcagcgcccagggcgctgaagaccatggcggccgaggcgcccatgacggcgaaaaacgaagcatactcgggccgctcttggactcggacatgtctgcgggtggggagggggccagctctgcgggccgannnnnnnnnnnnnnnnnnnnnnnnnnnnnnnnnnnnnnnnnnnnnnnnnnnnnnnnnnnnnngaaggcgatccggcccgtcagccgctgcgctctaaataccagcaccgcagaacaaaatgccgct

SEQ ID NO: 438331 - DNA, 449 bp, Homo Sapiens
  misc_feature (25)..(25): n is a, c, g, or t
tctttaaaataaaatctgtggctgntgggctcggaaaaggtctactttgtggaaaaggatgagggcgaacgatgagaccgtaaaaggcgaagcacctcggcgaagatgagaatcaggatcatgcccacgaatagtcggggctgctggcggtgccccgcacgccagcgtcccccacgaatccgaatggcaaagccggctgccaggccgctcaggcccacgctcaggccggcgcccagctggaggaagctcttgtagaggctgatgtcgtcattcagggagttggcgatgaggactgccaccaccaggccgtagatggcgatgatgccagccatgaccactgggatgatggacttcatgatctgctccggccgcatgacagacatggccgcaatgccggtaccgctccttggctgtccattagcgtccccagggcgccctcatgccgaatt

SEQ ID NO: 438332 - DNA, 899 bp, Homo Sapiens
  misc_feature (33)..(33): n is a, c, g, or t
atggaagggcaagtcccctgggcaaaaataaancccccatttgtcccacatcaaggcccatttccttttattagatactatcctcataaaggaagcttttgttttcaggacgccctttatatggccacaatgaatcttcgacaggtgattcaagtggtcctacaatttgttcctttataaagcgcatatcttcttcagggatgagaccatattgttccatgacaggcttaattccattagaattaataaggtgctcaaacatcataactgagccttgttcatgcgtccatttcacctccgggcgagcaagtggaataaatcgtccatcaaacatgtgagaaaatggcccatgaccgagatcatgacaaagtccagcaatctgaacacagagaacatctcgttcacttatctgcagctctggttgtttttcacccagtgcgtgaactagacatcctgctagataccccacccctagactatgctcgaatcgattgtgtgaagctcctggaaaaacatagtaaccacctcccagctgtttgatgtatcgaagacgttgaaattgaggtgtatcaatgattcggacgaggagagggtggagctcaatgtggccatggataggatcattaattaccttcattgtatcaacgtggatttgaacccatcgctggatataactaagcagcttcttcctctcccccaaggaacttactccaagattttccaaacgagactcatcaagacaaggcagtaatgcgcctgtgatttcattttctcggatgttcttcagcagccccggctcttctaagccaccgcgcctgaggaaggtgcacacctgctccgcccacgcgtccgcgcacgcgtgggtcgacgatatcccgaaacttccggaccggtaccgg

SEQ ID NO: 438333 - DNA, 382 bp, Homo Sapiens
atctgtatttagccttggcatctttatatttgtcttattttgaatcttatccactttgtaagaacaagtttatgtttgagcaactttttcatttaatccagaagggtagggactatgcagtgtaagctgcatcacttctgctttcttcctactagtgacaatcatctggtcttgccctcaagcaacaattgctagagtaacatctttgtataagcaagtaaccccagatagagttgacgtttcagctttgggctgtcaaaagggtatgtcatggaccaaagcactgttagtacgggtatgtttgcatttggtcactgatatgtaaatgactgctagcccacggctggaccacttctcaatcagcaaataaagccatgtctat

SEQ ID NO: 438334 - DNA, 510 bp, Homo Sapiens
cacacagaaaaccaaccacatttttactgcatctgctccacgctggattccaacatgctggcccggagcgtggctggctggaagcaactccaacaggtttttcccttccccgtcatgtacattatttatttttgatcctactcactgtcccaagtccagaggcagttacaaaaaacactcttgatgcaaaccgtgagtggctacaacacacggatgggggtgggcgcgattcccacaacagggagtggaatccgggaagatgatatataggggcaagacgcccccttacttgctaagagtatatggagctcaaaacccacaattgctttgttttgtttctcagttcctggagtatgttgaaactacttgctcttaacattagttcgtatttttcatcagatatctgacctgatttaaaacatgtttgtttgcatacatctttttgtagggcaccttatagttattcctactgatataggatgaagattataaatatctgcataaaaagag

SEQ ID NO: 438335 - DNA, 782 bp, Homo Sapiens
  misc_feature (556)..(556): n is a, c, g, or t
  misc_feature (589)..(589): n is a, c, g, or t
ggcgtgagccactgttcctggccaggtcattttctttttcagtctgttcactgaggcccacaaaacaaagggtctcaagcactcccaaatctattacagaccacccatgtgaaataacattcttcccagccaatagaaactgatagacctggtagcaggggtaagcatctgaaccttggcatgtcattttatttaagccttatgcccaagaggatctggatgtgcccttacagagatacctgtcttacctctaaagtcaggtaataccagccatcagaaaaccataatatctctgtgcccttctgtgaattacgtaatttcaaagtggagtcagtgagttcttttcttagctttaatcagaagttaacaacataggttctccagtgcaacagaagtccctggagaatcactgttaaaaaagggcagacattcagaaactactgccaggtcctactttgtgtaaaatactataccctcgtatgttcttttgaaaatgcttactggacaacacttgcatgggttttatttctggcttaatttctttgaacctcattgntagttttagaggatgtccttgggaggatcgcanagcagtcttgtgagcttgagagccacgcacatcgcctgtatgactctatcttggccttctggacatgcttgctgggtgcaccttattcctgacaaaaagcccatggcggcaatggagcactcatgtgaaagggttaaccctgcattcttttaggcagaggttgcacctgtcggccaacactggtttgtgagaa

SEQ ID NO: 438336 - DNA, 815 bp, Homo Sapiens
  misc_feature (531)..(531): n is a, c, g, or t
ttatagtttgagctttatctgctcttttttaatgggatagaggggaaggcaacacgtcttattttatcaaaaattgcaaagctacacgctctttgtggagaagcaccaaaaggaaaaccttagtttggaaggattcattgtaaataaaaatagtaactcagccctccattcagggaggagaaaggcattttaaagctagtatattgaaggtttcccccttgacttcagtgttgaatggctcttgcaaggacttcttgaaggatttttttctcactagccagtgtttggccgacaggttgcacctctgcctgagaagatgccaggttaaaccccttcacatgggtgctccattgccgccatgggctttttgtcagggataagggtgcagccagccagcatgtccagagaggccaagatagagtcatacaggcgatctgcgtggctctccagctcaccagactgctttgcgatcctcccaaggacatcctctaaaactggggtgttctccaacaggcactgaagaagaatctnccccttctgtaagacactctccgtcagagactgatgttcatctatatttttcttaaattgccggttaagctgcagagaagactttgagacttgtaagattggacctggctggagtcccgtggtcaagtaacatctggcacattatacagccagcagatcccctgttctcctcctttcctgggaagctgcccttcaacatctgggtctgagaatggccaccggtccaacctagctggcaaggaggggcgtgttttcagcagtccagaggagaccccgagggcctg

SEQ ID NO: 438337 - DNA, 427 bp, Homo Sapiens
  misc_feature (409)..(409): n is a, c, g, or t
ggttatttgagattttactttgtaatcgagtaatttagccacactcttgtgagggaacaagccagagccaggaccgcatattacccggtaaagctgcagagaagacttgagacttgtaagattggacctggctgcagtcccgtggtcagtaacatctgcaacattatacagccagcagatcagctcttccagctgacagcaaaatgtcttcacacattgcaccagtgattcttttccctgttctcctcctttcctgggaagctggctttggctggagcttgaagggaaggaagctggcccatcactgtctgacacttccaaggggctctgccttttggatatccccaggtgggcagggtaaccaagggtagaaatggatcctagatacgaaaccagggttagaaacctnttttcagccgagcgggga

SEQ ID NO: 438338 - DNA, 482 bp, Homo Sapiens
  misc_feature (21)..(21): n is a, c, g, or t
  misc_feature (36)..(36): n is a, c, g, or t
  misc_feature (55)..(55): n is a, c, g, or t
  misc_feature (105)..(105): n is a, c, g, or t
ctccaccatgaaaagatggtncttaaaatcctgaanctgggtaagattccccccntgagtttatttacctacagatggaagacacctgagagtccctgacatacntccagtatttagaaacctggtccaaaatgaaggagtccagaaaaagacactaagaaggaacagcctaatagagtaggagaaaaatgaggagactggtgtcatagaagctaacgaagaaaataggagggagtgcctgaaccataatgaatgctgctgagatgactgataaaatgaagactgagaacttaacttctaacttgagaacagctacatcagtgggaaaatgagtgtacaagtcagagtggagtgatcccaatagagattgagaggagataacctgagaatcctagtataaaataattcttcagaggaactgaaggaacagagataactattcagaggcccttaatagaggtttttgtttttaggactttggc

SEQ ID NO: 438339 - DNA, 1037 bp, Homo Sapiens
  misc_feature (1006)..(1006): n is a, c, g, or t
ttttttgctccaaatgctacgacctgaagaatggctgcagattgagatatcaaaaatctcagaaaaatatataatatatttgtatatctctgtatgtctattatttaaatttcacattcctttaaaagtggttattcagtcagtagctgctgaaggaggctcttctgctgggcctggggggtctgtggtcctgacgtgggcttttgagttcccagtggaccaggctggttcaggtaagggtccccgcctaccagattcactgtacactggacgtcagcaaacacctgaacctgttgcacctgctgggttccatctgcttctgttttgagaaggtcagtggatgagagctggttgcagtagaggcctgtgtgtctcagtgcgggatcatttatctgctcagggcacacagtgttcattcctggcatctgcaaagagctcatctgcatctgggccatcattgggttcatgttctgaacattcgtatttccacctgccatggaaacggtgatgctcatgttgttgtatactcctggctgtgcaggcgtggggctggttctggacagcttgactgaacacattgttgtttcctatcgctccttgctgccaggccttcatgtctggtgactgataccccggaggcaggtggagtttgctggagaagagaactctgaggaggagggattggcatcggcaccatggagctcccagggcttagagatggagcaaagttggcctcaccttggggaaccattcctgctcctggatactggaagacattctgctgcatctgaggattgattccagtgccaaactgtcctcctatgtttcctgtcatgcctctgctcaccatgctgttgcggttggccaaggatgcttcaggatttgctgctagttgtgaaaacgggctggtagaagcaggtggggttcctgggatttgtaccatagtttggtggattaggggaattgctgtggagcaccactgaggaagacgggggttccccatttnaactggtagtccagatgagggagggagggtt

SEQ ID NO: 438340 - DNA, 775 bp, Homo Sapiens
ttgctccaaatgctacgacctgaagaatggctgcagattgagatatcaaaaatctcagaaaaatatataatatatttgtatatctctgtatgtctattatttaaatttcacattcctttaaaagtggttattcagtcagtagctgctgaaggaggctcttctgctgggcctggggggtctgtggtcctgacgtgggcttttgagttcccagtggaccaggctggttcaggtaagggtccccgcctaccagattcactgtacactggacgtcagcaaacacctgaacctgttgcacctgtagagcattcctctagtctgtagtcaccacagagaagaactcttctgtcttcttgtcctgggttccatctgcttctgttttgagaaggtcagtggatgagagctggttgcagtagaggcctgtgtgtctcagtgcgggatcatttatctgctcagggcacacagtgttcattcctggcatctgcaaagagctcatctgcatctgggccatcattgggttcatgttctgaacattcgtatgtccacctgccatggaaacggtgatgctcatgttgttgtatactcctggctgtgcatgcgtgggctggttctggacagcttgactgaacacattgctgattcctatcgctccttgctgcctagcctacatgtctggtgactgatacccggaagcaagtagagtttgctggagcataaacttcgcagaggagggatggcatcgcaccactgacttacgagggcttagacatggagcata

SEQ ID NO: 438341 - DNA, 1897 bp, Homo Sapiens
tacttttccacggagaagaaagctgtataaagctgcagctttcaacaggttttaaacctggcattaaaatgtaatggcaaaaccaatattttctatattgtgaagggcaaaggttacagaaacggtcccaagaaaatctaacacccaaattttcctttgatagatagatgcctttaaaagggctggtaatgcagttacattctaacagagaagtccaaactacaggtaaaaactacggcttgtactgtgaaaaatgtgcagcttttcagttataaaactagttgaacactggtttacaagataatccgtagaacagagagactgtagaaaaatattccagcacttgagttgtgtgtggcagcagcatttgagtccatgaatgctatggtcattaaaataattgattatactttcctaaagaaaagccattttttaatgcaaagtctactacttccaaatgttattccaaacattaaattttaacagtctatcaatcaataaatgttgaacattttttttctattttgcatgtataaatatcaagacaccaaaattatttatagctgggcattaaaaatatctgacatttttctccccgcaaagatacttttcttaagctcacactttaattatttgtagactgctgttaagctaaatagccccaaaggaaacttttaattcatttagagactgtcaagtttccaattgcattttaactggaaagccactttcaatagcgtgattgtcacgacaggctatgacggggaaaggtcgcacaatcttgtgggatgaggccagtgaaatagaagcttttctctacatcaaaaacagggaagctgaaggctaaatgaccccactgtctcacaaaaggcactgagtactatggtctcataaagtgtttttaaaacattttgataacttattttaaaaagaaaaagaggaaactgtggattatgtgagtttttgcagcaatctagtgattccttccagcaggcccctgcttccccaggtctatgagcaactactgctgggccaggccctggctctcaagggccgagtctcagtttaaggccagattaagggggaaaattcgtccgagtagacctggacgaggaaaatttggtatctgtagcttttaagggcacacatatccatattaaaatgcaattcttatctgaaaatttaaaatcataacttatagaaaggagttaaagtcatttacatgcttacagttagagaagtaacttgagatctgtagcttatatgccgcagaagttagccatcaacatccatgcttagttttaaagaataatacttggtaggttgtttatttttaactggcgatagaaagatgggaattactatttattcagtcataggacagtgccccacatcttgctgactgagcacagcgcaagcctgggaaattgctaccatctttgggagtcaggcctcactgacacagaccgttctgaatctctgaccgtgacgcctgtctctgggctactcaacagagctgaatagctgggaaggctgatggctcaacccaactgccaagttccttccaggtagggccatgaataggtgcatgaaaaggttaaaaattcccacttagttttggatattaagataaactgtcttccagcttcctggctcttgtccgaacctagagaatatacggaaatgtcaccctgtcagaacctcttctgcctggaattcttccttttgcagagtggagattctgacttcatggcccttcccaggcaggctcacccaaaggaaaatggagtgaagaaaatcaccagcaaatcttccctgccgagggaccttggaacacccatatcagtttacattagcaactttatgaaaaactctctttaaaggaaagtttggatcc

SEQ ID NO: 438342 - DNA, 668 bp, Homo Sapiens
  misc_feature (592)..(592): n is a, c, g, or t
  misc_feature (599)..(599): n is a, c, g, or t
  misc_feature (642)..(642): n is a, c, g, or t
ttttttttagtctttaattcacttttaatagtataaacctcatttaggtagtagtattaagccacaacaataatgccacattgaaacagcatttaataaaatgcataaagctaattcatgcactgcaatactctatatacaaacacaacaatgcaaattcttcttcaagactgaagacattgattagatataaaattcagtttaaaaagaacatgctattttttaaatgccatcacataaacaaagtgatttcacagggagaagaaagctgtataaagctgcagctttcaacaggttttaaacctggcattaaaatgtaatggcaaaaccaatattttctatattgtgaagggcaaaggttacagaaacggtcccaagaaaatctaacacccaaattttcctttgatagatagatgcctttaaaagggctggtaatgcagttacattctaacagagaagtccaaactacaggtaaaaactacggcttgtactgtgaaaaatgtgcagcttttcagttataaaactagttggaacactggtttacaaggataatccgtaggaacagaggaggactgtagggaaaatatttccnggcactntgagttgtgtgtgggccagccgccttttgagtccctggatggnatgggtctttaaattattggttatta

SEQ ID NO: 438343 - DNA, 511 bp, Homo Sapiens
accagtaataacttatttcaacatatgctgcctgctgtgagtggctcataagaatttgggatatgggataaaaaggctttagatcttttcagaaacttcttaggatacagacacccaaaagtgataactgaagccattttgctacgttctatttttgcagtgttcaggaaaatcccctatctagccaattcttttcaccacatgcataatatatgtgtatgtgtgtgtatatatatgtacacacatacacatttatttttaatatcaactccacttttcaaaatttccccaaaaacaaacaaacccggcagccaagtactatgacatcccaattagtaaacacaaaacagaacgctttacaaaaatgaataaaatataccatatgcactcagcttccacactgtagtacccaagtgaggaggctgctgtgatgatgtctgtaggcagtttcttttggcagacagctccagcggaattgccactctcaattattaagttatgtataagaccc

SEQ ID NO: 438344 - DNA, 461 bp, Homo Sapiens
  misc_feature (17)..(17): n is a, c, g, or t
tggggtcttgcactgcnacccttaagaagctggcacacgaggtttcttattgctcctcttggctctggagcacaccttcttaatttccagaaaggacacaggcccaggagaggtggcagcaggggtcccacactggccctcctgctgatctccaagtggagcccggtgggcaggatgcaggctggctctagcccctacgtgtgacccacaggcctcccacgaagccgctggtctctgcagagtgagaggtgccgggactacctggcctccttgccgcctcggttaccgggtcaccgcccatcattggtcagctgcctccagggatctggacgtggggcacagatgagtgtccttacaaaaataactctgagtctgttcccagtgggaccaggttcctgagagcacgtggggccaggcaaaggccacgtggaagagtccggcagggagcgctcccgcctgca

SEQ ID NO: 438345 - DNA, 2157 bp, Homo Sapiens
  misc_feature (2140)..(2140): n is a, c, g, or t
ggagggtagggagggggctgttgatgaggcatcatgccagggtgccctgctgctccaagtggggccaggccaggtcctcctgagtgctggtgtgcctgttgagggttctggccatgctgctgctgttccatgtgctgtcgtgctcgtaattcagcatacttcagctgttccatgtggaagttttggcgttcagtaagcaactgctgcctctgttgtttctagagcttctgttctctctggtccatgatagtttgccagctcgttcagagatgtcgaagtttgatctctagtttcttcatttgtgtctcgaccaagagagctaccagggacttgatctttctttcgttccactgcagccaggtgcttggctttggtagccgctgaggcaagagcagctgctgcggctgtggcaacatttcctgtcggaaatttcatgttctactttcttcttcccagtatcactttctctttctttacatgtatcagtgagttctttgttctcttcagtctccttttcttctgatttggtatcctcactcacttcactatcctgttccttttcactatttttttcattttctccatcttgtgctttatcaccttcatccgtttcattttccactttattttctgccttttcaggctgctgaccatcagggtcggcttccattttttcctcttcagctccttcaagcttctctggctcatcgggccctgtgcctgcaatgcagctgctctccagaccgtaggtgggatccactttcccagaggctcgtgctgcttcttgtactttcttgacatgagcttcaaccaattccagtggtacctcctcccggacccgagaaaactcctccaaagccgcttttgctgcagcagatgccacgcgagggtccaccacagatgccaaaaaagcaacagtactcataactggatttcctgactgactgaaggggacaggctggtaggccaaaggcccaagggaagcatctgaattctcaaggtatgggtcctcaatgggaagtctcaaaaagtggaggatgcattcatcctgagtacgacttccaacatgttccgacactttgttccaatcatccttgtacatctccagggcctccaggagtagaagggtctcctgttcagtccattctcttccagcactagcacctttactctgaggtgatcgaagatgcagaggcacaagcccagagggggtatcagctaatacattaaaatgaggagtaggaggaggtcccattgccatgggtctactttccgggtcaacttggtaattaacgagtccccactgctctaaaaaggcatggaccctcatcacagcacacacatctccagtcaagttcctccgacaagcagtgctagtttaaatactccttgggggtttagacgatacgtgtcaatcataaaatttcgatatgccaagtatatttctggagtcttggatttgttttttccattgaagaactcaggaagagcacgccgttcaatcacatgaatccagttataatcaaaccatgatgcataactaggaataataatgtgattggtctgctctgtcacattatcttccccaaggtcaactgatcgactctgatcacctttggcaggatcttcatcttcctttcctcctgctgtgactgtttcttcatcctgctcatctagatccgctacagttcctcctttaacaggtgtattttcactatctttctttaggttcacatttttgggaagtactacttcttctatattgggtacaggtgttgggtcttccatatccttggttagatcttcttgctcatcttcctctttctgacttctgcgcttcccataaaggctagcttggcctttcttcccactcttcttcccgtgattctgttggtgtcggagggggaggcgaaggcgaatgtttcctctttcgagcattagctgatgcttttctatctcttctttctggacttctgactggctcttcattcttggttgaaatccgctgacgaaaactcacaggcttcctattttcatccacctcataatcctcctcattcatccattcattgaaaatatcagtgtccaaaatccatttcacatgaaccttccatggtttttctggaattggtggatcttnaatttcagcatcaacat

SEQ ID NO: 438346 - DNA, 787 bp, Homo Sapiens
cccttgagtgtcggcctgaggacccgacacgccaagtgtcagagagaggggtggtaagaggagtggggaggcacgggacacgtgcttggagctgtgagaagacaaatcctgaaagaaacccaagaaagttgaggaacacaagtcttgtcatccccactccagctcatggtggtgggcgtggaggttccctgcatcttccaggctaaggagcagctgaggctggcgggccaggagcaggaggcggagggaccccatctgcaggtggtgttgtcggtggctgctgctgtggtggagggggatacatgccgttaggtgctgtcaggggtacccggggtcctaagatgtttcctggcattggtggcatgccaggaggggtagggccactcccagaggggtggatgttggctgcaacagtgggaatcatgcggcctggcatgtgctgcccgggcatcatggaacctgggcctggtatctgacctggctggggtggatgaggtggtggcatctggtggtgcatcagagggtagggagggggctgttgatgaggcatcatgccagggtgccctgctgctccaagtggggccaggccaggtcctcctgagtgctggtgtgcctgttgagggttctggccatgctgctgctgttccatttgctgtcgtgctcgtaattcagcaaacttccacatggaacagctgcctctgttgttctagagcttctttctctctgtccatgatagtttccagctcttcaaaatgtcgaagtttgatctctagtttcttcatttgtg

SEQ ID NO: 438347 - DNA, 952 bp, Homo Sapiens
gttggcttgagaagttgcccatagtccagccttcatggatttcctggctcgggactggtctggcccgacaggtggataggttgctgcaaggtatccttcagaacctttgggagaggacccatgcctgaagtctccttttagtgtccctataggaagggtcaccatgatgaatgggatatgtatccatagggaccattgtccattgaaatatcagtaagaagaaagtgactttctatgttttaggctgcagcgacttcgaacttcttcagacactgtaagtaaagctgctaagtaggccacgctctgtgtattcacttcaaatttgtcacaatttctgtgtttgttaaccagagttagtagtgtatgtaaaattctgactgttcttgcaacaatagcaggtgaaggatgcctgtacccttttaaaaggtgtccaaccaatgcaaagttaaagttagagttgaaattgagtccaacaaaatgatccatttgcttgcagtgccactccagaggattccggattgccataaatacttcctctggactcttgtcattgaatatacggagactatctaaagtatgcaggttttgttcaagaagtgcggtacctgctgaatacaagttgacctcatcaagctgcagcacagccacagctacccaaaagagggctttgtgcagaggcgagtccttattaagaagtggctgtaatttggttagtgctattactgtagcttctatcagaacttgactgttgtaagtgtcaggtccttttaagcaactctcaagtgccttgctaagaatacggattatctgctttatctgcccatgagacactcgtttgctaatacacccaaagacaacaagagctcttggttgcagggatggattatattggcatgcaaatctttgagctagttctgtccactggtccagccacttgcacgttggaatatct

SEQ ID NO: 438348 - DNA, 476 bp, Homo Sapiens
tgctatttttatgtaagaaatatgcattcaagtttacatagttctttatgagctggtaaggaaatatactcacaataagttacattatacaaattcctacttaagttatggacttcttgtgattttaaaagaatagcaacaagaaaagatggaagagtactaaatttgagtaatctaggaacctcaaggcaaagtttgcttaccttgtcattgaatatacggagactatctaaagtatgcaggttttgttcaagaagtgcggtacctgctgaatacaagttgacctcatcaagctgcagcacagccacagctacccaaaagagggctttgtgcagaggcgagtcctggcaaagaagatatgtttgaggctagtaagatgaatcatgacatagtctctttcaaaacacactgcagttaaaaataaagcagcttatcttcctaaattacccatgttttctctttgggggaagataaag

SEQ ID NO: 438349 - DNA, 1705 bp, Homo Sapiens
tggcgtagtagggacgcccgttttatatgcgaggcggagacggcgttggttttggggtgtggggggttggtggcactatgtggcgcgtctgtgcgcgacgggctcagaatgtagccccatgggcgggactcgaggctcggtggacggccttgcaggaggtacccggaactccacgagtgacctcgcgatctggcccggctcccgttcgtcgcaacagcgtgactacagggtatggcggggtccgggcactgtgcggctggacccccagttctggggccacgccgcggaaccgcttactgctgcagcttttggggtcgcccggccgccgctattacagtcttcccccgcatcagaaggttccattgccttctctttcccccacaatgcaggcaggcaccatagcccgttgggaaaaaaaagaggggggacaaaatcaagtgaaggtgacctaatttgcagagggttgaaactgataaagccactgttggatttgagagcctggaggagtgttatatggcaaagatacttgttgctgaaggtaccagggatgttcccatcggagcgatcatctgtatcacagttggcaagcctgaggatattgaggcctttaaaaattatacacgggattcctcagcagcacctaccccacaagcggccccagcaccaacccctgctgccactgcttcgccacctacaccttctgctcaggctcctggtagctcatatccccctcacatgcaggtacttcttcctgccctctctcccaccatgaccatgggcacagttcagagatgggaaaaaaaagtgggtgagaagctaagtgaaggagacttactggcagagatagaaactgacaaagccactataggttttgaagtacaggaagaaggttatctggcaaaaatcctggtccctgaaggcacaagagatgtccctctaggaaccccactctgtatcattgtagaaaaagaggcagatatatcagcatttgctgactataggccaaccgaagtaacagatttaaaaccacaagtgccaccacctaccccacccccggtggccgctgttcctccaactccccagcctttagctcctacaccttcagcaccctgcccagctactcctgctggaccaaagggaagggtgtttgttagccctcttgcaaagaagttggcagtagagaaagggattgatcttacacaagtaaaagggacaggaccagatggtagattcaccaagaaggatatcgactcttttgtgcctagttaagttgctcctgctctggcagttgttgtgcctcccacaggtcctggaatggcaccagttcctacaggtgtctttccagatatcccaatcagcaacattcgtcgggttattgcacagcgattaatgcaatccaagcaaaccatacctcattattacctttctatcgatgtaaatatgggagaagttttggttggtaacggaaataccttattaaaatattacaagggacaaacacaacttctggcaaggacttcatcataaaaacctccagcttttgacatgtctaacagttccccgaacgacaattcctcctcggatggacaccgcgtttaaggacccaactccggctcggtgcatgctcaacgattgccgaaccctacccctgggccggccttcatcaaagacttattgggggttttaaccggcccctttcacaaag

SEQ ID NO: 438350 - DNA, 1132 bp, Homo Sapiens
  misc_feature (162)..(162): n is a, c, g, or t
cattcagaagaattcagtcccttttcaaggagctttattggaatagtccatagccatattgctttagtgcttccatccatctcttatttcccactagtttcagattctcctgtattctgcatttggtcttacttttgccttgtagcagcaccccaatctggntgatagaggtagccattggtttggtgtggattcccaacaccccgttgaaacagttcaatagctttgtctaggtcaccttttcttctgtaaaatttggctgcactgcggaggacatctgtttggcaaggagacttttccaaggcttcttcaacaaactgctctccttcagcttctttattcatcttctgcagtttcaggcccaagagaaccttgacgtattggttatcaggactcagctcaatggcctgcttcaaaacatcagtagagaactgtttctctgggtgattatccagatggtacatcgcaattgccagtccagaggagaattctgggttgttgggcttttcttccagagccttctcaaaacacaccttcgccctttcatttcttccacacttcagttgtgtccacccttcctcacagtcaagttcagaatactcaatactgtatggatttgaaaatttcttgcaggtttgtttcaccttatctacataaatctgagcatctgagagtctgcccaagtgatagtagacccaggcgtagtttccccaagtgactagacttctgatttctgcttggtcagcatgttcttgctggattaactcttcagcttgccgtaagcattccagggctgcctcgttgttaccatctaggtgttttatgtaggccaacaagttgtacattgtagctttgaactcagtgtttaaaaattcaatctggttacacactctatcttctagatcccttgagacactgtcttccttgaataagttccaggtgaaatggcatttcagctgtggaaggattttctccagggaattcttggtgacctcactcatgactgccctctgtgtctctgctgttccgaaaagctggtgaccaggctgatttgttcttcagaagtcttcctgtctgcctcaagtaaaaactccgctctcgacgaattcgagctcggccgatttggcctgat

SEQ ID NO: 438351 - DNA, 1042 bp, Homo Sapiens
agcggactttccctttgtaacgtcagctgaagggaaacaaacaaaaaggaaccagaggccacttgtatatataggtctcttcagcatttattggtggcagaagaggaagatttctgaagagtgcagctgcctgaaccgagccctgccgaacagctgagaattgcactgcaaccatgagtgagaacaataagaattccttggagagcagcctacggcaactaaaatgccatttcacctggaacttgatggagggagaaaattccttggatgattttgaagacaaagtattttaccggactgagtttcagaatcgtgaattcaaagccacaatgtgcaacctactggcctatctaaagcacctcaaagggcaaaacgaggcagccctggaatgcttacgtaaagctgaagagttaatccagcaagagcatgctgaccaggcagaaatcagaagtctggtcacctggggaaactatgcctgggtctactatcacatgggccgactctcagacgttcagatttatgtagacaaggtgagacatgtctgtgagaagttttccagtccctatagaattgagagtccagagcttgactgtgaggaagggtggacacggttaaagtgtggaggaaaccaaaatgaaagagcgaaggtgtgctttgagacaggctctggaaaagaagccaaagaacccagaattcacctctggactggcaatagcaagctaccgtctggacaactggccaccatctcagaacgccattgaccctctgaggcaagccattcggctgaatcctgacaaccagtacctttaagttctcctgggtcttgaagcttcattaaggtaggcgtgcacgcaaggtggacagacggcaacgtggacatgcacacgagagttcagtcggagagaacacctttgggggacaaagccccaggttggtaacacagatgtgacattcgcactggcggggcccagttttttcgaggaaaaacatgaggcgagaaaacgaattgaatggcgtgacacggcttgaatcgtattcacaa

SEQ ID NO: 438352 - DNA, 752 bp, Homo Sapiens
ggcattgcggagttatacattcctgcaacaggtcatcttcagagtcaatactaagagaactgagagaactgtttcttgagaaacaaactggggtatcttcaacatgaaatgatttaggagcatagcctgatgcttgaggtttacttggttctccctgtgagtcagggggctcagtctctttgataggttcattttctttattgttgttttcttggtcaatgtcactgagagaactcagagaggaattatgagaaaagcaaactggagtattttcaatagcaaaattctgtaacttttcatcagttgctgcccctctgtctggtatgtctttggatgactggggaaaagtggattgtttctgaagtatgggtttaggctgacctcgatttattggctgctttgcaatagcttgtgtcttattagctgattgttggttggaggttagttctgtgtggctggtaactttagcctctgattccttattttcttttgcctttcttaattcagccttttccctggaaaggtcaacatcatcatcatcaaaatctagagaactcaaagaatcatttcgtgaaaaacagtaaggagttccttcactaggcgtgtactgatgaggtgaatcaaaagcaaaacttcctctgactctatcttcattatttgggagcttatcattgaagtccttggaattatgcttcaaatctcgttctttgaatctttgctgtctgagacaactctctcagcatataaaatat

SEQ ID NO: 438353 - DNA, 670 bp, Homo Sapiens
aaaaaattttttccctttttccttttgcagggccccagaagttccagtttcctcaaacattcaaacgaggcttgatatgattgccagggaaagtggcgccccttacttgcccttgagtcccagtcgccagggagtggtgaaaggttacattccagctgtggcactcagtttggccataacctttcataaacttggcaccctagagctgcccggagaaattcccagaactgttggtgatgctggggctgctccagtaacaatcatccgcacacacccaccaagactggcctgaatcttattaaagaagagttcatcccagatactatcattcctgatgattccactccggacctcggcttgcttacgctttgctgcaaactccaggagccagcgctttaatggtgtgtttgcctggctgaagatcttgtcgtacatccggttcagcagtcgtgggaccacagggaagatggtggggcatagagccttcatgtcatctgagagaaggcggatatctccctggaagaagccaacacgccctccgtggcaatagacgacagactggattactctctcaaacatgtgagccagaggcaggaaggagatgagcacatcgtcctgtctcggaaagatcactttctgcaggcgacgggcatgggagacagaaagggcc

SEQ ID NO: 438354 - DNA, 1099 bp, Homo Sapiens
  misc_feature (180)..(180): n is a, c, g, or t
  misc_feature (1027)..(1027): n is a, c, g, or t
  misc_feature (1032)..(1032): n is a, c, g, or t
  misc_feature (1036)..(1037): n is a, c, g, or t
  misc_feature (1068)..(1068): n is a, c, g, or t
  misc_feature (1076)..(1076): n is a, c, g, or t
  misc_feature (1085)..(1085): n is a, c, g, or t
  misc_feature (1088)..(1088): n is a, c, g, or t
  misc_feature (1090)..(1090): n is a, c, g, or t
  misc_feature (1095)..(1095): n is a, c, g, or t
  misc_feature (1097)..(1097): n is a, c, g, or t
gtggctcaataaacttttattgttttgttatttatttttattcaaaagaatttgtttccctatcacaaaaattagataacaccaccaagagcagcaatgtccatggagttacattgatggtggagagttggctgggtattcccaatgtcccaaaggtcataaaggagggacaagaaaaanagaaaaaaatattcaaaacaaatccaaaacccatgatgactttggggagagacatcacatgacattttctgtttcttctctcattgtcagctgcagatgtatttcagcaggatcaagtacaatttgacttgagttaacccttcataccaattctagcaccttaattgtaccctgactgttagcagcaatcagcacattggactccccatctggtagtgccctccagcacacagcactaacaaattcatttgtatcatcttcttttcggtctttgtcgagaacacttttgactgtatcaaacttaaaagttagcaaagtcttagaaagtcctttatagtacaggtagagagagttattttcacttccacaagctatataatctccattggaagccaggcctacaaagtttttttcattgatatgacccttgaaggaacgtaggcagtatggtttccctacattccacagttttagctgactgtctgttgaggcagagacaatttcctcaccactcacaaactttgcataagagactgctttacggtgtcctttgaataccatgattggctgtttagtgttacgaagatcatagtagtggacacagtgatctgcacagccgaaagccaaatggtatctggaagaggggctgaatttaacacagcacacattagcctttgcctcaatgcttgccactgagttgtctagattggtagaccacagcttcacttttgcatcatcagaacctgaagccaagagtttaggatccatcaaattaaagtcaacactccaacacctcttctcatgctcctgatagacctttgacctctgtcctgtgaatccatcccanaacanaaanntgccttcataatcactgctagctaacaggtncttatggnaactacccnacngntaaancnga

SEQ ID NO: 438355 - DNA, 370 bp, Homo Sapiens
  misc_feature (25)..(25): n is a, c, g, or t
aaaacatctgtggtggtgcattgcnagcgacggttgggacccgaacagccccagctcacatctctggctatgctaatgttggacaagttactacaggaccattaaaggatttgaaactctcgtagaaaaggagtggataagctttggacacaggtttgcactgcgagtgggccatggtaatgacaaccatgcggatgctgaccgatctcccatatttctgcagtttgttgattgtgtttggcaaatgacaaggcagtttccttcagcattcgagtttaatgagctattcttgattacaattttggatcacctttatagctgtctttttgggacctttttgtgcaactgtgaacagcagcgattcaaagag

SEQ ID NO: 438356 - DNA, 1734 bp, Homo Sapiens
  misc_feature (115)..(115): n is a, c, g, or t
  misc_feature (1576)..(1576): n is a, c, g, or t
  misc_feature (1583)..(1586): n is a, c, g, or t
ggcctgaaatccttaacagggtgggttcacgcacccaattgtccattccctcagcctggccccagaggtaaatcattttcaaacaccaccaaaaaccctcccggtatgccataanccacccttaacctgggaataaggttggagacagcatgctgtaccgctgctagggttttggacatggtttcctgagagacctttatgctctgggtccttcaaaccagtcacatggggtttgtgggcactatctgcagacccactgttttcagacccagacaggatggaaagtggaggcagcatctctaggtgagtctggagcagcagtgacaactcagcagaacctgtgtcaagtcctcatagaaaagggaaaataagctaggattccctccccgctccactttctcctctgtctcttaaataaaacaagggtttgtgaccactggccttaagtgcacagaactcctaccttccttgcccaggaacaaaacactgagtagttcttataacagtccacacgtctgtcctattgcactgtcagatctgaaggggaaaaacttgatgagatgtttggggaagtggcaagggcagacccactgtagaggccacagcacgtcacagaggactgaaggggctgaggcgagagggaggttgggcagaactgttacacatcggtcctccaactctgatgagcctctacctcttctggtaccaccagcaggagttcacagttctttcctcgcaaatgatgttttagaaacttcctgagctcgctctcgcctccaatccactcgggcatcttgagtttggagtcgaggttgtagtaggcccctcccacctctcgaacacagatccagtgctgccttttgaggggcagtttcagtggaccccagcataggctggagggcagattcatgatgaagcccatgacgttagtgagggcaatgacaccgacatccctgcgcttgtcccaccaaacagcttcatagcctttggtctgaagtgctgccataatgacattcacatcgtagttgccatttcccagcatgctcttcttgtgaggtgtcaccatggtgtttggagacaacctctggaaaatctcttgcagcgtatcccgggtgaaggcattgctgtcctggaagacgttattgagggcgtggagggcacaaagctccctgcgctgtttctcatggtagatttgtgggggtgctgcctggggcagctccaatgattcagatttggccttgtctcctttccatggcacacaactcatgttttttgttttaggttccagagatggctataaacaccccactcttccctctagaggaagaatgtaagcttctcagtcttttccggattcctgaggtccaccttattctctggtgtccatgatttatgctttgtcactgggagaaaagattggaatcaaaaggaaaaaaataaaacccacctcttctctcttctcaatagaaaaataacttttggattacttttattttgctaccactgtcaaagtgcagaatttaaaaaaacacataaaatgtaagaccttgtttccgtttccccacccttccctccnacccccnnnnaaaatccccacgattttcttgctgtttccctctgcaaatgccaggcctcaaagcaggaggaccgaacacaatcggtcacatcgctccttttcttccatttcttttgaaccacgacgccaatgactcgggagacaaggcctgggtgacg

SEQ ID NO: 438357 - DNA, 251 bp, Homo Sapiens
agaaaagaagttgtttttattttaattcaagagggttggaaacataaaaacagtacattttccttgcagaaaattaccccatttaaattactatttggtacagagattatttattacactgcattttaggcaattttctaacattaagtgacaagttatacttttgattttgtttttcacattggagctattatgatttgcactcataataccaaagctactgaactcaccaatttttttcttagtaatta

SEQ ID NO: 438358 - DNA, 1078 bp, Homo Sapiens
ccttttttttgctcttcttgctgctagacattttattcttgatgtagctgaatgtacgactgacttttgttccactcttccattcagaatctttcttggaggggctatgtggcaggaaattatagttctcttctgttatactctcagtcagattagcactggtattgtggaaggtactgtggaagggccgtgaattgtccaatccaggatggctgattgtcattaatgagatggattttgtcaatggagaggaaatggctgatgtacagtaattaaatccctgctgcttagatctgtgacatatctgctgatcaaacatcctatgttctctctggtctgactccagatcctcttctgaaagtgacaccaaagagtcaacccgttcctcaccactgaatgggtgtctgagctcttcggcatttgcagagcttacttctagagatgaggatggcttgtttccgacaccagctcctcctgtcaagccttctagactgaaacttctgtggttcatttctgcatcgactgctgcattattgccaggcccgcagttgtgcactccggaaggggtaaagcgagctcatggttctccttatgactgggcggtttgctgacaacagtgctcctgtaagtcttctgcattgaaactccggtggttcatttctgcatcgctggctgcatttttcccaggcccccagctgtgcctccggaagggagaaagagagcgcatggagctccttaggacagagcagtttgcaggcacttcagtgatactgttcatctcctcctcctccacgtcgcctgggtcagcaggctcactgtcactttctcgaccctcagctcccatcccatggctgtagaatccatcaaggctttgccgatctcttgacctgtttggctttaaaatctgggagagagacacatcactgccatgagaagaatgtcggtccagtgaagccgtgtcatcggtggatgaactggatccggtgatatcacaggccaaatgctcttcctctggctttgggaagatgatgctgtccatgtcatcactgggtgcctcgtgccgaattcgccacccagc

SEQ ID NO: 438359 - DNA, 566 bp, Homo Sapiens
cccaaatgctacagagtggaacactcagacctgagatttgcaaaaagcagatgtaaatatatgcattcaaacatcagggcttactatgaggtaggtggtatatacatgtcacaaataaaaatacagttacaactcagggtcacaaaaaatgcatcttccaatgcatatttttattatggtaaaatatacataaatataattcaccattttaacatttaattcatattaaatacgtacaaatcagtgacatttagtacattcacagtgttgtgccaccatcaccactatttagttccagaacatttgcatcatcaatacattgtctagagacaagactatcctgggtaggcagaaaccatagatcttttgtgtttacagctatggaaaccaactgtaccataaagatagttcactgagttttaaagccaagccacatcttatttttccaaggtttaatttagtgagagggcagcattagtgtggagtggcatgcttttgccctatcgtggaattttcacatcagaatgtgcaggatccaaggctgaaagtgtgccacccgtcacaca

SEQ ID NO: 438360 - DNA, 467 bp, Homo Sapiens
  misc_feature (419)..(419): n is a, c, g, or t
ttttttttggtcacaaaaaatgcatcttccaatgcatatttttattatggtaaaatatacataaatataattcaccattttaacatttaattcatattaaatacgtacaaatcagtgacatttagtacattcacagtgttgtgccaccatcaccactatttagttccagaacatttgcatcatcaatacattgtctagagacaaggactatcctggggtagggcaggaaaccataggatcttttgtgtttacaggctatgggaaaccaactgtaccataaaggatagttcactgagttttaaaggccaaggccacatcttatttttccaagggtttaatttagtgagaggggcggcattagtgtgggagtgggcatgcttttgccctatcgtggggattttacacatcaggatgtggcnggggttcccagttctggaagtgttggccacccttcacacaactggggg

SEQ ID NO: 438361 - DNA, 853 bp, Homo Sapiens
tgttcacgcggcttcctgagcatggtgtattaggccacgtcggccagcgcgaagacgtgtggctccagcttgcccagccgctggttctcaaacatcttcacgtaccttgggttgtagatggcagggaacttaaaggggttgatggccaccaggatgctccccgcgtacgttgtagattcttttgttgcaggaagcggtgcttgaggttcttcaggaggttgccctcggttagctcggggaggttaacacaggtcatcaaagtccgcctgctgccgtggcaggaggccacgctccactaggcgccgggtggctgtggcctgcgccaccagctgcatatgcacgtacttgatggttccatctgcgttgcgctcctgcagcaggaagtagtagccatcctcctgagggtgctcgtcctgtgcccgccggggccatagcagcacccggtgcacaggcgagtcgttggcgtccagcacccattcctcgcctcccgactctttgacctccaccagcacataacatttggtgccgtccagccgcaggctggcaatggcgtccttgatgacgtccgaggtggtgctgtccttggtggcagtcacgcggcacgaggcctggctctcggtggtggacagctgggggtagatgtgcaggtggtaggccgcctgctcccggcggcccgagctgcctgcctctttcacactcatcctgccggccgcctggcttcagcatgcctcccaggctcggggcgcgcgtgtcctggagctggcctcggccgccgcgcgccgccggtcccgggccgggtccccggccggacgaccgcctgccagcccgccgctgctcgagccgctccgccccg

SEQ ID NO: 438362 - DNA, 859 bp, Homo Sapiens
  misc_feature (212)..(238): n is a, c, g, or t
  misc_feature (366)..(394): n is a, c, g, or t
gggggcagtcttggttttctgctagtgctgctgctgctgggaggacgacggacggcagcggccaagcaagaagaaagacgtggcagcaagcgggagtcggggatagtgtcatcggttcggtaaagtttctgttctctgatttggggatattccctgcccaaaaaattcctggaaaattgactagtattaagtgtgagtaaaaggtgtccacnnnnnnnnnnnnnnnnnnnnnnnnnnngtcttggatagtatttggcaagatttagcctagaaattatgtagtatttattacataagaatcaaaattgctttgttactgggctggtttcaaagtttagaactcatttctatgtatcaaaatcgggnnnnnnnnnnnnnnnnnnnnnnnnnnnnnacattcttaaatggtaaatatgccattgtgaaatgaaatctcaactccaaaagtttacccttttactaactggagtaaatgtatacttacaaagtctttagctgtagccattagtagtaaagaatttggacctaggctgcgtaagcaagcctttccagggccactatttaatggcaaaccagtgatactggtgttgatacaaaataagaaataaattttcccttaagataaagctttctgtgttttgacagtgcccagtttaaaaatggctataatgctggctctgccttcctacagcctggcctgcaccactcctggaatttactctattacccataccgtttctaatcctttttggggtaaaaccctcccctgaatgaccgaatggatggaatatatatacccttacctccccttatttataccctactggatattatgggggaaagggaattttacccttct

SEQ ID NO: 438363 - DNA, 1006 bp, Homo Sapiens
  misc_feature (904)..(904): n is a, c, g, or t
  misc_feature (910)..(910): n is a, c, g, or t
  misc_feature (929)..(929): n is a, c, g, or t
atgatcaagcagtctctggtccttgaggtcccatgggttgccagtggcagttcagggacagaggctggaaggagtgaaaatggagaggaattaaaaggctggggctggtctggtggcaggcagaagagggaatcagagaagcataaaacatggagaaaaagatgagaaggaagtggaaagaagagagtggatatcaacaatggccttaggctcctttcatgcacctgtttatttaacaaacgtttagggcctatcctgcactgggactcctctagttacgccaggaaaggttgtcaggggagtctgtgatggggaaaagagaggccccattctgggtttggctcttctgagtcatcggctgtggaagtgactgagaagtgagtttctgggtgtttcatccctggggtgagagcaagtccattggattaggagacagcagggacattgtgcctggagatagaggccttgtcatggcaatgacaactgactgctgtcttaattcaaaggagcaagcagttgccatggaaaccatgttacttgtatggtcccggattccggtgatccgccctcctagatcatatctgacattacgtctcagctgtcagcctccacctctccccagccatccattctagggggactgagaggtggagacaggaagggcagcttgtcctggtgagcagtggcagttgtggggagatgtcttccacatcctgggtttggtgcaggcagatggcaagtcattctgttatgtgaagggcacagccagaggccccatgaccaactctctatgtgacaaggggatagagaaccagagtgcttctttctctggtcaaaggggttgatgagtgggaggcctgagtgcttaggcagtttatggccatatagggtgagagggcaaatntgactngctataaaatatatgcagntttaaattatgattcacagggtcatctgttagaaaaccctggtgcaagggtcaccactaaatgcccaccctccacag

SEQ ID NO: 438364 - DNA, 884 bp, Homo Sapiens
  misc_feature (803)..(803): n is a, c, g, or t
  misc_feature (867)..(867): n is a, c, g, or t
gtctctagtcttttcaagtttaacccctccaccgattctggtctctttcccatccttccccattcgtgttgttacaaacttgctcattgttccttgggcctccacttctccctcatcaggagaaggaggggaagagttaggaggtatccagagctgatcttacttcgttttcactaaaggcatctggtttatggattattcaggtcctttgtcaaaattaatttccttcctttcttccttctgtttatttaaataattaggactctaactccttgtgatgagcagaatagcagcttatcacggtagcatcatagcatagtagttcagtctgtgtggatttatctactcttgaagcaaaagccttctgtaaatgccggacttttccctacataaaagttgatgaaatttatcaacaagatgaaaaagatgaactttcaaaaacttggaacatgatggcctacgtgtagtagtttgctttagaatctttaatgggggcatgcatatcactgaagacatcagtagaatcttcaagaaacacagccaagcaaataaaacctcctctcatggaacacaaaattttcgggagcagctcttcctgaagttgggaaatgagttcatccttctctttcagctgcagcttgagcatcgagcattcatctttcattatatccttgaaaggcactggctcttcagtaagaggactaacaggaagtgacgtggtactgcttgctggactcatgtctgcactctcttgaagaactctcttcatctttaataataacgtcttgactgccgtgcatccntgtaacatcagtctgaatggcagagaatctatgcctccgttttcttccacaccttgttagaggncaatccgcagatggact

SEQ ID NO: 438365 - DNA, 466 bp, Homo Sapiens
  misc_feature (382)..(382): n is a, c, g, or t
  misc_feature (439)..(439): n is a, c, g, or t
  misc_feature (454)..(454): n is a, c, g, or t
gaatgaaaagggcttttactttctttttaaaacaagtgatttttaagggtttgtagaaaaagcaaagaaaagcataattctcctcttacttcaagctagtgtctgatgagaaagtaccaggctaacctctgaagaatcctaccccaacaccttcttctttcttctgctgggatgaacatctaggggtaaggatatgactgctctctaccatctggggacttctcttctttattttgttctttgtacttccttgttgggtttgggtttttgttgtgttttgcccccgcatgggtccctaccttcctctgccggggctgtgggctacaggatgctctggacaggtggcatggctggcatgcttaggggacccccccatggtccntcttaccccaggacataacaacaggcctttggcaaggggaggaggttgtttaaacantgaggagggcagtgntccaattggttt

SEQ ID NO: 438366 - DNA, 973 bp, Homo Sapiens
  misc_feature (749)..(769): n is a, c, g, or t
gaatgaaaagggcttttactttctttttaaaacaagtgatttttaagggtttgtagaaaaagcaaagaaaagcataattctcctcttacttcaagctagtgtctgatgagaaagtaccaggctaacctctgaagaatcctaccccaacaccttcttctttcttctgctgggatgaacatctaggggtaagatatgactgctctctaccatctggggacttctcttctttatattgttgcattcctcaatctttgcataaggaagagaatggctaattcctctaggtgccaaggaagagcttccctcttcctacagcctcgcatgtttcttttcccactggttgccaggaagcttggagatatggtgacgactattcaggcacacatctcttccttgggtcctaccacagtcatctcctccaatatgcagtgatgttgacaggcttggagatggtgactagggagttctgaactaggtacctcaaatctatcaagtccacagtaaccaggagctatgatcatttcttaggttttctgatcttcccttctactttatttgtaaccatctggttgtaaatgttttcttgtaggttgcctcaattgattgtccagtgtgggagtaggtagtgaaaaacagtaataaaataagactcatagttctctgcctgatagtccctcccgtagtcttctggtttctagctaagaaaccaagtctgaagcaccttgtgaagatgaacttttttcttcttnnnnnnnnnnnnnnnnnnnnntatactggcttggatttccttctcttttcttactttcccccttaaaaaaaagcagcagccgccgtgtggacccttaatataggcagacagtaggtcacctggagatgcttaatacatgaggggtcagaaagaagcctggtgggcgagcatggcttattcagtcctgggctgctgtgggatgatccatcttcagtggtgcagtat

SEQ ID NO: 438367 - DNA, 738 bp, Homo Sapiens
  misc_feature (66)..(66): n is a, c, g, or t
accctctgacccacgtcggcgcctcaggagctatgaagacatgattggtgaggaggtgccatcggntcaatactactgggctcctttggcccagcatgagcgaggaagtttagcaagcttggatagcctgcgcaaaggagggcctccacctcctaattggagacagccagagctgccagaggtgatcgccatgcttggattccgcttggatgcgtgtcaagtccaatgcagctgcttacctgcaacacttatgctaccgcaatgacaaggtgaagactgacgtgcggaagttcaagggcatcccagtactggtgggattgttagaccatcccaaaaaggaagtgcaccttggagcctgtggagctctcaagaatatctctttgggacgtgaccaggataacaagattgccataaaaaactgtgatggtgtgcctgcccttgtgcgattgcttcgaaaggctcgtgatatggaccttactgaagttattaccggaaccctgtggaatctttcatcccatgactcaatcaaaatggagattgtggaccatgcactgcatgccttgacagatgaagtgatcattcctcattctggttgggagcgggaacctaatgaagactgtaagccacgccatattgagtgggaatcggtgctcaccaacacagctggctgccttaggtaacagtaggggactttggagaatatgaagatgaatttttgaggactgacttaaatttcct

SEQ ID NO: 438368 - DNA, 653 bp, Homo Sapiens
agttcgacggagactctcatactgtgcagtatttgtaccttaagctaaagtgttccctcctttccctatcccacattaaagactaagaaacaggaaccaagactcacctttgcccttctggccccaaagcaactggcagcatgtggcccagtattgttggcaacattgggagctgcctcttggtaacgctctgcctgtgggatctcccggtgaacttgatatgataagttccgaagaaggcaaacacagttctctacaagcttgctgtctgaatccttctgcccaatctcagcctgaacaatgagaatgagggcatcaactaaaccatcacattcccgaagtttccggcgagcttcactcctctctgagcttacattcctaaggcagccagctgtgttggtgagcaccgattcccactcaatatggcgtggcttacagtcttcattaggttcccgctcccaaccagaatgaggaatgatcacttcatctgtcaaggcatgcagtgcatggtccacaatctccattttgattgagtcatgggatgaaagattccacagggttccggtaataacttcagtaaggtccatatcacgagcctttcgaagcaatcgcacaagggcaggcacaccatcacagttttttatggcaatctt

SEQ ID NO: 438369 - DNA, 468 bp, Homo Sapiens
  misc_feature (185)..(198): n is a, c, g, or t
  misc_feature (306)..(306): n is a, c, g, or t
  misc_feature (313)..(313): n is a, c, g, or t
  misc_feature (346)..(346): n is a, c, g, or t
  misc_feature (389)..(389): n is a, c, g, or t
  misc_feature (408)..(408): n is a, c, g, or t
cttacaaagattctaagaaaaactcagggtgggagggctgtggaagggggacccaatttagctccatgtccacacttttgcaatgcctcttagggacctcctcaaagagaaatggtcccatttcctcccctctatccaaggtcctctccccccagagcggctcagttccaaggaagtttggcacnnnnnnnnnnnnnnaaatggggaaattggggagagagagttgagacatttgaggaaaggaggaagacagacaaagactaagatagagacaggacagaaaacaatgggaaccacacggagganaaaaaantagaaagtcatagggagccagacaaagaaaggnaggaagacacttggagaaggtatgggaagctagagggcaaatnagaaggaatagggagatantccaatgcagcaaacacttattaagcacctactgggtgctgaagaggaagggtgcaagga

SEQ ID NO: 438370 - DNA, 799 bp, Homo Sapiens
acagaaacatcctttagtttacaaaacagttattctaggcttgaagcctctgaacagcaaattgaatagatgggctgcatctgatttgctttatggatgtaattttacaaaacactcttgggtctctgaccccagggagttaagagtgcccataggaggtcctacacattaaaggataaagccccccagtgatgctggcaagcaaatgtgttgagttcttaaatcttcatttggttttctgttcaggattttaatttcaaatgaatttatttctccagtttatctaaagacttaatttcccaatagtttcctctgcatttatatactctgtagtgtttaggcacccctgttataagtttattaatattatgtaagtgttgttcttgtatttatgtatagtgtatgtattgtaaatatactcagagcttttttccttttactgtaaaatggtgatttttttgccctatgataatgtaaagggagaccctcctaatgagattctctcagaggatgattattccagtctattctcagagatttaaatgaacaagtgttattgtttttaatggtgtctcagacatattctgttggtgcattgcttttctgtattcaactttcctatgaattgagctgtgaactgaaatagagtttaaacctttaactgtatgcatttgtataattatctgaatgaaggcatgaaggttaaataaagcattttgtatggaacaaaactccctaactgactcagacactttggaaatcatagttattaaccattctaattaaacctttgttatga

SEQ ID NO: 438371 - DNA, 838 bp, Homo Sapiens
ggccagctgagggctagcgagcagaagctcaagagtgctgaggccctgctgctggagaagacgcaggagctacggggcctggagacacagcaggcgctgcagcgggaccggcagaaggaggtccagaggctgcaggagcgcattgccgacctcagccagcaactgggcgccagtgagcaggcgcagcggctgatggaggagaagctgcagagaaactatgagctgctgctggagagctgtgagaaggagaagcaggcattgctgcagaacctaaaggaagtggaagacaaggccagcgcctatgaggaccagttgcagggtcaggcacagcaggtggagaccctgcagaaggagaagctgagcgccactttcgagggcagtgagcaggtgcaccagctggaggagcagctggaggcacgagaggccagcgtgcgcaggctcgcagagcacgtgcagagcctctgtgacgagcgggacctcctcagacagcggttccaggagctgacagagcgcgtggccacgtccgacgaggatgtggctgagctccgggaaaagctgaggagaagagaggctgacaaccagagcctggagcactcctaccagagggtctccagccagctgcagagcatgcacactctgctgagagagaaggaggaagagctggagcgcattaaggaagcacatgagaaggttctggagaagaaggagcaggacctcaatgaggcttaggttaaaatggttgccttggggagcagcttagaggacacagacattaagctccaggcaaaagaagagatcataaaggaaatttgcaagtgaatctccaaaggacatggaa

SEQ ID NO: 438372 - DNA, 1275 bp, Homo Sapiens
tgataaatattacaggctctgaattcttttttaataagtactgaattaatctaccctgttttccagttagttttctttttaatggaatacacaagcttttgtcattgctgggaatttaatttccaggtacaatataaaaggctcaatgactaagtgactgatgaatggaccacattttggtttccctgccccatttctaaaattgcataaaagtgggtttgcttgctatagcaaagcatcactaaactcaatttatgtattctcttctcagaaacatttgtatctaacataatcagccaaataaagtatttgtctttgcttttcccctctgtagtttaagttatgcatataatactattacacagatacttaagaagtttttctgtaaccattctatagtgcttcttaaattctttaagtaattttcaaagggctatgggatcccctgtgaattcaaatattttaagatctttaatacaaagaatgtaaagtcatggtttagtatcaagctttgaaacccggtgagacagttagtgagagttttctcccaagtagcatatcatatctcctaaatagcttctttctttatattgatcttattacataagagcctctttgtggtgcctcataatatgctgatttttttctgatggtcttcggaatcccttcttgcagaattcacacctgtgtggatagtcttttgtatgtattgatatcacatgtcgtttaaagccagatgcatctgtagtgctgtattcacaatactcacattggtaaatcttccttccagtatgggtcttcatatgtttttttagctcattttgttgtctgaatcctctcttgcaccttttacatttcaatggctgatctttagtatgaactgaaaggatatggccactaagaataaatggatcggatgttttaaagtcacagtgcctgcactgatgaatcttcctacccttatggatatcactatgctttttgagctcagaaggacgatgaaaacctttatcacagacctcacatttgtgaggaaaatccttagtatggacagatatgatgtgccgcttaaggtcacttgaattggtgctcttatggtcacaatgaggacactggtgtgtcttatgtccttgaaacaaatccagatggcgttgaagctccctctcatcaccaaatgcttggggacaatgctcacatttatatggcaaattgttaccatgtttagacttaatgtgagttttcagatttgattgatctgcacacctgaaaatacaa

SEQ ID NO: 438373 - DNA, 1067 bp, Homo Sapiens
  misc_feature (343)..(343): n is a, c, g, or t
  misc_feature (639)..(657): n is a, c, g, or t
  misc_feature (842)..(850): n is a, c, g, or t
aagctcggaccgtatttggtggttttgatgatattctcctctgagttcagttgagcggtatgacccccgaagcaacaagtgggattatgtggcagcacttactactcccagaggtggagtgggaatcgcaacagtgatgggcaaaatctttgcagttggtggtgataatggcaatgcatacttaaatacagtagaagcgtttgatccagtgctgaataggtgggagcttgttggatctgtgtctcactgcagagctggagcaggagtagctgtgtgttcctgtttaactagccaaattcgaggatgtaggtcatggttccaataatgtggttgactgtatgtngatttgagttctggccaccaacattttagtcatatctgataggtacaaaaggaaaccaagattttgatatgaccacctttcaacactttttactgcaactagagtcttatttaaatgttaactgttgtattgtgactaagtacaacttttggaatgatacctgaagaattattagtaatagagttaaatttgatacttcctgcttttgcaaataatggagtagggaagaagatagtcgaacttaaaatcatacctaccctgaaaaatgcttaaagtagtgccaaaaatcttgaaannnnnnnnnnnnnnnnnnnatttggatgaatcaaaatgtaatttgttgagttttgccttttcttttgcctaaagatgttaacgtcaggcagtgggtttttcctagaggagagattagtacctattcattaacacaaggatacataagagacttgccccttttgaagatcatttctacttggtgctgatgaatttatgcctagcnnnnnnnnnctaggtggtgatttttcaatttcttttatatttacggaagtagaaaaaatgttctgtctttttgaatgccacttagctgcattttcagaagcttataggctataagaagcctttaatttcagtttgaattgctaggacaccaaaagacctaactgggctaactcctaaaaatgatttgacagtttaatttttctcttttgcaaaaatatttgttact

SEQ ID NO: 438374 - DNA, 2347 bp, Homo Sapiens
  misc_feature (845)..(845): n is a, c, g, or t
  misc_feature (852)..(854): n is a, c, g, or t
  misc_feature (858)..(874): n is a, c, g, or t
  misc_feature (878)..(878): n is a, c, g, or t
  misc_feature (908)..(908): n is a, c, g, or t
  misc_feature (915)..(915): n is a, c, g, or t
  misc_feature (918)..(918): n is a, c, g, or t
  misc_feature (921)..(922): n is a, c, g, or t
  misc_feature (1713)..(1713): n is a, c, g, or t
  misc_feature (1808)..(1808): n is a, c, g, or t
  misc_feature (1916)..(1916): n is a, c, g, or t
  misc_feature (1921)..(1921): n is a, c, g, or t
  misc_feature (1942)..(1942): n is a, c, g, or t
  misc_feature (1944)..(1945): n is a, c, g, or t
  misc_feature (1948)..(1949): n is a, c, g, or t
  misc_feature (1951)..(1952): n is a, c, g, or t
  misc_feature (1958)..(1958): n is a, c, g, or t
  misc_feature (1965)..(1965): n is a, c, g, or t
  misc_feature (1967)..(1967): n is a, c, g, or t
  misc_feature (2000)..(2000): n is a, c, g, or t
  misc_feature (2002)..(2002): n is a, c, g, or t
  misc_feature (2007)..(2007): n is a, c, g, or t
  misc_feature (2015)..(2016): n is a, c, g, or t
  misc_feature (2033)..(2033): n is a, c, g, or t
  misc_feature (2045)..(2079): n is a, c, g, or t
  misc_feature (2081)..(2081): n is a, c, g, or t
  misc_feature (2083)..(2083): n is a, c, g, or t
  misc_feature (2097)..(2097): n is a, c, g, or t
  misc_feature (2100)..(2100): n is a, c, g, or t
  misc_feature (2104)..(2104): n is a, c, g, or t
  misc_feature (2113)..(2113): n is a, c, g, or t
  misc_feature (2131)..(2131): n is a, c, g, or t
  misc_feature (2136)..(2136): n is a, c, g, or t
  misc_feature (2145)..(2145): n is a, c, g, or t
  misc_feature (2190)..(2190): n is a, c, g, or t
  misc_feature (2253)..(2254): n is a, c, g, or t
  misc_feature (2256)..(2257): n is a, c, g, or t
  misc_feature (2263)..(2263): n is a, c, g, or t
  misc_feature (2265)..(2265): n is a, c, g, or t
  misc_feature (2277)..(2277): n is a, c, g, or t
  misc_feature (2291)..(2291): n is a, c, g, or t
  misc_feature (2313)..(2313): n is a, c, g, or t
  misc_feature (2320)..(2321): n is a, c, g, or t
  misc_feature (2323)..(2323): n is a, c, g, or t
  misc_feature (2331)..(2331): n is a, c, g, or t
  misc_feature (2337)..(2340): n is a, c, g, or t
  misc_feature (2342)..(2342): n is a, c, g, or t
  misc_feature (2344)..(2344): n is a, c, g, or t
cacagccatgtctgcttagaccagagcagccccacagccaactagggcagctgccgccgccacaacagcaaggacagccgctgccgccgcccgtgagcgatgacaggagtgtttgacagaagggtccccagcatccgatccggcgacttccaagctccgttccagacgtccgcagctatgcaccatccgtctcaggaatcgccaactttgcccgagtcttcagctaccgattctgactactacagccctacggggggagccccgcacggctactgctctcctacctcggcttcctatggcaaagctctcaacccctaccagtatcagtatcacggcgtgaacggctccgccgggagctacccagccaaagcttatgccgactatagctacgctagctcctaccaccagtacggcggcgcctacaaccgcgtcccaagcgccaccaaccagccagagaaagaagtgaccgagcccgaggtgagaatggtgaatggcaaaccaaagaaagttcgtaaacccaggactatttattccagctttcagctggccgcattacagagaaggtttcagaagactcagtacctcgccttgccggaacgcgccgagctggccgcctcgctgggattgacacaaacacaggtaaatacggcgctgccatgcactagacctgcctgagctgcacgtctggttgggtcgcgcggttcagtctcgatgggactggagctgtttcgacagtacccgtgagaaactaacagacccaaagacatcagcccctatgctttaactcggtgagtcaggccttgagacggtggggatggtattcatcagcggtctggagatacctnccactannngcgnnnnnnnnnnnnnnnnngtancgggcctccggagctgtggggccaatttcncgggttnccngcnngcggagggttatttctagggcggcctaggcagcccagagcagctatctggttttcttaacaatgtagagcctcctcgggggtgagcaaggcctggtgttctcgcggtggtctcaggctaagaaaaggctgagaacgtcgcctggagcggagaaactgaagggtcgtgccctgagcctacgggagcttcaggccacggccaccgaagggtcgcgaggtggggggcgctattgtacgtgagaagtcttcctggattgtcccattccttttactcctccaacccagctggggcctacggaagcataaagaatgttcgagtcgccgccaagagctgcagtcagattctggcctctctgagctgcagagggagtgaagggagtaggacgggaggttgggagctcgctcctttttctgaccacaggcgcgcgtagcccgccccacgccccttccccgccgggctcgcgcgattgttttggagaccttcgccgcgttccgcgcgtcctgcgcaggcttacacgaggcgcgccgccgccgaggacactcgggcgcacacccgccgcgctggcgtcccccacccccagcccaaacaaaagacaagcctttggggtcgtggcctcgctgggccggggcgccccgagccggccagggcgccctctggggccagagctccatggtttgcctaaggcatagcttcttggcggtaggccgcaagcggcggggagacgccaggcagggctgggccgcccagagttccgaagatgcctccattcgccgccccggggaaggcgcgggncgacctctgagtgtcccggtaacgtgtgcctttgttccccaactcaggtgaaaatcttgtttcagaacaaaagatccaagatcaagaagatcatnaaaaacggggagatgcccccggagcacagtcccagctccagcgacccaatggcgtgtaactcgccccaatctccagcggtttgggacccccagggctcttcccgctcnctcanccaccaccctaatgcccaccnannaannannaaccantccccancntccagctacctggagaactctgcatcctggtananaagtncagccagnncaataaattcccacctnccaccaccaaannnnnnnnnnnnnnnnnnnnnnnnnnnnnnnnnnncncnctattagatgggcnccnctcncttactctnttttttgggactactgtnttttncttttttanaaaatcataaagaaaggaattcatatttggaagttcggaaaactnaaaaagattcatttataaaacttttttttacatttaaattattgcataaaaaaaacccacccnntnnttttcngnagactttttttncgcaactttggacnctttcaatggtcccttaaaatntataacnncnacttttcnaaaaannnntntnttc

SEQ ID NO: 438375 - DNA, 671 bp, Homo Sapiens
tacagtagaatgacatgtaatttattcatataactgacaattaggcagtactcaaaattcatttaaataagcaagtggttacacaaacatctaataatactaaaattgatagtcagaaggtataaaataccatgggtatgaaatgccatggtaaatactattcaacagactacaatcataattccaaactaaatcatggtttttaaaatgatttttagcagttctggaacaatttgacttttccctttctaagcaacttacttcttccactgatacaagacaaggtcgttattttcaagaaatatcgcagagtgacttagcttaggttgctctcttgaaacacattttcttgcaaattgttttttaatattgccccttgacatagaaaacaaactagtcagcacttagttccccaagcaaatatgcttggatcagaacagtgccagggtgtaacccagttccgcaagaggcaggcagtgaaaaaccttttgcagcttttgaaatatgcttatttcttttctgaggcttcaagcatcatacacttaggcatccaagccaatgaagttatgggaataaaatagtttgatatacagatgactatgacacaattgcaactggggtgaggggaagttacaatataattctgcagtacctgcccgggcggccgctcg

SEQ ID NO: 438376 - DNA, 2056 bp, Homo Sapiens
  misc_feature (28)..(28): n is a, c, g, or t
  misc_feature (47)..(47): n is a, c, g, or t
  misc_feature (64)..(64): n is a, c, g, or t
  misc_feature (72)..(72): n is a, c, g, or t
  misc_feature (78)..(78): n is a, c, g, or t
  misc_feature (104)..(104): n is a, c, g, or t
  misc_feature (1451)..(1507): n is a, c, g, or t
ttaacttccctttatgggtcagaatttnaagtgccttccagacaaanattgaggcctatacggntgtacggnattaantacacatatcccttcacagattggantacaaagaggtctcagaacgcaaacacccagcagtgtagcgagcacaacctttcttttaaaaataagaacgtttttcaaccccaccagaacatttcactcgtaagattgctaaaaaataacttggggcctgcatacacaaggtgaagctacttgatttggtgcagcggggtagtttcccactgctctagagatgggcacattaggttagcattggagctcactcggccagggctttcccacgggctctagacccagatccgtgaagttggcctcctacccttacctctggaaaagatgaactgctcagaagagtcaacctcatttctttatacatatttttcaggcatcaatgcataggcacatcccttaaaaaatatattaaggtccccaaaaaggggtgaatcaactttgtcactctggcatagaacacaatgccacacaccctgtcagaatgtaataaatacatcatttttccctgatttgatgttatagcttatataaatggccacggtttctgcaaccacagcttaggataagcaaggcagccactcagattatgaaaaatggcagtaagttggctggagtttggtatacatatcatatcaatactgaatcttcacactccggagctccgattctagaaggctgatgctcttgtgagggcaacaggagttagctgcatattaattactgtagaactttccagggtaattagggaatgtgaaattgcctgaggccatttcatcccaactaccttaacctcaagagtcactgggcatgtatttttctgtgatattggggagacaaagtattaatcccggggcacaccatctcaaagctgacacacatatctacgttcatctccaaaagtatatgaattgcatatattcgttcgcattcaacaagtccatttatgcaggaaaacaaaggctacttgtactccatttggggttaccagacacattccatctccttctctctctccatcaaggaactgatgattcagatgagttcaatcagaaaatttgtaattttgatgatgggttgtcacctgaatggatttatattttaaattacttcaccattaaggtgaaaatgcctctgtccaaagctgtagaattcttattaaggttagtgtgacagctacaaaatacacgtgtagatacaggatgcgtgtagatacaggatgctgaacatctctgggttgtctttccaaggggatggtctccaggtccactgtatcatgtagttcttcatcttgaaactggtggaaaaccagaactctccaggtgtagcattccacaacattcatgggtagtcctaagcatgaggctatgcacatacannnnnnnnnnnnnnnnnnnnnnnnnnnnnnnnnnnnnnnnnnnnnnnnnnnnnnnnncaaaagagatagtcagctcatatttagtctaagaaaaaaatatatttatatcactgcaatggcacaccctgggtaaaatgttacttccgcaatgcatatcataggcagctcatggaactggctttgttttgtgtggttgcacctgacctggtgtccatagtaagacctgtagcatttggtcacttgctgccacaccaatgcagcagtgacacacaggaatgaaatatggaaatacatataaataaaaccgcaaagagtctggggcaagggctctgcagagctggtgctgcgagacagtgcattcctcagtgcaactggagaacagatgctgaatcttaagtgtttgctgtttctttcactgcgaaaggggatttgaaagtcacacatttattcttttcaggtatgggtgttgtttcatcagtgtctttgccccagaactggtgtaattgaagcagaagaaacacatttagacggaactgaggagggtgtgttctgttttcttccacgggctttgtaatcaacaggaagggctgtgaggccaagatcaga

SEQ ID NO: 438377 - DNA, 321 bp, Homo Sapiens
cccttctaaacctgtcttctgttccttctgctattcttttttcttagagcataggaaaggggagcttttaaattaatacttaaagcatggaaaaaaagaacttgagaagaaagtaaaacaagggagatgaggctagtaaagtaaggaaaatgaagaggaagaggaggaagggttagcttctaaatttccaagtcaaattgatatggaacaggcaagccgcttgtcttacttaaacttcagaaaaggatctgctgaaacttgatagaaatggaaagggaaatccttggggtggggaacctcctaacattagtcaatgatagt

SEQ ID NO: 438378 - DNA, 768 bp, Homo Sapiens
  misc_feature (682)..(701): n is a, c, g, or t
  misc_feature (745)..(745): n is a, c, g, or t
cttctcagcattttcattatattagcaaaatcctgctgtgcagctctggaagatttagaaaactgtttctccaagatgttcttcgaatctgctggtaaagtcaatggtgaactagaactgaacttttctgattcattgtttcgagatttttgttttcctttatgttttggaggctgacttgatggtggtgaaaattcaggatgacagtcacaatcatctaccttcaacgcctcatccgccacctttagattctgattaccaccgttggccatttcgtgattaatttttctgaaatgctctttccttctccacaaagttaagtgaagtagtaaatataggtgctgataaactcctaggtgtgtaggccctgttttcataaaaggctttaattggatccttatttgctgttcgaccttgtaggtcttctatttgtttttgtaactttacatgctgctgaattagatccttgattccctcagggtcatttttacagagtttttgagcttttatgtttgcttgcagggcccagtcatattcccccagcatagaaagagcatcacaataacgataatgaccctttggccaagtgttcttcagaatagtggctctctttccatcaccgagtgcatttccgggcccgccgcccgcgagcctcggacgcgggcagcagcagcagcagcannnnnnnnnnnnnnnnnnnnacctccggccctccacgtccgacggcctggtcgacgatatccanaacctcggggccgtaccagcctt

SEQ ID NO: 438379 - DNA, 956 bp, Homo Sapiens
cggggaaaaaaacgggggattcaactgttacaaggggaaccccatgtgcccaccacccccggggcccccggccggctcaaacccctcccttgtacccctccacaaaagtacggggatcctgactaaggaaaaagaaggccaaacgccgccacgggagtctccggggaaacttgcgaacgcccgggaaaaacctcgggtctggttcaccgtggctttggcgccgcacagcctgccgataactgtagtccacccttcccgcggaggggcgcagggtacccccaccgcggggggccttcaggccggcaggtgcctgtgcccaagggcgggacagggatcaaagcccgaaattccgaagcgccgcatcccatcggagagctcaaaagcgaacacagcgggcaggagggactacaactcgcggcacgcctcggggccacaggcgcctctcccacccgcgtcccggtccctgctgggacttgtagtttgttaactaaagagcgcctcagcttcaaaggcgggcatgggagagtgacatgggacctcccaatccgccatcgcaccctgctcgggatccacgagcccttgttctttggggacaccacacataccccaactggagggcaaaaggtcacagaccttagcccaggattcaggggtaccccacatgccaagacttcaccttcatagaggcgatcctcgaatttctttggctgtcaagaatcccaggaaagacgttcagaacgcaggtcctcagccctatccttgacacaaaatgtcctccaaaggaggctgatcctttgagaacagacaagcctggctctggcactggcccacagtcctgccctcttagcccgatctaaggctgcccagcccttcaggacatcccatcagcaaggcccttgcaggacatgggccacctccgctctcgacgaattcgagctcggccgatttggcctgat

SEQ ID NO: 438380 - DNA, 464 bp, Homo Sapiens
  misc_feature (32)..(32): n is a, c, g, or t
  misc_feature (43)..(43): n is a, c, g, or t
  misc_feature (57)..(57): n is a, c, g, or t
ccagcctgggaaacccccctccttaaattttnaaagacttaanggtcaacttcctangaatgaccccaatccctcatttccttaggtggaaagaccccctctctccctttgaagcccctaacagtgcctctggaatagaatcaatgcccttttttgtttcccacatatatcatcctccactgctactgtgaactctgtaaagtcagaacatgtgtgactgacctttacatctgcagtgcccaggtgtgtagttggtatctagtgagtggttttagtgaatgaatatactgcagtcatactgagataactggagggatcaataggacttactgccatacatttaaatccgatctcattctctttttgccagttaacaggttacttcaatctgttttataaataatctgtgtatcaagagtaaataagtacagtttcgttttctctgtttctagaaggcatttcag

SEQ ID NO: 438381 - DNA, 1000 bp, Homo Sapiens
tggcaggaccaacaggagtttctgagcccaaagcaggcctctcggtttgccagcctttgcagccacttttgaagagtaggcctgctcccttggttggtagaaccataatgcttaggaaaaatcccttcctcttaggaataaagaatcactgatttgacagactttgctgtgattaccatgcaagtagccatattttggagctgaccaggatgattcttttaatctgaactattgaccatttgctttcctgtgagatgcaggggatggaaacgaaattaaacagtgcctgtggcaaatgctgcttcccagccaattagaagtaggagtgaaaacatccacaccaggtctcctagtaggacaaggaaagcccagcaagcacaaccacatggcagagactgagaaggaggaagtgagcaatggctggcggctccagaagctgaatccctggacagctgatttcccattaaaatgtgtgccatcctgcctacctcctcgccttcctcccgtcccgtgacagtccctcctacccaccctccacgagccatgtggcacttgccctgggctgattgggctgcctgcttggcccatggggagctgtgttaaagtgagagttgtgcctgctgtatctttttgtgtgtagaaagatggggttcattcagatcccaagtcctttccccaaccctcaaagtgaagcctcctagggatgaagagctggtcagcctggactttaaatacctaatgtggcccagccttggttcccaaaccctgccttccctccctgtgcttttgggtgggaaacgggggatttgtatctcccttcctcctccttctccatgtgggtggcctctctaggtttctctgtgttctctgatccttggagagccagagccaaggcagtcatcttgttcccccttccacggccaggctgggtgccttcaggtgaccaggggcagagtgtaagtcaccaggttcaatggggtgaggggagaaccaccttaag

SEQ ID NO: 438382 - DNA, 647 bp, Homo Sapiens
  misc_feature (24)..(24): n is a, c, g, or t
  misc_feature (39)..(39): n is a, c, g, or t
  misc_feature (41)..(41): n is a, c, g, or t
  misc_feature (56)..(56): n is a, c, g, or t
  misc_feature (105)..(105): n is a, c, g, or t
  misc_feature (116)..(116): n is a, c, g, or t
  misc_feature (146)..(194): n is a, c, g, or t
gtgtcttgcccaaggtcacattgntattaacttgtaggncnagcaaatgcagaagnaaaacccagaacttgtccaacttttaaaacctggccatttaagtcaacntgcttctcggnaagttttacaacttatccccatgtgaagannnnnnnnnnnnnnnnnnnnnnnnnnnnnnnnnnnnnnnnnnnnnnnnnaagagtccctgacctcaggtctcgtccgtagccgctcttgttctagttactgtcgatgagatcctgaaaaggagggaacggaagaaggaatctaaatgtaaatcaaacgcaatgtggtaggcgaaatcggtgccctcacagcatccggcaaaaggtgaaagcgacccaggagtacctgagctccaggtaaccgccctgcccgctgggcttgggacaagcgtgcgggcgaggtgcctcccaggccaacaagagaccctggcccaggggacagtcttctgttcccttttcccttgccggacctgcagctttcccagggcccgctccttcaatccactcccctctccgccccagggagacccggtctctaagcctcaccctggctgtgcccccgccgccgctaccacgtccccttcgatatccacatccgcctcttcagccgccatgatgggacct

SEQ ID NO: 438383 - DNA, 478 bp, Homo Sapiens
gtactataaatagcatgttatatatacctctgtttacttgtctgaatatttccgtgagtcagagctctagaaattacattttgtgttccaagggtatgcgcattttgagttttgatttattttgtcagaactcctttagctgcatgggaacaagagatccaattaaagaaattttgtaagtaaggaattgactgtcacataacaagattttggaagttggggcattgtagtcctaagtcagcaactcagtaatgtcaccaaacataaagtcttttctcctgtggctcatatggtatcttcaacgtattggcttgggcttcatggtcactaagtggtgtcatagttccaggtaccacgtgacaatgcccatgggaagaaaaggggtatttcctcctatgcatctctttttatcataaggacaacgtttcccataagctccctgccaatcccccttgtttcatttagccagaatgggcta

SEQ ID NO: 438384 - DNA, 1356 bp, Homo Sapiens
  misc_feature (151)..(172): n is a, c, g, or t
  misc_feature (214)..(223): n is a, c, g, or t
  misc_feature (325)..(334): n is a, c, g, or t
  misc_feature (351)..(460): n is a, c, g, or t
  misc_feature (467)..(637): n is a, c, g, or t
tgtttccccccgcttggttttttaaacggggggccccaagaaaacgatttttattgggccccccgttttcccccgggggggaaaattttttcccccggcgcccaaaagggttggggccgccgggaaaaaaaagatcgctacccaccccctnnnnnnnnnnnnnnnnnnnnnnaaagttttttaatattttcccccctttcccaaaaaatccccnnnnnnnnnnaatatataaaaaaagagccccgggggcccccttgtgagaagcccgaaaaacctcccaaaacccctctttgtttttttgaaaaccggttggggccccgggggnnnnnnnnnngtggggaaacccccccnnnnnnnnnnnnnnnnnnnnnnnnnnnnnnnnnnnnnnnnnnnnnnnnnnnnnnnnnnnnnnnnnnnnnnnnnnnnnnnnnnnnnnnnnnnnnnnnnnnnnnnnnnnnnnccaaagnnnnnnnnnnnnnnnnnnnnnnnnnnnnnnnnnnnnnnnnnnnnnnnnnnnnnnnnnnnnnnnnnnnnnnnnnnnnnnnnnnnnnnnnnnnnnnnnnnnnnnnnnnnnnnnnnnnnnnnnnnnnnnnnnnnnnnnnnnnnnnnnnnnnnnnnnnnnnnnnnnnnnnnnnnngacaaaagttacgtttaatttacaatgtaataaaggttacaggtaaaaagctacacataaagcatgaaaaggcctattacacaaatgtacaaatctctgtacaaagcttgtatcaatgtttcctaactttgtctcctatgtttgttagccaggtctagtcttggagctctgaataacaagagctctcaattgaggggggaaagagcctccaaactgacatctaaaaattcctcttagagacaccagttacttccaaacaaatcttttcctttttaatttgaattaccccaactggtcatatcctttgaaaactgccttcataatacacttaaaagtaatgccttagagtagaggacagtactctggaattaaataagaaacttcagcaggaggagtgctcaggtttgacaagaaaaacaggtaaatttcaaacaatactgtaagttaaaactataaacctgtgtctatggcaccagtcacagatgaaggaaaatcgaaatgttttcattccaacaggaaggacaaaagagaaaagcctagctactggacctcaaaaccactgacccaaggaaacattttttagtttaaacctcagcttaactgcagaattctaagccttctttttgatcaaactgagatctatggcaacccttctgctacccgggacttggaaggatagtgaatataaattaggctctggacccccaaggctggtgacc

SEQ ID NO: 438385 - DNA, 509 bp, Homo Sapiens
tctgttaacgtatttatttttggcttaggaaaaacatgtactttattggcaaattgttttagctgtagacggatggatgattctacagccacactcccctttccgggtgtacatccggggcctgtgcaacctgcgcggaatcaggcaactttgtttttcccggtccccaaaaagctcacctttgacacaccctctatatgcataggaaaactgctcttcttattcagggtctctttttgtggtggaattcagagaaactgggttgcaacatctttttagggagaggtcgagtatgttttttcattcgagtgactctgcatgcttaaggaatctgagtcggtataaaggactagaccactgaattgcgtacagcgtcccaggatgcctgcagccccagagtacaaactgtagatgctctcgtggcctgaatgtggaattttacccaccagaaagcattactggagcccaaactggcaactttaaatagctcaatgatatcggtaccttcc

SEQ ID NO: 438386 - DNA, 1127 bp, Homo Sapiens
tttcgaatgcgcagtgatgctttaatccccctgtttgcaaacgagctctgtggaagctcagcaggaaggatggaaagatggggaggaagaccctggcgggtggaagtgtggccagggacacaaggctgcccttatgggactgaaagagaaagctgctgggctctgtgtgactggaaaccagggaaggagacctggctgaggcaggaactgggtttgccagcagtgcggaggggcagcgggtggctcagaagtgggagcaggtacacagaaggagctcagggcatgcctggggcatctccaaagctctgctgagagtgaaggccaggagcctgttttccttccccagaagtgtgctcatgggaaatggggcagggggcaggctggcttggggatggaaagtaagcttacactttgatattaaactcattctttgacttgctgtcaggcaagatagcccattctgtgagcttcagcatataagcattgggagggtgtgagctggggctccctagactaccccctagagcagagggagcagggctctgtcagcctcctctgctgctcctggacagagacccacggggtcccatgggctccaaacctgcccagcaagtttaagggccgtgggcaggccttgtagccgggcaatgggatgtgagcagaaacgagaatgtggcctagcagtgggtgcaggacaaggagaggtgaaccccaccccgagagcattccgggaggtgtcatcaagtctcttaggcagtctggtgatatttggtgttctgagctaaggagggaatggacttgtctgtcacgcaggggccaagagaagcaggtgcaggtcttagagctgagccttggggaggggaccctagtgagacagcgcctccgtggagtagaagaaggggcaggatggaaatcaaggtgggaattttggggccgcttctccatgtgtgctttgctggacagcacattgtcccattagccactaccaaaccgccctctggcttctgagcttggcagcacaggaaaacgcggaggttggagcacccccaggagttcctggagtggctgtcacaggcctgggccccttcaccccaaggccgcgtgggccactccattcctctagacgt

SEQ ID NO: 438387 - DNA, 790 bp, Homo Sapiens
  misc_feature (73)..(73): n is a, c, g, or t
  misc_feature (111)..(111): n is a, c, g, or t
caaaccccagttatatttgggaacaattgaacacttccaaaagaattttcatgtttggttgagacaaatccancagcatttctttaaaaaaattcccccttaaatttgaancttcataatatttaaagggaaatataataagacattttttccatattacacacattttgctgcaatgtaattgacccaaatatcaaagagttttaaatcatccaaaccccaagtcacaatgttcaagtccaacatggcaaaatgtgttacccttttaatgatttacatagacagcagtacatattatatatgcacacatcgaggcttacacataaacatattctatacttagacattaagtttagtatgtttagaattttaccttgactatacacttgatctgaaaaaaaagagaatgccatatgtaaacacaattgtatatcttcttaaaaacaattggctttattttgaaaaatattgatggattgcataattaagctccttgaaggatgggacaacatctttttcaatgtttaacaccaagtgctttagaatttttaaatgcctgatacataagtttgctcaataatcaactgttaaataacagattagtaaaaaatggtccacattctacaattagctgtctattttgtatacatggaagatgtagtgacataatgttaaatgctataggtaccatttttcttttatttccacttaagtttgggacacaatgaattgtgaattgctatctattctacttctatttctttgcaagtgtgaattccctctcatctcg

SEQ ID NO: 438388 - DNA, 1249 bp, Homo Sapiens
  misc_feature (1060)..(1141): n is a, c, g, or t
cccgggaattcccggtatctccggaatccaaggggtactcacttgcttatggcggcggatttcctgtcatgggttctatgatcgccactcttctgcttctgtccctacttctgcttaattctcttgttctgctattataactgtgtttacccttagtaatatcacattctctactcctggattgtgcgcgtctatccttttccttacttttactgtgatcatgctcattactctttgattctaactgtttagacttctctttacttctactcctttcctgatcttttcctttagaatcagactgcttttcttattctttaacattttcatgatcccttcctttactccttgacctcatcctcttttcttcatttctattatgttttgaatctctttctttactctttgatttctctttgctcttactcctacttttagatttggcccttttcttcactttgtttttatacttgtcttctttttctgaatttcttctgatgtctctctctttgctgttagatttatggtctttaactttcttctccttttcattttttctgtttggactctcagatacattcctgtgatctgttatttttctctcttttactctaactggacttctctgattttcttttatttcattcaactcactcttatcccccttgatccatctttcaccacttgataccctcattctttgagctctctgcatctcttgcctccaatgtggaggagtctcactacgtctgaaacgatcccttgatctggatctggaaggagttcgataacgccttggtcctcttcctttaattttcctgccagatctagtaactaaaagtcgtctctggtatgaagcaggctgggagttaggtggattacactctctttccctttctctctctctgtttttcctttccttctcatcagctttaggaggactttttctcattaggaatctattttcaggtataggagggatctcttctggacggacagtagactggggttgtgcttcaagattttcagcttcactctcactagatgcactcttcttgcnnnnnnnnnnnnnnnnnnnnnnnnnnnnnnnnnnnnnnnnnnnnnnnnnnnnnnnnnnnnnnnnnnnnnnnnnnnnnnnnnnagtagcactttcggaatcagaggaatcagaagaggactgagaatcacttgagctatctgagtcactagatgaggaggagtgcatctaagtgagagtctccgtcgaact

SEQ ID NO: 438389 - DNA, 447 bp, Homo Sapiens
  misc_feature (43)..(128): n is a, c, g, or t
cctccgatgtgctcagatttcagcttcactctcactagacacnnnnnnnnnnnnnnnnnnnnnnnnnnnnnnnnnnnnnnnnnnnnnnnnnnnnnnnnnnnnnnnnnnnnnnnnnnnnnnnnnnnnnnctcttcagtagcactttcggaatcagaggaatcagaagaggactgagaatcacttgagctatctgagtcactagatgaggaggaggaagatgatgatgatttatgccttttcttttcttctttcttaactttagatttgggaatcagctctccacaactgagtatccgtacctccgcaaacggtttgctagctgcatctgttttctggttttcaatctctcttacaacttcttgacgcagagattacttgtccaaaaccaacatgatgcccatctaaatgaggagtgggtttcgttgttatgaagaactgtgaaccatt

SEQ ID NO: 438390 - DNA, 680 bp, Homo Sapiens
ttttttttgagaaacaagagcatgagatacttgtttttattttttaaaaagtctttccttcctgattgcattccctgtcttcttttgtatgtgcttcataaaaaggaaagtaaataagtttatattatgtctcagataaaatgaagactatttctatacaagtgtccatttaagatcttgggatcagacataatactctttatccttgtttttcttatttttgttggagcttttcgcactgctgggttgtttctcctttacaacagccccattggactgtgctgagttactgatgtagtttcgactctcgtccacatggtatgagccttcatcccggtttctgtacttgtacatggcatagaggaggataaggatgcacagggcggcagcggctactatcccaacgaccatacccgtggtgctgctggactcccggatcacttctgctgagcctggatacggctctctgccgcctgctcgggttgggttggctctgagctcggctcacaggggtcaatgtcctcatcatcgctgggacactctgctgaggccacaaggatgtcatctgtggtctggctaatgggttcttttgtcgggggctttcctcttctggctgtgctagtagccagggtcgggtatctcaatattgtgtgacatcttgatgcatgcagtgctgttgc

SEQ ID NO: 438391 - DNA, 806 bp, Homo Sapiens
agcgggagtcaggagctctcctgtcaccagtattgatttcagaggatggactaaatttcctaggatttccattaagaattaagaaaaaagctctaagcacgcagggtagccagacagacatggatatgagatggcactgtgaaaactcgcagaccacagatgacatccttggttggcctcagcagagtgtcccagcgatgatgaggacattgacccctgtgagccgagctcaggtgggttagccaacccaacccgagcaggcggcagagagccgtatccaggctcagcagaagtgatccgggagtccagcagcaccacgggtatggtcgtctgggatagtagccgctgccggcctgtgcatccttatcctcctctatgccatgtacaagtacacgaaaccgggatgaaggctcataccatgtggacgagagtcgaaactacatcagtaactcagcacagtccaatggggctgttgtaaaaggaagaaacaaccccagcagtgcgaaaaagctccaacaaaaataaggaaaaacagggataacgagtattatgtctgatcccaagatcttaaatggacacttgtatagaacatagtcttcattttatctgagacataatataagcttatttacttcccttttatgaagcacataccaaagaagaccgggactgcaatcaggcaaggcaagactttgaaaacactagaacaagtatctcatgctctgattctcaaacaagaaacaaaacaaaaacgggccataaatacctaatcacaggttacattacccgctggcataagtgcgaac

SEQ ID NO: 438392 - DNA, 844 bp, Homo Sapiens
catcccctaagtaggggcaaaaatggtattcagttgaacttacccagggaaagaaccgagttcctcttggcaaggagaatgtgcagaggagacaagtatctcaatgggatcgccgaccacagagagtgacttaagagagaaaacacctgaagacaattctagggtgttccaataccaggggtatggggtgggaaaggagtacacactttgtgtctcagagcaactttcctcttgtgtccaactgccatcatagaacatccatgaatacgaaaggagggatccatgctctccctatagtataacacaccacacccctgccgtctgtctggcacgtgctgagagagaaccctcgtcccttctctgggggagaatccccgccgtccatgggttccaattgaagtggggaggctaatacaatttgctaacccctaaggagaaatgaacatttttacttccagcctacaggaaaaccaatcaagtcaacatgtggccaagggttttgttaatgtcatggatactaatcataaagaacataaaagaaaataaattataaattatctaacttcacactcaaacagggcaatgtgtgtccaatttcttattttgcatatcagttaagaaggaggtgccatacagtctagaaattcatgacaacacactggcaaaaaccatacaccataagaataacgaggctcgaagggaccaggctgacaagacgaccccaagggtgactttcttagacaccagtaagtagattcctaagggtaaggagctgaagtagagccaacctagcaaccacactaacacccggatggatgtctgaaacagcaggacgtgcagttcc

SEQ ID NO: 438393 - DNA, 468 bp, Homo Sapiens
caaagagcatcagggactttaatcacatcccgcagctctgcggacctgcccaggcgctgatgctgcgcacagcccacccccattccctccctcccgccctcctggccctggccagctcagctctgtccggggtcggagagggggtcctgaggcagcagcagcccagctccagagtgacaggcaggggctgtccagctgagtctccgcccccacgttgccctggggcaggcccagctgctgtcagtgctgcttgagacactcagcagcatcttccaaggtcaggttggccaagtgtgggggctccagacaccttaaggctggcgataccaggctgcggggagacgaggctgcctcagctctccatgtcccccaccccctgcctccctccctgggggccccaggcctttccttccagctgggacgtgtggtcctatgtgtggccacatccacgacccctcgtgcctgggt

SEQ ID NO: 438394 - DNA, 1574 bp, Homo Sapiens
  misc_feature (462)..(462): n is a, c, g, or t
  misc_feature (945)..(965): n is a, c, g, or t
  misc_feature (1139)..(1139): n is a, c, g, or t
  misc_feature (1209)..(1209): n is a, c, g, or t
  misc_feature (1552)..(1552): n is a, c, g, or t
tgggaccctttaggaagatgccgcttccactgagggtcgagacctttgagggagaaaaaggactgcaccgcctcctgcgcagagctggtttgaggttccaccctcctcgggagccccctctaggacgtgggagctgaggggagccagccctgtgcccccacacatactcacccacgaggtgcttcaacaatacaacacactgccctgtgttggtttgaggaggggacttactttgtgccagttatttatgtagttcaggaggccctggacagctgacttccactgcgccgaggacctgtgggacacaggcttggaagtggtgcgcccctgaacccacggccccgccctacccgatgacagccaggtggaaggcggggagccccctccaaggagagcctgggaccccagggacagtagggcctggcacgggtgggtgtgatgcctgagccctactcgcagttnatagccaaagcaggcgacgtgcgagtctgtgcagttgttgcaggagatggtctcgtactggaagatgcctgaaacacgtacaagagccgccagggctcccctcagcctccagggccccgagctccaccggcacgcccctcagcctggacggagccttgcttaccacagcggtgctgacagtcgatgcggctttcgatgatggcgttctggatgaggtgcacctgctcccggaagatgtttcgcagctcgttggggaaatacccggggaagtacatcttcccctggtacagctgatccatcatctggtacacttctgtcgccacttggtccagcttctcccgggtgatcttggcggggatggccaggtgcagctccttcatcgtgtcgtcgctccagtcggtgagcagcgcccctgacacggggatgtcgcccacccaccaggacttgaagttcacatggtggcggtagaaggagaacttcttnnnnnnnnnnnnnnnnnnnnncagacagccgtgggccagcgccgccgtcaggcacaccaggcacagcagcagggccatgcccgtcccggcccgccgccggccaaccaacgacgctgctcgcgccacacccttcagccgcgcaccaaccaacggcccccactcgggcgcttggccgtgtctcctcccccgcccgcnccaccagcgcaggccccgccccgtcccagtcccagctccgcctccgtcctcagccgactactgacggcgnccggctccgcctccaggccgggcccacgacccgcccctcagaagactccgccactgggtgggcgccgccccaaggccgcgccgtacgcatgcgccaatggcccgtgcctgtgccaatggccggtgcccgctcctcggccggctcccggtgaggccccgccccgtgtcgcagccgcggtgcaggctccgcccacaggccgcggccccggttgctaggcaacggagacctccgcccggcccggctcagggcatcccagggctgctgcccggaacttggctccgtgcgccttcgccgcccgggccccttaaagcccgcgggaccgagtctgggaggggcatgcacnccgcttctgcgcctagctcgta

SEQ ID NO: 438395 - DNA, 1020 bp, Homo Sapiens
  misc_feature (42)..(42): n is a, c, g, or t
cactgctttccatcgacccccgtccgctcctcctcccctccntgctggtaccggtccggaattcccgggatcgggccgggacgggcatggccctgctgctgtgcctggtgtgcctgacggcggcgctggcccacggctgtctgcactgccacagcaacttctccaagaagttctccttctaccgccaccatgtgaacttcaagtcctggtgggtgggcgacatccccgtgtcaggggcgctgctcaccgactggagcgacgacacgatgaaggagctgcacctggccatccccgccaagatcacccgggagaagctggaccaagtggcgacagcagtgtaccagatgatggatcagctgtaccaggtgaagatgtacttccccggtaaggggcgcgaaaccgaggcggggcccccccaccccgggacaccccgcccaccgcctgagtcctgaccttctcctgcctctgacgactcaggttatttccccaacgagctgcgaaacatcttccgggtagcaggtgctcctcatccatgaacgccatcatcgaaagccgcatcgactgtcagcaccgctgtggtcctcggcgcagtggaagtcagctgtccagggcctcctgaactacataaataacgtggcacaagtaagtcccctcctcaaaccaacacaggcagtgtgtgtatgtgagcacctcgtgggtgagtatgtgtggggcacaggctggctccctcagctcccacgtcctagaggggctcccgaggaggtggaacctcaacccagctctgcgcaggaggcggctgcagtcctttttctccctcaaaggtctccgaacctcagctggaggcgggcatctttcctaaagggtccccatagggtctggttccaccccatcccaggtctgtggtcagagccttgggagggttcctacgatggtaggggtgcccattgagggctgactgccccacattgctttcagacaggccgagctgagctggtttgccaggcttacggttggagccca

SEQ ID NO: 438396 - DNA, 911 bp, Homo Sapiens
tttgggcagttcagcccctccatgggcacccctaaccatcgtagggaaccctccccggggctctgaccacagacctgggatggggtggaaccagaccctatggggaccctttaggaaagatgcccgcctccagctgagggtcggagacctttgagggagaaaaggactgcagccgcctcctgcgcagagctgggttgaggttccacctcctcgggagcccctctaggacgtgggagctgagggagccagcctgtgccccacacatactcacccacgaggtgctcacatacacacactgcctgtgttggtttgaggaggggacttacttgtgccagttatttatgtagttcaggaggccctggacagctgacttccactgcgccgaggactcgcagttatagccaaagcaggcgacgtgcgagtctgtgcagttgttgcaggagatggtctcgtactggaagatgccacagcggtgctgacagtcgatgcggctttcgatgatggcgttctggatgaggtgcacctgctcccggaagatgtttcgcagctcgttggggaaatacccggggaagtacatcttcccctggtacagctgatccatcatctggtacactgctgtcgccacttggtccagcttctcccgggtgatcttggcggggatggccaggtgcagctccttcatcgtgtcgtcgctccagtcggtgagcagcgcccctgacacggggatgtcgcccacccaccaggacttgaagttcacatggtggcggtagaaggagaacttcttggagaagttgctgtggcagtgcagacagccgtgggccagcgccgccgtcaggcacaccaggcacagcagcagggccatgcccgtcccggcccgccgccggccaaccaacgacgctgctcgcgccaca

SEQ ID NO: 438397 - DNA, 985 bp, Homo Sapiens
  misc_feature (748)..(748): n is a, c, g, or t
aggctggtacgctcggagtacgggatggcgcgagcagcgtcgttggttggcggcggcgggccgggacgggcatggccctgctggtgtgcctggtgtgcctgacggcggcgctggcccacggctgtctgcactgccacagcaacttctccaagaagttctccttctaccgccaccatgtgaacttcaagtcctggtgggtgggcgacatccccgtgtcaggggcgctgctcaccgactggagcgacgacacgatgaaggagctgcacctggccatccccgccaagatcacccgggagaagctggaccaagtggcgacagcagtgtaccagatgatggatcagctgtaccaggggaagatgtacttccccgggtatttccccaacgagctgcgaaacatcttccgggagcaggtgcacctcatccagaacgccatcatcgaaagccgcatcgactgtcagcaccgctgtggcatcttccagtacgagaccatctcctgcaacaactgcacagactcgcacgtcgcctgctttggctataactgcgagtcctcggcgcagtggaagtcagctgtccagggcctcctgaactacataaataactggcacaaacaggacacgagcatgagaccacgctcctctgccttctcctggcctgggacacacagagccaccccggccttgtgagtgacccagagaagggaggcctcgggagaaggggtgctcgtaagccaacaccagcgtgccgcggnctgcacacccttctgacattccagcctgggtatcgccagccttaagggtgtctggaggcccccacacttgggccaacctgacctttggaagattgctgcttgaagtgtctcaaagcagcactgaacagcagctgggctgcctcaggcaacgtgggggggcggaaactcaattggacaagccctggcctgttactctggagcgggcaggtggtgctcagaacccttttccgaacccgg

SEQ ID NO: 438398 - DNA, 1003 bp, Homo Sapiens
tttttttgtgtgaaaaccatcagggacttaagtacagtccgcagttctgcggacctcccaggcctgatgtgcgcacaagctatcccccattccctccatccgcggccttcctggccctggccagctcagctctgtccgggtcggagagggggtcctgaggcagcagcagcccagctccagagtgacaggcaggggctgtccagctgagtctccgcccccacgttgccctgaggcaggcccagctgctgtcagtgctgcttgagacactcagcagcatcttccaaggtcaggttggccaagtgtgggggctccagacaccttaaggctggcgataccaggaaggccggggtggctctgtgtgtcccaggccaggagaaggcagaggagcgtggtctcatgctcgtgtcctgtttgtgccagttatttatgtagttcaggaggccctggacagctgacttccactgcgccgaggactcgcagttatagccaaagcaggcgacgtgcgagtctgtgcagttgttgcaggagatggtctcgtactggaagatgccacagcggtgctgacagtcgatgcggctttcgatgatggcgttctggatgaggtgcacctgctcccggaagatgtttcgcagctcgttggggaaatacccggggaagtacatcttccctggtacagctgatccatcatctggtacactgctgtcgccacttggtccagcttctcccgggtgatcttggcggggatggccaggtgcagctccttcatcgtgtcgtcgctccagtcggtgagcagcgcccctgacacggggatgtcgcccacccaccaggacttgaagttcacatggtggcggtagaaggagaacttcttggagaagttgctgtggcagtgcagacagccgtgggccagcgccgccgtcaggcacaccaggcacagcagcagggccatgcccgtcccggcccgccgccggccaaccaacgacgctgctcgcgccacacccttcag

SEQ ID NO: 438399 - DNA, 843 bp, Homo Sapiens
gcagcgtcgttggttggccggcggcgggccgggacgggcatggccctgctgctgtgcctggtgtgcctgacggcggcgctggcccacggctgtctgcactgccacagcaacttctccaagaagttctccttctaccgccaccatgtgaacttcaagtcctggtgggtgggcgacatccccgtgtcaggggcgctgctcaccgactggagcgacgacacgatgaaggagctgcacctggccatccccgccaagatcacccgggagaagctggaccaagtggcgacagcagtgtaccagatgatggatcagctgtaccagggaagatgtacttccccgggtatttccccaacgagctgcgaaacatcttccgggagcaggtgcacctcatccagaacgccatcatcgaaagccgcatcgactgtcagcaccgctgtggcatcttccagtacgagaccatctcctgcaacaactgcacagactcgcacgtcgcctgctttggctataactgcgagtcctcggcgcagtggaagtcagctgtccagggcctcctgaactacataaataactggcacaaacaggacacgagcatgagcctggtatcgccagccttaaggtgtctggagcccccacacttggccaacctgaccttggaagatgctgctgagtgtctcaagcagcactgacagcagctgggcctggcccagggcaacgtgggggcggagactcagctggacaggccctgctgtcactctggagctgggctgctgctgcctcaggaccccctctccgacccggacagagctgagctggcaggcaggagggcggagggagggaatgggggtg

SEQ ID NO: 438400 - DNA, 912 bp, Homo Sapiens
  misc_feature (101)..(101): n is a, c, g, or t
  misc_feature (109)..(109): n is a, c, g, or t
aaagaggaaaccttcaggggccttttatcacatcccggcagctttggggcccttccccgggcgctgatgttgcgcccagcccacccccctttcctcccttnccgccttnttgggcctggccagctcagctcgtccggggtcggagagggggtcctgaggcagcagcagcccagctccagagtgacaggcaggggctgtccagctgagtctccgcccccacgttgccctggggcaggcccagctgctgtcagtgctgcttgagacactcagcagcatcttccaaggtcaggttggccaagtgtgggggctccagacaccttaaggctggcgataccaggttgtgccagttatttatgtagttcaggaggccctggacagctgacttccactgcgccgaggactcgcagttatagccaaagcaggcgacgtgcgagtctgtgcagttgttgcaggagatggtctcgtactggaagatgccacagcggtgctgacagtcgatgcggctttcgatgatggcgttctggatgaggtgcacctgctcccggaagatgtttcgcagctcgttggggaaatacccggggaagtacatcttcccctggtacagctgatccatcatctggtacactgctgtcgccacttggtccagcttctcccgggtgatcttggcggggatggccaggtgcagctccttcatcgtgtcgtcgctccagtcggtgagcagcgcccctgacacggggatgtcgcccacccaccaggacttgaagttcacatggtggcggtagaaggagaacttcttggagaagttgctgtggcagtgcagacagccgtgggccagcgccgccgtcaggcacaccaggcacagcagcagggccatgcccgtcccggcccgccgccggccaaccaacgacgctg

SEQ ID NO: 438401 - DNA, 470 bp, Homo Sapiens
atagggtgaacatacactctctctgatggctcaaggaagctgcattataacactgttatcatctcactactgaggaccaagagttcactggcactttctgaagctccatgcttctggaaagtgctgtgatctttgttgctgatgattgtcaagaatatcagacaccaggaatggagaagccaacttactggcttggaaaagataagaatttgatgtgaacgactctcagaacatggtgtaggcacaaattttaggctgttctgtcattgttaagccagctatttctctgagatctctagcttttaaagctggggctaagaaaaccgtttccaatttttttaaccaggaccttggcaaagatttctggcagtttaaatggcaataagagcctgtttcaaatcaagccagtatagttaaggtatattctctcttaataatcttttaaagtcagatttctcgtccaccaatat

SEQ ID NO: 438402 - DNA, 634 bp, Homo Sapiens
aactctacaggaaccccccgctgggcgatcaactcatctgaattatgctggtaaacttccctccgtgctaactgcctcctcattaatccaggagtctgttctcctccagtgtgcaaccagatagatcctatgaacatctggattagaccacctctttccccatccaagcatcccagcatctccaaaacagatgcccagcttttcaggcaaccacattacaggcctgaatcttgacccggcttcttgttcctatgagaaagaatagatgcctgtcgtacataggtcccagctcagtcacacctcaaagcatttgcacaaaatggtatgaattcctaaaatagctttctacacctgtttccattggttgccagaaataagaacacttctattaatccttggctggtactcaggactctgagcttggtgtatccacaggttctccacgccaagaactgggaaaacatcaagtgaacactcaagacaccataatctcagacaccacacaggtagtgtcaggttcagggagagactgggacactttctctttccctgtgttggcaccataagcattttcagtgttcagaccccatgaaaataaggcaactgtgaccagctccagctgatcaaacctccg

SEQ ID NO: 438403 - DNA, 409 bp, Homo Sapiens
agctgggcactgagggaccaagctggggggccctgggcgtgggttccctggatccagggagtgtgaggatggctttccctggttcctgaggcatggaccgagtcctagcctgcatctgagctccgttgtgctagctctgaggtgtgactgagctgggacctatgtacgacaggcatctattctttctcataggaacaagaagccgggtcaagattcaggcctgtaatgtggttgcctgaaaagctgggcctctgttttgcacatgctggtatgcttggatggggacacaggtggtctaatcctcatgttcataggatctatctggttgcacactggaggagatcggactcctgtattaatcccgacgcagctagcacggaggcagttttacgagcttggctctgttgtc

SEQ ID NO: 438404 - DNA, 174 bp, Homo Sapiens
tttttattagaaatattacagtcatttatcatacactttcctatgaatagttaaatacatctaattagcatgtcatatccaaaagtgctgggtacaatctagtgtgctctttatagacacgaggccacagatgtatcaactacactcaactaatgtagttaaagttagtgtgct

SEQ ID NO: 438405 - DNA, 2291 bp, Homo Sapiens
tgtttttggtgtttttaattgtttttgttaatgtaaaaacagaaccatcacagccgctcagctctataacccatccagcccaagactgttctagtggtgaaaccaagagtagacaggtcttcctacctcagtgacctcaaaacacaaggacatctccatagggcatcaacatgcatctgtcatccaagaatctaagaacttcctgatccttccacattttctatcaataatattgccttctgaggttatggattccaggtcttctatgaaataggtaaagcttcctttcgcgttccaagaaatatagtttgcgaagggaactggaaaacgtgactctaggcctcagccacttcctctgttaccctgtgcaagttgtagaacaatccacgttctcacagctccccttcttcagttgtggagttcttcaaggtggacagatcacacctcaggaagtcatcccttgtaagcacactagaatttatcataaaggcaggtcggcttgttagtttttctttgtccccagcatacactgagccaacaacttaagtcatgaatgggttgtttagggctctgtctgtcctaaatgattcctaaaagcttcatatagctcatatagtcttattgtccactgctcttttggtgtggtatgatcctacctgtaaagctatcaaacccctgggtcctggatgcctcctccagatttcataccttcctcaagtttactaaatactttctgaatttaagaattttgagaaagtcacctaccagctaatgcaaaaacacagcctaattctgtgtgaatccctgttgagatcagcttttcaggtcagggagggaaggtatggggtttagggtaccctctcctatcacacacatcccccctgcccacagtaccctgacctaccttgcctgagactcctagacactatgagctcccttctggctgccactcagactggccaggaaggctcccagattgaacacaggtgacctggtatagatacacactgtactgtgggccagaaccatggactacattttaagccatgttgtgggcccttcctgcctacagaaaaggacacttgagtggagtcacacttgggttgcctaatttattaccttaactagaaacattctaagtatgggagcctgttctggaggatagcttctaaaccaaatctaaaactatctttgcacacaagtgttgtgaagaggtaagcaggggatcagagctccatcttctgtgaccacttctccagggactgccacctatagggctcaggttggtaccaacagccctgcatagtagagtcactgtcaatcatcttcccacttgtaagcaggaagacaaaaagtctcatgaaatagaaacgaaaacactgaagcatggccttcatcgtcctaatgccacaagttcctgggatggccaagatactaccttagcttattgtccctgcttcacctccagagactggagacagaggattttccggggttggggtttcttctctgacttggcaaattcttctttttatctccagctgaaccaccagttccttgggtagcagagcagagacctaagcacaaaccacagggcttactagcacatccttcaagccacttcctttgctgttctattactcttcttcagcttatctgaacctgcggactctctggatacagaaactgcccaaagcatggtgaaaaagacaaagggcccaggtttcacctggcaaccactgctcccaacatctagagtaagtcaaagaggctgaaagatgacagcctagttctctttgccttcattatgatactaacaaaaaccagaagtttccaggagtcagcaagctactcagtatctgacgtggtttctaaggtggagttgcatggggagcactctcccgtggctgctgagtgaaggcaacagtgatgtccaaaacaagcccgtccggctctgaaccaccagttggcaggccaggatgactccagtctttagcaaagagctttccattctaactcccgaaatcccagaccagatggatgtctcctcccaactaggcgcagagggtagcacagacttccaaaaggaaacaccttcattaaatgcagcaggcagtcctatatgctgacccttgggtcaaaccacagcttaagcgggggaagaagtggttctgatccatgtacagccagatctgctgaggagtctggggttcccaggaaccagatttgcagatcctggacgatggtgcttcccttgctggcaccgtatcacctaacctaatggtttctcc

SEQ ID NO: 438406 - DNA, 209 bp, Homo Sapiens
gtatctctaacattaacatacatatgatcccagctacattctgtagcaaaatgattgaatcttaatcttaacactgcatttggatagccttcaatgagccaagtacatttagttttatatttatagttaattgggccatctgttaaatatccagaaggttctgttaacagatatggtattcctgtatgctgcttgtaatgttagagata

SEQ ID NO: 438407 - DNA, 409 bp, Homo Sapiens
tgttgaggtgatcagaaccaacatcgggtgtgggggtgacaaagtctggcagagtcaaaggattgagaaaaagacagtttaagaagtaaagtaggaccaaggggctatcatgatggtggaggctgcaaaggccctgagctctgggggcccatggtattttttggtgatccaacaaagaaacaggtggtgagaatgtggaggttgaaaggtcgcgttgcattaagtacatgatttacagctgtgatggtttagcatttgctctgctgcttgagataatggagagcaggttcttttaactcaagatacaatcgatcctgggagagcaaggagcaaggagccagcaagtctagacacattcaagagccacaagccctggattctatccaagccacgaggggttttatgccct

SEQ ID NO: 438408 - DNA, 551 bp, Homo Sapiens
  misc_feature (355)..(355): n is a, c, g, or t
catgaagagatgcatgctctttttgtaaatgctaattgttttaaaagttgaaaagaaaacctttggaaaactcagaaatcttccttgaaataattttactcagagcattggcctctccctggtttaggaatcattcttgccagagattcaatctcgaaattaacagccaggtccttgcctgctgtgcagtctgatgaaagacttcagcctctgctcaatcacctcagtcattcctacactagccaagattacagtacccagggaaatgttggggaagatttctttagatcagattgatttgctttctaccaaatccttcccactttacatgcatcagttacataaagccttgcgngaaaatcaccatctttgtcatggaggccgaatgcagtatgtcctatttctgaagggcattggtttaactttgggaacagacattgcagttctgggaaggcaaggaatttatccaaagggaaagatgggtccagacaagtttggataaaggttactcttaggaacatccgtcacagctttgggaagggaagggcaag

SEQ ID NO: 438409 - DNA, 1590 bp, Homo Sapiens
  misc_feature (27)..(27): n is a, c, g, or t
  misc_feature (1002)..(1002): n is a, c, g, or t
  misc_feature (1010)..(1010): n is a, c, g, or t
  misc_feature (1017)..(1017): n is a, c, g, or t
  misc_feature (1059)..(1059): n is a, c, g, or t
  misc_feature (1064)..(1064): n is a, c, g, or t
  misc_feature (1121)..(1121): n is a, c, g, or t
  misc_feature (1168)..(1168): n is a, c, g, or t
  misc_feature (1208)..(1208): n is a, c, g, or t
  misc_feature (1252)..(1252): n is a, c, g, or t
  misc_feature (1507)..(1507): n is a, c, g, or t
  misc_feature (1509)..(1509): n is a, c, g, or t
  misc_feature (1514)..(1515): n is a, c, g, or t
  misc_feature (1525)..(1527): n is a, c, g, or t
agtgaaggcctcctccaccgccactanaagcctggccctcctcttgcgcacccttcgctcatgctcagcctcctcatagtagtactcattgtgactgttgtcccgcctccgagctgccgctgcaatcacagcccgagactggccagtggagttgttggtgctgttttcctctccgagggaatacaccttgaagccagacactttcttggccaggacggacttgggcaggttgaggagggcagggttgtagacagggaagtcatggtaatacttctccaggatccacactgccacgcgctggatgctgagatggccaacgttgtagaagcggctggcgccgtcggtggagcgcacgaccttgagcgtgaactgaggctggagctggcgcagctccagcaggaccacggccaggtagtgcacgaaaagaagggcgtccaccagcgacacggcgaactgcaccacgccctggtagctgcgctcccgagcatccaggatgcgcacaccatagaagagccagtaggagaccacgagcaggaaaaccagcaccataagcagggcacgcagcacaaagacgcggggcagcgaggccttgggccggcggaagaacagagcccagctgcccagtagcaggatgagcagcttgaaggcgacagagatgaagaggccctcgcaggccgtcccgcaaggctccagctcctcccgccacagcagtgggggcagcagcaggaaggccagaggcgtgaggaaagacagcagtgccagggtggcccccgctgccacacccaggtgacgggagcagtccagagggacactgtcctccatgtccttggcgatgcgtgtgcggtcatcatgggagatgctgtgctctgaggtgcccgttgctactgtcgtcgtttccccccagttgtcatcccgctcatcccctcgtgtggactcattgtccagcaggggctccccgggagcctggattgtcaccgacttgtcccctcggcccccatctcnactcttanagcggtntcggtcccggcggtccctgtgcttgcgggagctgcgggagtngcccnacttgtaggaatagcccgagtactgggactcggtgtccatggcgtctgaacgccgcnccttgtagcgctccagggccgcaggctggggcctcttggggggcccnacagccacctccttcagcaccggcttctttaggccaagangcaccttcaggaagtcaaatgtcaccttgagggactctattttnctggacgggtgggcttgtctcagagaaaatccagcgacgctcccgccgctgcgaactgccgggtgggctccgcgggcgccccgctcggcccgtcgcctttgtatccgcagcgctccgggtcgctccgaactcggcgctcctggacaggcagcgcgcgcgatgggggatgttgaggggggggttcttgagtctggtcaccccctgctccgtcccagaccgctgcctcttccccctcaaggccccgggggctggggncnagggnngaatattgtnnnctaaggctcccatggcgggaccaaggatcaaggaatcaaggatcaggaatcagatcgggatcc

SEQ ID NO: 438410 - DNA, 443 bp, Homo Sapiens
gcatgttcccgtatgctttattggaatgctgtcaggtccgcgccttccacctgggccctcacacacagcaaggagaggccccagcaccggtcccaggcccacctgcccgcacctgcagaagggaaaggccatcaccctccgtggacggggtctcggccaccacatccaccttctgaaggtggcccagacacctccacgctgctgactgcacttcccatcaaaagggactccctggggcagagtgggccgtccccctacccccgaggaaggcaccctcctgggcggggacagaccttggctccatgctgccaagtcaaggtgctggcgtggaaacaggcacatgtggaacaccacatcccactgtccaaggtggagtccacccctcctcggagcactcagcccaccagggtccaagcagccctcgggagataccacgcggccgc

SEQ ID NO: 438411 - DNA, 1286 bp, Homo Sapiens
  misc_feature (17)..(17): n is a, c, g, or t
aagtggaccctcaaaanacagtgtccacagggtaaacgcctacccagagtttgcacaagctgtgcctcctgtcccgagggacgaaataccctcaaggtaaaaagggaaagcagctctctttttatcatttccccctgctggttttaaagaccccaagcccagactcttgcaacactgaaccataggtgggatacagggaggagagacagagggtaaggaatatgaatggtgttaggcccaccaagctctgtatcccttccccagacttcccagccaggcagttgttggtaggttgatatttgatttgtgacaaaattacagggtatgagggtggctctcaataaaaaaacaactaggaaagtcagagttgaactgttttcctctaagggctgcttagctctacagaaatacagcaagggccttcaatctaacctgtttaactgggaaggggaacaggagacagggagaagaaatggtcagatgaagctcatcttcccatcatttggcacccagaggaagacggggaggtggagactgtaatggggactgctggtattgcctcttctgtcttttcactgttgatcctattggccaaatcaggtgcacacaagtatcagtgttgctgcttttcttctaatccttgcaggagagtcagatgtccatctcgaactgagcatcatccccaactgcatgtttcctgtcgtgattgttcaagttgttcaaattgtttacttctactttggagtcttcaattaaggtgccagggctagtgactcctgggatattgggcagatggcagggtggggtctgagccatgggagaattgcgacgatccaacagaaactttctgtcataaatgattcgagttcctcccggtgtggtggagaagagcgtccccccgggcgtggtgcaatagtcatgaggtagctgcgcggcgtcgctgatggccacggtgcgggtggggatggcgcggctctggctgggctggtggccgctgccggctgacgaggacatggctgtgggcgcgggctctcggctttgtccgcgggcagcgcggcggcggggccggggctgcttcggctcctcaggcggacggaaaagcgcgctctgcgcgctcctcgctcgcttcctcccgttccctcgtcccgctccgctcccagcacgccagccctctcagccgccagcccgccagcccgccgctcgatcctccggcctcagccagcagcctcaggagcaacagcagcggcagcagcggcgacgacgacgaccggaagcgggcgaaggcg

SEQ ID NO: 438412 - DNA, 1014 bp, Homo Sapiens
  misc_feature (910)..(920): n is a, c, g, or t
ggggaagggatacagagcttggtgggcctaacaccattcatattccttaccctctgtctctcctccctgtatcccacctatggttcagtgttgcaagagtctgggcttggggtctttaaaaccagcagggggaaatgataaaaagagagctgctttcccttttaccttgaggtattcgtccctcgggacagagcacagcttgtgcaactctggtagcgttaccctgtgacactgttttgaggtccacttcctttctttcctctgggaggaatgtcttctgtctttggtattatagttcatcttcccattcttttacttagtgcatttgtgcagatatttttaactctgtacatcagaagagagcccttggtaaccagttttgctcttcttctgccactcctccctgcttgcatctcgttgctggcagagtcctcttgtacttcaagaaagcaaagtgattttgtctgctcctagagcaggtccataccaagtaatagaggcactttagcttccacttggtgggtaaggcctgatcatagtattctgtcagataatgcctaagaatgaccgctgaagaacgttgacccatttgagtacccggtctcagtcgtcatttttaagtccagtgagcattgtggtagttgtccttagattgcagtttcttatgtcctgagtccgaacgttgattttccataatgttcccccaacacaaccgcatttttttcctccggcggatctgcctttccctggcctgcttggcataaataagccacggcgctttaaaaaaatgtggttcctcccccagttttcttgggcctttccctggcggtaatccctgaaatttctcccttccttaacctcctcttccctctttctttcccgggttttcactttccctttgtccttctcnnnnnnnnnnncttaacccacggccactctttcgccacgtttctatcaccccgcacaaatatccccggaaaactgtgttcggttaatctcgacgaaatttgatct

SEQ ID NO: 438413 - DNA, 714 bp, Homo Sapiens
  misc_feature (326)..(336): n is a, c, g, or t
  misc_feature (682)..(682): n is a, c, g, or t
tgatactcaagatctttactgatttaactataacagcaaccattgatgagaatttaattttttccttaatttccaaacatctgctggtttggaagaatagttaaaatacaaaaacaactgatcatggaatcacacaggactgcctcaaggactgcgtggtaccctctgctatccatccacacacagtgaaatggatgggagggatgagggaacaacacatcatgggagacaaagggaagaccaaggaaagtgctggcagtctccgcttttccattcagaatggatggaactgggccgttagtggcactaagacagggcagggctannnnnnnnnnnaaataaaatattttaaagatgcataaaatggacaccttagcacgtgagtgtcctttgggctcttcaagacaccttctttaaggtttacccctggagtagcagagggtctcctcacccaggtggaaagagatgggctccatctgcagatgaaggaaaggcactggcgcacagcactcagcaatgtagatacaggcaccaggtaggagcaggatggcttacccagcaacctgcctcttagctccctgctagtgttcttccctcctccccagtttccagttaaaagtacccttggcctgggctgtttaactgggaaggggaacaggagacagggagaagaaatggtcanatgaagctcatcttcccatcatttggcaccca

SEQ ID NO: 438414 - DNA, 881 bp, Homo Sapiens
cggctgccgtggtgaaatcccattatctgagacatcgtcgcgggtaaaccttcgcgatgttgcttggttcatgcgaacaagtgcgtggaaatgttcaactcgtgcgctgttgcaaaattagtggtcggctgctggttgtcagtagatcctgcattccacagtttgcgacgtgaggcctttaaatttccgcaatgttcatgctccttgtggattgcagttcacatacagcagttatccaattcctcgggcataacaacggagttgggccctttagaaagcgtgatctgctgcttctgttccaatggtcatacctgacaccagacagaatatcatctatatattcaggtaagccttcttcctccagttgcccttcaattttgctaattgtttttgcaagggaaaagtctgagaaatcctctggaatggcaacatcgtcggcagtttggacatcagagtatttcaatttaacacttgaatttgttttccttcctttatttgcagagtgtaatttgttttgaaccttgtttacaggatcaatgtttttggtctttggcttagtttctgaatgaagatgaactatcccttcagatggtaacagacctcttaaactgtaatcatcttcgtcatcacatgatttcatttgtgttgaaacaggcctagatcgtacttcttgccgatctcttattatttccttagcttgttgaaccacgtcagctgtttttgcctgcaattctgcatttaaacgcttatattcttcctccaaggcgaggaggtcgggtccaggtgtagagggttgctgaacgggtggcgggaacggagtccctggaacgctgcttctcgtgagacacagacttcgccccgccatcttcggcgactgcccc

SEQ ID NO: 438415 - DNA, 773 bp, Homo Sapiens
aaggcaagttggaagtcatccatgatgaatgctatgtcacggtcatagcctcgagtccgtgattcttccctcatgtgttgctgaacttcaggcaatgagtggcttgatccaaactgatccctggtgtctgcagatattggtggcaggggtccagctgcagccctggccattcccattggctggccaacaggactgagtgggctttcttcttcagaattctgggccacaattggtattcttcctctactttgactaattggcaaactggtcggcttagttctggcagaggatgatgcatgactaaaggaaacatctagagcttcagcctcttgagctttcagtcttagggaagagctagaagaatcccttttaattgataaatcaagcccatagacagaggaaggtctggaggaaggtctggacctgctgccactactgtatggcttatccgcttcatcctgcagagctgagcgtatggtatttcctaatgtgcccagtcctgtgccaagagaagatcccataaatttttgttggtctgtaatattttttctgaggccaaaagtgatgtcatcttgaaggagccttgccctggaggaaatgccaccaatagatgaagtgctagaagtcatatagcttgaataatcaggttcaaggtctctactttcttgaataggtgaaaattttgacattttagggtcaattagtgatttcttatgctttgactgcttttgataaagtatggctgctggcagttgttttgctgcttgtttttc

SEQ ID NO: 438416 - DNA, 1095 bp, Homo Sapiens
  misc_feature (25)..(25): n is a, c, g, or t
  misc_feature (832)..(832): n is a, c, g, or t
ggtccggaattctccggatcgggcngctgctttcgccccctaacccgaacactgtttggcttccaatcactagtacagcgagagtgggtggcagctggacatcccttcctgactcggcttgggggaactggggccagtgaagaggtgagaatgattcgggatggcatcgggggcatattactaaggaagtaagagaatgagaaattattttgtataatccattggaggtgaatccggtcagaagggccccgaggttaggctgggacgaagatcctgatgagtgaggccttacaagcccctgctaccctcaattcagattttcattccctgacttccataagttccccctattccctgtgttccccattcccttatcatctcgtcatcctccctctttgggtcccaataatcccttccaacctcttaatttcttttcaggctccggtgtttctcctcttccttgattgtgtctggcagctcctccagcagtttccagctgattttgaattctctgagtttttccttcttgctcttcatgacagtgtcagggttcctgacacccttaccttcctgaggaataccccctgggagcgcggaaagcagagcggacagttaaactcctatacacaagtctacaccccaggatactcccagcctccagctgggaactcttttaacctgcagctgtctgtctgggactgggatttacgttatagcaatgcacagatactacaattccagaatcctggctatgacccagaacactgtccagattcctggctccctagaccacaggtggaagtgtctaaacttccctaaattcccttgacgntcccacaggctcatgctactagacagtggagaagtggaagacaaaatgtcttgagttccttaaggaaagctactccactactcttctgcagctgtcccttatagcccctgggtgtcccctaggagaccgaagacctagaataccccagaaggccaccccttttggcccttcctcaaggctgggttactcatcttccctgtctcggtgcaaacataagggggccctaaaatcaccctttaatcagcccccaggacctaattgaa

SEQ ID NO: 438417 - DNA, 1613 bp, Homo Sapiens
  misc_feature (55)..(55): n is a, c, g, or t
  misc_feature (206)..(206): n is a, c, g, or t
  misc_feature (445)..(500): n is a, c, g, or t
  misc_feature (1051)..(1051): n is a, c, g, or t
  misc_feature (1463)..(1463): n is a, c, g, or t
  misc_feature (1486)..(1486): n is a, c, g, or t
  misc_feature (1538)..(1538): n is a, c, g, or t
  misc_feature (1553)..(1553): n is a, c, g, or t
  misc_feature (1559)..(1559): n is a, c, g, or t
  misc_feature (1561)..(1561): n is a, c, g, or t
  misc_feature (1594)..(1594): n is a, c, g, or t
  misc_feature (1598)..(1598): n is a, c, g, or t
  misc_feature (1609)..(1609): n is a, c, g, or t
  misc_feature (1611)..(1611): n is a, c, g, or t
aactctctaagtgacagcaatgggccacggcataagtaggactgcaggccacgtnaaagggcctgggacacgccatattcatcatcgacatcttgcttggcattctcaatgatgtgccgcgcgtccaccttagagacgtcatcgctgtctggatctggaatcttcttcttctcctccacgggcagggtgggaggctgtgctgcctntgcggctgctcttcctcctcctcctcttcctcttcttctgagccactttcttcactatcagacctcggagctacttcataccccgggttcatctcgagccaggcctccagctgcccggctttgggggcatctgtgcctgtgaggatcttcccactctccacgtggatcaccttcaccgggagtgcgctcatctggctggtctcgtccagaggctcgccatccggcccaatggcaggcgnnnnnnnnnnnnnnnnnnnnnnnnnnnnnnnnnnnnnnnnnnnnnnnnnnnnnnnnggcagacactgggcagccttgtgctgccgcaccagctccgtgaggttagccacgtactcgtctgtctgctgcaagaggtaggccaggcgcttgtccttcttctggtcgatgagcttgcggtacccctcctcatcttcagccatgagcctccgcatgcgctccttctcgatccgctcgttctctttcttctgctcccgctccgtgttggcgtggtacgtggccactgccttggtcagcttctggattttgcctgtgacggatctgtgatattccttgaaatccttggcatgctggagaatgctattgaggtattcctggtgcttctgccggcgcttgcgctcctgctcgatcttctgctgcttctccagcttctcagtgatgcgggcctcgcgcagggactggcgcttgctgcgcttgtaggccttagcattgagggctgtctccagcgctgtgtccctccgcatgcacaccaccacctcctggcgcagctgcctctggaagttcagcagcctgagggccttgagctcaatggtcgctttggttcgcaaatncccggccagggacccgggaaggttttcaagttcctgaattcggtgtgcgatgcgagcctgcagcctgtactcgcgctcctgcaggatctccacagggtcgaggccccgcggcttctggatgggggtgatgcggctctgcttctggtgcagtggcaccatgggcgcgggctgggccggctgcccgggggactgggtctgcggtggcatcacgggcgaggcggcgggtgggacggcagggggcgcgggggaagggcggcccgttggctgcgggggaatcagcttctgaggggtgctcgtgggggcagcagcattcgccatgggtccttcaggccagggcttgggaggccctccaggaggctggcctggcatccggggggcacgccgaaggtcctgggggaggcatgttgggccntccataccatgaggctgctgtanttggaggtgcgggcgggaccgggccgggcaaggcaagggcagggcgggtctnttgcgacacgagggngagtancntggatttctgttcatccggcatcgcgcttcctncacncattgcagtgntngg

SEQ ID NO: 438418 - DNA, 909 bp, Homo Sapiens
  misc_feature (191)..(235): n is a, c, g, or t
tcccggaggcccaagaaggtctgcatcgtgaaggtggtggggacacggaacctgtggaagaacattgtggtcctgtgtgtgaactcgctgacggggtacgggatccaccactgctttgccaggagcatgatgggccgttagaaacatttctttgttctggaaacaaagtactgttgaaaccagcttggaannnnnnnnnnnnnnnnnnnnnnnnnnnnnnnnnnnnnnnnnnnnncttggcatcaatgaatatgcacttcagaaatctacagagaacttttttcactttgtatttgttccacagcattctagccaggagtacaaaataggagctcttcaagcagcacatgaagatggcccaggagccttcagccatccagagcagcagagcagcacctaaatctccacacacttcccagtataaccactaagaacacactagacccttggcattaggggatttatcatttccagttctattatctgggaatgactccaagggtttgtgacaagcttttgaaacgtaagtgctaagacgagtgtggacaagtcactgagctaatgaagaatagacccactgtctgcttggctctgctattttgtacctgtcttcacatgtggggaaacttcataactgtgcccacaaatcagagaaattcgcaaaggactagacaatgtattgcctgtgaacttcagaggcaactggaaatagtgcaactggaaatcaactagcttcatacataggcggatttgtttccagggaccaaaagcacagaagataagaaaacttttcaggtgatggccatattctcatcatatcctctctgtgtggagtgtgcctgttgtcacaaaaaccttgaccctacatcaagttacaccttaacaaagggaagatacaggcatcagtcc

SEQ ID NO: 438419 - DNA, 806 bp, Homo Sapiens
  misc_feature (47)..(60): n is a, c, g, or t
  misc_feature (782)..(782): n is a, c, g, or t
  misc_feature (793)..(793): n is a, c, g, or t
tgaatttttttaactaaactctatcatcattttctatgttgacatcnnnnnnnnnnnnnnaatctgtttccaactctgagtctgtgaactatctcttctgactggatgctggcctaaaatcctattagtgcttaaacagacctcgggtccttgatggcttcaacaaacaaggtcataatttgtttaaattcagtgttttctgtagataccttcttctcagtttcattaagaagagtaaccatctttggttttccaaagaatggaaactcctaccctagactttagacttagagcgtctgcctttcacgatgagtaagagatccagaatgtttaggggatgtgcgtcagcccacctggtacagtggcaaagctgaatgcgaacttgaggcctcctgaggcctgaccttctatgcccccagccctccaccccaagcaccttttggtgtggctggaaacacatgacattggatgtgatttttctcaagcccttcactgtggaaggcatgggagactgcccagcattgggcatgtggctgttaacgtttccatttcaagtccctgattcttactggagaagttaaggagccacttaatgttttcacagacctctgattctgttgtgaatgtggcattccagtgagtacaacctgcttgctattaagaaagcagcatattttgacaattttatttcttccttgggtacttacatttttattacaaaaatggccgttataaaaaaagacagaagggctgggcagtggcttgctccccaagaaaactgngaatcccgaanccaggtgtttccc

SEQ ID NO: 438420 - DNA, 871 bp, Homo Sapiens
  misc_feature (449)..(462): n is a, c, g, or t
  misc_feature (498)..(548): n is a, c, g, or t
ccaaaaagtgcttgggggtggagggctgggggccatagaaggtcaggcctcaggagggcctcaagttcgcattcagttttgcccctgtatcccgttggtctgacgcacaatcccctgtaccttttggatctcttactcatcgtgaaaggccgacgctctaagtctaaagtctagggtaggagtttcccttctttgggaaacccaagatggttactcttcttgaatgaaactgagaagaaggtatctaccggaaaccctgaatttaaaccaattatgaccttgtttgttgaagccctccaggaccccagatatatccaaggaccacatctctgtattggcctacaggttcagagtgttttgaggtctgtttaagccctaataggattttaggcccagcatcccagtcaagaagagatagttcaccagactcagagttggaaaccagattnnnnnnnnnnnnnngatgtcaacatagaaaatgatgatagagtttagttnnnnnnnnnnnnnnnnnnnnnnnnnnnnnnnnnnnnnnnnnnnnnnnnnnnagtgtttgcatagcaagacattattgcccttcagcctggcagaaaaacataaactcaggtgtatattttataataaacattgtattgaatgctaagaatgatacactgttgaacatctcctgaatggtttgccttcttgtaaatcataccaattgtttagacaattgaaattccaagctctttctcttctcccatataaaaacaacagaaacaggaggctgttagtagcaagctcctcatgggaaagggtatgtgaatccacaaagacgagaactatggcaatagcataatacacacccgctaccttactgcccaagtgctag

SEQ ID NO: 438421 - DNA, 783 bp, Homo Sapiens
acgctctccctgtggggccatggcaaagacttggccctgaagtggacagaaagaggctgtgctgagtgatgaatgagactaaacagtgttctcatgcttggtgattttgatgagaacatactacataagagttaagagcattataattccctttatcgccatataaacatgtcacttatccggaaagcatacaatttatttgtacatgagaatgtaaatttaaaaattttctgaaaactagattatttcttgagaagcggttttcaagtaaacaagaacatgccatgttaatcagcactagatctcccccaccccccacataatgtgtatgtacacatttctcaaattcagactgcagtacagctgtctccttggaggcgtcaggggttcctaagcctaaattctacctctagggtcttgatccctcaagagttcatcctgagttaaaattttgttatccccggaagcagagatgcactgactctggtgatctcagtatgaatgtgggatgaaatcttctaggtgtctttggtggggcctgagggagggtaggaaaggtgacgaggaaaaagtagagggagcctgaacaccctgggtctcaggttcggagtgaagaaatcactatggtgaaaagacaggctgtggccctagagctctgccaagtcctgatggacaacaagtcctgggcaaatcacatgccaccaacacaccttcagcttcagggtcgaatagatggtgtaagatcacagcccttttgtaaaagcagataggcactcataggtt

SEQ ID NO: 438422 - DNA, 968 bp, Homo Sapiens
  misc_feature (708)..(708): n is a, c, g, or t
  misc_feature (865)..(865): n is a, c, g, or t
  misc_feature (878)..(878): n is a, c, g, or t
  misc_feature (935)..(935): n is a, c, g, or t
  misc_feature (953)..(956): n is a, c, g, or t
  misc_feature (963)..(963): n is a, c, g, or t
tgatcccggaaaggacctgagctgggaaatagcgagaggcggggatgttggggattttaaaacttatgtagatcaggcatgtagagctgctgaggagtttgtcaatatttactatgagacaatggataaaagaagacgggcactaaccaggctgtatctggacaaggccaccttaatatggaatggaaatgctgtttcagggctggatgccctaaataatttttttgacacattgccttctagtgagttccaggtcaatatgttagattgccaaccagttcatgagcaagcaactcagtcccaaactacagttcttgttgtgaccagtggaactgtgaagtttgatggaaacaaacaacatttcttcaaccagaacttcctgctgactgctcagtccactcccaacaatactgtgtggaagattgcaagtgattgcttccgttttcaagattggtctagtagttaaaggggcaaaagtccattctcatttggtccattagttccagcaattgaaatttatgtgaattattttgattgtagaagcactataatatgtgctgaaactaaatttctttaatattttctattcctgtcagcaccttttctagcagctgccagtttggagcattgccctctaagagctttaaaactatttttttacatgccttatatacattccactaatgacattcttataataatcttccncccatgatcttggtactaacatactcactgtgaacccagcctattgcaaaaataaaatctttttataatattatctatgggatgtcagcacaatataacactctgggaagaagtggagttttttggttattaggttaattttctagtaaaacacgtngcctgttttcaantaacactggtaatgccattttatatatggctttttcaatcagttcagtgaaatagtncagatttaggttacatannnnctctgcntactg

SEQ ID NO: 438423 - DNA, 718 bp, Homo Sapiens
gcagctgctagaaaaggtgctgacaggaatagaaaatattaaagaaatttagtttcagcacatattatagtgcttctacaatctaaataattcacataaatttcaattgctggaactaatggaccaaatgagaatggacttttgcccctttaactactagaccaatcttgaaaacggaagcaatcacttgcaatcttccacacagtattgttgggagtggactgagcagtcagcaggaagttctggttgaagaaatgttgtttgtttccatcaaacttcacagttccactggtcacaacaagaactgtagtttgggactgagttgcttgctcatgaactggttggcaatctaacatattgacctggaactcactagaaggcaatgtgtcaaaaaaattatttagggcatccagccctgaaacagcatttccattccatattaaggtggccttgtccagatacagcctggttagtgcccgtcttcttttatccattgtctcatagtaaatattgacaaactcctcagcagctctacatgcctgatctacataagttttaaaatccagagacgtggccatctgggaccttgtagcagtgtgttctggcagtgtcggcgtcactacctcctcacgtgtccggtccgcagggcttgagtggctggtgtgtggcccctcataatagttacttcttctttggtatccttctctgtctccctgag

SEQ ID NO: 438424 - DNA, 794 bp, Homo Sapiens
catatgttaaacatcagcttctatgggatacatttccagaatggttgtgttaccactttataaacattctaggccaaacaaagagcacaaataacatcaatgttgtcttttttccaatatctgtatcaattaccagagggtaatcctaaccatatatactagcttaggggggaaaaagaagagaatttatgacacattgcaaagatagaactacagcatcttagttgtagagatgatcttaaggtgcagaaagaggggactctctagaaggtgatggtgtggtttcttctggtggaaaaactgtgagtgtgcaagcacgaatgccaccaagggattctggcagatcaaaaaccttatgccattcatctttatctggatcatatttctgcactatctctaccatacaacgattattccaagaataccccccaaccacatagattttattttcgaagacagcgaccccaacatcactctgccctcttaacatggcagcaattggggtccactggtcaaggataggtgaatagtattcacagcttaggacatcatcataatcacttgttcctctgaagtgattgccaccaatgacatagagcctttctcccactgtacacatgcaatgcagacctctgacagtggtcattggcgccttctggatccatttgtcagtatcagggtcaaagcacatgagctccttttggaaagtatcatgagtaattcctcctgaaatatacatcactcctccatcctgtgccgattaccacgagctcgacctaccgaatgttttcata

SEQ ID NO: 438425 - DNA, 1159 bp, Homo Sapiens
  misc_feature (63)..(63): n is a, c, g, or t
  misc_feature (597)..(625): n is a, c, g, or t
  misc_feature (699)..(993): n is a, c, g, or t
tgggggaagagtgagaccgtcttaaaacaagcaaacaaaaaaccatcaaggaatagtcatganaacatgttcatattgagacatggaggtaaatacaaacaaatcagccaagagttggacagactactgtgaggcaaggaaagtggggtaaaggcagggtaggagggctactgtttttcataataaaccttatggaacaacttgttttcaatctgcgtcaactgattttcccccctaagatgcaggatataaaactgtttaccaagctacatattttaggttgatcccccttcacttttcagaatctgggtagggttatagccagtttccattgcgtggagaatctgcaaggctggtgttcctgtacgggtccagagtgaactacatcaaaagtcgcttttgatatcgaggatgcagttcactactattaagtgtaatgtgttattactcaaagtaagtactgtttactgtaaaagtatgatgaattcagtaatgattatactaaaataacatactagtacagggtcaaaatacggctttaggtctacttaagatagaatacttaagaattacttatctggggaccagggaattgtnnnnnnnnnnnnnnnnnnnnnnnnnnnnnaggtgtgcggcttgcagtcttcatttctaataagatccttagttgatgttgaaaaccactgctttcatttgttnnnnnnnnnnnnnnnnnnnnnnnnnnnnnnnnnnnnnnnnnnnnnnnnnnnnnnnnnnnnnnnnnnnnnnnnnnnnnnnnnnnnnnnnnnnnnnnnnnnnnnnnnnnnnnnnnnnnnnnnnnnnnnnnnnnnnnnnnnnnnnnnnnnnnnnnnnnnnnnnnnnnnnnnnnnnnnnnnnnnnnnnnnnnnnnnnnnnnnnnnnnnnnnnnnnnnnnnnnnnnnnnnnnnnnnnnnnnnnnnnnnnnnnnnnnnnnnnnnnnnnnnnnnnnnnnnnnnnnnnnnnnnnnnnnnnnnntgaagccctattttaaacgtctattgtatctgaccaactcactgatgcttattcctcagataccagctctgtaacctccaggtagtatcataagacaagcttattagaacctcattaattgatgccaggttaactaatgatccctacactccagaccgtaccagcc

SEQ ID NO: 438426 - DNA, 450 bp, Homo Sapiens
  misc_feature (139)..(258): n is a, c, g, or t
ttatttttaaaaagtttaatcacatcttaataatttgacactgaatatgatctaaccagaattacaatatcagggagatgggtgagaggaagtaaattcatggtgggcaggaggaagagaggattcaaaagataatggnnnnnnnnnnnnnnnnnnnnnnnnnnnnnnnnnnnnnnnnnnnnnnnnnnnnnnnnnnnnnnnnnnnnnnnnnnnnnnnnnnnnnnnnnnnnnnnnnnnnnnnnnnnnnnnnnnnnnnnntggggcaccatgtttggcctgaagccctattttaaacgtctattgtatctgaccaactcactgatgcttattcctcagaataccagctctgtaacctccaggtagtatcataagacaaagcttattagaacctcattaattgatgccaggttaactaatgtgctggattttttcccctcctctttcattact

SEQ ID NO: 438427 - DNA, 1205 bp, Homo Sapiens
  misc_feature (533)..(541): n is a, c, g, or t
  misc_feature (792)..(874): n is a, c, g, or t
  misc_feature (1037)..(1147): n is a, c, g, or t
cttgtcccacgcgcggcggcgtaaagcttttgctttgtgggggagggcggtgtttttctaggggagtattcctagggcgcgtgtagtcttatgtgtcgtagagaggccggatagcggcgcgatatgtcgttagcgcgcaggcggataacgagcgttacaggggattagaattcgggctcgcgtgtctgaggagacaacatgcagattgaacagtggaggaacgggtatgaggtaagcacccgggcgtagaatattaggggggagtgcggaattttgtcatacagtatatagacgggggcggagaggggtatggggattgttatgggtacgaggcccgagcgggggcacacgcgtatgcggagaaatcgcgggtcggccgcttagagtggatcactcgcgggggccgggacggaatgatagtgcgttgggcggggggtgttatctcagtaatgggcaatggtgctttcgattcggtttcagtggggggttttcggctccggggttttttccccggtgggggagggcagaaaaannnnnnnnntttcggctttggggtggcggtagttttcgttggagagtgtgtggcccgggtttggcgtcgcccaaagaaaggaaagggtctctcctcgcaaaattcgcagaggttaggtttgttttccccgtcggggggttggtaaaaaagggcccaatccctcgggttttaatcgggcccctttagggggcccctttttccaaaaaagcggggtcggggaaatctgggccccccggggggtttttttaaaaggccccccnnnnnnnnnnnnnnnnnnnnnnnnnnnnnnnnnnnnnnnnnnnnnnnnnnnnnnnnnnnnnnnnnnnnnnnnnnnnnnnnnnnggtatttttaaaaagtttaatcacatcttaataatttgacactgaatatgatctaaccagaatttcaatatcagggagatgggtgagaggaagtaaattcatggtgggcaggaggaagagaggattcaaaagataatggtggccgggtgcagtggctcacacnnnnnnnnnnnnnnnnnnnnnnnnnnnnnnnnnnnnnnnnnnnnnnnnnnnnnnnnnnnnnnnnnnnnnnnnnnnnnnnnnnnnnnnnnnnnnnnnnnnnnnnnnnnnnnnccatggtggtgtgcaccagtatttctagctactcaggaggctgaggactacaggtgtg

SEQ ID NO: 438428 - DNA, 793 bp, Homo Sapiens
  misc_feature (495)..(532): n is a, c, g, or t
  misc_feature (734)..(734): n is a, c, g, or t
gcggccgcagacagacgcgcctctagcatagccgcgctgaggctcaaggccaaggagcacgcggcgcaggtcacgcagctcaacatcctgccgggcaccagcacgggcaaggaggtgtgctaaaggctgccctccacacccgcgccccgcgcgcgcctcgaaaggtcacctcactcagcaccactcaagaccaaatggaaacagaggaccagcacactcccgagacggcactgagagagcgcagccgccttcacagcagtctggatgcgggcatggcagccctcggcgctccgggacgtggcacctcctcggctggctgtccacccgcccctgcccctgcccctgctactgccaacctcgctccaactccaacatccactctctcttgttcttactttcctgaaaatatcggggaggttttctcccccagacgcctgatattgaagtaaaaaatttaaaaagcccaacctcttcctcctgacaccccacttagcnnnnnnnnnnnnnnnnnnnnnnnnnnnnnnnnnnnnnnaaatagcattttggcgctcgaagttgatctccccagcgagggccccagcgtgaagccagggcccgggaagcaaatgcgagcctgtaagatagctaacagtgcacttaaaggagaggggcgtcttgttctctgttctcttctttatcatacaccaaccaaggtttttatatcacaccacaagggaaataatactctgctaganatatggactgttgaagtcaccacactgtgattattgattctgtacataccattgttatt

SEQ ID NO: 438429 - DNA, 660 bp, Homo Sapiens
  misc_feature (107)..(107): n is a, c, g, or t
  misc_feature (122)..(122): n is a, c, g, or t
aacccaattgctaacctgggaattcattgcgaaaaaatccaaaggtctagggtcatcacaagaccagcttgtaagagctgctcgatcctatcttatcaatcagtganttagtatgaggttanaatcaaggcatttttggaatgtaagatttcagaaataaggcagcccagatgataaatggaaccattagcaagtttactattaagaaagaactgaaagttctctacttacccaatctttctggttgagtttagctgcttcattatatacttcaatggcagctttatgttttcccaaaagaaataaagatctggccacctgcttgaggttatcagcactctgaggactaagaactgcacatgtctggaagagttctagggattcttggatatttccttctaggcgaaatatcaatgcttggacatagatagcatattcacacaatccctgagtctcttgaagctgttctttgataacagccttgcaggcttcataatctttccggatataatgaagatgaatcaaccagttctgcttctccaaaataggaaactctggagcttttttctgccggggtttttgagactcagtagatacaggaaattgagttctcgtcgcgactctctcctcagccattttagctcagctcgtgccgaattc

SEQ ID NO: 438430 - DNA, 1129 bp, Homo Sapiens
  misc_feature (278)..(278): n is a, c, g, or t
cggtgactgcttctgcgtaggctctcttggcaatttttcaatatcttccaagattggtcagagcccactgccaaagagcatgtagagctccccccatctttggctggaagttgatggccgcactgagaaaatgaaaagctgatgcatactgctgcatggtcaaatggacaaggcccaaattatacagaatcttccaatcgaagggtgccaagtagttggctcgtttcaggcagctgatggccgccacatagttcttcttgccaaagaaacacattccnatgttattccagagtggaggactttctggaacagcacaagccacaactctgtatttggtgagggccacatcgaagtccccgtggttctgcatcatgctgcctgctgccaagatggccttgtagttggtagggtcataagtcagtgcattgccaagatgttcaaatgccttctggtaaatgccgagctgtaagtagagtaatcctaaagttgtaagaagctctgtattttctggtgagaactccactgctttcttgtagacttcaatggccttgtccaagtctccctccagcaagtggatcttccccagcattatataagtcagatcgtgcctattaagattcagggcattgtgcaactggtcttgtgccttgttgaactgcttcaggtatatgtagcaaactcctaggttatggctgatctcccaatctttctggttgagtttagctgcttcattatatacttcaatggcagctttatgttttcccaaaagaaataaagatctggccacctgcttgaggttatcagcactctgaggactaagaactgcacatgtctggaagagttctagggattcttggatatttccttctaggcgaaatatcaatgcttggacatagatagcatattcacacaatccctgagtctcttgaagctgttctttgataacagccttgcaggcttcataatctttccggatataatgaagatgaatcaaccagttctgcttctccaaaataggaaactctggagcttttttctgccggggtttttgagactcagtagatacaggaaattgagttctcgtcgcgactctctcctcagccattttagctcagcccaccactgcccc

SEQ ID NO: 438431 - DNA, 420 bp, Homo Sapiens
agtagttgtgtcagcagtacaaacaaccaatcttgaagatcatctttgtggacttgtatgaaatccgctagagtctccaaaaacatgctgaataccttgccatgagggtcagcaaacattcttgtgaaaatttcacataatcttttcagttcaactcgacttagtgttctctgattttttaataagttctgcagacctaggaggccttctttcctttctgaccaattggaactagcacatctattgaggacttctgccacatcttccgtctgcctcatatatgtaggaatactaccatttcgagaactataggagcgttctgaacaagcactagatgcatcgctgttggcgtcatcatctgaatgcattccatatgattcatatcttcttcgagctggctttttcttagtccgtatgtct

SEQ ID NO: 438432 - DNA, 410 bp, Homo Sapiens
gggggcgggaagattttactcccgagtagcggaaagatctgctcgaggcctgggtgctttggtgtcggagatccgagagtcggagatcggagagtcggacacaggacagtcggacaccggacggtcaaacaccggagagttagactgggcttctcggtggggagaggctctgggataactactgttacagctttgaagggtcaagggaggattggccaccaaagcctgtttattagcagctgccatttgttgaaagaaatttggattattttagaaacaaatttggaaagaaaaagaatggcgtccgtttcagctctaactgaggaactggattctataaccagtgagctacatgcagtagaaattcaaattcaagaacttacggaaaggcaacaagagcttattcagaa

SEQ ID NO: 438433 - DNA, 2555 bp, Homo Sapiens
  misc_feature (2158)..(2158): n is a, c, g, or t
tggttccatatgattgtaggacttggtgtgttagaattggtgaacttgactttaagaaaatctcttactttttcttcgacttccttaggcctagacttgttccaagtgtctcttcctcccaataagacagtcaggactaaggctacatctttggaaggctgcgttttcatggtcacaatatttgtagaagatcaaagtagagcctgcgggaaatgactcaaagcggtgtaccacagctgcattctggccattcttaaatccattgctcagttcttggtctacctctagtttgacagtatcactgtcttgagtagctttatctgtcccatcaatccggatggcacggacactacgaaaagaagaataggcatcagcaatttgttcactcagacacctaagtgcttcttcagcatctcgggcagcagtgagcagtaagatagcaggctgagaccgaggatgggagctattaagatgtttttccaggaatgtttggctccttttccacagcttctcatcttgaccttggtacttattcttaagttgattcatctggttctggaactcttgaacagcagtggtttctacctcaggagtactaaagaaccattaactcccagaggcaagagcagctatcagaggaagtagccaccaccggttcctcttgacaaaagatgcattttggggttgtccagtcacttgtcggctggaggttgatggtgactggtttccaagctctgatttcagaatgctgtcattttgcatcctggtccttattcttgcagtttgtggggcccattcctggggagttttttgatatcctgagcttagcactgaacgttgcttatcatgagctgtgaagttttgactttgtgatgactgccaaaatgattctatatattgactagatgatctggtggttttatctccagattcatcagaatccctggatctggccttaacagtagtgacactgctgtgagagctgtcttgatcatcttcttcagtttctccttcttcagagaaattgaccttctgttggacactggtggcttcatatcttgggtatcttagagggggtcgacgtaacctgattacaagatcttcactcactggagcctcttgtatgctcctgacagttttctttgagatcgtttggcttaaatcagtttgggaagatgcttcatcctcttcagaggaatgagagtcccgcagccctctcctggtcgtaacaggagacggctgtagcggaggctgctctgagtgctgctgctgaaggcgggtagtccttcgcgtcttcatttcctcggtttcctggggtcgcggctgcctccgctgcctagaccgaaggtagtacgcgctttctctcacttcctctttcgcagaatcggaccggaactcttctagccgggttcgttttcccaccggggacctttctttggccaccaggggctcgaagtcgccgtacacttctggcggctcgtccgagaacctcacttcccgccggccctggcgcgacggaggagttctgtacgcaggcgcatcgctgctgccgccattttgaggggcgagccggccccttccctctcggatgggggccctgggggtgacgtacacaccccatccttcccgcaccgcctctgcccgccgcccgtcgcccgccatagttgttgacgtagctttagtcgatcgcgaagatggctttatggaccctaggttctcctgccggtggtggcgatggcttctcgggggtgttgggcggtggccgctgtggtcagggaggcagttgcgagtcgctggggccgccgcctgcgtcgtcgctgctgtgtagcaaacctgcctctgggcccatggtgtgtcttgagggctgtgagagaggcagtgcctgagctgggtcagctgctgtggatcgctcccgcctcctggctggaggcaccaaagaggaggagaagggggaggaggacgtctctgccatcgcccttaagtaaaggaggggtgggggcgatagaaggatggcagggcaacttgcctgtcctaagtctagccgctcgtggcaagtgttgactgcgtgtaggagactcccgtcctatctcccagtaccaagtctcggggaaaaggagtgcgacgagggtggagaagaccaagtttcgcttctcggccncaggctgttgcgcagtttccctggaatctttttgatcgactgctacgttgaccatgtccttcccagtgtccttagcaggagtgatggccagagagagaacttttgcacatgccatgttttcgtggcaaaaattttagtttcaagtaccttatgagggcggttacctagttttgaattttgtcacttgttgagggtgtacaaaatcctatctagagtcatactcgttggatgtattttcttttccgaaatgtacccataggacacataaccttattcctggtctttaatatttctcggttttataccaagcagcagtgttcggaagaccatgttagtgctacattgtgcacagtgagaaatgaacaagttttttaattaaagacagcactgtaatttt

SEQ ID NO: 438434 - DNA, 627 bp, Homo Sapiens
  misc_feature (572)..(572): n is a, c, g, or t
  misc_feature (588)..(588): n is a, c, g, or t
  misc_feature (608)..(608): n is a, c, g, or t
actcacacaattttgaagaatgtatttaccatctggttccctatggccctcaaccattttcacatgcttatctcaagtcagattccaaagtatgcggagggcagctgctaatgacatatttgttagttttaattttattctgcagacattatgcagttctataatataaaatgaatacaatactaaaatctatttcctttatttacatggtgtaacatttccaataacaaacatttctaatcatgaaagatggtgttaaagcagaaatattgtcatgattgagtcaatgggagaacataaaatatgctgtatttcataatttttccgtaagaaaatgtctagtttgtttaaatgcaacaaatactgtattagattcactttataagccatacactccttcttgtctttcttttgaacacattctggaaggcagctgtgaagaacggagtagcgagtccacgccattcaacatccatcagaaaccctattttaatcatcttggggatcgattatcttcaatggataatggttcttctggggatagggattcaatttctacaaattatttcggnaaatcctattcaccantccggggggttctctttcantggcggcttacaccgttcc

SEQ ID NO: 438435 - DNA, 1370 bp, Homo Sapiens
tttttcgcaatactaaaatctatttcctttatttacatggtgtaacatttccaataacaaacatttctaatcatgaaagatggtgttaaagcagaaatattgtcatgattgagtcaatgggagaacataaaatatgctgtatttcataatttttccgtaagaaaatgtctagtttgtttaaatgcaacaaatactgtattagattcactttataagccatacactccttcttgtctttcttttgaacacattctggaaggcagctgtgaagaacggagtagcgagtccacgccattcaacatccatcagaaacctgcttgcttgattattttaatcatcttgggatcgattatcttcaatgataatagttcttctaggataagattcaatttctacaaatatatatcgaaaatcatattcaccacttcctgggttctctttcacttgcgcatacaccgttccttgcttccctggctcagagccctcaatgtagaatttcaccacgcgtgtgtttcagcccatcttttacatattcagtgaacctgacatgctgccggcgaccccgccttgtcacctccccatagcctttaacagactcaccataagacaccgatcacctcaggatgtgatctgcatttttctaaggctctcccatatatcttgctaggactggatgaagaaaaaagttctttgaaaatcgtgtaaaacaagccacctgtaatgctgattccaaaaagcaccactattaaataggtaaaatctcttccggcttctttcactttttgtgatgttgggacggcggttccccctctctgactcctgtgcacagacacttgtttgctgccatcctcctttgcttttcgggggctcggtccctgcgtccagatggttttctgggtgactccaagaatacatctaggtcgcagcgttttcttttgatattgaagcccacatctcaaactgggctcagtcttcaagcacgctttgttaagcacgatgtatggcaaaagcaatcgctttgccgaggacctgtgcagcttctccgtatactgtacggctcgtagaaaagtacaaatcatgttcacggaaaatcgttccgcttagggacgatgctaactacaattaggaaagctttagggttcactacacatgcggccggacacgtactcaagcctatacgtttacattacatggggtgttaggcaaaaacgtcagtttccgcagcgtaaatgaaaacgaaaagtctccagggagaacctgatgtctaccttcccttctgtcttctttccattttaattaacaggctctgatcaccttctgggctgacattcacagtgtccccgccatgccttcgcaaagtcacctccgct

SEQ ID NO: 438436 - DNA, 527 bp, Homo Sapiens
caggctgacggcgaatccgggaatgtgtatgaagatgtagcacattaagtctcagtagtgactctggttgttaatattgtagtgtaagtgtaatataccttattaaattataaggcatctttttatcctttcttgtgttgtaaaatggatatagacagatggtaataactaatccttcaaaagataagttacaatgttttggtaaaattttcaaatgtcagtcaagttttgcattagggacagcatttatatatagcaaaacgcctgagctgttgtttaaacagctaaaaacagtagtatttattacaatctccacaatgaaaacaaatagtgcaatgtaagaaatattatgtatcttactgtctgatgtgtgagcaggggagcagagctatctgcgattggttatttcgctgtgagagtcctaatatgttcttcaccaacttttatcttcctcatagaagcaacataggcatagttaagggtgtggactctgggctcctgctgccttgggccccgattccagcatg

SEQ ID NO: 438437 - DNA, 873 bp, Homo Sapiens
  misc_feature (11)..(11): n is a, c, g, or t
cggttctttgnctaggccctgagggctgaatcccactgggcatactgtgtgagaggtcaaggttcagtggtgctctcagcagcagccgggaggtgtgattctgaggctgggtgacttgtgcttcaggagaagcaggaaagggccctctaggtgtgctgcagtctctcagaaagagttcatcaaagtagcgagcaacgaaagaaacctggtcttctttgatcggttttctgttattttcactggtccacctgctcctgctgaattgctgtcattcatttttctgttgagttttgtcattatatctcgtgcaagtgtaaaaaatgcctcttctacatttgcactggattttgcgcttgtctccaagaatttaatcccatagtcaattgctagcttctcccctctttcttttgacacttgtcttttgtcattcatatcacatttgttacccaggatcattctttcgacatcggaagaggcatgctcttcaatgtttctgatccaatttttaatattgtcaaaggatttttcatttgtgatgtcatagaccagcataatgcccatggctcctctgtagtacgctgtcgtgattgttcggaatctttcctgacccgctgtgtcccatatctgaagcttaattttctttccatctagttctatcgttctaattttaaaatcaattccgatggtggagatgaaggtggtgttgaaggcgtcctctgagaagcggaacaggaggcaggtcttgcctacccccgagtcgccgatcagcaggagcttgaagagataatcgtacgtcttcgccatcttctcgctccggccctctgaccggggagccagaggaggcggtggagagaggcggggagggggcccgct

SEQ ID NO: 438438 - DNA, 997 bp, Homo Sapiens
gcatgggttaaggccccaccaggaactgaaagcgcaaaaagggtcagcggtcttcatctagaatttcttggatgttcccttccagaaaagcatcccccgatgatatggcagtgcaagggcactggctttgtccttgtccggggtcactgccatcttttttccttcccatttctgttggcagcttaatttcttttgtcatcacttcatccactttctgccatatcaacacagtccctttcctatacatcggcggctcattattatagttgatgttgaattcagaaaacaaaatctcatttttgtctgctgcaagagttcccctgtaatctcccttgggcttgtactgggtgttagtccagattgttgtataagtgcccagaaagctgtattataaagattattgatgtgacaatctgcttgtcgccagctgaggtagtcctttaaagtctggttgctgggatacaccacgactcttcggtcaaagcctgggggatacagaagggggctggtcctcaaagtaatcccgccaataaaacacatagctggaggcaaactgggaggccacgtgagtcatgaacttactggctcttcttttaaaccaattggttttccgcttgaacacaaagctgtactcatcactctgtccatacgcgatcacaatatcctctagttcttccatcacagtctgcgcacatttggtcatcagctggagagcacggctgtcattgggttttgcaaagttgtgcttctcagcaaaccgatggaaattccggccgtccagccgcactaccacccagcagtgtgccaggcaggtgtcgtcagcctcgaagtccctcacgtactcgaacttgctttttgccatggtcgcccccaatctcaggtaccgtctcagagtgatggaaatggtggccaaggaatcgtgaaccttaactttacaggcgccccacattctacacgcggaaaggaaagggccagatagccccgccccggaagtccc

SEQ ID NO: 438439 - DNA, 1322 bp, Homo Sapiens
gaaactaacattctttattttccttttattttttaaaggtcacctttacaaagtagcatttaaaaataaatccatctcacagctcaaagaaatttctgacagtactgccctcatgctggtcagccattatttactgtgtgtctgccacatgccggcacatatatatagctcttcctctcctttcctgggagcaaacccttagcgtttcttccacgtaaactttctgcgggctccctcttggcctggcttcttccgttccctcacacgtggatcagtagtaagtagtccagcttgtctcatccactcgacctcgtcctcggtgacaaagctgcacaaggcttttgccattgccagtcgtattgctccagcctgcgctgacctcccgccccctgagactgtgcaggtcacgtcgtgctttcccagccggtcaacaaagtggaaagggaacatcagctgttctctgtcctgtgtgatcgggaagtaaagctggtaatcaattccatttacttttattcttccacttccatgtttataaacaattgcttctgcttttgcagtctttcttttaccttcgcttttgctaaaggccattccttgctcatcatactgtacaggttcaatcagctgtttttttgattcaagagttacacttcttcgaaacctctgcacaaattcttcctcagcagcaccacactgcgatgtcaataacttttctagcagccgaatgaactgcatataatctagatctgacagtttttccactaacatttctttctaggttcctccttaatcagccatctgctgccaatcaacgtctcctggttaccgttttttctgggagcagacttttggcttgcgagtgactttgatgtttttctaaattgagtaacattccatatacatcctctttgtcttggaaaaatctgttcaggatgcttcattactggcctggctcgtttctcaacaaaccacttgggaaaaggtaagcatagctctgtcaatatcttcttgagtgaaagtttctggatcttctcccatcatgttggctaaatgtctctttcctatgttgaactcttcaatctgctttttaataaaatcctctgtgtaagtttcacgttttgaggtaggaacgtttttctttggtattacaaatgcagtatgtcttagccttaatatctgggatctgacatttgtttgcaactcagggccgcggttttccagaggccttgcttccgggcgaggctacccctaccccagagaagaagccggtacgaaactgctccgccgtaggacacacagggcgccgccatgttagctgtggg

SEQ ID NO: 438440 - DNA, 935 bp, Homo Sapiens
  misc_feature (111)..(111): n is a, c, g, or t
  misc_feature (847)..(883): n is a, c, g, or t
gcatcatgctgtacaggttcaatcagctgttttgtgattcaagagtacacttcttcgaacctctgcacaaattcttcctcagcagcaccacactgcgatgtcaataacttnttctaggcagccgaatgaactgcatataatctagatctgacagtttttccactaacatttcttctagttcctccttaatcagccatctgctgccaatcacgtctctggttacagttttttctgggagcagacttttggcttgcaagtgactttgatgtttttctaaattgagtaacattccatatacatcatgcattaatgaatagtatgactgtttgccagtatagaagagatagtgaaatggacggccatcttctccccactggattgctctttgtcttggaaaaatctgttcaggatgcttcattactggcctggctcgtttctcaaacaaaccacttgggaaaaggtaagcaatagctctgtcaatatcttcttgagtgaaagtttctggatcttctcccatcatgttggctaaatgtctctttcctatgttgaactcttcaatctgctttttaataaaatcctctgtgtaagtttcacgttttgaggtaggaacgtttttctttggtattacaaatgcagtatgtcttagccttaatatctgggatctgacatttgtttgcaactcaggggccgcggttttccagaggccttgcttccgggcgaggctacccctaccccagagaagaagccggtacgaaactgctccgccgtaggacacacagggcgccgccatgttagctgtgggagctccgctctcgacgaattcgagctcggccgatttggcctgatnnnnnnnnnnnnnnnnnnnnnnnnnnnnnnnnnnnnncggccgccaccgcgatgagctccgagttcgccctatagtgagtgtatcatta

SEQ ID NO: 438441 - DNA, 331 bp, Homo Sapiens
cagtacctataaatttatgaacctgcttttcttctgggcagcatgcatattaatggttcctaaaggcttctctttttatgctgcagctggactacttactactgatccacgtgtgagggaacggaagaagccaggccaagagggagcccgcagaaagtttacgtggaagaaacgctaagggtttgctcccaggaaaggagaggaagagctatatatatgtgccgacatgtggcagacacacagtaaataatggctgaccagcatgagggcagtactgtcagaaatttctttgagctgtgagatggatttatttttaaaatgctacttttgt

SEQ ID NO: 438442 - DNA, 942 bp, Homo Sapiens
  misc_feature (256)..(256): n is a, c, g, or t
tccataatgttaaacccccttcacattttcaaaatagataatttaagagtcttggcttcgttttaatattgccagcaactggtatcagtggcccgtcaaatcttgggatgtctcaacttgcaaagcaccataagtgctcatcatatgtcatctcaaaagatttcacagtctgtcaacactttcgtggcatggcaaataagcatgttttcttcaagcgggcatcttgatgcagtcttacatcaaggtgcacgagacnaatcggctcataaatggtgcgggcccgatccacctctttgtatctcagctcaaagttgatgtaggagtgctaggcttgctcctcaggttgccactccatccagcgctcaaacacctgccgggcaccggcaacgtttcccaacatttcctccatgtacgtgtacttgtaccagaactgattaactcgaggcagcgttgttatggcccggtcccagatatttcgagcatggttgacttggcgattcttcatttccatttctgcgtatttcagccagagtgtaatatttcggtagtgtacatctaaagcacgctcgtatatggatcgagccctttgaatctcctttaggctttcttcccattgtgcgtattttatccagttactaatcacagtcctgttttttcttatattatcttcaaaagtcttccttttccttagtttataatcatttaattcttcttcatctgtgatcttctgttgaggtggaggtggaagaagctcaagttctctttctttagcctctcttaagagttgttcagcagttatctgtacctcagccggggctttgtttttcaccttggccactttgggaatccgctgcttcccggccgcggtggaggccgccatgtctgcagcagtcgacctctggacacctgtccccggcacggacgctagaaatcggctgtgag

SEQ ID NO: 438443 - DNA, 2080 bp, Homo Sapiens
cccaggcctgcattcaggcccccttctccaatttgggccccttcctcctcttcctggccttttctccggcccgagagtttggtctactctctcccttatctgaaagctgttcccaaattccttcttcaaaaacttcgccaaagattcccggcagcataagtcctctcttcccttttctttcacagtttggcatggttttgttagcttcttcataaatttgtttgcatttagtcaaacttccttcttttcgtgaagacaactcaaactggagcaaagctgatccatcccttgacatgctgcgtccgttgaagcaaccgccggtaaaggtttcgtgttctttctgtttcttcctgctcaatttcaaaatcaatatatgatttccaaagcacctctggcatgtctaaacgtggctgactgatggctaattcatagattgcccgtgctctgtcaatatcaccaaggattgtctctaattcagcgaatttaatccatgaggtacaattttcaggtccaaattccaggaacttttcataaaagcttccggcatctgtcaaattctcgaagctgtagctccaattctatgtaaactttaaataatttgttctttggacatttgcctatggaagttcccaatgctcttctggctaatgacagattcttctgtcgtatttcaaactgtgcatacagtatccacattttggcaaatgtgaactttttgtgaggaattagttccaaagaggcttgatacacctgtcttgtcctctcaggatcctttgcctccaattcttcatagagtgcatagttgatccaaagataaatgtagcgcttccagtgcctcttctcctgaatgggtgggacattggcaatggccctttcatagacgtctctcacggcttcagcttctgcgtcactttcataccaagcgcaagtaatccaaaccatgcatcataattgtgtggattcgccttcacttcttcttcgtactggaatctccgtttgctcacaatgatatcttcaataccccgcctatcaccaaacttcttctcaaagatggtataatttttaaagagttcttgggcatcttgttttgaaattctgtccaagggcatacttgtaaatcacttgtaccctttcaaactttttctgattttcttcaaacttggcaaaggcaacataaaggtgctcatccatatgttcatctccaaagaattccacaggtctctcatacactttccgtgcatgggcaaaataagcatgtttttcttcaaagcgggcatacttgatccagttcttaacatcagggtgcacgaggacaaatcgctcataaatggtgcgggcccgatccacctctttgtatctcagctcaaagttgatgtaggagtgccaggcttgctcctcaggctgccactccatccagcgctcaaacacctgccgggcaccggcaacgtttcccaacatttcctccatgtacgtgtacttgtaccagaactgattaactcgaggcagcgttgttatggcccggtcccagatatttcgagcatggttgacttggcgattcttcatttccatttctgcgtatttcagccagagtgtaatatttcggtagtctacatctaaagcacgctcgtatatggatcgagccctttgaatctcctttaggctttcttcccattgtgcgtattttatccagttactaatcacagtcctgttttttcttatattatcttcaaaagtcttccttttccttagtttataatcatttaattcttcttcatctgtgatcttctgttgaggtggaggtggaagaagctcaagttctctttctttagcctctcttaagagttgttcagcagttatctgtacctcagccggggctttgtttttcaccttggccactttgggaatccgctgcttcccggccgcggtggaggccgccatgtctgcagcagtcgacctctggacacctgtccccggcacggacgctagaaatcggctctgagagctcaccgaaaccacaaagctttcagaaaacaaacaggatctcggaaccggaagcggaacttgcaggactgactccgct

SEQ ID NO: 438444 - DNA, 1530 bp, Homo Sapiens
  misc_feature (166)..(166): n is a, c, g, or t
  misc_feature (528)..(528): n is a, c, g, or t
ggactgattacctctggctcacctggccaggttctgttccaggtacagtcaggtctgggatggatctaggtcttggctgtccggtgcctgatatacgatctcagggacatccagaatgttgccaaataaacaagtttacggtggccccgtttaggcttggaatagnctgtggttgcggcgatcctagcttctatttcagacatgtcagcactcatcctcttgccctcagaggttgggggcaagctctccacactgctcccactcaacaattttgattctaagcgcttaatagtatcatttgtggcaggaacttgctccatattagtgtcacttttgttactcgtatttgtagaagcaatgtccatgaatgagcctgtactggtggcagagttgctctgtccttcatctgaatactgacaaggatactgtaatggctcatctgctcctggaaagtaccgcatcaagtgagtcattattttcaccatttccctccattgaagggcgctgggaaaggatctttagcccaancaaggagtcatcaggcttttcaatgggcttaggtaaattttttatacagtggtggtcgagtaccattatgaccagcccacatgattcggaaagctggggccacccatctcatcaaagggttttccgacgcgttatcacttcccaaagaataataccccagctgaagacgtcacatttttcactgtaattactaccttcaaaaacttccaggtgcccatccaagcagcactccccttgtttattggtcatgtgtgtctgaatgtcacaggctgtaccaaaatcacaaatttttagaactgtcccccctgcaaccagcagtaagtttggtggtttcaggtcccctgtgaattagcgctttggggttgcatgctgtgaagataagccactccttgggaacactgtaaacaccaactcattgcgtgggcagcagtataatatggcaatggttcagcaccatgcagcacattatataaagagcccccttcagcatattccatcacaagacacactggattcaagcaggctccataaagctttacaatattaggatggttcacacgggataactgccgaagctctacaataaacgctttcctctcagattcactttctatttgtttaatagcaacatcttttgctctccacttagctttgcaaacaactccaaaggctcctcttccaacaacctcttccacctcgatctccttgtagtcgatctcttcaaagttgaggacctgggaaggggcttcgatcatctcaccggccgaagacgaggaggaggaggaggcggcagaggctgtagacatgatccctcgcggcgcccggtggggccgggaacggtgccacccggacaatccgggtgagacccgcgcccacccgcctccggaccgaccctcagcctggagccgcgcagtcctactacccggcgatccgtggcgggggtagaggcagcggccacagccgtaaccggctctggctccgctgcgatccggagaattccgg

SEQ ID NO: 438445 - DNA, 822 bp, Homo Sapiens
tttcacggtaatattacctgtcgaaaacttcaggggccaatccaagcagcactccccttgtattggtcaatgtgtgtctgaatgtcacaggctgtacccaaaatcacgaatttttagaactgtgcccccctgcaaccagcagtaagtttggtggtttcaggtccctgtgaatttagcgctttgggttgcatgctgtgaagataagccactccttggggaacactgtaaacaccaactcattgcgtgggcagcagtataatatggcaatggttcagcaccatgcagcactgcgaaagaaaggcacaaacattatataaagagcccccttcagcatattccatcacaagacacactggattcaagcaggctccataaagctttacaatattaggatggttcacacgggataactgccgaagctctacaataaacgctttcctctcagattcactttctatttgtttaatagcaacatcttttgctctccacttagctttgcaaacaactccaaaggctcctcttccaacaacctcttccacctcgatctccttgtagtcgatctcttcaaagttgaggacctgggaaggggcttcgatcatctcaccggccgaagacgaggaggaggaggaggcggcagaggctgtagacatgatccctcgcggcgcccggtggggccgggaacggtgccacccggacaatccgggtgagacccgcgcccacccgcctccggaccgaccctcagcctggagccgcgcagtcctactacccggcgatcagtggcgggggtagaggcagcggcacacagccgtgtccggctctggc

SEQ ID NO: 438446 - DNA, 492 bp, Homo Sapiens
  misc_feature (21)..(21): n is a, c, g, or t
  misc_feature (32)..(32): n is a, c, g, or t
  misc_feature (48)..(48): n is a, c, g, or t
  misc_feature (131)..(131): n is a, c, g, or t
  misc_feature (170)..(170): n is a, c, g, or t
  misc_feature (206)..(206): n is a, c, g, or t
ccccaaggggtaacctgtggnaaatcaatcanggggtccccaaggganggaacttcgaagttggcctttttcctgaaggttgggtccctgaaggtaagtaaatcaatcctgaacaactggggaactgggangaccctaactgcctcaacctgacccaggtttctgttccnagttaacaagtccaagtcttggatggatcctacgtncttggctgtccgttgcctgtggttgcggcgatcctagcttctatttcagacatgtcagcactcatcctcttgccctcagaggttgggggcaagctctccacactgctcccacgggaggctcccaagcttaaacgtccagattcactctgttgctttgcctgatttttcaacaattttgattctaagcgcttaatagtatcatttgtggcaggaacttgctccatattagtgtcacttttgttactcgtatttgtagaagcaatgtccatgaatgagcctgtactgg

SEQ ID NO: 438447 - DNA, 947 bp, Homo Sapiens
  misc_feature (31)..(31): n is a, c, g, or t
  misc_feature (94)..(94): n is a, c, g, or t
  misc_feature (134)..(134): n is a, c, g, or t
  misc_feature (211)..(211): n is a, c, g, or t
  misc_feature (228)..(228): n is a, c, g, or t
gtgcatgcagcttttaaatgacaggcacgtnctcacaggcttctgttcagagagaacctgtgagctgtcctgtggcctttcctgtttacggtgncagccatcccaaatatgatgcccccaaattcgagtctggnctagaaggaagtgtcatacaaaggccatgccattctccctgacaaaagacatgagtttcttgcaagagtcactaagnaagttttaagaggtggnactcgaagagaggagaatgaattgggaaagccagcacgaatgtggctcttactcctctgtgaaatatttgcaggaacgagcctggagaccagcaggttcaggatggaaagctggaaagaattctttcctaaaacttaagttttagagaaaaataggcagccagtcccaaccacccaaaggcgtccaaagccatgtttgttctgggaaggccaaggcatgggaggatgttaacttgggctatcagcaggattgaagggcagggtgaccttggtacgctctcagggcctgtgtttccaagtcgacaaactgttctgagcttttccatgaaacgagtgaagcccttttcatacctccttcgtgttccagaattcttgccatcgatgttccaaaggatctgtgatagatttatgtctagccttaaatgggacgagttgtaacattcagaattattttatctttctgagacctgctattattgtgagaccctagacatgctttgctggggttagggtgagggtactcctaacgagggaaggaatcttccatttgtgcctgcccaaagcgttctagaactgaccggacctgagaggctgtctcattagaactaagagaaggtattgttgatgatgtcttatatccatggaagaattccctgggcattccctctgatgctgcctgggatacctacattgctcaaagtacagtttctttatgaatag

SEQ ID NO: 438448 - DNA, 846 bp, Homo Sapiens
ttctctgttctgttcccagtttgctggagatccttcacgacagcttcttttgatgccatcatatatggaggaaccaaattcaatattcatttcttggaagagttctctgcactgcatagtaataaagtctcccagcaagaggggatttcacaatgccttgttgaaggacatagccatcgtggactggaattgcagtggtatgagtggctccactgtccaaaatcagcccagtagaacgaccattagcaaatgctgtcaaaactgcagttttgcaaaggaagaaggcagggatgttgtagtgttcaaacattaactctgtcagtttctctctctttgctctagtattccacggtgcctctgacatgagaacaggatggagactggcttctgatttgacatgcattttgtaggtatgatccaaaatagcttggaaactatcccagtcttcaaccatcccattttttagaggtgaaatggcctccatattctccctcggaacacgcagagcattagtatctatgtagtaggtgggaccgccttgtttgcctttatcgccatctatttccattaatgtgcttccgtcatctctttctaccaccataccaatagctgtaggaaaatccaccttggggcagtcctcaccagcataaccagctctcacagtataggatccaatgtcaaaaacaagggctccaacttcatctcccccgtacacgccgccgctcatggctgctgccggcgcgactcctaccctaagggctaactggcgaagtgactgcagtggccgcgactgcgagtctcgaggagcgatagccctgactcccttaacttccaccgccacccacc

SEQ ID NO: 438449 - DNA, 1105 bp, Homo Sapiens
ccctagtgattggctgataggaggagccagcaagtgtggctgagctccggggtgtgtggacgccgctttgttgcctgagatgaagttggagcccttgtttttgacattggatcctatactgtgagagctggttatgctggtgaggactgccccaaggtggattttcctacagctattggtatggtggtagaaagagatgacggaagcacattaatggaaatagatggcgataaaggcaaacaaggcggtcccacctactacatagatactaatgctctgcgtgttccgagggagaatatggaggccatttcacctctaaaaaatgggatggttgaagactgggatagtttccaagctattttggatcatacctacaaaatgcatgtcaaatcagaagccagtctccatcctgttctcatgtcagaggcaccgtggaatactagagcaaagagagagaaactgacagagttaatgtttgaacactacaacatccctgccttcttcctttgcaaaactgcagttttgacagcatttgctaatggtcgttctactgggctgattttggacagtggagccactcataccactgcaattccagtccacgatggctatgtccttcaacaaggcattgtgaaatcccctcttgctggagactttattactatgcagtgcagagaactcttccaagaaatgaatattgaattggttcctccatatatgattgcatcgaaagaagctgttcgtgaaggatctccagcaaactggaaaagaaaagaggagttgccctcaggttaccagggtcttgggccccaatatatggggaacttggggtatcccaggagtttcaaagcttccggactttcaggtgtccgatatccactttatgatgaacaaatgggtgtccagatggccacctggtcctttataaatttccccatgggctacaattgtggattttggcgcgaaagccggttaaagatattccaaagggatttctggaccctttcccatggaaaaggggtttatcaggaaacaccaatggtagggagctccaccatgtgtgtctccaccacaacttggggaatggggtacatttggcctcaaa

SEQ ID NO: 438450 - DNA, 1364 bp, Homo Sapiens
  misc_feature (65)..(65): n is a, c, g, or t
  misc_feature (553)..(555): n is a, c, g, or t
  misc_feature (557)..(566): n is a, c, g, or t
aaatcctggatcagcctcaagcaaaagaattggtgaattgcatttaagtttgacttaacttcagnagattaaggtttccagcactcaggaaaagccatgaactctgttcttcaagtgtaccatagctacctgatttttcttcatgacaccatatctagaagacccatctaccaaatcctgtttaagtaaaatgtacaatttcccattttgaattagttggatatattgggccagctacaagactgcaagctccttgctggcagcgtcttaactcttggaaacctggaggtggattacagtgttatctgactttttagcaaggtctcaactattttaatctacacaaagactcaccttattccttgacaaacttttgcttataatcatgtttctcttccctgtgaattgaagcttaaggtatcatattccttataacagaataaaaacgttttgaagaggcccaaacaaacaaagaaaaccctagcctggttccatcacacttggaagtgcaaggatctcaactactttctttgaagttgaaataaatcttgcnnngnnnnnnnnnntacacagcaaagctaagcaaagtaagtggtctccagtgaaatacctaactgtaccttagggtctggtgccatgaaatgcatctaaataattaagtttcacatatctacagggctcaagaagggggctcatcctctgaatctgaagcaaggtgtgctattgtgggattgctgctatatacttcagcagcctgcctttagttagcagctcactgggagagtgaaatcccttaagagctgaatctccaaaaggaaaaccataaagtgactcatttctcacgagtatgactctcatataatgtataactgtgaagaatttatagactcatcagttactctcccaactgctgtacatgtacactcgttgaatgaaagatgactgtgcgctagagttcctcacacttactacagttcatagacttgctctctaatgtgaattgtatggattttctcatgactactaagagttattctctaactgaaggttttttcacatcgattacacgtatgaggttgctccccactgtgaattctctgatgttgaataaggtgagagctttgtcagaaggattttccacatttggcacatacatagggtttctctccagtgtgaattctcttgtgttggataagggataagcatgcactgaaggatttctcacactcttgcacatgtagggtttctctccagctgtgaattctctgatgttggatacattgtgaatgctgactgaacgcctgccacagtcactcggaacgcgtgggtcgacgatatcccgggaattccggaccgtaccgcct

SEQ ID NO: 438451 - DNA, 1247 bp, Homo Sapiens
  misc_feature (281)..(289): n is a, c, g, or t
  misc_feature (452)..(464): n is a, c, g, or t
  misc_feature (512)..(512): n is a, c, g, or t
  misc_feature (518)..(519): n is a, c, g, or t
agaaaaggtttcatgaccaacccgcgggtggggaatgtgttcctcatggttgcgcccgataactcacttttggggcgtgcgaccccactttttcggcgtatattacatgggccggtggcgtagggggggtatttttgataagagggtgtctttcttggggaattacccggtcggttgggattctcccgtgaatgggggtcatgggcaacttccaggtctggggaggggtttcactaaaacgagtattggtttttcccccggggcgttctttttttattgcnnnnnnnnnattccgaatgccctttagggtacccgccccccgcatttttcctttgggacaagcatcttttttggccaattgtcccctttttccccctggggcgcccccgccattccaagggcaatgggtgtgaaaaaggcttttttgatgggcaggagttcttcccgccacnnnnnnnnnnnnncaggtgtttgttttggtctcggtttttggtgtgtggggcttggtgtgngattannttttcaggcaaatatgtttaattttttaaaataactgatggcaaaataaaatatttacatcacatcatactgtgtaaacatgtaaggtctctgtacaaagaaatatacatgcaaaataatgtaaaaatttaactgaaataataaaagaaacaatacacaaataaaaattatgaggttacgaatacacatccagtttcgaatccaatttcttttaaaaagtttctgtacaattttacaagaagaaacaaacaaaaacccaacaaaagaataaataaaatacactggaagctgcaaagcttaactacgccagtttatggctcaagacccaggtgtctggctggcttgggaagcgggctggtctcttttgtagtgcagttcacacgagaaagataaaaagacatccagaaaacttcgagggtgcccagaaacccagcctccttgagttgaaaggactccccacaccagtgcgaatgctgccacagtgactcgggcattgggtaccagccgcggggcggccagtgcttaatcggcttttatttcttaccaaaagctcaaaacccagccaatttttatacagaaagttcaacgtcaaaaagtctaaaaggtagtaaatgtccagactgattttgggaaaaaaaataatactttggcattctgaataatagcataataaattttaaaacattcccctattatccagttttatattcagagtatgaaatcaatat

SEQ ID NO: 438452 - DNA, 938 bp, Homo Sapiens
  misc_feature (699)..(699): n is a, c, g, or t
  misc_feature (784)..(784): n is a, c, g, or t
  misc_feature (863)..(863): n is a, c, g, or t
  misc_feature (875)..(875): n is a, c, g, or t
  misc_feature (921)..(921): n is a, c, g, or t
attgttggaaaaaggaaatgaagcccttcgtagactatagctgttctccaggctgaagtctatggggcgagactagctgccaagtacttggataaggaactggcaggaagggtccaacagatacaattgctaggacgagatatgaagggacctgctcatgataagctttggaaccaattagaagctgaaatacatttgcatcgtcacaaaactgtgatccgagcctgcagaggacgtaatgacttgaaacgaccaatgcaagcaccaccaggccatgatcaagattccctaaagaaaagccaaggtgttggtccaattagaaaagttctcctccttaaggaagatcatgaaggccttggcatttcaattacaggtgggaaagaacatggtgttccaatcctcatctctgagatccatccggggcaacctgctgatagatgcggagggctgcacgttggggatgctattttggcagtcaacggagttaacctaagggacacaaagcataaagaagctgtaactattctttctcagcagagaggagagattgaatttgaagtagtttatgtggctcctgaagtggattctgatgatgaaaacgtagagtatgaagatgagagtggacatcgttaccgtttgtaccttgatgagttagaaggaggtggtaaccctggtgctagttgcaaagacacaagtggngaaatcaaagtattacaaggatttaataagaaggcagtaactgacacacatgaaaatggagacctgggcactgcaagtgaaactncgctagatgacggtgcttcaaaattagatgatctgcacactctgtatcataaaaaatcttattaaattgaccatatctncagacaagatgntaatcagactattctgaaatttgggcactggggaagatggtgacanagactacaaatcagggg

SEQ ID NO: 438453 - DNA, 1454 bp, Homo Sapiens
ccacctttcaaacacacaatttattagcaaaatttttaagtccgtaattctaatgtaaggcacttccactcattttcaaataaaatttccatatgaagttttttattcttttgtaatcaagtcttcacaaattcagtaatgttacttcaagtaaaactttattaaataatgaattttggcataagtgccataattatctttacttctgaaaagaatgaaggataggcatcaagctctgtgcaagctaaatttaaatgaaggtactcttggtctgttttagatttagacttagcagtgttttatcttgtgtgatcttgttcaaggatcttaaaatcttccccacaggaagactgcttaaggccagttggtaaccatgtgttctgaatgtacctttaggtaaatacactatattggcttctaaattctttaccaaacacgtggctttgatcccatcttcgagttgctctgcgttccttttgtaggcaagttttcatgttttcttcttaagcttgctatttctttttccagtttaatgatcctcttttttgcctccataggattcctaaaggcatagctgtgttcaagtagtacttgctgactacttaatgtttgattttaaattagatggtccagctggagaacaactgttgtttttcttcaaaagattccttgacttgagtttcatagactttatatgggtacaaaaatcaaaaatggttggaacagcatccattttaagtcgtcgagtttgtcctgttaggtcaaaacaggaggcttcaaagtgctttgaacaaagaaaagtgtgttttcctggcacaaaatttttgcgcctaaccaggcgaacccattcttttcttcttttaggatccaaaggaaacctgtggaagctgatgttaatgtgcttgttgtaggtagtggcacagcccgccgcagcgcaattggtcggcatttccctttcccactcattcagcgcccttaggtctctactgaggcgctggctgctaagctttcttctggcagaggctggacaatcgaggcaggcgtgccttaatcgtgagagcttagtcgtgagagcggagtgggaagaaggggtgtgtatgtgggggcggaggcgaaggacggtcagccttccctttctctttattaatatggccgactagagcccacagaactggccctcctggagctctagtcgccttcgcttgacttcaccaacatggcggacacaacccgttctttctccccgcccccaagagggagcggatctactgcgtttctttggcagcggtcctcagagcaattaaaaggaagaggtgttttcccctccgattactataaattacaagagttttacaataaaactctctcaaggctgcaacagcagctccacctacttctgcatgcacccaactgtaccaagccagacctgcggtgggtgtgaccctaggaccgga

SEQ ID NO: 438454 - DNA, 1348 bp, Homo Sapiens
accacattcactacattcatggtctttcttccctgtgggaatttccttatggatgacaaccatctgcctgaaactttcctcctgggcaggggaccacctcagtctctccgctttgggatttctctgctgcagttctaaggtaccctcagaggtagcttcaaatgtagaggtgtcagtagcaagtttttctgagaacacctgtgattccacttcagtaatgggtggttgtggcaatgatcctttgtccttgggctctgggccatcttctgtaacaactgacagaaaatgtaaatatacctgttctaagagataagaatagtaaggcactctttgggaaaggctgggtctccttaggctggagctggatgctcagtgcttcctgggctgctcccagagattccttcttctcccatggctcttcctgtgcaggtccatgtgcagggcctgggacctggaggtgatcaggcaccactcagtttaaattttcttcaaattactagtgtggtttttgtcccctgcctgggacacttgcagatgtgaccctccttggcccaaagcttcccaaggagactttagagagcctcctcagagtcagcacaagggaagaagaggagctagagtctctttctcattcagggctcgagggcagaaaagacagacacagaaacacatactaactgctctacctggcccaagagaggtttgaacttggcacctccccctacagctgcccctcggtccagcctgaaggtcatcaatctggctcccataacagaccaaatcccccttcccacctgcggctctggttcaagtcctttctctaaatcctccagcacagtcacagcctcctctccactcttagggtgatgtccccgcacccaggattggagctcctcaggcaggatggtcaagaattgttccagcaccaggaactccaggatctgctccttcgtgtgtttctctggcctctagccactcacagcagagtactcgtagttggctcaaggcctcccggggaccaggagtctcctggttagcggagatgcctgaagcgttggcggaagatctcttgactggtagagtggttcccaggtagcctggtctcatactcacaagactgttcctcttcctttggtcccatcatcatcatcttctcttgtccctgtgtagcctgaagggccagagtttcagctgctgttagtgatacagcctatcctagtctgcactagactctgctagaaggcttatacctagctggaatcttgcaagggccccctcacaggaccaggaggttccatcggggcgctgccgcgaatcgcgccctcgtgccgaattcgccacccaggcc

SEQ ID NO: 438455 - DNA, 529 bp, Homo Sapiens
aatgaaggttttaccacattcactacattcatggtctttcttccctgtgggaatttccttatggatgacaaccatctgcctgaaactttcctcctgggcaggggaccacctcagtctctccgctttgggatttctctgctgcagttctaaggtaccctcagaggtagcttcaaatgtagaggtgtccagtagccaagtttttcctgagaacacctgtgattcccacttcagtaatgggtggttgtggcaatgatcctttgtccttgggctctgggccatcttctgtaacaactgacagaaaatgtaaatatacctgttctggatgtatgaagaaatgacacttagattaaaatgtatatttctggaatgaaaacaaatgcttaaaaacaactatatatatgacaaacattcgaagaatatttactggatattgccaacagttatctcttggtgatgggactatacagaggagagggtttcttctttttaatttctcccatttatctgctttttttcccctaatttctcc

SEQ ID NO: 438456 - DNA, 480 bp, Homo Sapiens
gatagaattgctcaattactgcttttgccttatgttaaaattggggaaaacaaaaaggaaagaacaggagggtttggaagtaccaaccctgcaggaaaagctgcttattgggctaatcaggtctcagaggatagacccgtgtgtacagtcactattcagggaaagagtttgaaggtttagtggatacccaggctgatgtttctgtcattggcataggtactgcctcagaagtgtatcaaagtgccatgattttacattgtctaggatctgataatcaagatagtacggttcagcctgtgatcacttctattccaatcaatttatggggccgagacttgttacgacaatggcatgcagagattactatcccagcctccctatacagccccaggaatcaaaaaatcatgactaaaatgggatagctccctaaaaagggactaggaaagaatgaagatggcattaaagtcccaactgaggctg

SEQ ID NO: 438457 - DNA, 1120 bp, Homo Sapiens
  misc_feature (515)..(539): n is a, c, g, or t
  misc_feature (1098)..(1098): n is a, c, g, or t
atatatatgtgaccctaattaagaactaccagattggatcaactaatcatgtcggcaatgtaaataactttatttttcatattcaaaataaaaactttcttttatttctggcccctttataaccagcatctttttgctttaaaaaatgacctggctttgtatttttttagtcttaaacataataaaaatatttttgttctaatttgctttcatgagtgaagattattgacatcgttggtaaattctagaattttgattttgttttttaatttgaagaaaatctttgctattattattttttccaagtggtctggcattttaagaattagtgctaataacgtaacttctaaatttgtcgtaattggcatgtttaatagcatatcaaaaaacattttaagcctgtggattcatagacaaagcaatgagaaacattagtaaaatataaatggatattcctgatgcatttaggaagctctcaattgtctcttgcatagttcaaggaatgttttctgaannnnnnnnnnnnnnnnnnnnnnnnngaaagaggaaaacatacatttttaaatgtgattatctaatttttacaacactgggctattaggaataactttttaaaaattactgttctgtataaatatttgaaattcaagtacagaaaatatctgaaacaaaaagcattgttgtttggccatgatacaagtgcactgtggcagtgccgcttgctcaggaccccagccctgcagcccttctgtgtgtgctccctcgttaaagttcatttgctgttattacacacacaggccttcctgtctggtcgttagaaaagccgggcttccaaagcactgttgaacacaggattctgttgttagtgtggatgttcaatgagttgtattttaaatatcaaagattattaaataaagataatgtttgcttttctatttccttttgaatttgtgtttattgttaattcatagctattcaaagtgtgattagagctgggcttggtggcttgcatctacagttccagctacccaggaggcaggggcaggaggattgcttgagcctaggagttcgaggctgcagtgagctatgatcctgccnactgaattctagcctgggcgac

SEQ ID NO: 438458 - DNA, 740 bp, Homo Sapiens
  misc_feature (434)..(486): n is a, c, g, or t
  misc_feature (509)..(517): n is a, c, g, or t
gctttcattgccattttaataaaaaaatagaaactcctatattacaaaaatatattgcgtattgatgtcacaatggaaattttacaaacacaaaactttataaaagggtgttaagccaattccagatgaagcaaagacatgaaaacaggaaagttctagaaaaagtctaaataaatgtattcatattctatgagtgaaaaagataattcaaaaggatgtccgtaaggctgggcacagtagctcacgcctgtaattccagcacttggggagggtgagatggggggactgactgagcccaggagtttgacaccagcctgggcaacatggtgggacctcgtctctacaaaaaatacaaaaattagtacggtgtggcagtgcccacctaaagccccagctactgaggagactgagacagaaggattgcttgaactcannnnnnnnnnnnnnnnnnnnnnnnnnnnnnnnnnnnnnnnnnnnnnnnnnnnnggtaaaagtgagatcctgtctcnnnnnnnnntaaattacaaaggactcatatatattaattttgtataattcctctaaaggaattattcaaagatctcaaaatatttcactgatatttaagtcctgtaagtttccatttcatacggtgatataagaccatgggtagaaaatatcagtgaataaaggaagacatgccaaatgtctcatctgaatattttgaccactccatgatcttttgtcctcgcactgctgca

SEQ ID NO: 438459 - DNA, 949 bp, Homo Sapiens
  misc_feature (276)..(303): n is a, c, g, or t
cgactcatattcctatgagtgaaaagaaaattcaaaggattcctaagctggcacagtagctcacgccgtaattccacacttggggaaggttgagatggggggactggactgagcccaggagtttgacaccagcctggcaacattggtgggacctcgtctctcaaaaaatacaaaattagtacggtgtgccagtgccccacctaaagccccagctactgaggagactgagaacagaaggattgcttgaactcagaaggctgaacctcagtgactgtnnnnnnnnnnnnnnnnnnnnnnnnnnnnggtaaaagtgagatcctgtctcaaaaaaatgaattacaaaggactcatatatattaattttgtataattcctctaaaggaattattcaaagatctcaaatatttcactgatatttaagtcctgtaagtttccatttcatacggtgatataagaccatgggtagaaaatatcagtgaataaaggaagacatgccaaatgtctcatctgaatattttgaccactccatgatcttttgtcctcgcactgctgcatagttaggtttcagaggctggtcttcgaattaggtcaccaaaatatgcagtgattgtcttcaatttgttgttaaggagttctgttctatttccacttgccctccaggcccagctaaggatgccacctggtcaatatcagcatttcttggaagaaaataaacaatattattagtgatcttcttagaaagtctgaaaatttcaaagccatcaggagacatcattgttctaatgtcaaaggtctctgcagtggcatagtctggccctccccaaggtgggctgaggaacacaacatcagcctttaaaaaagaagccagcagcaagaaatctccacagatgaactctatcttatctgctatcccataacttctgcatccctaattccggaccgtaccagc

SEQ ID NO: 438460 - DNA, 479 bp, Homo Sapiens
  misc_feature (429)..(429): n is a, c, g, or t
ttcggatgaggataaacttaaaattgctgatgaaggacatcccaggaacagcaacagcaacagtgactcagacgaggacgaacaacgaaagaaatgtgcctcatcagagagtgattccgatgagaaccagaacaagtctggcagcgaggccggcagtccccggaggccacgaagacagcggtcagatcaggactcagacagtgaccagccatccagaaagagaaggccctccggttctgagcagtctgacaatgaatctgtgcagtcagggagaagccactcaggagtttctgagaacgactctcgcccagcttctccaagtgccgaatcagatcacggaatcggagagaggatcttgataatgagggttctgggccaaggctctgggaattgattcgggaaccagaggggttcccaacattgagggcntcaggttggaggtttcagaacttggggttcagattgttagttgattaggg

SEQ ID NO: 438461 - DNA, 1220 bp, Homo Sapiens
  misc_feature (109)..(109): n is a, c, g, or t
  misc_feature (292)..(398): n is a, c, g, or t
  misc_feature (412)..(571): n is a, c, g, or t
gatgggacatggcggcaacctctgcagcgtcagtgctgctggcgggtgcaagaaactggtggcgacactgcctgagcccgctgctgttgccaaggtgacgaggcataangccgcggtggttcggtgcgtgggggcgcggagtgggtggtgaagggagaacgaagctcgagcggaaagacaggaccgcgaccgcttgtcaggggattcggcttccagtcccccttccagagggcgtccttctgcagccaggcctctgtcttcccccgcccccacacgagtctcacttcatcannnnnnnnnnnnnnnnnnnnnnnnnnnnnnnnnnnnnnnnnnnnnnnnnnnnnnnnnnnnnnnnnnnnnnnnnnnnnnnnnnnnnnnnnnnnnnnnnnnnnnnnnnnatgtgccaccatgnnnnnnnnnnnnnnnnnnnnnnnnnnnnnnnnnnnnnnnnnnnnnnnnnnnnnnnnnnnnnnnnnnnnnnnnnnnnnnnnnnnnnnnnnnnnnnnnnnnnnnnnnnnnnnnnnnnnnnnnnnnnnnnnnnnnnnnnnnnnnnnnnnnnnnnnnnnnnnnnaagattgtgttgctttctgcctcaatattaatatgttggaagttaccaagaagttcatgacagatctatttcaaattctggtgaagaaggaagaattggcccttgaaagaatcagtgttttacaataattttgaaagagggtagcgacagaaggaagaaaacattatcaggagggaattcagataaaggacaaaccatattttgactgctactgacttgttgaactggcagtcggggtcaacttgggaagacagctgtgaccataaatattaaagaagacaaaaggattctttgtgacactgagaccttctgcagtaccacagtggaggaaatgccagtgtacacaactggcctcatttaattcctgggaggagatagtttgggatgcagtgcttgttgttgctgagcaggcgatcacagcatgcactgtgtttctttctttgagaatatttgaatcctgcctgaatactcgtaacagatgagagacgcaggttttgatagcatagatttacgctgtcattagtcatgagctcttgggacgaaagtaattggttttatcctctttagagttagaccctgtggttgggtatgaaagatgagtgtctgtaaaaatccttcttagaaatgtatttcctcaagactctgtctc

SEQ ID NO: 438462 - DNA, 933 bp, Homo Sapiens
gccaatcaaagcacacaactttattgatgatacacacagatgcggacttgggtggaagaggttaagtcggtacaatagacagaagagcagtgcacttttttgatgaataggttcactatccatcaggcgcgtgtagaagaaagagcaaacgaaaaataattcaacctaagctgcaacaaatgcattttcagctcaagccgcgatatgcctctggtctctgcaaagcggtcccgcttggacagggagaccaccacaggcaacaatagcactcgtgatgctgtaatttgatgttctttgtccacagcaggcagctgaagtgatcccctcaccacatgaaggaggctgcaagggaggaatttacaatgccaacattgcctgcagactgcacaaccaagaagttactcaaagctctgtgggagcccctgcctggccaataagagtgtggtcctggattgagccctggaactttcacccaatgaggtggtgattggctaaggctggatcttcagtagcaccctctgcagattctttgacatctgcaaaccaagcgcgttgtgggtggattccgtcccattgtgttcgagagggccgtttatggggcaggggtttccaggagaatctctctgtttccatttctgattgaagaggtctctcaggtccagggtgagtaaggatggagggtagcagtcttcagcttcttccaggctcttgtagctctcttgtgatgaatctgcaaggttccaaccaaggcagttttctccttctctcgctgaaacttgtgccgaaacctacaggccaacagacctacaaacctgcacggtccgagctagtttccttctttcttcacacgcctgcagagtaatagggggctggtacccagacggaggcgactagcaggacttgtgctctaggcggctcttggtcacgcccgct

SEQ ID NO: 438463 - DNA, 1808 bp, Homo Sapiens
  misc_feature (5)..(5): n is a, c, g, or t
  misc_feature (12)..(12): n is a, c, g, or t
acaantttattnatgataaaaacagatgcggacttgggtggaagaggttaagtcggtacaatagacagaagagcagtgcacttttttgatgaataggttcactatccatcaggcgcgtgtagaagaaagagcaaacgaaaaataattcaacctaagctgcaacaaatgcattttcagctcaagccgcgatatgcctctggtctctgcaaagcggtcccgcttggacagggagaccaccacaggcaacaatagcactcgtgatgctgtaatttgatgttctttgtccacagcaggcagctgaagtgatcccctcaccacatgaaggaggctgcaagggaggaatttacaatgccaacattgcctgcagactgcacaaccaagaagttactcaaagctctgtgggagcccctgcctggccaataagagtgtggtcctggattgagccctggaactttcacccaatgaggtggtgattggctaaggctggatcttcagtagcaccctctgcagattctttgacatctgcaaaccaagcgcgttgtgggtggattccgtcccattgtgttcgagagggccgtttatggggcaggggtttccaggagaatctctctgtttccatttctgataaagagggacatgaatgagaagagcatctgggcaccgactaactcccccgccaagactggcttttcagacaaacccatcagcggtttcaaaacctgaaccttagcacatccacttccctctgatatcaaaggaaacttcaagtctgaagcggacttggcaagcatgttattaataactgtcatgcttattaacaaatttaatccggcctgctgcagaaatgagttgcagcaacgtgacacagtctcccgacacacttcattgatgtacatcttaatctggccctgactttcaatactcgcatttaagttatccggggcacacaaagcctctctaacagtggggtctggagtggggctcgtgtttctagccattgagaggctggccaaatggctattgatatcctggctaaatggaaagcccgcatccttgggctcggcaaacaacagttttccctgaatgaaaagacacttggagaggtccagaacacaactgccatttttacaattttgagcactccaagtatttttatgttcataggggaatggccgctgttttattgggtgtgctcggttggccttgcctccccctgagggcctgtcctcagtgccacctggggccccaggttcagtccaatccccatcctcagtccagggccgagccatagtttcaaaatcaaaccaaatatcaggctcctcctcatccagctcctggtcatcgtcccactcctcttccccctcctcctccagcttctcactgtcatctcttcctatggtcagtttgtaaacgcagtagcaggcaccagccccaatcatcagtcctgccgccatccaacccacttcccgagcccggcccatgctcaagtctgtgccagccttggggcaggacaggagagggccttgctccacctgattgaagaggtctctcaggtccagggtgagtaaggatggagggtagcagtcttcagcttcttccaggctcttgtagctctcttgtgatgaatctgcaaggttccaaccaaggcagttttctccttctctcgctgaaacttgtgccgaaacctacaggccaacagacctacaaacctgcacggtccgagctagtttccttctttcttcacacgcctgcagagtaatagggggctggtacccagacggaggcgactagcaggacttgtgctctag

SEQ ID NO: 438464 - DNA, 407 bp, Homo Sapiens
tttgccaatcaaagcacacaactttattgatgatacacacagatgcggacttgggtggaagaggttaagtcggtacaatagacagaagagcagtgcacttttttgatgaataggttcactatccatcaggcgcgtgtagaagaaagagcaaacgaaaaataattcaacctaagctgcaacaaatgcattttcagctcaagccgcgatatgcctctggtctctgcaaagcggtcccgcttggacagggagaccaccacaggcaacaatagcactcgtgatgctgtaatttgatgttctttgtccacagcaggcagctgaagtgatcccctcaccacatgaaggaggctgattgaagaggtctctcaggtccagggtgagtaaggatggagggtagcagtcttcagctt

SEQ ID NO: 438465 - DNA, 963 bp, Homo Sapiens
  misc_feature (46)..(46): n is a, c, g, or t
  misc_feature (460)..(470): n is a, c, g, or t
  misc_feature (862)..(862): n is a, c, g, or t
  misc_feature (881)..(881): n is a, c, g, or t
  misc_feature (943)..(943): n is a, c, g, or t
aacctcttcctcctagcactttctagggccctgataagtcttcatntgtagggagacctctagtctttagaacctgaattctcattctggtttcacaaaagaacgaactattcatttgtgcaaactagcattgcgagtttctcagagccaggtaaggtactgtcaggtccactggccccagccctgcacacaccctaaataggtttgagtgtccagaggcagaaccgtgcaccaagagaagcccacagagagagctgcatcccccagggtcccaagcccgggccagtgacctttctctaagtgcactgcctggaagcaggtgcattcgtgatctgcactctccttagaacaagctcagggtggaaagcatgtgagtggacaaagtcctaacctttgcagcggcctgggcagaagcagcaatcaatggtcaccaaggcacagacactgacggacatttaannnnnnnnnnnaactgaggcatcatggcagtttaatagtgaggtatttaattgcatttttataaaaaacattgcaaaacaaagtgacaatagggacctaaattctttggacttacggtagagatgcttgaggatcctaatattctacttctgccaacatgtcaggtaggaagctcacaatgttccccataagccattacaaactgggctaaggaaaatcagtcatgactaagtccttgtctgcatcacgctcctgcccctccacacactgtctgaggcgtgcacttttctttcgaagggctaatttatgagggcattctgcctggaggtcaggggctattgctaagtgggaaggtttgatggaacctcccaggtaggaaaatgcaagggcctggcaaaaatgncggaacagcttcggatttnacttatgggctttattaattcaaggggcaaacttttacattaaggaggttgttatttttccntcaggttctggcaaaagggt

SEQ ID NO: 438466 - DNA, 1955 bp, Homo Sapiens
  misc_feature (1874)..(1874): n is a, c, g, or t
tactttaaaaatggttttattgaatattaatcatttacaagtacagtgagctagacattaagccaaagcacaattgcaggttaaatataatcacaaagatgtcttaaatagaaacccaccaggcaggcaggttaagttccttgatgccctcctttggaaagaagtggagggtgagggaaaaaggacttccatttcaggtgacgagatgatgactagaggactttaacatgctgtaggtgatttcccatgaccacagctgtaggattgccagatttagaaaaaccaaacaatgagaaaaaccagcatgctcagttaaatttgaatttcagacaaataatgaatgcttttactgtaaatatatgccaaatattgcatgaaacattcttaacgtgaaattgtttctctgaaattcaaacttaactgggcatcttgtacttgatctgacaatcctacaaatagataaatacaaaaaagaaaggagagggggttgtaacccctgccactgttgggtcacacagagactaaaaataaaaacaacacgaataatgaaccaaagagtcactacactggttgctcacacagaccaacatcacaatgagaaaacacaattactactccgagtgctgttgccaggcaacataacattttctcaaagctggttttgtaaatgttttgagaaaccttgataaaagtacctttttagtttgtaggtatcaaagacaaacattactactacaaagataagatgagcttgaaacaatgggagcagaagcaggtgttatatgcacatgaagagtttcagtgttttgtgtcacggagacaatgtttacatactcaaggtcatcttctaggtctaggctatcggcctcaaagatctgtgttctttcctaactttgaatgggttttctagcctttcatcctgaactttgggaggggtgcgcgggtgtgtgagggacaccccactaccagggttcaactgcatttctctgcaaacactctgaatcaacacaaagggctttcagggctgcttgcagaaatgggtagactgatgtaaaagaaatcacagaacaatctgaattctggaacgtgaaagaaacctctttgaaaggatgggaggtagggcaggtgccgaagacgtgaagtgtaaagcaaaaaagaatgtgaaaggaggaaaagccgaaatgcaatcctacagtgcgaatgttatttcagaggaggcagaactctctggcaatgtataaaactcgtcatactacgaccatatttggtcgtgcaaagtatataaaatcattagcttcctctaggttttcactttagcataaccataatttacattttaaaacaattaaaaaacacagcttgcatatcactcatattctacaaggtatcacagttgctgtcgtatccccacatacacaactgaataggctttgaaatctttccagcacttctccaaaccagaaatctggtagctgaggaagttccaatatggagaaattgaaatggattaattttaatcagctccattgcatgtaagggaatattacttatgaaatataccatcataaaataagatgaacaggtctgaaacacatggagacatggccgactcactgacacacctttcaaacactaagaaatgggactacaatgttttatttattaaaatataaaaggttaaaaagtttccgccatagttaaggctttctagaggggaaaaatttaatttattaatggcagagtgcacaagttgctgaagaagcctcatgttctagaatagtagttttcgagtgcatttgctttccatatgctagatgtgtacaatagctcaaacatcactttcacaattactttcttttcacttctgtcactgntctgacattaaacaaatttgactttactctttaaatacgtatctgacatgaaatcctatcttaatggcagttttgaatacc

SEQ ID NO: 438467 - DNA, 499 bp, Homo Sapiens
  misc_feature (347)..(347): n is a, c, g, or t
  misc_feature (358)..(358): n is a, c, g, or t
  misc_feature (394)..(394): n is a, c, g, or t
gtactttaaaaatggttttattgaatattaatcatttacaagtacagtgagctagacattaagccaaagcacaattgcaggttaaatataatcacaaagatgtcttaaatagaaacccaccaggcaggcaggttaagttccttgatgccctcctttggaaagaagtggagggtgagggaaaaaggacttccatttcaggtgacgagatgatgactagaggactttaacatgctgtagggtgatttccccatgaccacagctgtagggattggccagattttaggaaaaacccaaaccaatgagggaaaaacccggcattgcttcagtttaaattttggaatttttcnagggccaaacnaattgaattgcttttttacttgttaaatattattgncccaaatattttgcatggaaaccattctttaacggtggaatttgttttctcctgggaatttcaactttactgggggggcatcttggtactttgatccttgggcca

SEQ ID NO: 438468 - DNA, 462 bp, Homo Sapiens
  misc_feature (235)..(235): n is a, c, g, or t
  misc_feature (422)..(422): n is a, c, g, or t
  misc_feature (431)..(431): n is a, c, g, or t
actttaaaaatggttttattgaatattaatcatttacaaagtacaagtgagctagacattaaagccaaagcacaattgcaaggttaaatataatcacaaagatgtcttaaatagaaacccaccaggcaggcaggttaagttccttgatgccctcctttggaaagaagtggagggtgagggaaaaaggacttccatttcaggtgacgagatgatgactagagggactttaacatgnctgtagggtgatttcccatgaccacagctgtagggattgccagatttaggaaaaacccaaacaatggggaaaaaccagcatgcttcagtttaatttttgattttcaggaccaaaccattgaatgctttttactggtaattttttggcccaatttttttgccttggaaacctttctttaaccgggganttgttttcncctgggattttccaacctttaccgggggctt

SEQ ID NO: 438469 - DNA, 1023 bp, Homo Sapiens
  misc_feature (11)..(11): n is a, c, g, or t
cggcacgaggntttccgagtgatcatttcagtcagcgattcatgttttacagtgtttagttgttgattattagaaaaagtaatattttcttccctttatgattacatcattataaatcaagtccttccatgaacacatttaaggtgtgtggagatgagatgtctgaatccatttggggatgggctgcatttttggggaactctatgcctgtccagtgaagagtgcctaaaacattaattatagatcaaagatgttctgttgagggacaaagcttgatggtcatcaaacacaaggctttgtaaaaatacgaccacctattccacttactgggatctgtcaggtgtgtaaaacttctctcgccagttcatcatgcttccatgagccctcaggactgggatttgagccttcctggctctttatcccttggggcagacatggaaccatctctgagggaccaggtggatgctgaagctcacccagtcagggcccctctcctagctccttttacactgaaattaatctgaaagctttcatagccaaggctttgcctaggtgctattattccagctggccaaagagaagtcttgggccagattgggattctcaatggattttatagacataattcccctgcaaacttaaaaaaataaataacccctactttataggactaattgtttgaattgtatctttctctgtatgttaaaccagattttataccttgttttataccttatgtaggtgctcctacataagggtggcatgccccactggctgtggttaaatttaatcctcgttgctttgggagtgacttaaaggccttttgaagtggagcttttgcactttatactttttctgtgaactatgataactatatttgatattaaagctgtaagtggcattttcagcaaatgaatatgtacatgtttgtgtctatttccaaaatgatttctgaactatctgcagtgaaaatgtatctgatggattgtagagcaaagcacattgcctaaattcatttgttaa

SEQ ID NO: 438470 - DNA, 469 bp, Homo Sapiens
gggcttaaacaacagaaatttattttctcacagttctggacactagaaatccagaccgaagtgcaggaacattccatctctgatgaggcctctcttcttggcttgaagacagccaccttcttgctgtgtcctcatatgggctttcttctgtgtacaactgttatggctgagggaagcagtgatgggggtaggcaccacagtctgtaacccctccccttctatctcagtaccaacaaggcagatgagctggagttctggtaatcctacacagtttacttcatgccagcttttgctttccatgaggtccaggtaaaccaagaacgctacataaacttgggtggcatctcctatatctaattccatcatttctagatacttagggtgagtgcccatccaggcgtcctcaggggcccacgaaggagctccaccgccgtcgccaaagccgcgaacaccgcccggacccaggccg

SEQ ID NO: 438471 - DNA, 1892 bp, Homo Sapiens
  misc_feature (64)..(69): n is a, c, g, or t
  misc_feature (73)..(73): n is a, c, g, or t
  misc_feature (77)..(80): n is a, c, g, or t
  misc_feature (83)..(83): n is a, c, g, or t
  misc_feature (86)..(86): n is a, c, g, or t
cgcgcccaaaacgaattggtctaagaaaagctttttcgaggggccgaggcgggccgaccagggnnnnnntttntttnnnnttnttnttttttgattttaaaacatttttattataaaatacaaataaaaacattgagaaaagacaaagtcatccattttctgcctcctatcccactataaccagttagtaatttgatttactttgttatctttttatcatatgcttggtctgttatttcagccatgattacacccacttatacacttttccgtcttgcaatttttacttaaggtaatattttcatgtttttaataatattcattactaatttttaataagtacattatgtatcatttgtatatatctgtttattgactatttcctagacccagggatgacaaactatggcaccacatttgtaaacaaagttttactggaacaaagccacgcccgtattgtttatgtattgtctatggctgcttttgtgcttcatacagcagtgttgacaagttatgacagagacagtaggtttaaaaacctaaaatagttactttctggccctttatagaaaaagtttgccaatctttaccccaaactttaaagtggtttataatttgggctactaaaagtaatgtcacttggaacatctttgtgcatataattttttatactttgtacaatttgagagacattaacaaaagtggaataactgggtctaattaatgaagacatttttacggttgattctctcccacactgttgtaatattcaagctatgatatgtgataagaatgaaaaggatagcccagaactcttgtaggtaacatgtctctggtccctgttacttaagacacgtaagttacttaagacacactctggatgaacatattttgagttttgatttaaagttaaccaaaaaagagaaataacagtaactgcaatgggaagaccaattgaaagaaatcttttactttttactggagaggaaaaagtaaacagaagtgggtgacaaggtacatataaaatgccattctacggtagctgcagtggccaaaaggcactggggagagctgagtaagagaaagaaatggcagtctcaacaatgagctggcagtggcagcaagaaacaaagagacaactttgagtgtgggatgacaaaagcagcacacaggtcccacccatctgaatacatcctaggcataaacctgtatataactgtaattaaactgtctctagataacaaagttttaaagaaatcaccctatattttttaagaaggagaaagtcttctacctggggaagttttactcttcagaatgaaaaccttatggaatggggaagtcaaccctcactatgtacgtcaaccctatttctgagataaaagatgaagcagtctgatgggtctcaaatccaatcttgtatgaataaaacaagcatcaggaaacatggatgtcatcttctaagagaaatattctgttatggctgagggaagcagtgatgggggtaggcaccacagtctgtaacccctccccttctatctcagtaccaacaaggcagatgagctggagttctggtaatcctacacagtttacttcatgccagcttttgctttccatgaggtccaggtaaaccaagaacgctacataaacgtgggtggcatctcctatatctaattccatcatttctagatacttagggtgagtgcccatccaggcgtcctcaggggcccacgaaggagctccaccgccgtcgccaaagccgcgaacaccgtccggacccaggccgctgcagccgggggtcggctcggaatcgccgcgctcctccatgccggccggtgcggcgctcccgtggcctcgtgccgaattcgccacccaggcctcgctacttagga

SEQ ID NO: 438472 - DNA, 924 bp, Homo Sapiens
  misc_feature (136)..(137): n is a, c, g, or t
  misc_feature (141)..(141): n is a, c, g, or t
  misc_feature (156)..(156): n is a, c, g, or t
gtggccagccaaggaaacaaaagaggaccaacttttgagtgtgggattgacaaaaagcagcaacacaggtccccacccatctgaatacatcctaggcataaacctgtatataactgtaatttaaactgtctctagnnatanacaaagttttaaagnaaatcacccctatattttttaggaaggagaaaagtcttctacctggggaagttttactcttcagaatgaaaaccttatggaatggggaagtcaaccctcactatgtacgtcaaccctatttctgagataaaagatgaagcagtctgatgggtctcaaatccaatcttgtatgaataaaacaagcatcaggaaacatggatgtcatcttctaagagaaatattctgagggtctggcagcataaatccatcagtaagtttataatagactattgtagaatcagactccactatggccaaagtaaaagacatcggcaaatctggatcaccttgcaactttcgagatgccttcaagatctcccttatcctgttatggctgagggaagcagtgatgggggtaggcaccacagtctgtaacccctccccttctatctcagtaccaacaaggcagatgagctggagttctggtaatcctacacagtttacttcatgccagcttttgctttccatgaggtccaggtaaaccaagaacgctacataaacttgggtggcatctcctatatctaattccatcatttctagatacttagggtgagtgcccatccaggcgtcctcaggggcccacgaaggagctccaccgccgtcgccaaagccgcgaacaccgcccggacccaggccgctgcagccgggggtcggctcggaatcgccgcgctcctccatgccggccggtgcggcgctcccgtgccggaccgaaactgttctatagggcac

SEQ ID NO: 438473 - DNA, 797 bp, Homo Sapiens
  misc_feature (727)..(727): n is a, c, g, or t
  misc_feature (756)..(756): n is a, c, g, or t
  misc_feature (780)..(780): n is a, c, g, or t
aggatggacaaccggaaattttctacacattttggaattcagttactcaggcactttcttctcaatttcatatggcaacaaactcttcgatgtttttgaagcaggcatttgaaggagaataccctaaattattacgtctttataatgacttatggaagcgtcttcaacaatacagtcagcatatccaagggaattttaatgcaagtggaactacagacctctatgttgacctacaacacatggaagatgatgcacaagatatattcataccaaaaaagccagattatgatccagaaaaggctttgaaagactcactacaaccctatgaggctgcttatctatcaaaatccttatctcgactcttcgatcctatcaacttggtttttcccccgggtggtcgtaatcctccttcctctgatgaacttgatggtattattaaaactatagcaagtgaactaaatgttgctgctgttgatacaaacctcacattagctgtgtcaaaaaatgtggcaaagaccatccagttatacagtgtaaaatcagagcagcttctctccacacaaggagatgcaagtcaggtgattgggcctcttactgaaggacagagaagaaatgtggcagtagtgaattcattgtataagttgcaccaatcagtaacaaaggctattcatgctcttatgggaaaatgctgtgcaaccctttactcacttctgtggggaggatgctnttggaggccataattcatcaccctggccntcaaggaggactttttctggggtncatttatcccggcttcc

SEQ ID NO: 438474 - DNA, 1150 bp, Homo Sapiens
  misc_feature (17)..(17): n is a, c, g, or t
  misc_feature (31)..(31): n is a, c, g, or t
  misc_feature (43)..(43): n is a, c, g, or t
  misc_feature (52)..(52): n is a, c, g, or t
  misc_feature (104)..(104): n is a, c, g, or t
  misc_feature (351)..(388): n is a, c, g, or t
  misc_feature (618)..(618): n is a, c, g, or t
  misc_feature (869)..(910): n is a, c, g, or t
actcacccggaaaagcngaactgcgaaaccnggcacccggganccaggctgntttaatccagaatgggttaatttaacactctcctcaatccccctgccccacnaaacatgccaaacacagtccatgacccaccttgggctttacttcccacaaggtcttccagggagagcatacactctggctccgattccttcctagcacattgacactgcatacctattttagggggaaacaaaatcaggatgaaattcttgtcagttaaggacaccacgtaagacatctatttcctcatatataattattatgctgggatgcaaaaattccatattgatagttccaattagaacagnnnnnnnnnnnnnnnnnnnnnnnnnnnnnnnnnnnnnncactttgaagttacagtaggtttttaagctctattatttggggctaataatattttttcactctttttctccaatgtgaggtgagaattaagcttgaagcaccaactttatatatataattacctaggctgtctatacaatccatgttaatattctcattgcacacataataacacacactcaagtcatcttagagatatgaggtggaaaatcatgctagatgcaaaacncaagttgttaggcagatgcaatgaatacttccaagtattcatgagaggggagacagtctacatggtacgtggacagagtggctggaccaaaaactagaaaaggtagacgaagggacagaagaaccgagatgtccaggtagggaaattttcaggaacacatctcaactaatccgtgaagtatttctaggtgtgttggaaccagaatctttaaagataattaaatcatcgagtttctagaaaaagagatttcnnnnnnnnnnnnnnnnnnnnnnnnnnnnnnnnnnnnnnnnnnctgctagaaatatttttcaaggaaaaaagaaataatgtgcctaactccaaagttttgcaagaatgcttcttagctgttcggtaatgcaggactgtggatggattttcaatgtctaactagtaaggttttcatgggtcacccatgaagccaggtcacactctaggcctttggtgaagaagaaaataggctggtggaaaagaccttctgaatattgttgaaatgcaagaaactttcacggca

SEQ ID NO: 438475 - DNA, 1864 bp, Homo Sapiens
cgaagggttgacggatggttaatgtttttactttaccttgaagggaccccctttaaaaaaatgtaggcaaaaattcacccagtcttggttttaaatataatcaaaaattatttcttaaaagttacaaaaaaaggattcatgtgggaaggaatactgtaaaaagatactgatcttaagaataaaggaataagaaaagcttctattacattttgcacagccaggttacttcggcaaattttcagtactacaaagataagcaaaggatactcatatcacaaatacgctctgaccatagttctcgaataagaactagcatactggatggaaagcaaaattactgtctaataatattcatatcccatcatctaagcaagtcccaagagagggacattctaagagggcaaaagataacagagcaagaaataacatacagcaatgggaaatgtcaagggcagcattctaggaggagagagtaaaatgttttggctatgagcacatttcaggcgtgcctgacaaattcaactctgactatgggaaagaggagttgtttttcttaaaccctttcccctgagggctctcatgataagctagtcctgttaatcaaaatgaaaagtcctttgaatggccaagagttccttaagccataagcacttcacctggaaatagctgacctgcgaatcatgcacctgggagcatggctgttttattcagattggttattttaccctctcttcattcccctgcccatcaaccatgcaaacacagtcatgaccatcttgggctttacttccacaaggtcttcagggagagcatacactctggctccgattcttctagccattgacactgcatacttggcattattgtgcttgtcatcttctgttagattgccactcttcacaaggtcatagtttatacagcctggctggatggcatcaattaaatccacaactgccaaactggagctgatcgtcttgtccttaaaactctgaatggaagttgattttccagcttcactcaacgttctgttcacccagttcacaatgatgtcgtcattggctttctgaccatctccaagatcttccaggacattgagggtatatcttctcatcagctgccagactaaagctaaagtcagggtttggttcccatcattcaggtcttgccctccaatgccaaccagggagaatttagcaggatgcttccctaattcaacagcatagttgcagttttctagctttttcatgttggctcccagtttcgggtatggaggtttattaaccttactccagtcaacaggaactttaattcgttcatataactgtaagattaccagggcatcttgcaggtcagcatagagatggtttacgtgaggattgacaccaagagagttcatccagttacggaaggttctttcttcacgagtttctccttctaatagagtccagtcaatatcctggttctctggcttagttagtgctgggtatttattaaacaggttagccacgaaagctaagttgagtttggggtttccactgacaacatcagcaggggtaacaaactgtctgcaacctaatttatctgcttgttgaagcatactctcagctctcttcaaatcatctgtttcattgaaacctgacatgttaatatctatccgtggttcaccttccttttgtccttttggtgcgatttgattgagaagatggaaataggctttggaatccttgatgtcagcactaaagttgttaattttttgccagcccgagttttccaaatgaaagtttgcccatctaagcagaagctcttctggagacaatttcataagttcctccaaagtctcaccatctcgaagtaaagcagccaa

SEQ ID NO: 438476 - DNA, 702 bp, Homo Sapiens
acacaaatattttacaactgatgaagaaatgggaacgtgatttggaaaagaactcaattttaggcctttcatcctttaataatctgaggaaattttttaaagtgtattaaaatgtcatcaagtaagtctgataatgactaaaactagaagttcagcaaacattcaaatatattttaagatcattatgcttttggtatgactataaatggacgatttcactttacctcaaaaacttcaattgggattcctcaatttcacacttttcctcataagtaagttttagcttctccagttctagctgctcaccagcagatgcagctttgccaaaatctgcattgtcatgggaaaatggtcttttggaggtttcgcccaccccagaatcttcacctgttgtaatccaagaattgtgcatgtttccggatgcatccagaagtgtttgttccctcagtgtctcctcttgtctttgagattttagctgttgctggagcccttcgttttcaagcacaactacttgtattttatttttcattccagagagttcctccccggagactccgttgatactgccccagaatctcctccagggtagagttctccggggacttcgccatgcacgcactctaggcccagagctgggagttacgtggggaaatgtccagctttctcccttccgagaacaacaggcctgtggccgcgagcgca

SEQ ID NO: 438477 - DNA, 864 bp, Homo Sapiens
gggattcctcaattgtcacactgtttcctcataagtaagttttagcttctcccagttctagctgctcaccagcagatgcagctttgccaaaatctgcattgtcatgggaaaaatggtcttttggaggtttcgcccacccccagaatcttcacctgttgtaatccaagaatttgtgcatgtttccggatgcatccagaagtgtttgttccctcagtgtctcctcttgtctttgaagatttgtagctgttgctggagcccttcgtttttcaagcacaactacttgtattttattgttcattccagagagttcctccttgcagaacttaacttctgcctctaaatgatgaatatattgagactggtcattaatagtatgaacaaggtcgtgcatagtaggcatattggtttcctcatgttctaatgacctcaagggggacatttttcttcttcttgacggagatacttcactttccttatctgcttgttggcgcaacaaatctttgagctgattaacagcatggctctgttgtaattcgggccaggctgtcctggcgtcctcatttcccacactggtgctaaaagaaagatttggtgcatcttctccaatagtgacatcgccttctttcagggcacatgtcagttggtgaatgcttctgctggcatgttcccggagactccgttgatactgccccagaatctcctccagggtagagttctccggggacttcgccatgcacgcactctaggcccagagctgggagttacgtggggaaatgtccagctttctcccttccgagaacaacaggcctgtggccggggagcgcccgcctgcttcctgccgcggctgtcacaggggagcctccc

SEQ ID NO: 438478 - DNA, 407 bp, Homo Sapiens
  misc_feature (29)..(29): n is a, c, g, or t
  misc_feature (31)..(31): n is a, c, g, or t
  misc_feature (33)..(33): n is a, c, g, or t
acaaggtgtttttggttttttcttttgtntntngggctaatcaagaacatatttcccatatatgtatctatctacaattctctgctcaaaatgaacaaaataaagtgagtcttgggtcactaaccatactaaagtgcatactgactcataagacaggatgctaatgccctcttcggagagatagaaaaggcacgctcacagaggtactatgttgtcactgagggatccccaaatagagccaggctctgagagtcttatttgtcctattggagggccacacatctggacctcagattgacatctggaatgagtccctcagcatgctcagacaattattctcatcatcgatccaaacaagcaccctcccaacaaataagcatttccacagccaggcttattttgtgcat

SEQ ID NO: 438479 - DNA, 1435 bp, Homo Sapiens
  misc_feature (42)..(89): n is a, c, g, or t
  misc_feature (125)..(125): n is a, c, g, or t
  misc_feature (176)..(272): n is a, c, g, or t
  misc_feature (445)..(445): n is a, c, g, or t
  misc_feature (468)..(468): n is a, c, g, or t
  misc_feature (827)..(882): n is a, c, g, or t
  misc_feature (907)..(921): n is a, c, g, or t
  misc_feature (1055)..(1065): n is a, c, g, or t
  misc_feature (1185)..(1185): n is a, c, g, or t
taccttgagatgggagtctcacctctgtcactcaagctgaannnnnnnnnnnnnnnnnnnnnnnnnnnnnnnnnnnnnnnnnnnnnnnngctcaagcaattctcccgccccagcctcctgcgtantgggaccacaggtgcccgccaccacgccaggccaatttttgtatttctagnnnnnnnnnnnnnnnnnnnnnnnnnnnnnnnnnnnnnnnnnnnnnnnnnnnnnnnnnnnnnnnnnnnnnnnnnnnnnnnnnnnnnnnnnnnnnnnnnatcttaacaacaaccaaataaccccaaaaccatacccaaaaatacactgtaaatatcatccgcaagggtagtaaacaagtgctggtaaacacttaagtaactcaaatggacctctatctgggaatggcttgacttacacggtataaacgtatggagttcagatattcagatanggcctagattcttgatgagatantggtcataagggagtaactattaaatacctaaaaacttgttttctaacataaaaaaaattagtacctggcacagtggctcacacctacaataccagctgaggcaagaggatggcatgaggccaggagttcaagaccagtctaagcaacatagcgagatcccaactctaaaaaaattagaaaactaaaattagccaggcatgttgacacgcgactgcagtcccagctactctggaggataaggcgaaaggatcgtttgagctcaggtgttcaaggccgcagtgagttatgttaatgccactgaactccagcctggactgtgagataccgtctcactatacaaaaattagcaatgctgccnnnnnnnnnnnnnnnnnnnnnnnnnnnnnnnnnnnnnnnnnnnnnnnnnnnnnnnnttaatcaactgcacacagctgaagnnnnnnnnnnnnnnngcaactgtcctaaaaagccaacagtattcatttaaaggcaggtactatactcactgtgttccataatatatgctccataaatatttttcctcctccttcctggacttcacttagaaccctagaactctggcacnnnnnnnnnnnaatccgagaggtggtcgtctcatttttacacatccttgtttccatctcaccaaatgcctctgccttccgtgatccaaggataagtttccttttagctttcgacaacgtacaacatgtagnaaaaaaaaggaactcagaatatctatacaaataaaaaagggtatctgagcaactagcaaagtgcaatactacacctgccatttttaagtattcaaagttttcaaagcattttctgcagaaaatcttggaatcggaaaagtctagtgtgagcacactgactggatttcagagtgtcatttttaagctcaaattttgaaatcattatgttcagacaaggtcctgtgtcatatgaccgaagggcgttacgtgt

SEQ ID NO: 438480 - DNA, 1355 bp, Homo Sapiens
  misc_feature (25)..(25): n is a, c, g, or t
  misc_feature (31)..(31): n is a, c, g, or t
  misc_feature (37)..(37): n is a, c, g, or t
  misc_feature (45)..(45): n is a, c, g, or t
  misc_feature (119)..(119): n is a, c, g, or t
  misc_feature (126)..(127): n is a, c, g, or t
  misc_feature (150)..(151): n is a, c, g, or t
  misc_feature (158)..(158): n is a, c, g, or t
  misc_feature (177)..(177): n is a, c, g, or t
gggacatgggaatatcctggtctcnaagccntggtantttttccnccattgaagagctgtgtcttcaaactcttctggtaatagctggaaaatcccttttaaagtgaaatctgcccaanttatagnncagatgaaggtagagttgtgtgnnatatagnataggggtgaaagtagtgngggtgtcctggagctctcttctggtgcaagcctagctcttgtgccttgaaggaaattaccctggggacggctctgtggaacatatttgcaaaccactgatttggaagatagagatggcttttgttaagatctgaattcacctttttggcattttatttgatttctcaaggtaaagaacttattttgtaataaagtttcctattatttagtagataggccaagttgctgtgttaattccatgtagattttgggtttcctttgctcattttttcactcttaatctcacatcattgtaagtttatggaagttatcatacttctgactttttctttgaagagcagaaattagaaattcccaataattattttgatagtgtcatttaatgacactcacatgtgatgtagccacaaagatttaatgagttcagttttaaatcatattaagactgttggtttcatttgttctcattaatgtaattctgaagatgaacaataaaatgtatttttagaactttcaaatgaaatattatttcatccttccagatcatataatgcttaagttctgattgttaatcttaaagtctagaaaattaaaagataataaaatgaaagtgacttttaggtattagagttttattataaattctggtgtgtcattggagctatgacatgaatatttcaaaggccaatagcattggatctttacagttataacttaccatttttaagtttaagtagtaatatagattatttaataatcaaaatcaataaatattaattattaaaatgttttgtggtatagtttgagaatcattgcttttaactttttccatataggtttattgactttaatagcattctaaacataacatctctacattctttgtgtttaatactgtggaggtataaaaatacttatatatgatgataaactatattagagtaaattaaatattcttatgagtttcattttagagtgcatttacttaattttgaagtccttatttttagcaaactaaaaggaatgttggtacattatttactaggcaaagtgctcttaggagaagaagaagccttggaggatgactctgaatcgagatcggatgtcagcagctctgccttaacaggtagttctcactagttagccgctggtgtggaccttcactgtctgccttccac

SEQ ID NO: 438481 - DNA, 821 bp, Homo Sapiens
tactattaagtaaaacactcaatgatatgaatgttttaaattaaaattggaatgtaaaagcaactccatttctgggtatttagccaaaaaaatggaaagcagagtctccaggagctatctgtacacccacgttcataacagcatgattcacaatggctaaaacatgaagcaatacaagtgtccatggacagaggaatggaaaagcaaaatgtggcctatccatacaatggaatagtatttggcctgaaacattaggaagttctaacataggctacagcatgcatgagctttggggacattatgctaagtaaaacaaatactgtgtgactcctaaagtatatgagaacccaaagtagtcaaattcagaagacagaaagaagaatcgtggttgccagggacttggcgggaaaggaggaatagagttcaatgggaacagagcttcagtgttacatgatcaaaaggttacagagatgggtggtagcaatgattccatgacattatttaaatgtatttaataccagcgaactgtatacgcaaaaaatggttaagaacataaattttatgttacacatatttaaccacagtttttaaaactgaaaataaaatggagtataaaactcaacatggacttgtagcaaacattattagactatccatgagggttttttgtccactaacttagagatgagaagtgcttaaacctatgccgctatcaaatgggaaatgttgtaaaagttttttgaaaagtcaaaagttctttaataatgcacagtattaatcacatttcattagaccacagatctgtttataataggctcctt

SEQ ID NO: 438482 - DNA, 609 bp, Homo Sapiens
ggacaagaaaataaaattttatgagaacgaaatacagatagaagccatgttcctgaatgataaatcactatttcaaatacatgagttatacagaaattgctttgcaattttagtcaaaattctaacatagtttttctgggaacttgacgtattgtattgacatatagctaagtaataaaacaggcaggagtagatacaagaattttgtaaaagcatagtgcttctgtggatgcttaagtatcatcttaagttatgagtgtggtactaacaaattgtgaagggaagttacataaaaactgcatcttatataattaagaattttaaagtatgatataagcatctatctatctgataagggccattaaagtgtgtctttggttagctcttgctccaagtggggatcatttagatcaggagatggcaaacagattgtgggccaaatccatcctcctttccatgtatttttaagcaaagttttattggaacataaccaaacactttcatttactgattgtgcatggctgccttccagctacaattgcagaattaaatagttgcaaaggaaatcgtatggtttgcaaacccaaacatttatacctactcctttta

SEQ ID NO: 438483 - DNA, 3793 bp, Homo Sapiens
  misc_feature (1627)..(1693): n is a, c, g, or t
  misc_feature (1938)..(1938): n is a, c, g, or t
  misc_feature (1943)..(1943): n is a, c, g, or t
  misc_feature (1946)..(1948): n is a, c, g, or t
ttttttttgctgtactaatgtattccatctttcaaaaagaaagacatgattttaatattacttaacaatatgttaaaaaagtagccaggcaggcctccgtgttaatacagtcgtacactctataacagacttgatggtgtgagtactgggtgggcttgtttttaactttctcgttctgcaagggatcttacacaagctggctacaagtcagggggatcaaacacaaacagcgcaacgtgtacactcggagacagtagattgtggagaacaaaggaggcctgccccgcccagcccgcctagggtgagacgcaggggcacaggagagctgagtgacggccgataccccggtgaggacacatgacaggacagggcgcaatgcagaggcaacggagccacgtggatgatgcaaactcctatctggccacggcccaggcctccgaggccgcggtggtgggaggacttggcgggaactactgttccaatccgacagcacagagctacaatcgaaggagtctcacgcacagactacacgcacacgagctaacggcgtgggccgagcatcaacttctcggtctggggtttcaggcagcaccagctccgcacagcccttggcaagcaccacggctctggggcgccagcgaggggcgtggctcttgggtggtgcagcctggcctgcctctcgcgtgtccctctccagggagtcctcattcaagtgggcagcaaaggtggcttttttcaagcttaaaattggaccagttgatagacagtctttgtcgggtctgtctagcagaatccaagcagaaccttttgaaatattccacttccctctctgtctcatccatatccacactgtctaggtcaatatctttaggtagaaagacatcatcaattgaattgttgactctgtctcctttcttcttcttatttttcttgttcttgccctttggctgaggggactctgccagcaccagcttgctgttctgctgatgctcaccgggagaggtgggctccataggggttgggtttgacttttcgtccttgatgtggttcagctgctttttgttattgttattactgttgacttttctctcctctcttttctgctctgtgatggacatgaggtcgaccaccttagcctttgactcagtctgggcccggggcttggactgcccctctgtggccttggggggctctgtgggcctcctcgctggctcgctgctggccttgctggtctgcctcagcttctgcttgccatttccttctttatggtgctgcatgatgtcgaagaaaaaagagagtggctcatgctgcttcccattcacctccttggggaggagaaatttggagtctctggtgtcgacggggtctgcagcatccccatcagcccctagccctggcctgggctctgagtggttcatatgcctggatggggagtgagaagaggtttctggttcttcagtttgctctagtgagccattgtggatgtttccagagttaggaacagactctgttgctgcctggaaatttctagtgagcatgtccaacttggggcagtctttacttggcctctccttcttcttcttttttacagctcttagcttctgaagctcctgaagccgctgaaatnnnnnnnnnnnnnnnnnnnnnnnnnnnnnnnnnnnnnnnnnnnnnnnnnnnnnnnnnnnnnnnnnnnggaggtgcaggtgctcccgggccctggcctctgcttctaggcgagctttctcctccagcttcctttgcttatgccttgctcgcttcgctgcacgcgtgctgctcactggtttggtttcggagctatttataaactgcaacaaatcctccaccctccgatggtcaacgacgctttccctttctgagatctggtccatttttttaggttgctcctctttcctcttggtcagccgtaagcgaagcttntcccncannnctgcataatttctacttgttggtgcagctggaggcccgccgtgcccaaagaattcgcagtagcagcagtcgcagtacttgccctccttctggttggtggaggtcgaggtgctggagctgtgctcagagcagctgtcctcatctgcactctcgtccccatcatcctgctgtgggtcgtagacaccattctcgcagcggtgcccttcgcagtcagggtcactgcagacacttggaggggcgctaatggagccatctgtggccgggggtaggggtgcaggacagaaactcttgcgtgtgtccacaaacccaggagttgtggttgctgttttggggaatgatggggctgcaagatttgcaaggtgaggtgtggaggcaggtgagagcgcagcaggtgacagcgcagcaggcgagagcgctgggaggggggccaagcccgtggggctattcctcggggcggctggggccgagtgtctgtggtcctccttgctgatgccatgaaacacgtcacctactgaaggaggtctcttggatgacactctgaactggctgttgctggactgcactgtggtagctgtgcaggacacagaggacgtggctgatgacgtggccatgacaactttatttgcttccatgaaagcatcttggaaattgtataaacatttcttttttgcagcattctttttctctttactatccgagactgcaggtgtttcattgctagatggaggtggaagggcttccggtcttgtttctgagagtgttggccctaatatttcactcccagaaattgtatctggcaagaaagtgccaggattccagttcttatcattcatcacttctgatccccaaagacttataaatttagaactattccactctggagtattcccaaaacagctcggataaatatggtcttgaagagatgcattgaatacctgatgcttatttgtgtgattctgaacaggtgctggcggtaaagccttactgtgtgtgaaggggggcgttgcatacaaggtggggtggatgagagggcgtggcaggtgtggaacagtgtgcaaaggcacatgtccatggatgtgagggtaaaggtgcagtgcagggtgtgtgggcttctctgggctcaagaactgatggccaggaggaagggctccggctgtcattgcagatggtgtcagtccagaagcttcctgcttacaaacatgacattcacaagtgtttggagcttgttcagcctgctgtgttagggtaggatgggggtggactgtctgctttgctctcctctgtcctggggctcctgcttcccagcactccatcttccttcggggcccctgggggctccccactactctcgccgtccgcttcttcatcatcagcttctgaggaactactgctggtactgcttatctgaggagactcatccttcagggccatgttttccccgccaccattcaattcgctgtggattccattcatgttggccaccacctcggtatcatcataattactcaatggataaatatcagcaaatttggctgacaatgtgcaacatcttcatcatcactacaaaaagttggtgccgagccactgtctgtgaggatgagcctggggtgctgctgaattgtgatgggagagctggagccggaccccgagcttgcagatgacacactgggcgggctcctctcagcaagatagtcaggagcaggatccacttgaagtgggagctggtgaatgtggatgtcatcagtgacgggggggtccatgataccacacgtgaggatgtgtgagagactgcagtcatcgcaagcacatcttctcctgtagttgcagttggggcagtcgggcatgt

SEQ ID NO: 438484 - DNA, 2046 bp, Homo Sapiens
agaatctttccattttttattaattgaagcacagagaaaagaggcaaaatgattaaagaaatttatgttttttagacagggtgttggctttacaccaacgaaaaagaaaaacagatgaataagcttttgatcttcattttctttctcttattctcatggtaggctgagatgcttttaaatgtgatgttataagcctaaggcagcttgacttgcagcaacaagttttttaccctcctcggcaaagcaggtctccttatcgtcagccttgcagcacttctctacaaaagctgcgaaatcatccataacagctttcagttgctcttttgttgccttgggcttgtgtttcacaagctcaacaagtgcagtttgtttcttgatttgtctctccttctcagaaagtgtgcatatatctgcatggaaggtgaatgtttcagcattaaactctttgggaacgtatgtttcatcgacttccagagctgaaaagcatggtcgcctgttcaccaaggattctgtgcagcatttggtgactctgtcacttactggcgttttctcatgcaacacacataactggttcaggaccacggatagatagtcttctgcacagggcattctttttgcttcaggatgtttacaacatttgctgcccactttttcctaggtttcttgagacctctaccagagttggagttgacacttggggtactttcttggtgtaacgaactaatagcgcattctggaatttgtactctccaagctgctcaaaaagctcacaattttgtttgattaaattctgaggctcttccacaagaggtttaaattcatcgaacactttggcatagcattcatgaggatctgcagcggcacagcacttctctagagtggtttcatatgtcttggcaagtctcagcagcagcacgacagagtaatcaggatgccttcttgcatattcatacaaaaacatgcccaggaagacatcctttgcctcagcatagtttttgcaaacatccttactttcaacaaaatcagcagctaatgaaggcaagtcagcaggcatctcatcattttccacttcggcaatgcagtgggatttttccaacagaggtttttcacagcattccttcagtttactggagatcgaatcttgattttcacagatatacttggcaaggtccgccctgtcatcagcacattcaagcagatctccatggcagcattccgtgtggactttggtaagatctgtcactaacttggaaacttctgcaaactcagctttgggaaatctctggctcaggcgagctactgcccatgctttgaaagctctttctccaaatttttggagactggcacacttgagtctctgtttggcagacgaagccttcccttcatcccgaagttcatcgagctttggcaacaggcaggcagctttatcagcagcttggcaacattctgtaaaagcagctttataccttttagcaaagaaaaggagttccggggcataaaagtaaggatgtcttctggcaatttcatataagtattttttcaaaaatgtctcttcattgtcatgaaaagcagtgcacatcacatcaacctctggtctcaccaatcgggggaggtttgggttgtcatctttgtgttgcaagaagcattcatttctctcaggttcttgttttgcacagcagtcagccatttcaccataggtttcacgaagagttgcaactgtgcataatttgtctccaaaaagggtatgaagtgatttgtcacaattttcagctgactcatcagcaacacatgtttttgcaaattcagttacttcattcactaattttacatgatcttcaaatggacactgctgaagatactgagcaaaggcaatcaacaccaaggctttgaaattttcttctcccaaatctttaaaccgatgagcaacctcactcttgtgtgcatctcgacgaaacacacccctggaataagccgagctaaagagaaaaagaagggaaataaaggttacccacttcattggccaaagatcccgggaattccggaccg

SEQ ID NO: 438485 - DNA, 251 bp, Homo Sapiens
  misc_feature (130)..(130): n is a, c, g, or t
  misc_feature (137)..(139): n is a, c, g, or t
gttttgtagagaagtgctgcaaggctacataaggagacctgctttgccaaggagggtaaaaaacttgttgctgcagtcaagctgccttaggcttataacatcacatttaaaagcatctcagcctaccatnacaaaannnaaaaatgaagattaaaagcttattcatgtgtttttctttttcgttagtgtaagtcacacctgtctaaaaaacggatttctgtgatcattttgcctcttttccctgtgctttg

SEQ ID NO: 438486 - DNA, 597 bp, Homo Sapiens; identical to SEQ ID NO: 252635

SEQ ID NO: 438487 - DNA, 459 bp, Homo Sapiens; identical to SEQ ID NO: 313153
  misc_feature (180)..(196): n is a, c, g, or t

SEQ ID NO: 438488 - DNA, 651 bp, Homo Sapiens
gttctcccttccctgattgggttttatggcctcattcttgcagagtaagaagctagataccttggcgtgagttgtttctccttcaccttggaagctttaggaatacctagcatctggctctcctgaccatccccagttaggaatgaccacttctctaccccagctcctcttttctcagtggcaggggcgccatcaacaccccactcttaccctcatttattccttcaataaatatgagcatctgctttgtgtaaggtcttagctaggtagaaagtaaatagagccttgtcctcgtagcgcttacctaagtgagagcatactggacgagagactggaggatggtggggccctttcttgaaatggagtatatgttggcggaaggaggaggcaagggttccttttggaacacactaaatttgagaaatctgaaaaatcaccgtcagtgttcccgctagtttctggaattgatgtatttgattctggcactaacatacctattttagggtgtgggtcttggtatcagactgccctggtttaagtctaggctctgtttactaggtgtggatgactttggggaagttccttaactttaatccttagctgcttcatgggtaaaatggggaacataacagtgcttatttccttactggg

SEQ ID NO: 438489 - DNA, 434 bp, Homo Sapiens
gtttaagatttctgcaagatggcataagatcattgctggatctctcaattcttgtgtttccagggtatgaaaacagagctgtatccagcaaggctggcacacagtggtctagcagtatcactggtgtgctctctccaaatgtgtttataggtgtttactttcaatcattataatcattataatttgttctctcagcccccataccaactagggttattaggtgacataacagtgaaatctttgtgtcgttcatttgctaaggtctccatcaactcagcttggctatattgtaaacaggagcagacctctaaacccagtcccctgtgagtgacccgactcaggagacgtggagtagccaagcatgatgaagtgcaacttccagagctggcggttgtcgaagtcaggaacattcacccaaagatgtaacgtgatct

SEQ ID NO: 438490 - DNA, 550 bp, Homo Sapiens; identical to SEQ ID NO: 313154

SEQ ID NO: 438491 - DNA, 1032 bp, Homo Sapiens
tttttcttttgtagagacagggtctcacttggccaggttgtctcaaactcctgggctgaagcgatccttccaaagtgctgaagttacaggcgtgagccaccacacccagcccaactcccctatttataaaataaagatgaaatttgtattataagttttggcaaggaagatggaatgcagactgcttagcacagggcaggcccataatcaatagagtgtaactagtattactgcaaagttaattgtaagagtagaccttgctaataacttgcctataagttccacaatactcccactacggcttcggccaccagactcctccttagcagcggtgagctgcccaatgcccccgactgcggtcagggtttgcagaagctcgggtggaggcgttctgaagagctgctgcaacagctccagggctccggtcacaacattgtggtcttggtgctgtgtatgatgtaacgtcagttcataaacctggacaagctgctctgcagaaggagagacttccatttctttccttgtcactccgaagctgcctttcaggcttgtgtccttgacctgctgctgcagcaagggcaccaaatacctcaaggtgagcagcacgccaagaatcagcagagtggagtgttcatcctcgacaggaacgagtaagcctaagagcacatttagtagccaactatagaaatattgtgtccttcttgagtgctggcagatgctcactgctgatccagccgctgtccgccgaatggtgggggagcttgacttcaggttcgctatgaaggcctttaacaaaaccttaatttcattgtcatttgcaaaattgccaaaagaagccataattttgggaacagctgcagccaaggtctcctggactgattcttcgggtctcttgcttgttcgagtcaggcacggcagaaggttcaccaggtaaggcctgcatttctgaggccgaaccaggtgagccagctcagcagacctccacagggcagctcgcaaactccgaggggcaccattctttttaatttcctt

SEQ ID NO: 438492 - DNA, 2786 bp, Homo Sapiens
  misc_feature (237)..(237): n is a, c, g, or t
  misc_feature (244)..(244): n is a, c, g, or t
  misc_feature (285)..(286): n is a, c, g, or t
  misc_feature (326)..(326): n is a, c, g, or t
  misc_feature (2009)..(2009): n is a, c, g, or t
  misc_feature (2139)..(2139): n is a, c, g, or t
aattggagtttagcagttacctgaattcacgaatccttctacaaagcctctatagtgtgagtcatggtttccctccgtacttgagactatagcgagttgtgatagtatgaacttcagatgtcacagccttctccccagtgtaagcctctagcaatatgaggctgactgtgctggaatttctatatccatcaatcataggttttcctcatatgggggtcctcgaagaccaatgagatntgacttntgaaagaaggtttccctgcatgtgtaccattcatagggctnntcccctgtatgtgatctctgatgttagcaaaggtctgatntacggtaaaagatttttccacattcattacactgacaagatttctctcctgtgtgagccctgtgatgtactgtgagtgatgatttgtgcctgaaggatttcccacattcattgcattcatagggtttctccgccgtgtgctttctctcatgtaaaataagtcctgattttacacagaaagattttccacattcgttacattttataaggcttttcttgtgtatgggttctctgatgtacaattagagctgacttatggcagaaagcttttccacactcattacattcatagggtttctcccctatgtgaattctctgatgctgagtgagttgtgacttctggcagaaggtttttccacattcattacattcatagggtttctcccctgtatgtgttctattatgttttgttaggtatgatttattgtaaaagatttttccacattcatgacattcatagggtttctcccccgtgtgtgttctataatgttgagagagggttgacttatggctaaagaatttcccacattcaggacatgcaaagggtttctcccctgtgtgcgttctctgatgtattgtgaggtctgacttcaagcagaaggttttcccacattcataacattcataaggtttccaccctgtatgaattatctgatgcctggtgagtactgacttgtggtagaaagttttcccacatgcattacattcataaggtttatctcctatgtgagttctctgatgctgtgtaagatttgacttttgactaaaggatttcccacactcaagacattcaaaaggtttcttcacctgtgtgagttctctggtgtactgtaagggtgtgaattcatacagaaggatttttcacattcattacattcataggttttctgcccctgtgtgtgttctctgatgtttagtgaggtcagatttctggtaaaaagttttcccacatgcattacactgatagggtttctccccctgtatgtgttctctggtgtaatgtgagggctgacttatggctaaaggctttcccacattcattgcatttcaaaaggtttctcccctgtgtgtgatctctgatgtttagtgaggtttgacttctcccagaaagtttttccacattgattacattgaaagtgtttctctcctgtgtgcaccctctgatgtcgagtgagatgtgacttctcccagaaagctttcccacattcattacattcaaagtgtttctctcctttatcacctttctgaagctgtgacagacacaatttcctcctgaaattattcccactttcaccacaatcatagtgtttcacaggtaccccatcatgtttagaaagggtggacttcacacataagaacttctcacaatcactaaattcatagtgactgtcctttgatggaggtatctgatggaacaagagggatgaactatcacagaaagttctcccaaattcattatagtcacagttattctcttctgcattctctctcttccgtgtattgaatactgccttttcaaggagggtttcctgacatatactgtattcaaaattgtggtctaaagtttgaatcttctcatgctgcaaagtgttctcacgatgactcagagtgttcctatttttcaaaacttcatttttctctcgagtatgagtttcatcatgcttaatattgagtaacaatttcnccacatgcattaaattcgtcagacttttttcctaaatagtttatcttactgataaccaattctgaaacagtgttgaaactcattccacatgagtcatactgacagaacatttttctggaaggaaaagaanttacgtccatgttaaatggtattcctattacattaccttgttccttagtcagcatttcattattgatgaatacatacttcccacaaatgtttagattgattttcttggctcctctctttcaggtgatcagctgtccagacttctctatccaggattctctccataactgtcaaggtcatccaatagcaaggaaagtctgggaaaccaccatagccaagaggagcctggaaagctctggcttgggaattcttcctccagtctccatggttcttctccttgttccagcctgaagatcacctctggtttgtgagcacaataccccactgagacaaggttgctgtagttctccagcatcacatctctatacagagccctctgactagggtccaggtgctgccactcctcctgggtgaagcccacagtcacatctttaaatgatactgacccctggaacttctgtatctaccttgttcattttgttctgttcttggaaatgacggagacaactctgaagatacagctcactctctcttcgggttgcattcgctcataagagatgcctggtagatcgcctgaaatcccgggaccgcctcccacgcaaaacgtgagacaaactaaaaggaaaggcggaaacgcagaaacgcaga

SEQ ID NO: 438493 - DNA, 1054 bp, Homo Sapiens
  misc_feature (1015)..(1015): n is a, c, g, or t
  misc_feature (1018)..(1018): n is a, c, g, or t
  misc_feature (1033)..(1033): n is a, c, g, or t
  misc_feature (1037)..(1037): n is a, c, g, or t
  misc_feature (1039)..(1039): n is a, c, g, or t
  misc_feature (1045)..(1045): n is a, c, g, or t
atcaggccaaatcggccgagctcgaattcgtcgagagcgggcttcgcggcggaggcccgggcaactcttttgaatggaatcgggctgattcatcgccggtttgcagacagagccgcgtcgggtgtgcgccgctgctgctgttgcctctgtcttcgcgtcaccacagaggcaagacaagggtccatatcgcggcatccggctcccgcccgtcttcaggagagaaagaaaaaataaaatatacttggggaagttgtacctgccagaattagcaagagctttctttaagaagacatttgtcaaactcaacaaattgaaggttaacaccttaagagttgtagttactgaccagaaatatggacagacttcttagacttggaggaggtatgcctggactgggccaggggccacctacagatgctcctgcagtggacacagcagaacaagtctatatctcttccctggcactgttaaaaatgttaaaacatggccgtgctggagttccaatggaagttatgggtttgatgcttggagaatttgttgatgattataccgtcagagtgattgatgtgtttgctatgccacagtcaggaacaggtgtcagtgtggaggcagttgatccagtgttccaagctaaaatgttggatatgttgaagcagacaggaaggccggagatggttgttggttggtatcacagtcaccctggctttggttgttggctttctggtgtggatatcaacactcagcagagctttgaagccttgtcggagagagctgtggcagtggttgtggatccccttcagagtgtaaaaggaaagggttgttattgatgccttcagattgatcaatgctaatatgatggtcttaggacatgaaccaagacaaacaacttcgaatctgggtcacttaaacaagccatctatccaggcattaattcatggactaaacagacattattactccattactattaactatcggaaaatgaactggaaagaagatgttgctaaatttgcanagnagagtggatggaggnttgnanttcagnctatagtga

SEQ ID NO: 438494 - DNA, 2050 bp, Homo Sapiens
  misc_feature (57)..(57): n is a, c, g, or t
  misc_feature (428)..(428): n is a, c, g, or t
atacaagtttgtatttgcgcccgtgtttttcggccataggggcgcaagttataaatncgggggggtaaacaggggccgtagaggcggggctagcgagtgtgagggtgtcatcagaaaacggtttggggagggattgccatagttgaggaggaaaggtattaaaggaaggggccaccaggggttcgaagggggtttacgggggggaggcaggtgaatttgaaatcgagggtcggtttgggaatacggggggaaaaatgccaggtaaaggcctttagaaggtcccattgggcagtttgttcagaaccggtggggttgggcgccggggggtttttgttaattggggaggaatgccaaggccggtagtgcatgggccaaagattttccttagggaaaaccagggtgatggggcatggtggcgcttggcgtanctgggcccgggcacgcccaacgagatgggtttagagaaagttgttcgagggccggaggggggccgggcaagtggcgtgtggttagggtggtgtttgtggggactggtaaatgtattttattttgtaagtgacaatcaaaatatatttgtgctactgattttttcaaatattaaatgggatcttaacaaaatttgtccactttgatgtattcatgtataactttagaatctgcaaagaccctgactaaagaaacagaagtaattgcacaactgagactgaaggtgttacagtgctgcaaatgatgccagatgtcttacatttagccaagtacaccttcagaggtcccttgattttgagcattaggaacaacagaggaatatacactgaaggcatcattaatagcgtttttcgttgctttatttaaatacgacagtatccaacatagctgctaaacactggacaatatttgaggtcataagtacatccacatgttcctccaaatgacgtttggggtcctgcttgccaacattctttattgccagctgttcaggtgtcatcttatcttcttcttctacagccttattgtaattcttggctaattccaacatctcttttaccactgattcattgtgtttacaatgttcactgtagtcctgaagtgtcaaaccttccatccaactcttcttatgcaaatttagcaacatcttctgttccagttcatttttccgatagttaatagtaatggagtaataatgtctgtttagtccatgaattaatgcctggatagatggcttgtttaagtgacccagattcgaagttgtttgtcttggttcatgtcctaagaccatcatattagcattgatcaatctgaaggcatcaataacaacctttccttttacactctgaatgggatccacaaccactgccacagctctctccgacaaggcttcaaagctctgctgagtgttgatatccacaccagaaagccaacaaccaaagccagggtgactgtgataccaaccaacaaccatctccggccttcctgtctgcttcaacatatccaacattttagcttggaacactggatcaactgcctccacactgacacctgttcctgactgtggcatagcaaacacatcaatcactctgacggtataatcatcaacaaattctccaagcatcaaacccataacttccattggaactccagcacggccatgttttaacatttttaacagtgccagggaagagatatagacttgttctgctgtgtccactgcaggagcatctgtaggtggcccctggcccagtccaggcatacctcctccaagtctaagaagtctgtccatatttctggtcagtaactacaactcttaaggtgttaaccttcaatttgttgagtttgacaaatgtcttcttaaagaaagctcttgctaattctggcaggtacaacttccccaagtatattttatttttctttctctcctgaagacgggcgggagccggatgccgcgatatggacccttgtcttgcctctgtggtgacgcgaagacagaggcaacagcagcagcggcgcacacccgacgcggctcagtctcctcgtgccgaattcgccacccagg

SEQ ID NO: 438495 - DNA, 1615 bp, Homo Sapiens
agcttgaggggttttccactcccccctataattttcacaggccatcccgtaacacacaatctaatttttatatgtgcttgctttgcaaattcagcttcaagataaatctccctccccctgcgccacaaccccatatagaaatcttgaattgtctctggggcaagataaggagaggaaaatgccccagaccaaggtaagagctacagttatcagtctttaataacttacaggcaaatgctaaaaaatagttaataacaataatacagaggacacacacagcttataaaaagggtcatggatctacaaatgtggggaggggttcttggcactttcacagacacaaaaataaaaactatgtgactggtattcctagaaaagcagcctggggagactccccagttgggggacagaggaaggggagatagttatttcatcccaaacacattctccaagtcacttccatccccccgcccccaaacacatccaattaaaaatttttagccagagaagaaaaataagaaacagggtcgaggtagagtcacagtttacatttacgtctccacagtcctgcagcgcccacttctccagagaggatgagagagatatgcaaagacatcccatctcccatccccaccccagtgtggcaccaaaacgggacaccccatgctcctctctccttcattgaggtggacaggtcctgcaccccagtctgactgagaggtcacaggctggtcccaccctgctgtccaagtgtgcagacccctactaggtgggaggaaagggagggggggcttgggtcaccgtctcttcttgccaccccgagctgccttcttcctcttgaggatcatctcatagaggcgctcaaggccctgctgcaggcccagaccgtccacagcgctgcagccttgcacatgagtgagagtggcggctgctagctctcggactgccagcctcttctccacctcagcagcgctcagtgccccgggctggtcctgcttgttggccagcaccagcactggcacgccctggttgtccgaggcccggctgattcggtgcaactccaccttggcttcctccagccgctcagcctccgcagcgtccaccacaaacactagaccgtctgtccggcgggtataagagcgccacagtggtcgcagcttctcctgccccccgacgtcccacacttggaaggtgatgccacgcgatcccccgaggggcacccggatcttctcggtgttgaagcctttggtggggacactctggacaaactccttgaacttgaggcggtaaaggagggaggtctttccagcagagtccagcccaatgaccacgacatgcagggcttggaagtggggcaagaaggaggaggcagtgggcgccatctcagtcaagtggttccccatagtgagctaaggcgcctagtagaggcagggaggccttgaaattgaaggttccagggagcacagctgggttatctctcgtgagccgcgctctcctcgagcctttcccggtgaaacaccgcagccgccccgcgagacccccgcagacacccaccgcgcctccaaccgctgcctctgcagagcctgcctagggttcggccttaaaaacccccgct

SEQ ID NO: 438496 - DNA, 490 bp, Homo Sapiens
aagagctacagttatcagtctttaataacttacaggcaaatgctaaaaaatagttaataacaataatacagaggacacacacagcttataaaaagggtcatggatctacaaatgtggggaggggttcttggcactttcacagacacaaaaataaaaactatgtgactggtattcctagaaaagcagcctggggagactccccagttggggggacagaggaaggggagatagttatttcatcccaaacacattctccaagtcacttccatccccccgcccccaaacacatccaattaaaaatttttaagccagagaaggaaaattaaggaaacagggtcgaggtagagtcacagtttacatttacgtcttccacagtcctggcagcgcccactttctcccgagagggttgaggagagttttggcaaggacttcccttttcccttccccaccccagtttgggcaccaaaaacggggacaccccatggttcct

SEQ ID NO: 438497 - DNA, 1045 bp, Homo Sapiens
ttcgtcttgcctgatggcattaggtttattttgtgggaaagcagaattggggctctctgaaaggcacttgtgaggcatagaagtaaaggttgccacatggctaatggtggacgtcttcctggcatccttgggggtaggggaaagacagacagctcccagggccacagaaaatacctctatcagatagagaaatccgagtcccagtgccttatggtggagccaagggttaagcagatggcctgctttttttatacgaagagtttgcttcctccgggcaatcttaaagtctggcattcacggctggaggtatagggcccatccacttctctcccagcaggtgcgccagcagctccatccggtcagagccaaataacatgtgggtttggccatccacatgggccacggtgatgggcagcccaaaggctccgtatctgcaggctgcctcagtggtctccttgagctggttcttcacctttggcgttgcgatcttttccagaagtccctgggcttgttctgcagacataccagccttctctgcagccgccaggatgctctgcggctcggtgatgtcttcattccttgaccagacgcgcatccacagctcccgggacgctttctccagcatctctggatgctccaagttcacggcggtgaggaaacgcatggcagacaaacttcctttttcaagcatcacagacaagaaatccttggggaagtggatgggaatctggagatggtgtctcaggagctttaagtcatttgccatgtatagtcctttgcggggaagcagacctggaggcttgtttccactgtctttcatgatccctgttatgaggctgggccgcaactgcaggttgatgttccagatattctgataccggcacaggatctcgaagcccagccaggagtagggggacagcacgtcatagaagagctccacggtgcgcggcaggggccccatgctgcaggctccggaagagcagtggcagcaggagctccttttcccggaacccggcagaggctgcccagcttctgggcctgcctg

SEQ ID NO: 438498 - DNA, 1096 bp, Homo Sapiens
  misc_feature (239)..(239): n is a, c, g, or t
ttcggggaaaaggggggttttacctgggaaggggccagtagattccccccgggggcggggggcaggattcatgacccctgaaaaaccgtgcctggggggaagttcagaaaagtccatccccaggttcttccccagagggaattccccagagcccccacatttcaccccttgaaccagacgcgcatcccacagctgcccggggacgctttctcccagcatctctggatgctcccaagttncacggcggtgagggaaacgcatggcagacaaacttccttttttcaagcatcacagacaagaaatccttggggaagtggatgggattctggagatggtgtctcaggagctttaagtcatttgccatgtatagtcctttgcggggaagcagacctggaggcttgtttccactgtctttcatgatccctgttatgaggctgggccgcaactgcaggttgatgttccagatattctgataccggcacaggatctgcgggcagaggtcaagaacgattgccagtgtgcaagatggaaaagtgaaagagccgagggaaagggaagggaggcgctaagtgcagagcaggggttatgcggacaccctacattgtttggtttgaaattggcaaaactctcctcactactagaaatctattccaggatcttcgctcctgtggccagttttccccaaaactgccatcgttgggctaagaggtggccgtgttctgcatttctccctgaatgtttggagccgcccctctttccaccaccgtgggaaactgcagtcgggatataaaggctcgggttggagccagcgactctattccgtttaaaagcacaaagtgaccttcagccccggagctctccctgcttgccttaaccccttgggcggcgccaggagttacacgagacctctgtcccggagccctgcgctcactcttccctccgccctcactccccagacactgccgaggcgacccctcccagcgtcacctcgaagcccagccaggagtagggggacagcacgtcatagaagagctccacggtgcgcggcaggggccccatgctgcaggctatcccgggaattccggaccggtccagc

SEQ ID NO: 438499 - DNA, 842 bp, Homo Sapiens
ccggtcagagccaaataacatgtgggtttggccatccacatgggccacggtgatgggcagcccaaaggctccgtatctgcaggctgcctcagtggtctccttgagctggtgtcttcacctttggcgttgcgatcttttccagaagtccctgggcttgttctgcagacataccagccttctctgcagccgccaggatgctctgcggctcggtgatgtcttcattctgggaagaagagaagacagcatgaaggcggtgcggggagaggggtgtgactgggaggacagtagatcccccgggcgggggcaggatcatgaccctgaaaacgtgcctggggaaggtcagaaagtcatccaaggtcctcccagaggattcccagagccccacactcacccttgaccagacgcgcatccacagctcccgggacgctttctccagcatctctggatgctccaagttcacggcggtgaggaaacgcatggcagacaaacttcctttttcaagcatcacagacaagaaatccttggggaagtggatgggaatctggagatggtgtctcaggagctttaagtcatttgccatgtatagtcctttgcggggaagcagacctggaggcttgtttccactgtctttcatgatccctgttatgaggctgggccgcaactgcaggttgatgttccagatattctgataccggcacaggatctcgaagcccagccaggagtagggggacagcacgtcatagaagagctccacggtgcgcggcaggggccccatgctgcaggctccggaagagcagtggcagcaggagctccttttcccggaacccggcagaggctgccca

SEQ ID NO: 438500 - DNA, 1804 bp, Homo Sapiens
  misc_feature (191)..(191): n is a, c, g, or t
  misc_feature (1788)..(1788): n is a, c, g, or t
caaagtgagacattttttattctgcattttggagcctcctcgttcccacaccctgtggcaggttttgcccaggtcctcagtcactgccctagcctctgacaaccccagctctacccgacatcccccaatgcagtgcagtcagcgggccacctgcaggagctcttccgtggccaggcccaccagggcatggnaaggctcaggtgcaggtattttctccagaagcgtcggtcctgcccgtacacctgggccgggtagcaggggcttccgatgccgtgggaaggatgcgggccacagccctgctgggaggaacttctcctctgggcctcagggacaggaactggcggatgtcgcagcggacctggtcctcccaatcctggagtctggcctgccctggctcggggccctgtgcgtcctccatgcctcccggctcctgcccttcctcttcctcaaagtagcggccgagcaggtccttgagcctggtgctgcgctcctcatcctgctgctccaggcagggcccgcagctggggaaggctacgctgtgaaaggcctggaaggttctgcgcagacgggccagggcctggcgctcccgggcctgcacacggccatagaggaagtcacatatctggtccttctcctcagcggtcaggtcccccgggctgcgaaggtggaaggccagctcactgaactccacaagcacccctgtcccacgccgcacacctgtcctgggctcgtggtcccactgcagctggcagagagcctgccgcacagaggccagctcccagcccatggagtccaccagcttgaccatgtcaaactccacggagctgctgccttgccctgggtcctcaggcagctgctgggccaagcacacagccaaagggggacacctgtgggccagggcctggagctgggcagggcccccagggcagttcagacggcaatgggtataggtggtcgccagcagctccagccagtggtgtgggtgcagctccaggtagcacagcaaagtctcgatggcctcctccggcatgtccaaagcctgtacggtaagctgtattgggagtgcccgctcatggcccatgcagacccttctgggtccttggggctgcttggtggctaagctgctcagcctcttgaggggggtacttgggcacaggcctctccccacccacggccctttcttgctccgagggcggcctggtgcaggtgcaggtgcaggctgggaacacgcgctgtaccagcctcttcacagccaggaagtccgtgctgtcggcgtgcacatgtctgcgcagctctcgcaggtcttcgccctggggctgcaggaagaggtggcagtgggcaggctgcccgtcactgcccggcccggcccacggcctgcacgtagctctcgaagcttgggggcagccccagatgcagcacagcccgcacatctggccggtccagccccatcccaaaggccaccgtggccaccaccacccgcaactggccctgcatgaaggctcgctgtacccgccgccgttcccggctgcacatgcccgcgtggtaggcctcggctgtggttttgggggcacgacctccagaccctgggacccaggctgcgtgcaggcaggttcggaggagcgcagcgatccgctctgtgtcctcgcgccggttgcagtaaatgataatggaatcgaggttttgaaaacgtttgccttgcagcagcgtcaacagtgcctggtctgtgtccctgtccatggacacggaaaggtgcaggttggtgggaactggggctggcccgtggaggtncagctcttcagccaca

SEQ ID NO: 438501 - DNA, 2129 bp, Homo Sapiens
  misc_feature (1340)..(1340): n is a, c, g, or t
gagcaagcttagttccctgttcaatcccaggctcccttagggggtcagccatctttcattaccaaggtgacctacccattaccagggtctgtgcttggcactaagggcaagcaagggcagtgcccctcgtttgaaactagtctgtctggggtgggggcctccttgcaaggtccatatgctttttcacagcttcacattagggacgttcacagcagagtggcctgttgggggtgggggactggctgtcgataggctggtagccgagccctagtagcatctcggcggcggcggaaggccaggatttcctccggaagggcagcacagcgggcactcagggccagtaacatgggcagtgttcaggaggcagccctcctctggagttttcacacctagctctgtctcagcttcaggtctgagccgggagctggccaagcccaggtgcaaagtctccagcaattccatgtccccagggaattctgagtcccactcatagttctcgtccacagatgtgttcctcctcttgctgactgtcaccacatgctcccttcggggccatctctcagggccactggcccagctgctggtgtctcctggagcagggctgaggtagctgcctcctgcagagggggctgtggaggggggccgcaggaacgaagcgctgcctcgcccgctgctctggctggtgaggctgcctcgaggggcagcagggagaaggcctggcagcagccgctccctcagtgtccagtcagccagggctgtgtaagggggctctgcagtggccccagcccctaccacagccccaggaagtgattccctgggggatacaggaggggtttctggagaacgaaggaaagatgaggtgggacagcgccgggtatccatgtaatctgggggtgcagcagggctgggctcctcaagcgggggccagtccccatccacattcatctctcggaagaagggcaggctcaggtactggagcaggggtccaggacctggcaagggactgggtggggctgctggagggggtgccacagggctgatgtcttcaatgcagaggggctggggtgccccactggggctgctgctgctacagtcaaaggaccgggccagacgctgggctggagtccgaggttctgcctgctcccggcctgacctttcctggggggccgccacagtgggccccatcacaaagcgcccgtctgggccccggcaaatgggctccagaggtaagggtccccggctagatggaggatccgggtgggggctgggagttccggcaggatcccccccagagcagactctggcgcaggctggggactggggatccctggagcttacanttcgccacgctgtcaggactgcctgagcccagagcagagctggggaaggacaggagatcagggtctgtggtaggggcaggtccccctcccaggagccagcgtcaggccttgagaggtttggtgaacaacagagcagagctagggagaacaagcgaggaaaggaccaacaaggtggaggggtggagggaaggcacaggccatactggaacggcctcaggctggggccactgcacaccccttcttaccctctcccacttttgttcctccccaacacccaacatccccctggtaaagatgcaaaaaaggaagcagaagatactggcacgtacaatggaaaggcagaagaaagccaaggaggtggaggcacttacggtgcagctgacttcccggtcggagagaagataagaggtggatcttggcggaggcgcttgcggcggcggcgggcagccctgcgccggttcaggaggcagccggccaggatgctcacaaggacggccactcccagaaagcagactccgcccaccacgccggccagcacgggctgaggcaggaggcccggcagctgcgtgcgcgaagggtagacctccagaccggaagtggagacgttggccgtgttgctggggtcgctgacgaagctgcccgcgaaggccacgaggcggaactcgtagagaacatccttgatgaggcctggcaccagcagctctgtttctgtgcctgccacagccgggtccagcacctcccagccctgggagccttgccggccttccaagacgtagccatccagtctct

SEQ ID NO: 438502 - DNA, 401 bp, Homo Sapiens
gcagacctaagatccctgttccaatccccagactcacctagggggtcagcacatacattccataccaaggtgacccaaacccactatcagggtctgtgcctgggcaccaaaggggcaggcaggggcagtgccctcgtttgaaactaggtctgtctggttgggggcctcctttgcaggtccatatgccttttcacagcctcacattagggatgttcacagcagagtggcctgttcggggtgggggactggctgtcgataggctggtagccgagccctagtagcatctcggcggcggcggaaggccaggaattcctcccgaagggcagcacagcgggcctcagggccagtaacatgggcagtgttcaggaggcagccctcctctggagttttcatcccgggaa

SEQ ID NO: 438503 - DNA, 973 bp, Homo Sapiens
gttctaggaatcggactctttcctctttcatctccagctttacctttaaggcctgtaactccctccatctgctttttggctgtttcgttaacaagcttcagctccctcttgcaaagtttctaccagcaacatagagtccatgtgatcagtagtggattcttgtcgtgatgccagggtctcactgcctaaagctggatcaaggcccttgctctccaaaattgccaaacagttgtcccgaaacttctccagcagctctaccttctgggtcaggtccttcagctctccctgagtttcagtcaacttctggtgcaactgcttgttgacggcttctaacagctggttcttgtccttgagctcttcctctgatttttgcttactcagtggtttgtagccttttctgacattccttctggtggcagtgtcagtagctttcatttgcccattctctcgtctcagtttggtgatttttgtaacatcattctctggacctcctgaatgaagctgtttggaaacatcgacttctttggacctaacaggtaagagactcttagaagtggcccgagtttgtgtgtctgccggctggccgccgctcagcgcagaggggggctgcaggctatacactgtcttaaccacactggtcatcgtaacgaggcggcacggctgaaccccaggagcccgccggtcctgcccgcagtccttctcgctctcgtttaaaagattccctgcagcaactgtcgtgccaccggctaagtcggccgcctgggtttcaaatagaaacttccggtagctaggcggaagtgggtgggaatcgcactctgtagacagccatgttgtacggaaaactctgtccaggggcggggcttcgggagccgccatactgtacggaaggttcgctcagaggccagagccagacctagcgaaaggtgttggagcccccaggtctgggcagaggaggagggtgatgcaatttgta

SEQ ID NO: 438504 - DNA, 981 bp, Homo Sapiens
taggtagcgaggcctgggtggcgaattcggcacgaggcttttaaacgagagcgagaaggactgcgggcaggaccggcgggctcctggggttcagccgtgcctcctcgttacgatgaccagtgtggttaagacagtgtatagcctgcagccctcctctgcgctgagcggcggccagccggcagacacacaaactcgggccacttctaagagtctcttacctgttaggtccaaagaagtcgatgtttccaaacagcttcattcaggaggtccagagaatgatgttacaaaaatcaccaaactgagacgagagaatgggcaaatgaaagctactgacactgccaccagaaggaatgtcagaaaaggctacaaaccactgagtaagcaaaaatcagaggaagagctcaaggacaagaaccagctgttagaagccgtcaacaagcagttgcaccagaagttgactgaaactcagggagagctgaaggacctgacccagaaggtagagctgctggagaagtttcgggacaactgtttggcaattttggagagcaagggccttgatccagctttaggcagtgagaccctggcatcacgacaagaatccactactgatcacatggactctatgttgctgttagaaactttgcaagaggagctgaagctttttaacgaaacagccaaaaagcagatgggaggagttacaggcccttaaaggtaaagcttggagatgaaagaggaaagagtccgattcctagaacagcaaaccttatgtaacaatcaagtaaatgatttaacaacagccccttaaggaaatggagcagctattagaaatgtaagaaagaagcaagtggccagatgggctccctcttggggcataaaatctcagaggaagctacttaggacatcatccttggccatggatcttctggggactcaccatctccagaatggaaaacaatttctacagtagaacttaaagacagt

SEQ ID NO: 438505 - DNA, 1131 bp, Homo Sapiens
tttttttaggttaaaaggctattttcattcctcaatgttacagtcagaatatttacagaagtatttattttaaaagtagacttaaaaaagaaaagtaatttagattaaaagatccaaggtgtattgtttcatgtaggtgttactgctacctatactttcaccccatttattaagcccaaaacacttcaagcaacttcaggttcataaattaataaggaggtacagaagcccaaccaggatgggaaagaatgtgtttcaggttagaaggggacagcatggctcctcaatgatgtcttgtatggaacatttgtgctccactgtaatgaagattttcttcctgaaaatctgaatgtgacattttagatcctctggttgttggtttagtctcccgattgtaatggtgtgctgaagtcaggtggttgactagaaggtcaatccaagctcctaggctcccctctcttgtaggcctcaattatccacctgtgaggctcaggagggctgaccaacctgaaggttgggaaaacttgcttaaatgcggaattgccatttcagcataaactgtccttaagtctactgtagaaattgttttcattctggagatggtgagtcccagaagatcatggccaagatgatgtcctaagtagcttcctctgagattttatgcccaagagggagccatctggccacttgcttcttcttacatttctaatagctgctccatttccttaagggctgttgttaaatcatgtacttgattgttcacataaggtttgctgttctaggaatcggactctttcctctttcatctccagctttaccttaaggcctgtagtcctccatctgctctgaggatgttcgttagaaagctcagctcctcttgcaaagttgtagacagcagcatagagttcagatgtgagcagtagtggattctgtcggaagccagggtcacgctggctaggctgggtcaacggccgtggttcccaaacatgcaaacaggtgtccaaaatgtcacgcagccaactcggggaggcgagagccgccgaatgacgacacctcgaggaacgccgtgcggctttcgagagatcaacggtgactacacactatggacaggtggaacagcacactggcatg

SEQ ID NO: 438506 - DNA, 761 bp, Homo Sapiens
  misc_feature (114)..(114): n is a, c, g, or t
tcagtagtttcgaagcctgctttacaaataagcgggcagaaagtcccatatttgattatggccaatatccaaaacttctagctttcggctttcacatacccatcaaggcacatnttctaagcggttccttgaaacatccatgtaggacagataatttggaactgggtaaacatcaagttgaacaagttcattagaagaggcatagagcgcttttaggaaatagccacagatgtctaatgtgaccagttgattcctttcacagtgtaaaacttcaatgttgttgaaaatcatagcatctagatcaccaagcttattgtctcgtaggtcaagctgagtaacatgctgtagaaagtccacttcatctgctatcagcttcctaattacgttcaaccttagatccacatgtttaatgtgaggcatttttcttaaagcctgtagcctaagggtctccacacagtttccagacatacaaagtttatccacagcagtcaatttctccaatacttcgggaatgtcagtaaattcattgaaagaaagacccagataactaagctgcttcatgttctccaactcagcaggaagggattggagaaagtttccatccaacaaaaatgtctgtaagttgtgcatcactccaacggctgccgggactgatcgcagggcattgcaggacacgttcagctctgccagggttggaatactgcagactgccagagggaagtcccctaaatgattattggaaaggttaagactcttcaact

SEQ ID NO: 438507 - DNA, 1023 bp, Homo Sapiens
  misc_feature (61)..(61): n is a, c, g, or t
  misc_feature (64)..(64): n is a, c, g, or t
  misc_feature (145)..(145): n is a, c, g, or t
tcttcttgcttctttgattacaagattcattttcatttcataaagaaaagactgctggatnagnagttgggcattctggttcatgagtgaggtactttggaattaaagggtggaattttcaacctgaagcttggcattctgtgtntgaagagtggtattctgtctttgtaatgacactgtctgcctctgaagtgcaagaatctgagcctgcaaattattgttctgtgtctcaagttgcttcagttgagttttcaacgcttgcttctctgcttgcagtgtagcattatttctttctacttcaattaatctgtctttaactttcagaagttctctagtcgtttcttgactttctcgctcccatttgttgtcttcaccagatattggaggagagctctgtaccatcctttcctcatcttgtctctgtttgagagcttcataattttttttcactgttttaagttcttggcgcaattgctggttataattcgtggattcttctaatcgagcttctaaagcagcaattttttcttcttttatttcaagagacttcttaagagtggattctaattttgattccaaaagtttatacctactgtcatcagtactttgttcatcatgtaagagtcgctccttatttaaccctatcttctcaagctcatgagttaatttttcgagatcattgttcatctgttgggtcttcaacttttcactcaccaaatcctcacgtagtgtaaccaacgtttttatatcaatagttgctcttttcacaagctccttattttctttttctagttcttccagacggacacaagattctttatatataccaatttctttggatagggttttgttttctttttccaaatttccaatcttcacattattttcttctaatgtggtatctttaatttctgcttgttgtcggagtctcttattttccttctccaattgtttcttatccttttccagttgagaagtctcttgctctaatgatttattttctttttccagctgttctagtct

SEQ ID NO: 438508 - DNA, 930 bp, Homo Sapiens
tctccacactgctttcttgagttgagagaatgtcactgcccatcagcaggaggatgatgcttcggaggagcttatgggagtctatgagagctatctcaggtgtctgccacctttggcacagactgctcccacagggagtgtgagagttgtttgacgggaggctaaggtaagcttccaccagctgcaggacctgacacgcagcaagtaccaagccttggaggacttctggagggcaggatcccgaagcacagacagcagcagagagacacccttggtcaccttctggtgagtccagtagagttgacttcgaagcagatcacaggtcagggaaaggagcaggtatgtgtcagtagtctgatcgagatgcttcaggctcgatgctgcctcttccaggtgtaactgggcatagctgggacagccgagggtcaggaggagctgggtgatgtggcaggaggagccagctgccttcgagtggtccttcagtctctcagagacaatccgtagcagcaggaggacctccagagcctgcatgggctttgccaccagctggtagagggctgctaggatctgcagtgaggctgctgtctgctggagacaccgtacagctggggcctgcccctttgtaagcagctccttccacagggccagggcttggtccaggcatttggactgagcagcatctgcagccaggttgaaggcaatgttactgtataggaaacgatcttcctggagtttatcttcatagttcaggtcattgacttcaaattcctccagagttaccaggggcctgggctctccgatcccgctcgataccttcctgcattttggcttccagagtacagatgtaaagccacagcaaggcctgtgctttatcgtccagaagctgatctctggcctgggcctcaggcctcacagagtccagaagctgca

SEQ ID NO: 438509 - DNA, 1610 bp, Homo Sapiens
gccccggaaaggagtggcctttcttggggccagtgtgttgccagtgttcattcccttgatctttcttggagccggggcccttgttgctttgggtggaatggaagaaaggtgaggggagtttcttgttgaactcaagcggggaaggacaccttacatctcccatcaaaagcggttcttggacacctgcagataccgtttcccttggcccggttaccagcttcctgtcctgcaggatcagaacattgtctgcttcctggcttgctttggctgagccaaaaatggacgctgtctgcagttccttgtcatcatcctctttccgggggtgaatgaccagtgtcacatggcagttattgtctgttgcaaacttccgaaagaccccgatgatgtagtcttgagctgcgatcctgtctgtggacagctgctcgtgacccatcatgaactgcaggttgtcgatgatcacatgacaaatgtcatagacgtagactgcatgttgcattgtatctattacagtcctgatgctttgctgtccatggaaagtcatgaaatagaggggcaggtcctcaaagcggtcagcccagtgatcatatttgtccagttgatcttccagccgcccctcggcaaactgtgtcagcatgacccgggctagtctcacattgctgatctcgaagctaccccacagtgtgttcaccccctgggaacacaaatccagggcatactcactgatgaatgtcgtctttccactgcctgttggccctgtgaagaccgtcagctcgccctttcgatgtcccttcaagatacgattgaggtctggaaagcggctccagcggaggccagctgcttgctccacatttgacagttctcctagcacctcctcccgaagctgccggaaagatacgatggacttgtgccaggcagggcagggcggtacgaagaatacgagaaagattgaagcctccgttcagggcctccaggggacggggttgctggtctcctggtcgcaccaagaagcatcgtttggggttcagttttcgtgcaaacaacttggcggcttcccaggaccgaaggtcatcccccaaccagaatacaatccgccggaactgttccaggtaagggagtaaggcagggggtaagcaggtcgttcctcggggtagagtaagggtaggcagccccgtggactggttcaaggccaggctgtcaagctcacgactcgtcagtaccacctcagcatctcgacgactaatcagtggtaatccaaacagattgtggtaggcgctgggtcggggaatagtggtttcctcgtagctcactccatccccctggcatttagcctctaggagcttcaggcctcgtaatcctgagcccccaggggagaaccaagggaagacaagactgcgagcaggtcgcagatatcgcacactgaaacgcttgagtgtgtcatctgtaaccttggtaaggccaaacattgtatcagccagctgaacctcctcctgatcaggcagctcccagagaggtattgctcggttccagatcctccggacctcctcgctgtcctcaaattctggtgccttgctaagcctcgtgccgaattcgccacccaggcctcgctacct

SEQ ID NO: 438510 - DNA, 1664 bp, Homo Sapiens
  misc_feature (1)..(2): n is a, c, g, or t
  misc_feature (8)..(8): n is a, c, g, or t
  misc_feature (12)..(12): n is a, c, g, or t
  misc_feature (16)..(16): n is a, c, g, or t
  misc_feature (18)..(18): n is a, c, g, or t
  misc_feature (22)..(22): n is a, c, g, or t
  misc_feature (35)..(35): n is a, c, g, or t
  misc_feature (41)..(41): n is a, c, g, or t
  misc_feature (46)..(46): n is a, c, g, or t
  misc_feature (50)..(50): n is a, c, g, or t
  misc_feature (54)..(54): n is a, c, g, or t
  misc_feature (56)..(56): n is a, c, g, or t
  misc_feature (58)..(58): n is a, c, g, or t
  misc_feature (60)..(60): n is a, c, g, or t
  misc_feature (66)..(66): n is a, c, g, or t
  misc_feature (68)..(68): n is a, c, g, or t
  misc_feature (77)..(77): n is a, c, g, or t
  misc_feature (81)..(81): n is a, c, g, or t
  misc_feature (83)..(83): n is a, c, g, or t
  misc_feature (87)..(87): n is a, c, g, or t
  misc_feature (100)..(100): n is a, c, g, or t
  misc_feature (128)..(128): n is a, c, g, or t
  misc_feature (139)..(139): n is a, c, g, or t
  misc_feature (142)..(142): n is a, c, g, or t
  misc_feature (1479)..(1537): n is a, c, g, or t
nngctttnactnattncngttncattaaaatgttngaaaanttgtnttantttnananangacaantnaaggcagtntgtntncttntggaaggcctggntccatttgctcctgatggaaaacccctntcccagcagtnttnagaatgaactggagaaggcagattggtaccagattcagggagaggtacttgatagaccaagaccagttctttctgttttaaagatgtgttatctcgatctcctccaatgctccctttggaaattcacagaagattagggctcccccacagaaacagcagctggcctgggctggtcttctgactaactggagctgaataccaaaagtctgatgggttgactgagtcggtgactgccaattggagcctgaagcccccaaagtcttctctagacttgatgatgaagcaccagttacagttctcccagctcgccttccattgcccgcaccatgacatacagctcggccagacccaccacagaggcgacgatcaatgcagctagcacccgcgaggccatttctgtgaagatatattggcttccaaggtaagtgcagacgaaggcagcaaccaccgtgacaatgaaattgaagatggtgatgaccagagccttcaatgatctcacttgctttcccaggtcgctgagagtcccaccatgtcttgtatcctgacaagtgacgttgcgggtgatccgtttatattcctcattggccagctgtatcttaatcttctccagccgggcaactagttctgggttccgtggaggcttcacaacctctgggagatagatttcactgccttctaggagctcatggaggtatagtttggaatccctttctctcagatgctggtgcagatcccggatgagacggaaagaaaccaagcgttgggggccactggagctatcaccgcccttgtgcttcttccccagcgcggcctcaagctcggcccgcagctttcggggtagccgctctggctccagctccccgccggggcccaaagcacgcaccaatcgctcgcccgcaagcaaagaggacgccatatctagccggccaccgacagatcactccacagcctgccggtgggctggctgcctgtgtggtgatccgtcggcgggctggggtgcctatgtggtgatctgtcagcaggctggggtgtgatctgtctatgggccagggtgtgatctgttggtgggctgcagtgtgatctgtcgggctggggtgtgatctgtccgcgggccgggctggggtgtgatctgtccgcgggccggggtgggatctgttggtgggctgcggtgggacctgtcagcgggctggggtgtgatctgtcagcgggctggggtgtgatctgtgggtgggctggggtgcctgtgcagtgacagtctgctgtgcactggggggttggaaggtcgaggccactggtgacagaggggaagctcctgagaggtttacttaaaagtaaannnnnnnnnnnnnnnnnnnnnnnnnnnnnnnnnnnnnnnnnnnnnnnnnnnnnnnnnnncaacaacaaaatacacacatagctatagacacattttaattatagaaaggattgcagggaaaatacctttattattgtgagtctaaaattctttagcctttaactcacttttttcccgttgaaataa

SEQ ID NO: 438511 - DNA, 1426 bp, Homo Sapiens
  misc_feature (19)..(19): n is a, c, g, or t
  misc_feature (26)..(26): n is a, c, g, or t
  misc_feature (34)..(34): n is a, c, g, or t
  misc_feature (234)..(246): n is a, c, g, or t
gggtgtgaagcccaccctnacccccngccccccntgtagctttttaacccacaaatttttaataatggcctcggggttactgggaaaacactgtaaaaatgccccaccctactttttccttttccacagctggacacttcctccccaactaacagaaactggcaaacattgtagaggaagtgtcccactgagtgaatgagtatataatttatgaaaacagaaaagtgctttggnnnnnnnnnnnnngacaacaggagtacatacagtgaaccaaaaagagtgtaccaggaggagcagaccctgaacagttagaactatggaaaatcgctatgctttgtgttgtcacaggagttaaaataggaataccctgcatacaataaatatttattggataaataactaagcctgatacccttttcaatgcgttatacagactctatcatcacaccactaatctaagttctcagaagttaaacattacaagacttcagaacaacataggcgtctttggctccatttaacagaagaaggaccatagtgatcatttaatctctatgagtctgtcttatcttctggaaaaggggcctaacaccatttccttttgcaaaaaggtagctgccttgcttccagttctaccatcctctagcaacccatctttctcttatttgatgtctctgatcagctcctcttccagcacaaactggagaaaggggatcctttctgttttcttgggaggcttctgaactcaattacaggtctgcattaaaaatgtatggagaaagctggtgattagtttgtacatatggacaagttcaaggcagtatggtctacttctgggaaggcctggattccatttgctcctgatggaaaaaccctagtcccagcagtgtttagaatgaactggagaaggcagatgggtaccagattcaggaagaggtactgatagaccaagaccagttctttctgttttaaagatgtgttatctcaatctcctccaatgctccctttggaaattcacagaagattagggctccccacagaaacagcagctggcctgggctggtcttctgactaactggagctgaatacaaaaagtctgattgggttgactgagtcggtgactggccaattggagcctgaagccccccaaagtcttctctagacttgatgatgaagcaccgttacggtctcccaagttcgcctaccatgcccgccacatgaacttaaggtcggccagaccaccacagaaggcgacgacaataggtaggacccgcaagccttctggaaatatttggttccgggaactgcgacatggaaccaccgaacagatgaaaggtagccagctctctaacacgttcagggcaaaccccgttttctcaagagagggacagaaacagcgccgtatatcaggaaattgggaacacca

SEQ ID NO: 438512 - DNA, 3096 bp, Homo Sapiens
  misc_feature (271)..(289): n is a, c, g, or t
  misc_feature (330)..(338): n is a, c, g, or t
tttcacttagaaatgtttatctttatttcagaataacctataggaccatatccagataaaggtcctatcagtacttctcatgagttatcactcagttttgcttctagagacccaccagtcaaagcagtaaaactaaatctccttaacaaaactgaagtcttcagaaaagcagtgctaaatgggtgatgaaaccttacttaaccactccctgtatgcaagatgacttattttgcattcctaaaacttctactttgattctcaatatatccgnnnnnnnnnnnnnnnnnnncaaaagcattattttggtgaaaatcccaatatatgagtttnnnnnnnnntcattaacatcattaacagtactttaaatcaattactccttttgcctgcaacagggtccagcaaagccttaccacctcaagcaaacccactatacctatctatgctcaagaagtagtttggctactgaagacatgctggtctcttccaagtctttcctcaggatccacacatcagacattcatctctattctccaaagagcacaccatggctgctgtgttcctctccttctcttcttcctcttttgataccttttctttatcttttagcttctccttatttagagtgaactggattggattagctgctggtctcgtccttaaataatacatcccagtcttcaaaccctgcttccagccgtagaagtgcatactagtgagtttgccatagttaggctcagcaatgtggatgttcaaagattggctttgatcaatgaaagcacctctctcagctgccatcttgagaacagttttctgagagatttcccacacagttttataaagttgcttcaggtcatcaggaatttctggtatgctctgaatagagccattgcatgcaataatctggtttttcatctcttcatgccataggccccgctcggtaagatctttcaataagtgaggatttacaatctgaaattctcctgacaagactctgcgagtatagatgttgctggtgtaaggttcaatggactcattattccccaggatctgagcagtggaagctgtaggcatcggggcaataagtaaactgtttcttataccatactttgcaatcttctccttgagaaccttccagtcccataggtctgtaggagtaacattccacatatcatactgaagaattcctttgctaactggagagccctcataggtttcgtatgggccctgctccttggcaaggtcacagctggcttccagagcaccataataaatagtttcaaagatctgcttattcagtaactgggcttctgcactctcaaaagggtatctcatcaggataaaagcatctgccagaccttgtaccccaattccaatggggcgatggcgtttatttgataggcatgcctctggtacaggatagtagtttatatcaataattttattcaagtttcggacaacgactttagtgacttcagccaacttcttaaagtcgtatgtgtgttctgatgtgacatacatattcagggccagggaagccaaattacaaacagcaacctcatctttgctggtgtactccactatttctgtgcacaggttgctgcatttgatggttcccaggttctgctggttgctctttcgattacaggaatctttgtagagcatatacggggtgcctgtttccgtctgagactcaatgatggcataccaaagctgctgagcttttacaactttgcggacacgaccttgtttctcataacttgcatatagtttctcaaattcctctccccaaacctcatccagaccaggacactcatttggacacatcaaagaccagtcctgattagtctccactcgtttcatgaagagatccggaatccaaagagcaaagaaaagatctctggcacgctgctcttcctttcctgtgttcttctttaaatcaaggaattcaaagatgtctaaatgccaaggctccaggtaaatagcaaatgccccaggacgcttgttcccaccttgatccacatatcgagctgtgttgttatatactctcagcatcggtacaaggccattggaattgccattagtcccagcaatgtagctgccagtagcccgaatacaactcacagcaacaccaattcctccagcagacttagaaatcaatgcacattgctttagagtgtcataaatgccttcaatgctgtcatctttcatactcagaagaaaacagctagaaagttgtgggcggttggtaccagcattgaagagagtgggcgaagcatgagtaaaccacctctcagaaagaagattatatgtttcaattgctgcatcaatgtcttctttgtggatcccaacagatactctcatcaacatatgttgtggtctttcagccacttttccattgatcttcaacaaataagaccgctctagcgtcttaaagccgaagtaattgtaagagaaatctcggtcatagataatagcagaattcaggcgatctttattggccagaacaatatccaatgttgacttggccaccatgggagagtgtttgccattatgtggatttatgtagttatagaggtcttccatcacatcactgaacactttctttgtttctttgtgcaagttagagacagcgatcctggctgccaggatagcatagtcagggtgcttagtagtcaaggttgcagctgtttcagcagccaaagtatctagttccactgtggtgaccccactgtacaagccttggattactttcatggtgatctgagcaggatcaacaaaatccatattgagtccataacaaagcttctggattcgagatgtaattttgtcaaacatgactcgttcttggcggccatctcgcttgatcacatgcatcgcagctagtggctgaggctctgaaggatccaagactggactgcggctctaaagcgccggcgggatcgagaaggtgacagagtgggaagggttaggttccaggcgctgctcaggggaaagaactggagttggagccagacagcactttcttcagagcagaggcgcaacaatccaaatccccttcccgcgcccgccacccgtgacgcacaaaggggcgcgacg

SEQ ID NO: 438513 - DNA, 423 bp, Homo Sapiens
ctcaaaccattttattgataaccatttaaatgatgacttgaagatcatgattgattcctttcaatttggatttcaataattaccaataagcagagaaatctattcatacctctggtacaggatagtagtttatatcaataattttattcaagtttcggacaacgactttagtgacttcagccaacttcttaaagtcgtatgtgtgttctgatgtgacatacatattcagggccaggggaagccaaattacaaacaggcaacctcatctttgctgggtgtactccactatttctgtggcacagggttgctggcatttgatgggttcccggggttctggctgggttgctcttttcggattacagggatttctttgtaggaggcatatacgggggtgcctgtttccgtctgaggactcaatggtgg

SEQ ID NO: 438514 - DNA, 619 bp, Homo Sapiens
  misc_feature (34)..(34): n is a, c, g, or t
  misc_feature (40)..(40): n is a, c, g, or t
  misc_feature (62)..(62): n is a, c, g, or t
  misc_feature (114)..(114): n is a, c, g, or t
aattccagccgaactttaatggcccaaaaacaantacccnaatgttgaacttggccccaccnaggggaagaattgtttgcccaattatgtgggatttaatgttaagttaataanaggtccttcccatcaacatccactgaaacaactttcctttgtttcctttgtgccaagtttagagaacagcgaatcctggcctgcccaggaataaccatagtccagggtgccttagtagtccaaggttgccagctgtttcagcagccaaagtatcctagttcccactgtggtgaccccactgtacaagccttggattactttcatggtgatctgagcaggatcaacaaaatccatattgagtccataacaaagcttctggattcgagatgtaattttgtcaaacatgactcgttcttggcggccatctcgcttgatcacatgcatcgcagctagtggctgaggctctgaaggatccaagactggacctgcggctctaaagcgccggcgggatcgagaaggtgacagagtgggaagggttaggttccaggcgctgctcaggggaaagaactggagttggagccagacagcactttcttcagagcagaggcgcaacaatccaaatccc

SEQ ID NO: 438515 - DNA, 1241 bp, Homo Sapiens
taatcggcacgaggctgagctctggctgtcagtgtgttcgcccgcgtcccctccgcgctctccgcttgtggataactagctgctggttgatcgcactatgactctgtgaagaagtccgcggccaggacacagttccggaaagcacagccaggtgggtttcagggcgctgagaaagccgctggtcggtcggcgaccgtcagggttttccagtggtgggaatccgcggggtaggaggggagcgcgggggtccgggcgccagatcccggttggagagccggggtgcaggcgctgagccgggattggagtgtggttggagttggggagccaagggtgtgtgcctggtggccggggctggggtctccgccgcgccctccggccggctcccgctcactgcgctggctcctccgcaggatgcagggtgccgggaaagcgctgcatgagttgctgctgtcggcgcagcgtcagggctgcctcactgccggcgtctacgagtcagccaaagtcttgaacgtggacccctgacaatgtgaccttctgtgtgctggctgcgggtgaggaggacgagggcgacatcgcgctgcagatccattttacgctgatccaggctttctgctgcgagaacgacatcgacatagtgcgcgtgggcgatgtgcagcggctggcggctatcgtgggcgccggcgaggaggcgggtgcgccgggcgacctgcactgcatcctcatttcgaaccccaacgaggacgcctggaaggatcccgccttggagaagctcagcctgttttgcgaggagagccgcagcgttaacgactgggtgcccagcatcaccctccccgagtgacagcccgcgggggcctttgtctggatcgacgggtgacgccccggggcgcctaaagcgcgcttgccttttggaggggcctctccagggtgccccatgcttcttgaaacttggcaggcggggatccccttggtaatcaggaagcccttcctctcgagagtgcctcgtgcggcgggccagccttccccatctgtgacctttgaaggttttgcacgtttgctcccccctacagccttagtttggcgtttcctcttgttcctcggtaaaatagaagaaagccgccttcactctctacccttctcgatgatctctcccttgctctccccgtcatatatggtcagtataaaccccggctcctttcttaggactctacaatattcttatctccacccctccgccctctctt

SEQ ID NO: 438516 - DNA, 1061 bp, Homo Sapiens
ttttttttgtttcaaaaagtttattgtaaaattcaaagcttcaacagcagcatcctttagaaaacgaagcattgcccggatccgttttgaaaaagcagcgcagtcggctaagtccttcacgctcctgcaactgtaccaagtccagggcgccgctccttcctgccgagcgcaggctgctgagtcacgcctgcccggccagtctgtccttcctggccctgaggccaacgtcctagcctaggccttcctgggcgagcagccgctccagacacttgcagagtcctcagctcggaccagcctggccctgccgccaccgggcccctcctcgggaggccgcgcctcctcgctctccaggcgccccccccgcctgccagtctccacgccgcactcgggcaccctcggagggcccctccacagagccagccgcgctctaggcgccccggggcgtcaccacgtcgatcagaccaaggtccccgccgggctgtcactcggggagggtgatgctgggcacccagtcgttaacgctgcggctctcctcgcaaaacaggctgagcttctccaaggcgggatccttccaggcgtcctcgttggggttcgaaatgaggatgcagtgcaggtcgcccggcgcacccgcctcctcgccggcgcccacgatagccgccagccgctgcacatcgcccacgcgcactatgtcgatgtcgttctcgcagcagaaagcctggatcagcgtaaaatggatctgcagcgcgatgtcgccctcgtcctcctcacccgcagccagcacacagaaggtcacattgtcggggtccacgttcaagactttggctgactcgtagacgccggcagtgaggcagccctgcacctgcgccgacagcagcaactcatgcagcgctttcccggcaccctgcatcctggctgtgctttccggaactgtgtcctggccgcggacttcttccagagtcatagtgcgatcaaccagcagctagttatccacaagcggagagcgcggaggggacgcgggcgaacacactgacagccagagctcagcacggcgcgcccaccac

SEQ ID NO: 438517 - DNA, 1024 bp, Homo Sapiens
  misc_feature (827)..(827): n is a, c, g, or t
  misc_feature (838)..(838): n is a, c, g, or t
  misc_feature (843)..(843): n is a, c, g, or t
  misc_feature (869)..(869): n is a, c, g, or t
  misc_feature (932)..(932): n is a, c, g, or t
  misc_feature (955)..(955): n is a, c, g, or t
agcgggctgaaccttggggagcccctcagggaccccttccccacctcatttaccggacccctctcctcccagatcccctcggatgcagggaaccaggctgcctgtttgctgtgcctgcccagtcggctcctccaaaccggccgaggctgagaaggaaaaggcaggtccgccggggccaccctacagtgcacagtgaaaccaagtatgtggagctaattgtgatcaacgaccaccagctgttcgagcagatgcgacagtcggtggtcctcaccagcaactttgccaagtccgtggtgaacctggccgatgtgatatacaaggagcagctcaacactcgcatcgtcctggttgccatggaaacatgggcagatggggacaagatccaggtgcaggatgacctcctggagaccctggcccggctcatggtctaccgacgggagggtctgcctgagcccagtgatgccacccacctcttctcgggcaggaccttccagagcacgagcagcggggcagcctacgtggggggcatatgctccctgtcccaatggcggtggtgtgaacgagtacggcaaacatgggaggcgaatggcccgtgacccttgcccagaacgctgggacagaaacctgggcatgatgtggaacaaacagcggagctcggcaggggactgcaagtgtccagacatctggctgggctgcatcatggaggacactgagttctacctgccccgcaaggtctctcgctgcagcatcgacgagtacaaccagtttctgcaagaaggtgttgcagctgcctctttcacaagcccttcaagcttctgtacctccanagtgcagaacngcttnctggaagccgggaagaatccactgcngctcgtgcaagtgaacgtggtgcggtcgcaagtggagacctgtatgcggggtggcaccaagancgtctgataggaagatagggctngccgcttctttctctcttccgttcttagaatgcaaccgcagtggcacttgttgagaatgcacttgataa

SEQ ID NO: 438518 - DNA, 1367 bp, Homo Sapiens
  misc_feature (1060)..(1075): n is a, c, g, or t
  misc_feature (1104)..(1112): n is a, c, g, or t
aaatttgcacaatcattatatcttttatttacatatagaaattagtaaaacttaaaacaaaacccaatgcgacttgtacagaaatcctttaattttctttattttcacacattaaaaaatgaaacacactatacaaatggttttcatagcaggttacatgtgggtccactcagacttgctctcaaagtgctgccaacgtgacaagtgctgccaagacgacagctgcgaatcggggagcccatgtattgacttagtgcggtagcatgcagccctcggcacggagggtcagtccccgctgttcttaaattagggtaaatggcgttggtgtccgtatttacagacttgaaatgtatcaatcctgagcagttccgatgtaaatccgagaccagctgatgggagtcttggtctcagtttttaaaagggaggtccaatggcggcaggctggctgctatgaacttgagttgttttcattctttccaacatgaactatttgctgcgggtcacacagtcagacccttccagaagggttaagccaagtaactgtaggtgtccttttcaccatccactcgctccaaatattctttctcaattagaatgtcaatgcatttcttgatcacagggactcgaggtttgaacctggaggacagctgagtgaggacctcgccaagtaactgctggtgtttcagaaccttcctcatcttcatgattctcacgatggccgcctgaatcagtagtttgcggtcttcctcgatgtttttgtgtgtggtttcttgttcctgcttctgttcggttttcattggcacattgatgttaacccttaatttcttatttttataaccaagatataattttattaaggtatctggcttcaattccacctcatcaacatttgcattttcatcttccaagaccaatagcttcgactttaataaaatctgtaaaacttgcgccaaaatgtccattttaatttgggtgctgtcgagtcagctgctgcagggtgtatgcatttttcgtgttgtactgaagcaggataggcatcttcactgtcgattttccattnnnnnnnnnnnnnnnntcacccaaaagaagagtatgctggaaggnnnnnnnnnttggtacttcttagaagttcactaaatttactgcttccttccaccctgacttctagaagtgaaatcaacccctttctggccttgatcacacaataatagaaatgaacaattctgttatacttaaatcaggttgagtaacccttatctgaaatgcctgggactagaagtgtttggatttcggaatactgcactggatttacagattcagcagccctgatggaaaatccgaaattcaacggatcccggaatccggac

SEQ ID NO: 438519 - DNA, 698 bp, Homo Sapiens
  misc_feature (80)..(80): n is a, c, g, or t
gtggttcagacccttcctcatcttcatgattctcacgatgccggcctgaatcagtaggttgcggctttcctcgatgtttntgtgtgtggtttcttgttcctgcttctgttcggttttcattggcacattgatgttaacccttaatttcttactatcaagaaaaatgaggaaaccgatcactattatattaaaaggtaggcagtgaaggctgctttctatttttcaacctttaagaagtgccctgcttccctagacagaggggagaatgttgatttctgtgagctctccgtgaaaatgtcctctacccagcactgggtagagtccgatcatggcctagtttcctactcggccattaacagggacatccacattacagaaaatccaggtccctaatctgctctcccaaattttgtcaagtgagataaaatcaagccacttggacacaaaggtccaaacttttcttggtgagccatttaaggagacttatttgccaaaataataaaaatcccagaagctcagaattggagaaacatcaggctcgctgaatggaatcaaaggcctacctcacactcccagcctagtgcctgtcgcttcacactgagtccccggtctcccttggtttgtaacaatactgagatccgtgctagggctcccgggggacgtgtctatggtcaagggccatctacttattagatttt

SEQ ID NO: 438520 - DNA, 924 bp, Homo Sapiens
gttcttctgtttgatcttttggtggtataaaaagctcaggcatcaagaacaggaaccgaagtcttctgttgctgataagatgccatgatactattgcagtagaattggggacctagaaccggggtagctgaattctgctggtaagtaagagtccaaatgttctggaagtgacctttccatcaactgcagcgttatcttcaaaggccttctgtaattcccttccttgttcatcaaactcaaagagaaagagtacctttaaaatatggtatacttcatctttcaggttttcagtgttctgcaccacttcactcagtgcctccaggagggccaggtcctccagcggactgccttctttgaggctgtgcttcttccgctccgcttttcggcgattcttggatgatctcgctgatatcctggagttactatgggagtatttgccactcatctcactgccactcacgacactgctagtttcagagaagaggtctgactcttgcccgtggggtacctcatcatccagacctgcctgctgggcttgctccttgagctctcgaactaccaataaacgtttcttgtggcgactgaatgtggctgtctgagagtccagaaatgccatataatttttctgggcttctaaaatggaaggctttacgttggtttctataatatccagtctgttatatttgtataccagcctcaaagcttcttcccaggcagctccttctaacagcaagagcacagcttcttcataatcctgggcacactcttccaaaaccatggccgcatcaatgtgcttcctctgctcaaccagctttcctgccagagttctgccgaggcccaccagctggtctttggtaaagttaagctgggctgccacacagagggcttgcttccagttgccacatgtgagaaaggctgagagag

SEQ ID NO: 438521 - DNA, 1247 bp, Homo Sapiens
  misc_feature (104)..(104): n is a, c, g, or t
  misc_feature (268)..(269): n is a, c, g, or t
  misc_feature (352)..(352): n is a, c, g, or t
  misc_feature (472)..(472): n is a, c, g, or t
agagcctttttccacagaggtttcccacatagagcttccagggttctccccgtgtaccttcgtgtgtcatgaagagagatttggagtaagctttttccacttcncggcattaaaggtttctctccgaatgagttttcggtgtatctgaagtgatgccttcctagggtaggctttttcccattcattgcattcatagggcttctcagttgaatgagttctctgatgtataatcagctgtgattttccacaaaaggctctctcccacaannctacattcataggtctctctccggtgtgtgttctcctatgtataacaaggtatgacttgctgctgaaagccttcccacattcnctgcatccatagggcttctctcctgcatgagctctcagatgtgcagtgagctgttccttcctaccaaaggctttcccacattcaccgcattgataaggattatttcctgtgtgaactccnctgatgtacaatgagttgtgtcttcatattgaaggctttcccacaatcactgcattgatagggtttttctcctgtatgcattcggatgtgaacaaggagataggacttactcctaaaggctttcccacattcactgcatttatggggtttcactcctgtatgagttctctggtgtacaacgaatggagacttcaaactaaaggctttcccacattcgctgcattcatacggtttcactcctgtgtgacttctctggtgtaaaagaagctgtgatttctaactgtaggttttccgacatttattgtagctatagggtttccctcctgtgtgaatttcttgatggccaatgagctgtgacttgaaagagaagaccttctcgcactcagtacatgagtagggtttttctcctgtatgaagtctctgatgagcattaaggtttgagttggtagtgaaggttctttgacatttactgcattgataaggtctatatcctgtatgaattatgagatgtataatgagttgtgacttataatgaaaagctttgccacattcattatacacacagtttttttctatggtatgagctatttgatgtttaagaaaatatggttcttgataaccatgaaacttattaggattctttattaaataagttatgcttggagctgagttttgtgtcaaactttttccatgtgtgttatagagtatatgtcttgaagaatcatgggttttgctcagattaagtcttcccaacacactacaagcatagcttctt

SEQ ID NO: 438522 - DNA, 906 bp, Homo Sapiens
aagaaacatctttctttctggccttgcaggattctccaacggcttaagattttgcaatgcaacccaaggtgtcctctgttattggggtttgctttcaaaggttaaataagaactccttgttcttcggttgcaccgcttcacctttgaattgccacaggttctttaagaaaaatgaaccttgtcctaagagaatcaggaaggactatatgtttctccccccccaaagctgtgaagcatggcctcctgttggcatataaagaagtgcagcactggccaacaccaagggtttactggagtcatttcatgtctgatacataagtgtccgataataatgtcagccgctccctcgccacaggccaatagtttgtcctcactgagttggcaacaagtggctgctgtggctgccatttttctggtgatggccatcagctccgacgaggtcagctggggggctttctttgtgtaagcaacgagaaacgcattttgtaagtaatattctcctagtttctggaagaggccgcagcttcgctttgccaatgcttggctctcctggatgtatttctgtaattcttcttctcctttatcttggcattcaagagggttttcagtctggaaacacttctccaataactcctggtatcctttagcaactcttagaattactgagacagcaagctgaggatgtcttcttgaatattcatgaacaaaacttgccaagaagatatttttttcccctgaagaaaattggttaaaatctctatttcctaaaaacctgtttagatttggagatagaccttcaggtttttcatcattttctgcatgaattaatacattgaccacgttccagcgtggtcagtttgcagcattctgcggacgcgtgggcggacgcgtgggcggacgcgtggg

SEQ ID NO: 438523 - DNA, 1091 bp, Homo Sapiens
acccaggggcaactggaaaacagacccatgggcctggcccattccagcaacccaaaacggtgcccgtgtgcgtggattcagggccaacaattcacaagcgcacaaatctgatgagtgcaggtggggtgcacaggaaaattgccccacgtggctctggaggctcttcctggggggagggctgctctcagctgcctgctcctttcggggaattcaaaccccaggcaaaaggcagctgaccccaggcaaaggcagctggccccaggccagagaggtcctggcttcccaaccttgagctgtgcagtcattacctaggtgcaggctgggctacagggacagccaagctgagcaaggacaggtccccgcagcctagactggggcaccgcttcgttctcggtctcactccccgctgtgccgtgctttgcctgtgagacggcggcgctgggccttgctggtacgaggggcccttgggggctttttggagtcctgggcccgtcggggatgtttcctcttgacctttttgcggctgtgtgcatgtagtgatgctgtgagggaggagatccgctgagagagcagggggtctctggacttcctgggcaaggctttggttggtttctccgtggatgacgcctcctcctcagacctgtctccagcccctccctcaggtggggtcagcccgagcagccgggcccccgagaggtccaggtcactgatggtggtcacggtgactgtgtggttggggtggtcatactgcaccgactccgtctttgctgtcaccaaccggtccagctcatctgcctcctccagagcctcttctctctctgccagcatcttcaagtattcctggtggcgctcctcccgaagcttcctctgctcctctttcagccgctgcttaatctcctcaatggctgccttctttcgctcgaccttccgcttgtggaagcctgtcaggtactcccgcctcttctcctcgtcgaagctaagaacgagcctcggccgccggtcgtcaccatctcgcttcttcttcttgttgcggcccatagcagtgaggccgccggcttcctctccctgaagacacttccgggtgtagcccc

SEQ ID NO: 438524 - DNA, 393 bp, Homo Sapiens
  misc_feature (313)..(313): n is a, c, g, or t
  misc_feature (336)..(336): n is a, c, g, or t
  misc_feature (364)..(364): n is a, c, g, or t
gagtggctgagaatttaatactggtaaacactataaattgtaaatgtaagttgtaaatgaccttgtcactggagaggggagaaggaactggagtcagacgtcccagcagaaacagcagcggcaacatgcggtaggcacacctggagagcaacaggcactttggtaagtggttcatgcacatggtcttattttagtctcggggcagccctaagacggtaggtatctggtgtcaccttacacatgacgagacaaaccagagaggtcagcacagccggaagctcactgcaggcgaccaagcaggcagagcctgggntttcaaacccgagccctgctgtnttgcaagaacccctggggacttcagctntttcctgcttcacagcaggcttgaggcac

SEQ ID NO: 438525 - DNA, 726 bp, Homo Sapiens
  misc_feature (383)..(383): n is a, c, g, or t
  misc_feature (616)..(616): n is a, c, g, or t
agcgggagtgccacttttaggggctcagctgttgccccattccaggagaggacgctccgggccaggtgcccggccaggtgtggggagtgggtgagccctcccctgtgccctgggccaggcgctgagtgggcttggcccttagtttgtgcctgcagatgggaacgcagcctgcgtgacaggtgctccgggacattgagcctggggacgaggtgacatgcttctacggcgagggcttcttcggcgagaagaatgagcactgtgaatgccacacctgtgagaggaaaggtgaaggagctttccgaaccaggcctagggagcccgctttgccaccacggcccctggacaagtaccagctgcgtgagaccaagcggcggctgcagcanaggcctgggacagtggcagccgacagggcctgctgggccctcgggcctgcgtgcacccatccccgctgcgccgggacccattctgcgccgcctgccagcccctgcgcctgccagcctgcagcgcccgcccagacacctcacccctctggctccagtggctgcctcagccccagccccgagtgcggccacggaagcgccgacgccccggccccggagggccccagtgctctccnaccacacgctgcccgcgtctccctgcaccgatggggaggcttgtggcccccatgccgcctgcgaggagaggcctggtggccctggggcagccccccaagccgctgggccc

SEQ ID NO: 438526 - DNA, 1436 bp, Homo Sapiens
ggaccgaggactaccctgcactgccccacagcaagctgcccatgggcccggggtcaagccaccacccacatgtcccaggagtccggccagcccaccacatccgctccctagctccggcgaggccaccccttctccaagcggcatgcggtccctgctgaggcagtcaggcagctggcttcggcaggccgtcaggacccaggaggtgggcgcaggggtcatccaggatttgaggccctggccccacctgagtgacaatgatgtatttgaccccaccgggggtcggctccatggccagcgcagcctgaagctcagctgagagaggggccggcctcacctgcagccccttcagaaacgtgtctccattcgagcctgggggaaagccgtgccacacagcagccacaaactcagccacagtgtcgtccagggtgaagatcacggcattggggcccgcgtcaaaggtgtacgccaccttggtgtccccgtggtgggcgttgaagcggtgcaccaggtggatgatgcgccaggagatggcattgaggtaagagatgggcgggaaggtgtcgaggcaggtggcgtggaactggttgctgtccttcatggtcagctgggcgaaagctggggaagtctcgctcccggatgcagcgggccatctccgccatgcgcgcgggcaccacggactcggcccggaaccgaagcagggggctggtctccacactggcccgcatgcccacggtactgcctgtcagcttcttctcagcgctcaccacaaggatgagcacgcggagttcaggccagtgtgactcgggggccacttgccgagcgatgctgtccttcccgtcggcctgctctcccatctgccactccacaaagcccccatacaggctccggcaggcgctgcctgagccccggcgagccacttctgagaggtcactctccacgccgtagacacgggccagggtgtaggctaggcaggcatagcccgccgctgaggaggccaggcccgcagccgtggggaagttgttcaccgatgccacgtgcaccttgcagctgaggctggagggcagcgggtccccatcccgtgagttcctccgcttccgggccaggcagcggatctcccgcaggcaggcctgcagcctcggctgccccacatcctcctcccggccattcagccaaatccggtcctcggtgaagtccttgctgatgacggctgttgtggtggtttttaactggtcctggtgcagagtgacgctcagggaggagttgatgggcagaaccagctcttcatcgcgcttgccccagtacttgatgaccgcgatgttgaccggcgctgtacaagtgactgccgccagcggcttctccgaggccatggtcccaccgcgcagtgaccccagctccacagccacttacggcctcgtgcggaattcgccacccaggcc

SEQ ID NO: 438527 - DNA, 439 bp, Homo Sapiens
  misc_feature (20)..(20): n is a, c, g, or t
ataggtaaattttgctcctnaaagcccaataattcggccacgaggatcttcacccctggaacgaaaactgtggccttagttttgtggctgctgtgtggcacggctttccccccaggctcgaatggagacacgtttctgaaggggctgcaggtgaggccggcccctctctcagctgagctttcagctgcgctggccatggagcccgacctcggtggggtcaaatacatcattgtcactcaggtgggccagggcctcaaatcctggatgacccctgcgcccacctcctgggtcctgacggcctgccgaagccagctgcctgactgcctcagcagggaccgcatgccgcttggagaaggggtggcctcgccggagctagggagcggatgtggtgggctggccggactcctgggacatgtgggtggtggcttgaccccggcca

SEQ ID NO: 438528 - DNA, 482 bp, Homo Sapiens
  misc_feature (209)..(209): n is a, c, g, or t
aaaccaaagtggcgtaaaactttgaagcgggcccccaaagccgttgaacttcaaccctggaagaacactgtggctgaatttgtggctgctgttgtggcacggctttcccccccaggctccgaaatggagaacacgtttctgaaaggggctgcaggtgaggccggccccctctcctcagctgagcttgcagctgcgctggcccatggagnccgacccgggtggggtcaaatacatcattgtcactcaggtgggccagggcctcaaatccctggatgacccctgcgcccacctcctgggtctgacggcctgccgaagccagctgcctgactgcctcagcagggagcgcatgccgcttggagaaggggtggcctcgccggagctagggagcggatgtggtgggctggccggactcctgggacatgtgggtggtggcttgaccccgggcccatgggcagcttgctgtggggcagtgacagggaagt

SEQ ID NO: 438529 - DNA, 1560 bp, Homo Sapiens
  misc_feature (7)..(7): n is a, c, g, or t
  misc_feature (12)..(13): n is a, c, g, or t
  misc_feature (23)..(23): n is a, c, g, or t
  misc_feature (27)..(27): n is a, c, g, or t
  misc_feature (43)..(43): n is a, c, g, or t
  misc_feature (46)..(46): n is a, c, g, or t
  misc_feature (60)..(60): n is a, c, g, or t
  misc_feature (67)..(67): n is a, c, g, or t
  misc_feature (76)..(76): n is a, c, g, or t
  misc_feature (81)..(81): n is a, c, g, or t
  misc_feature (91)..(91): n is a, c, g, or t
  misc_feature (95)..(95): n is a, c, g, or t
  misc_feature (114)..(114): n is a, c, g, or t
  misc_feature (123)..(123): n is a, c, g, or t
  misc_feature (130)..(130): n is a, c, g, or t
aagaacnaattnntttattatanaacncggggagtgggccagncanactcattcaagagncccactnagtgagagncgaanaagcaatctntctntattatgaggaactaaganggtgggccnagcccanactcatgtcagaaggccccttcagtgagtgcagcccaggagactggtcacattctggggttgcggaagggccttggctgcattcagtttctccacatcactgtagcagtacaaattgggaccatggatgaggtacaagccggggccattggcggaacatgagttagggccaagggacttttccatacacaaggctcggtctcctttttcatggggccaaggaagctctgtccacgtggcttgggctcctgacttcaggtccagccaccccagccgccgtcttgccatgatatggagccgagaagacccagggcagataaaggccgcatccacagagtccaggataatcccatgaggggtcccgacttccttctccagccgcttcggataaccgcttactagggtatagcctccctttgtcaggaagacatatacctgggtgccctggaccagatagagtttttcttcccaggaaaaggcagcatccactgctgaaggaccctggggccactgatgagcaatgggccagctatgccagccatcccggctggtgtccagacgccagtagtgggtcccactgaaggcataggtggcaccatggttgtcagacgtcagtgcagacaagactagatgtgggctacagcgcatatactcagggccatggtgggtactgttcccatggccagtcccattcctgtgtccatggcctctgccagggcagggcatgaagtagtctcggacatcccgcgggtacctgggaggcacctctcccctgacagggtcgaagcgcaggaattggttaccctggaagcagtagtagcggcccagccatctcagggcagaggagcagttcccaacagctggccaggaacgctccttcatggttcccgtagccaagtcccagaaccactcgcggtcaccttggaagaagaggacgccttcagcttgacattctccacggtgacattccacagctgcatccagtggggatgggattccaggaaattcatcttggagcaactttgggtatcctttctccttcttttcaggagggtatacccagactttgtcccccttgatcagaaagacactgttgtgaccttgacggaatgcagcatccacagggctggggaaattcttccatctctctgagattaactcccggtcccatttgtgactcttccacacaaactcccctttaaaaaacagcatggttccattgtcatccagggtggtagcatcaaagctccagccatctgagcagcgttcagtcacgtctgggtctggcttggtctcgccttcagcaacattcccatgggcactagtcggaggaagaggggtggcaatggccagagaccagcataggctccacaaccccagtgcaacgggtgctcccagtaccctagccatgctgagctgcagatcccggga

SEQ ID NO: 438530 - DNA, 1375 bp, Homo Sapiens
agtgaagaagcatctgtctttattatgagaaactggggaggtggggccaggccagactcatgtcagaaggcccctcagtgagaagcgaagaagcaatctgtctttattatgaggaactaggaggtggggccaggccagactcatgtcagaaggcccctcagtgagtgcagcccaggagactggtcacattctggggttgcggaagggccttggctgcattcagtttctccacatcactgtagcagtacaaattgggaccatggctgaggtacaagccgggaccattggcggaacatgagttagggccaagggactttttcatacacaaggctccgtctaccttcttatggggccaaggaagctctgtccacgtggcttgggctcctgacttcaggtccagccaccacagccgccgtcctgccatgatatggagccgagaagacccagggcagataaaggccgcatccacagagtccaggataatcccatgaggggtcccgacttccttctccagccgcttcggataaccgcttactagggtatagcctccctttgtcaggaagacatatacctgggtgccctggaccagatagagtttttcttcccaggaaaaggcagcatccactgctgaaggaccctggggccactgatgagcaatgggccagctatgccagccatcccggctggtgtccagacgccagtagtgggtcccactgaaggcataggtggcaccatggttgtcagacgtcagtgcagacaagactagatgtgggctacagcgcatatactcagggccatggtgggtactgttcccatggccagtcccattcctgtgtccatggcctggagagagaaatgggtgaggagaacacagaaggaggccagaggtcagagtgaggtccaaggtggaagagatggctggggttagtggggtgtgggtttccccatatgagggcaatgggaaaatccagaatggaaattggggctagattaagggccaaggtgtcgcaacacggagttaaagtgagagctaggacacgtgagatccacaagctcagggaaagtggatgaattctgacaggtctcaagtgctagggctttctcacctctgccagggcagggcatgaagtagtctcggacatcccgcgggtacctgggaggcacctctcccctgacagggtcgaagcgcaggaattggttaccctggaagcagtagtagcggcccagccatctcagggcagaggagcagttcccaacagctggccaggaacgctccttcatggttcccgtagccaagtcccagaaccactcgcggtcacctttgtccaatcaatcaacaggcatttggtgagaccgggttacgccctcctttgtg

SEQ ID NO: 438531 - DNA, 926 bp, Homo Sapiens
tggggcggggtggtgcgtgggcggcgggccgttgttggttgtgggtgtggctgcaggtcttggggtgggcgaggtgggccgtagggggcgcggtgtgcggcgggggtgtgggcgagggggtcgctgtggcggtcgcgctgggtgcgctggggtcgcgtggggagccccggaattgttccgggcttgctcgcaggggacaggctccactgagagcagcgctccgagtcggcgccattccataggattggggacccgccgtctgctgggggtttgggactccctcacaggggccgccgggctccgtgtggcagcttggccctgtctccaggctccctcgtggtcggtcggtcccggccctacctgggatgtagatgtccacgggcacgatgcggtcgcagcccgctcaccaccgagtaggaatagtggtagtagcctcctccgttggcgcagctccccatggagaccacgtagcgcggctccggcatctggtcgtagaccttgcgaagcgctggggccatcttgttggtgagtgtgccggccacgatcatgacgtcggactggcgcgggctggcgcggaagaccacgccaaagcggtccatgtcgtagcggggtgctgccatgtgcatcatctccacggcgcagcaggccaggccgaaggtcatgggccacagagaactccggcgggcccagttgacgaggtcatccagcttggccaccacatactcgccccggctgctgggtttgggagccacggctctggcctttggcagggcaggctgggtgctgcttgggccatcggtggccacgctctgatggacacctcgtgcctgcacagccgggcccacgctggagcgcagaccaaggatccggaagccgcgcaggccaggagctgacagcaccgccatcttggcctcgccttcaatccc

SEQ ID NO: 438532 - DNA, 1068 bp, Homo Sapiens
  misc_feature (81)..(89): n is a, c, g, or t
gtcctgtccagggaagtttttgttttccagaagagcgggctacgggttttggcccgtccgcgggccggctttttttatttnnnnnnnnnaaattcccaaagccccctttttcgatggcccagggggtttttctagggaaaacaggcctattggcccatggttcacttaccttttgggggcccgggcggcccaaaagaatggttttagaaaggtttcttggggggccgaggccggccgacagggtatagttttgtttgacctgcgggcattttggcggcagcccgagggcaggtttatttgacaacctcacgggacacaagcaggctggggacaggacggcgacaggctccggcgcggcggcgcggcgctacctgcggtaccagatctgcagcctccgctcccgcttgatcttcctctgcagctgcaggatgccgtagagcagggcctcggccgtaggtgggcagcctgggatgtagatgtccacgggcacgatgcggtcgcagcccctcaccaccgagtaggaatagtggtagtagcctcctccgttggcgcagctccccatggagaccacgtagcgcggctccggcatctggtcgtagaccttgcgaagcgctggggccatcttgttggtgagtgtgccggccacgatcatgacgtcggactggcgcgggctggcgcggaagaccacgccaaagcggtccatgtcgtagcggggtgctgccatgtgcatcatctccacggcgcagcaggccaggccgaaggtcatgggccacagagaactccggcgggcccagttgacgaggtcatccagcttggccaccacatactcgccccggctgctgggtttgggagccacggctctggcctttggcagggcaggctgggtgctgcttgggccatcggtggccacgctctgatggacacctcgtgcctgcacagccaggcccacgctggagcgcagaccaaggatccggaagccgcgcaggccaggagctgacagcaccgccatcttggcctcggccttcagacaacctctgaggtccgatcccgggaattccggaccggtcc

SEQ ID NO: 438533 - DNA, 497 bp, Homo Sapiens
  misc_feature (88)..(107): n is a, c, g, or t
ttttttttgggaggcggcccgcaggggcaggtttattgacaacctcacgggacacaagcaggctggggacaggacggcgacaggctcnnnnnnnnnnnnnnnnnnnncttacctgcggtaccagatctgcagcctccgctcccgcttgatcttcctctgcagctgcaggatgccgtagagcagggcctcggccgtaggtgggcagcctgcagggaccttgcctcagtctcgtttcccgcagccggagcccgcgtgaccggttgcacagcgcagccggttcggcttttggaagggtttcccggtgccggcctttgaaggtggaggctgacagccctgggtgggcgcagtgccagggactgggagccggcgcaggggaggtccctgcaggaagagtggggtcctcccctgggcaaggccccactgccctccacccgtggctcatcccgggctgtcacagggacctctcggacaagacgctgacctcactaaccccggcc

SEQ ID NO: 438534 - DNA, 929 bp, Homo Sapiens
  misc_feature (168)..(169): n is a, c, g, or t
  misc_feature (246)..(246): n is a, c, g, or t
  misc_feature (320)..(320): n is a, c, g, or t
tccaaagtttgtttccccttattacctctttaaaacccggggtatttcggcttccccctccatggtttttctaaaaacctcttttaggcataagaggggtcccacagccttttctagttacggcaatcataggtttctctcctaataaaataggcctgttgtagattnncccgtctcaaattccttccaatgtaagttttggtgttaagaaaactggtcccccactgaagcccttaccacagttgntcattcaaagggttctctctggtatgaattctttgatgactgacaaggtgtagttctgactgaaggccttccancattcagggcattcatagggtttctctcccagtatgaacacgatggttgtttaataagatctgagctgctcctaaaagatttcccacatgttgttgcatacgtaaggtttttctgccactgtgaattctgatgatgtctcagaaggtctgagctctgattgaaagttttcccacattctttacattcatatggtttctctcctgtatgagttacctgatgtccgatgaggtctgagctgccctggaaagccctaccacactgattacaccaataagctttctcttcttggtgaattttctgctctcccctaagctcctcatccttgctgaaggttttctcacattcttcaagtttctctccagcatgcagtctctgatgtttgaggaaagctgtgtgccacatgaagagtttcccacattccttacattcatagggtttctcaccactatgaattctccgacgttgaataaggagtgaacgccgcctgaaggctttttcacattcagtgcactgatagggcttctctccagtgtggattttctggtgtgtgacaaggtgggacctctggctaaagactttcccacattcactacattcatgaggtttct

SEQ ID NO: 438535 - DNA, 1725 bp, Homo Sapiens
ttttgatttaaaaatattttattctttagaaaatacagcattcaaccatcccaaactgcagtgacccctgccccagccctgactgaccccacttcttgtggccaaaggtttctgggctgtgctgggaccctagtctcagctccccgggaggccaggttcatgccaggcccctgacccagcccccttaagccagccaggcagggtccccggacaccctgggcacacagacgagatgcagggacagcaacagggaagggtcacaaaatgccagcccggtggccctcggacgctgcaagtgcgttcagctgccagccctcctgacctcccagaaacactttcctggagcccaggaaggaggatggtggcagggagcggaaggtgggcagccccacagtccacacgtggccggccctgctccagcctcctagctgtcatccccattttcacccgggccgcggatgaggcgcttatggccccgcttgccccctgggcccttgggcttggcgaaggcctgcttgaaggcgtgttgcttggggtgcacctcgtcgtagaggaactctgccgtcagctctgccccatcgccaatctcaattttcttggcgatctccagatggaagtcctgctccacggagtcgaggaggcgggctcttgcagctggagtagagcattcgctccttgatgctgcacttgtacccccggcatggagtagatgaacactacagactcaagggggtcgccctcatgggtgtgcttgtagaggaagaagtggtagcgggcagcatctcggggcacccgggagggcagctgggccacatccgtgggctctgtgtgcaccagctcaatggtttcccgctctaggtccagcttcatctggatgtagttgaccattttctgcttgagctgctggagtgcccgctgggcctcaggctgcagggggaaggcgaggccctgcagggtctggtgcttgctttccacactgatctctgtcttcacctcgttaatgcggatctgctggagctctctctcagccgaggtcagcggggcaggtgccgcacaggacgacaggtgtttctggtacccagcaaaagagaggtcatccttcacagtcccgaagagctcatccttgatgtggccacctccaaactcctttttcactgtggcccgcgtggccgcgtacagcatcttcagccgcacgggggagttatcaggcgaccaggcgaggaagagccattcgaagccctgagcattctgtgagtcgaggcggtagagcaggtagcagggctgctgggcgtccagcagtggcagcacggccctgtcatagtcctgatcccagcggcctactggctcctgcgaggcacccagcacgagctgctcgtcctcaatcacaaccttgatgagccgcacagagccagcccgtgccttggcaaagaattccttcagctcttccgtggcgtggatgcccgtttggtgcgccatggctcggcgcttcgctccgtccgcgccgtcggagccctccgcttgaccctggcccggcaacgctcgctggaccaagagaggtggaggatgtggcggaggctgtcgaccctcgcgcagcttcccgggcggtgccgcaggacccgcccccagcggcgccccgcccccgacaggcgcggcagggaggcggggactcggggccgcgcgtgcgcgcagcctgcgcctcggtccgggtgggtctaaggatccgct

SEQ ID NO: 438536 - DNA, 825 bp, Homo Sapiens
ctgagatcttcaaagcgctcaccgtccctaatatacttcctgccattggcatccggtaaagatgttccataacccaatccccccggcccctttgtccctgaggtaaaaaatgacacctttgccgtagtcctccccctggacgagagcctgtggaacttccggggtgtgggaggaatttgtaatttttaaggcctcggactctgtctcactctctgttcggataccagttcctgattgctctgtggcagatttggggttgtcttgtgcagttgcttttgcaaaacacaccaactgtgggcaaattactgtccacaagagcaatagcttcataggcaacatcggggcgcaaatctctccagaacattgactgatgtcagtacgggttagcagctccagtcatattttctccaggcaatctttcattcacaacagcgtgatcatggtgctctaaccgcctccttcccaactttatatcgttagagcattcagcctcttcttcccacccaaaggtaaaagcggcctggtacttcgccttttaccggaaagccaccaaatttgagtctatttccaggccaccagtcttggccaactcaacattgggctccaggcccacagctgccactatgtggtcagtttctaccttcctgccgtctttcagcttgataagtaacttgccactgctgactccaacggattgcacaatagcattgggcatcaccttaaccccctctcgtctgactttttccatggtccagttgctgaggtattcggggaggatctttcccatatttcctttctcggggaagagttgaatcacttctgtgc

SEQ ID NO: 438537 - DNA, 1475 bp, Homo Sapiens
gttttcttgatgtcttctttattttaacccggctagacttgtatttggaagatggctacccaccatccaggggacccgtttttttgaggacatgcagaaagaatgggttacctctgaagcgctctcagaaaatgaaagaaaaacttttcccaacaaagaccaggaaattgctcctctcattggcccaaatatgttacgctcattgccagccaataactgtggcagggaatgggattctgctgatttaggttggaattatgctacgttgcttagattgggaccacatgcccctgtaagtaggcagagcagggatgtgactcagaactgggcttgtttaccaagataaggaagagtggatactggggagtctaggccaccataagtttcaggtacagccaatgcaaagccttggaaatccacctgacagctccggttgtaccgtccgccctccgtatctggggtttccaaattccgggattcaatcaactctctttccatcccagtccggaatccaaaggctccttcttgccatgttgtcctcgggcgttggctgcttcctcccatttgttactttggaagtgtcttctttcctcagtgtttcttctgcgtgggccttaccggtctttactgcactcacttacctaagaggggatactgtggagtctaggccaccataagtttcaggtacatctcacttcaaagccttggaaatcgacctgacagctccggttgtaccgtccgccctccgtatctggggtttccaaattccgggattcaatcaactctctttccatcccagtccggaatccaaaggctccttcttgccatgttgtcctcgggcgttggctgcttcctcccatttgttactttggaagtgtcttctttcctcagtgtttcttctgcgtgggccttaccggtctttactgcactcacttggctatgtggggtatgggtgggtggggatttaagaacctctcgcttcagcccggcattgtctggtctggggcttgttttgtcttctttctcccgcattcggctctgcatcgaatctgaccggccgcgcctactctcggaacggccgaggaggatgggtctcccgtctccacacgcgcggtgtctgcgccgactgcagccctcctggacgggagcctctgggcccagcttagggtggcgtccagcgtgacctactcgggaatggcagccttcagtgtcctgcggcctcgggttccgggaagctcggggacctgggcagcggatccagatgcttccacagctgtgtctccgtcgctccgcttcgggggccgagaaccagcaagaccaacgcgaggaggcgccacggtacctgacaccccgctcccaggaggcccggacgaggcttcgtcggcgagcggtcggggcctgcttctcgaggtgcctgcgagcgcctcatgcccctccccaccggccccaactccgtcccgcctcacccgaccgcg

SEQ ID NO: 438538 - DNA, 271 bp, Homo Sapiens
tggaactggaaacgagagttgatgtgaatcgccggaatgttggaaaccccagatatcggagggcggacggtacaaccggagctgtcaggtggatttccaaggctttgcattggctgtacctgaaacttatggtggcctagactccccagtatccactcttccttatcttgagtctcactcttttgcccaaattagagtgcatgacacgatctcgactcactcaatctctgactcctgagtcaagcatctccgcctataagcatcctctaga

SEQ ID NO: 438539 - DNA, 1648 bp, Homo Sapiens
tttttttaataaatacaattccggatttattaaaaatcagggctcccctgctgtgccctcctggcactaaggaaataaataaccagagggggcacagctaggtaaagggggaaaaaatcagatctcaagacagactctttgaactaccctttctccctccccaattcccacccccttatggctcttgggacatagcacctgagcaggcacctcagtccgtgtagagtgtgaccggcaccaaggcatgtctgccctacccaagaagggagacaggccctggggtcacttgtttccagcccttcatgaccccaagacctgttccccacaggggccagggctgaagcaccaattggaggcacctgagggtggtggctgggggagggaggatggggtaacagaacctaggcagcagaagcagctgacgggggtccggccccctctccaagttcagccagtgcctgactgaggtcatgccccatcgtcctttcccctcgaaccccacctgcactcagctgaggatcttccggggcagttcaacagcagcacggatgaagactgcatcatcccgcacatagtttcgctttcgaatgtcctggtgggagatgaacttgggataaccaaagcccagagaactctcatccagggagccccgccacgtgcctggcttctggaaattcttccagtttgggtcggggtggaaggtctcagtgacgtgctgtggtttagccagcccagggtcgctctgatccagcagggagaaggtgacacggcgggcaaagggccactcaaggagattgtcaaaggcaccaggcagcacacgaatgtacagtgagaggtgtgtgccctcaccactgccattgccattgaggaatgcagacacctgcagcttgtaaccatacttatgtgtgtagaaggctgggctgaagcactcaaggttgggcttggccttggcctcctgtagccgccgtccatagctgccaatcttccagatgagcacgccatcactgcccactgatagctcctccagctctcgccgaagctcctgcagctcctgccgttgccggctcaccagggcacacatcatggccagatgtggcttcacactctcctccacatgccgtgccattgccagcttagggcacctgtgcttgcagccggagtctttgaatgggcagagcaccagggcggtgttacagctgtccttcagatggcctggcaggtcctcccgagccacagtgcccacaccacattggttggggcaggcaacaggcagccttgggcactggtactggtggctctggatggtgtcaaagacaaactccttagtgcagtaggtgcagggctgagtgcgcttgggggcacataccctcatggctctcataggcctccccactgaagtcacagccacaaaactcgcacttgaggcgccgcttggggcagtcatgctgcaagtgtgcaggtagatcacggcggctcagcttcatggggcagcgattagggcagggaatgacattgaagctgcaggtattcaggtggccctgtagatgacgtagtggcccactccagcggcagccctcctcactgtggatgcagcggataggcaggcccaatacttgtacttccagctccgggtctgggtagatctggg

SEQ ID NO: 438540 - DNA, 1089 bp, Homo Sapiens
  misc_feature (7)..(7): n is a, c, g, or t
  misc_feature (18)..(18): n is a, c, g, or t
  misc_feature (22)..(22): n is a, c, g, or t
  misc_feature (28)..(28): n is a, c, g, or t
  misc_feature (30)..(31): n is a, c, g, or t
  misc_feature (35)..(35): n is a, c, g, or t
  misc_feature (38)..(39): n is a, c, g, or t
  misc_feature (59)..(59): n is a, c, g, or t
  misc_feature (61)..(61): n is a, c, g, or t
  misc_feature (72)..(72): n is a, c, g, or t
  misc_feature (77)..(77): n is a, c, g, or t
  misc_feature (79)..(79): n is a, c, g, or t
  misc_feature (122)..(122): n is a, c, g, or t
aagaatnaagttggttgncttngcctcntnngccncgnncatagtgccattttccagangncacgccatcantcccnantgatagctcctccagctctcgccgaagctcctgcagctccctncgttgccggctcaccagggcacacatcatggccagatgtggcttcacactctcctccacatgccgtgccattgccagcttagggcacctgtgttgcagccggagtctttgaatgggcagagcaccagggcggtgttacagctgtccttcagatggcctggcaggtcctcccgagccacagtgcccacaccacattggttggggcaggcaacaggcagccttgggcactggtactggtggctctggatggtgtcaaagacgaactccttagtgcagtaggtgcagggctgagtgcgcttggggcactcagaggtggcatgctgggccagcagccgccgcatcatgcgggcaccacacttattctcacagtagacactctcctgggggcacataccctcatggctctcataggcctccccactgaagtcacagccacaaaactcgcacttgaggcgccgcttggggcagtcatgctgcaagtgtgcaggtagatcacggcggctcagcttcatggggcagcgattagggcagggaatgacattgaagctgcaggtattcaggtggccctgtagatgacgtagtggcccactccagcggcagccctcctcactgtggatgcagcggataggcaggcccaatacttgtacttccagctccgggtctgggtagatcttggcatagtccagaggaagctggtcctcagggcacttgaagactccttcactgaggaactcctgcaggcaggtatcgcagaaacggtggccgcaggtggaaacctgcacaggctcgcgcatgggcttcccgcacagtgggcacagcagccgtcgcttgggcttctccaggaacttgtagtcgaagccaggcatggcgggcgagcggccggcacgggcgagcggggccaggcacgcggcggccccacagcccgcgcctcgctggagcggcgctcccggctccgggcggcgccgact

SEQ ID NO: 438541 - DNA, 1150 bp, Homo Sapiens
ccgctccgttaaggggcgggccgtgccaaaagggggggccgagtgttttcccaagagagagagcgcggggcctttccagtggacccactgggtataggttcccttacaagttttttgccagaaagctttcctggcaggctctcttgcgggtttgccgggttcaaccagggggcccaccatccttggccaaggaagggggttttaacatttgtccttccaaaatggcgggggccatttgccaagttaagggccactggtgtttgcagccgggagtttttgaatggggcagagcaccagggccggtgttacagctgtccttcagatggcctgccagttcctcccgagccccagtggcccacaccacattggttggggcagggcaacaggcagccttgggcactggtactggtggttctggatgggtgtcaaagacgaactccttagtgcagtaggtgcagggctgagtgcgcttgggggcactcagaggtggcatgctgggccagcagccgccgcatcatgcgggcaccacacttattctcacagtagacactctcctgggggcacataccctcatggctctcataggcctccccactgaagtcacagccacaaaactcgcacttgaggcgccgcttggggcagtcatgctgcaagtgtgcaggtagatcacggcggctcagcttcatggggcagcgattagggcagggaatgacattgaagctgcaggtattcaggtggccctgtagatgacgtagtggcccactccagcggcagccctcctcactgtggatgcagcggataggcaggcccaatacttgtacttccagctccgggtctgggtagatcttggcatagtccagaggaagctggtcctcagggcacttgaagactccttcactgaggaactcctgcaggcaggtatcgcagaaacggtggccgcaggtggaaacctgcacaggctcgcgcatgggcttcccgcacagtgggcacagcagccgtcgcttgggcttctccaggaacttgtagtcgaagccaggcatggcgggcgagcggccggcacgggcgagcggggccaggcacgcggcggccccacagcccgcgcctcgctggagcggcgctcccggctccggatcccgggaattccggaccg

SEQ ID NO: 438542 - DNA, 855 bp, Homo Sapiens
  misc_feature (526)..(526): n is a, c, g, or t
gatataaacagggaggagcaggctctgagaacctgccaggttgcgtggataactgtgactttttgcgcctgatgccataagttggagggtcctctgctcaaacatatggtacacacttctccgtcgtgtcatctggtatcatgtatcatctctcagatccaataagaaaacattcccacgtctttccctccctccctagtaccaaggtcttcatctcagttttcatgggtccatggggggctgcctctagtgatgagctggattcttaaggcctgaaatagagccagactgcagcagtcccaagtcctggagagctttcaagtaactgctcccgcgcagagccaataaaggaattctccaggaaggtaggcaggcttcttacaccatcccgcagggtatacaggggcactcgcaccaggcccagcacctccagcccgtggtccttggcgcgtgttgcgccgggcctccacagccaacagctcctcgagcgtcagacgcttggcatagaaagtgggccacaacggcngtggccctgaccccgacgtgggagctgcggtagtcagtgcgctccacgcggaaagcggcagccgcttcgcccagctcctcgcgcagctcgcggttcagcccgtcctctaggcttctgtcctgcgtgtccacgaatccgccggggaagcccaggcgtccatcgaagcgcatctgcatcagtatggcgtagcgcagcgggatgcggccgaagagcatcccagggtccggcgcgtagaggagagcgtggcacgcatgacgccagcccgaccccagcgccagggcctcgcctagctccagcctgcgggctccggccatggccggacactgctc

SEQ ID NO: 438543 - DNA, 1039 bp, Homo Sapiens
  misc_feature (57)..(57): n is a, c, g, or t
  misc_feature (991)..(991): n is a, c, g, or t
  misc_feature (1001)..(1001): n is a, c, g, or t
  misc_feature (1008)..(1008): n is a, c, g, or t
  misc_feature (1014)..(1014): n is a, c, g, or t
  misc_feature (1022)..(1022): n is a, c, g, or t
  misc_feature (1032)..(1032): n is a, c, g, or t
cgctgcgctacgccatactggtgagaagggggcgcgcccggccactttctgcctganccccgcaccctctctggtggtctcctctggggcgcccctgccaatccccgcttccccctcccgcagatgcagatgcgcttcgatggacgcctgggcttccccggcggattcgtggacacgcaggacagaagcctagaggacgggctgaaccgcgagctgcgcgaggagctgggcgaacggctgccgctttccgcgtggagcgcactgactaccgcagctcccacgtcgggtcagggccacgcgttgtggcccacttctatgccaagcgtctgacgctcgaggagctgttggctgtggaggccggcgcaacacgcgccaaggaccacgggctggaggtgggaccagcctgggactctgtccctttcccaatttcctcttctcccaaagctttctctcccccaagaaagcatccctggagaaaagtctttgcccctctgaccttgccctctccccagctttcttggtggagttgggatcgtgatcatctatactctgaattagtactgccaacctgggctttctgtaaaggtctttcccaccctttaccaggagagatcctttctagaacacactcatccatgtctctctgctgttccctattgacagtgtgatagattatcacattatctaggtgtggcaacctaggttttattcttggggtttgcttttcttgtgtaggagatgtggccctgatatttcaggcagggctagtagatagattatgtatgaaggtggttctcaaaatttggcaggtagcagaatcatcgggggcgtcttattaaaatagcgatttctctcagcattcctgcattggtggtggggcggggggagaggaacctgagaatttgtagtttcaaaagttccaaataatgctgatgcaatatctgaggacacatttgacaacactggtgaaaggtatgatacatcttgaggngtagcactanagtttanagcaangtgggaanataattatanactaata

SEQ ID NO: 438544 - DNA, 1009 bp, Homo Sapiens
  misc_feature (136)..(136): n is a, c, g, or t
  misc_feature (601)..(601): n is a, c, g, or t
  misc_feature (692)..(692): n is a, c, g, or t
  misc_feature (805)..(805): n is a, c, g, or t
  misc_feature (874)..(874): n is a, c, g, or t
  misc_feature (876)..(943): n is a, c, g, or t
cccagaccacccaccccggtgctgaagactcttcctgagtcgtgtggcaggccctgagcaggcagctgggtgtcccgctcagatccaggcccgagtgggctgggcggctgcagagccagtcacctgagctacccanggtgggatccctggccccgacctctgtcctgacacgccccaagcggcagcaacaaagccccaattggcctgggcctgggcaggaggagctgggccgggtgccagatactgggatcagccactgcagctccctgagcactctctacagagacgcggaccccagacatgaggaggctcctcctggtcaccagcctggtggttgtgctgctgtgggaggcaggtgcagtcccagcacccaaggtccctatcaagatgcaagtcaaacactggccctcagagcaggacccagagaacagggcctggggcgcccgtgtggtggagcctccggagaaggacgaccagctggtggtgctgttccctgtccagaagccgaaactcttgaccaccgaggagaagccacgaggtcagggcaggggccccatccttccaggcaccaaggcctggatggagaccgaggacaccctgnggccgtgtcctgagtcccgagcccgaccatgacagcctgtaccaccctccgcctgaggaggaccagggcgaggagaggccccggttgtggngtgatgccaaatcaccaggtgctcctgggaccggaggaagaccaagaccacatctaccacccccagtagggctccaggggccatcactgcccccgccctgtcccaaggcccangctgttgggactgggaccctccctaccctgccccagctagacaaataaaccccagcaggccggggaaanannnnnnnnnnnnnnnnnnnnnnnnnnnnnnnnnnnnnnnnnnnnnnnnnnnnnnnnnnnnnnnnnnnncggaaaaaaaatttaagcgcccggggcccctgggagaaaaacaaaaacacccaccctttgtttagg

SEQ ID NO: 438545 - DNA, 931 bp, Homo Sapiens
  misc_feature (196)..(259): n is a, c, g, or t
accgggggccccctgcaaccagggcactcttggccaaaagggtgggttcaccaattcaacggcaacatttggtaatgaagacttcaggggccgtcttccacaaattccaaaccaggtgcaaaatgacttagtgcaaattaaattccagaagggacggggggaaacagagtcgtggaggctttgaatctctcagaannnnnnnnnnnnnnnnnnnnnnnnnnnnnnnnnnnnnnnnnnnnnnnnnnnnnnnnnnnnnnnntggtggggacggcgtcatcccgctggaggagctcagctctgggatgatgtggtggctggtggtcaaccgtccgccgcagggggtggccatgaagatggagtcgccggtgcggggtgggtgctgcgggcgctgctgttccgatggtgtctttgatgttgggctgatgaggtctggttcctctagcttcaccttccagagccgattcctgagtcaggtagtgcagtggttgtaaagtgcagcatattcatttccaagctagagggttttgtgtccggattcaaaggcccaggcttgagctgggtagcaccatttctttcatgttgtgggttctgggagcccagagggcagccatagtgtgccgactccgtggaggaagtaaagaaacagacccgcttcttgccgcagccccaccagcctaaggtgttcaggaaggccggacgcgcctcctctgtcctcgccgtcacaccggaccatgtcatgtcctgcttgtcacgtccaccggacctggcgtcttggccttcggcagctggtgggcacgtccaccccagctggagacctggcctcgtctccagcccgaacgctgaggcaccgatcccggctccgtcgccgcccgcgaggcccgccttggccacgggctctggaggccagtgcctcccgctcgccgcccgctgc

SEQ ID NO: 438546 - DNA, 2282 bp, Homo Sapiens
ttttgctgtaacagtgtttattgatgatgagtccagggctcctgctgaagccctggtggggaggggcacagagcgagatggggcgtaatggaatgcttgaaggctgctccgtgatgtcggtcggagcttccagactaggcgagggcagggtgaggcctcgggcacacagccggcgcccagtcacccggcccagatggagggcggccgggccctgcgcaggcacttgccaaggtggctcacactcacgcacactcgcaccgagactcaaggccgtctccacaactccaaccagtgcaaatgacttagtgcaaattaaattcagaagggacgggggaaacagagtcgtggaggctttgaatctctcagaaaaaaggaaagacaggaaagctcagaaacaaagagacagaaggatgaaaaagaagaagagggaggtggtggggacggcgtcatcccgctggaggagctcagctctgggatgatgtggtggctggtggtcaaccgtccgccgcagggggtggccatgaagatggagtcgccggtgcggggtgggtgctgcgggcgctgctgttccgatggtgtctttgatgttgggctgatgaggtctggttcctctcgcttcaccttcgagagccgattcctgagtcaggtagtgcagtggttgtaaagtgcagcatattcatttccaagctagagggttttgtgtccggattcaaaggcccaggcttgagctgggtagcaccatttctttcatgttgtgggttctgggagcccagagggcagccatagtgtgccgactccgtggaggaagtaaagaaacagacccgcttcttgccgcagccccaccagcctaaggtgttcaggaaggccggacgcgcctcctctgtcctcgccgtcacaccggaccatgtcatgtcctgcttgtcacgtccaccggacctggcgtcttggccttcggcagctggtgggcacgtccaccccagctggagacctggcctcgtctccagcccgaacgctgaggcaccgatcccggctccgtcgccgcccgcgaggcccgccttggccacgggctctggaggccagtgcctcccgctcgccgcccgctgcgctcctcacccctgcctgcaccatcctccctcctgagagctcattcactccgccccgcccgcctcgcctagtctggtctcgccccatgcccttgactcccctggatgctgtactgtctgccaagccagccccaggggctgagcggtgagggcatacagcgtcaccaagtccactgtgggccctctccgcaccagaccctgggccgcagtgcctcgtgggaccggcgcccgcaggccgagcccctgcagcctccttgctgcgcaatgtcccggggcccccctcccgtggccgcttcgccctcctggtgacgtcctgctgcaactccccgagcactgcctgtcttcccgctctccagccctcgaggctccggcataggcctgagaaagccgtgccggagctgcccctgtgcctgctactaaatgaattgcggtgggtgaggtggcagctggggacccctctgtcctgtgtcccctgccatgtccctgtctgacccaggcctggggtaccaccccacgtgctggaccctacgctggccacccctgtgctccctccctgccctcttgctctttctgcctggaacgggcccataaccccccagccttgcgcagtctcggctccccccgagaagatgtcacctttgctaactctcctgcccccatcctgcccctctgctgggagggtgtctgcttctccccgccagccctcgatcccctaaacctccttctttcagaaggctggggaagcgaggcctggggagggaagggactcacctgcccggcagatggggtcctcacctgcccgctgctgccagctacacctccgttgcccaggccctgggatcaaaccctgcccaccagctcccctcgtccaaccagctgccacgtcctgtaaccaaaagtgaccgggatgaatgcctggctcccccttctttccagccctagctcaggcccatcgtccccagctgatgtcgccctgtctgcacgatgcctgggcgcctactccacactcctcactggcctcaggccccaccagccctgcctcgagctagcccctccacccgtcatcactcctgccagactccagatgtccaaggtgctccttggctcccacaagctctcctccagcaccccatcttcccctggtgcccctcggcctcgtgccgaattcgccacccaggc

SEQ ID NO: 438547 - DNA, 1377 bp, Homo Sapiens
aggtgtccctgtgggattacttgcacctgtccgtcttctccgatctggtggatctgcacctgctgtgcgttggccagcgcgtagtgcagggcctgcggctgcggctgtggctgcgggagctcgctggcaggaggtggggtgctcatcatcggctctgaagggcagtaggaggacgagttgggcgttctccgcgagaagctcttgaccgccaggctctggccccgctgcttgcgccgccacgccgtgcggcacttggagtcaatgctctgcttgattcggtaccagtcggattctgtgatgccaaatttatagaaaaggtgacaccggatgccgtagatggtgagcgggtcccagctgttttttccccgtgcttgccttgccccgagagggttggacacagcctgccaccttgcggtggaagaggtagtccagcagcgttagcgccatcttctcggccgtgcggcagttggtgctgatgtgcagcatgtcggaggggatgatggcgcagcgtacccgcatctcggggttgttctcgtcgcccagccaggtgccattggggtagtcctcttccgagttcagggtgatgagcgtgacgttgctcccgatgctctgactgcccgcctgcccacagctggacacagagtcgctggcctccgagccgctctccccgtcctcgtggtggctgtcttcttggcccggcaccttcaccacaatggtgttctgccgacgcccaggcacagcgttgctaatgacattttccagggaatccggtgccctgttgctcaaggggtcttccatcttggctacaatggcgttctgccgatcattgttgagtattactgtagtctgggggacgacgcatcgcactttgttgcacgtctgggttgccccgagaggggagccggccaccatgggaacctggatggggctgtgctgcttgttcgtgaccagatccagcttttcttctaaggatttacaagtagcctccagggcttgcaatttggcttcaatgctatccaaccgcaagcagattgtctggttgatggaatacaggaatgactttatagatggatcctggcaattgatttctagtcgctggcgtttcaaagcaggttcgtcttcatctgtcactacatgattctccaaaacaactgggtggtcagggctcaggtcttccactgcaatctgaaccacatcggccaggtcgtgttccgacatcatccagagcacaggagagtggccggtcaacacgaaagagttcaactcacagtggggctggcttttggtcaccgtgtgggctgcggaattctcgtggtgtttgtcggggagatgcgataatggcgtccgtcctcgcgagatcccgggaattccggaccg

SEQ ID NO: 438548 - DNA, 1056 bp, Homo Sapiens; identical to SEQ ID NO: 150500

SEQ ID NO: 438549 - DNA, 821 bp, Homo Sapiens
ttttttccgcgaagctgcaccaactttatttgcaaaaagaggctccaagcgcacggagaggatgggggctgcaaggtccccaccctcctcccggcctcccgcggctcctgccctcctccaggccccccacggcccccgccccgccggctacacgatcccgaactggcagatgtagggcagctgatcgcggcagcgcttgtcgaaccacttgccgttggccgcgcctgacaggaccgcgcagttctcggtcttgccgccatcgggttgcgcggtgatctcagtctcccagttcttgtaggcgatgcgggcgccggtcatgtccacccaggtgccctcggccgccatgtcgttgaggcccagccagatctcggcctcgttgcccacgctctggcgcaggtactcatacagggcgtcgttctccgagccagtctgaggggtgctcagggtgcccccgcgcgagatgcagtcctcgctggcctcgtggaaggtcttcgtctgggtgaaggccagaaagcatttcatgtgcaccttggtccccttcaggcagaccgtctgcagggcctgctgctccttcagcagggccacctcctgggccagggtgtccagacggctcttgagctcctcaaacatctttgtgttcacaacatctttcttggcatttacaatcttcttgggcttctgggttggtggctcggtggtgacctgggtcaggagggagaagaggcagaggaggaggtaggccccccagagctccatgctgctgcgcgggcgggggctgctgctgcctgcagcgggtctgggtccgaacgcagtgacccgct

SEQ ID NO: 438550 - DNA, 749 bp, Homo Sapiens
  misc_feature (77)..(139): n is a, c, g, or t
ccgcgaagctgcaccaactttatttgcaaaaagaggctccaagcgcacggagaggatgggggctgcaaggtccccannnnnnnnnnnnnnnnnnnnnnnnnnnnnnnnnnnnnnnnnnnnnnnnnnnnnnnnnnnnnnnggctacacgatcccgaactggcagatgtagggcagctgatcgcggcagcgcttgtcgaaccacttgccgttggccgcgcctgacaggaccgcgcagttctcggtcttgccgccatcgggttgcgcggtgatctcagtctcccagttcttgtaggcgatgcgggcgccggtcatgtccacccaggtgccctcggccgccatgtcgttgaggcccagccagatctcggcctcgttgcccacgctctggcgcaggtactcatacagggcgtcgttctccgagccagtctgaggggtgctcagggtgcccccgcgcgagatgcagtcctcgctggcctcgtggaaggtcttcgtctgggtgaaggccagaaagcatttcatgtgcaccttggtccccttcaggcagaccgtctgcagggcctgctgctccttcagcagggccacctcctgggccagggtgtccagacggctcttgagctcctcaaacatctttgtgttcacaacatctcagtgcttggctgagtgtgtgcccatcacagctactaataagatgagggcagaaggaacccaggttttccactcttacagaggaggccaggctctgggctaagccg

SEQ ID NO: 438551 - DNA, 792 bp, Homo Sapiens
  misc_feature (41)..(53): n is a, c, g, or t
aaataactttataatttcctggtggatttagtttgtgaatnnnnnnnnnnnnntgaacaaagtgtttacaataattatcaaggcaaagttgaatataacacaatttctttgtaatgtcattatcctgtcagtaacacaactccagcaggaacacacacatacagctgaaggcagcgggtgcacgtgcatcccagacaccaccatggaggctgctactgttaccaaaaggaactcaagctacaagggggcaggtgctcctcagctcctccactaaagtgcaacacttctcttctgacgcatcagggagcagtcacaggccccactggatatcctgcaatgcccggcaggtgcctgggctagtcctgcgatgggccagcaggccagagtgggtggtgctgccctcaggatgtgtagctgcagtagatggatgcaatactggcgtggtgtggaatgaggggctggacccagagggcctgctttggccggggtgaattctctggcttcagtagggttcacttcctttcctgacagtggcttctctggggtcaagagagagcctgggcctaggagatctagggtctaaaaaagctcaaagggaaataattgagggcctgaagccagaaggaactgacatggaggacagtctgttccacctggattgcaggctccaggctggccagtgctcacccgtgctgggtggtcactggaagagatagcaccaagtgggcaggagaggtcctgtggcctgccaggcaggggcttcagggtcaagcccaggttaccatgcagtcc

SEQ ID NO: 438552 - DNA, 1261 bp, Homo Sapiens
  misc_feature (232)..(240): n is a, c, g, or t
  misc_feature (710)..(710): n is a, c, g, or t
  misc_feature (905)..(905): n is a, c, g, or t
  misc_feature (1015)..(1015): n is a, c, g, or t
  misc_feature (1017)..(1017): n is a, c, g, or t
  misc_feature (1115)..(1115): n is a, c, g, or t
tatgaaaaatccaaagtttattgcaaattgtattttgcttcccttcgttcttcatttttacaggatttattgctatccatgattttttcacagatgtacttgttgactttggagagtctctgtgcaatttcagtttcatccacagtttcttgtgctattctgtcatacaaacactctctgacgatgcttagtttgtgaggcgagaggggtggtttagggactgcatctttcnnnnnnnnngtggcgacgcctgtgacgcttctgtttttcagaacatctgttccccaaatcataactgccaagttcttcgtgtacttggaatctccttgggttacttgtagctggtgccatttctcctcatcaacccaaatcccgcttcccagatggaccttgccattgtctaggatatacttgtccatgacaggcgcaggagcggggtaataggacgacgtatttgcttcctcactgaaagtgctccgtaactccggctcgggctcgagacattctgactttactttttccagatcaatggcgggaccgctgccaagcctcaggagcagcacgtcctggagcctccggttaaggtcacggagctccttcatttcagacacaagtgccccgtactccttgagcttcttggcctgttgtaccagctgcctccgagtcccgctccagctcttgctggaggtggcgcatctcttcctgttgcntgctggtagttgcgcagcagctcctcatacagagcccggggcaccacagcatcttctagactgtccatgtcctctgtgcctggcgaggcttccacgaagaccctcttccggacacgtgctatggcccaggctcaggtcgttctgcttctctagccgagccaccactgcctcgatgctcttgtgcgccacttcgcntcggcttccgcccctcaggtctcttgatgtgtctaagctgtaaatcttcttcgccataatctttaacctctccatcttcttctacatgattaagagaaagcttggggatntntattttcttctgcatcacactgttttcaaggtcagatatgtcttctgccagcgccaggatctgggccttgtggagcaacagcgcgccccagtcgcggngggcgcgcgggggctctcgggcccggcgcccaattcctccgggctccggtacacggcgtacaccttctggttgtcaaatccagaccgcgagcggggctaagtggcacgccacacggcagcgcgagcagacgttgtcctccaggaac

SEQ ID NO: 438553 - DNA, 1311 bp, Homo Sapiens
gaatgtattagaaagtactttattaacaagttattataaaacaatattcattttatataccacaaataaactttttggtgcagataggaggaatatttgagtttttcccacctatttctaaaactgctagaatttctttttataagatcagtaccttcaattctagaatttaaacaaaactttttgctctaagaatgcatacataaaatacttcccctacaactgtactctatccttgacaaatccttattaagaggttcagtagtaactgtaggtatttaatgtcagaacaatctttcttcatttctcaggtttggaaatataacttcaagtatggaaaataacttttcccttaagaatacgagaattcacttagagacatctcctcaaatcagccaatcccactgcttcggctccttacatcaggactccatgtcaacctcagccccttcattcctgccctgaagtgttgcttctgtcagggtgtcttcacttaaatcttcaatgtctgccagatcaataggaggcaaaggattcctccagtactggaaggtattatactgccaaaattcttcattgtgctggcgcgatgcgaccccccagtctccccgcgggggtcctgcgcgccccgccccgtcgtcgccaccgccccccgggagccgggcgcccgggagctcctcccccggccccggcagtacgggcggcggcggcagcggcggatcgcctgtctccagaccgtggtcctcacgctcctggccgctcggggcgctgttgtccccgctgtcacggcgcttgctgggcgaagccgagggctctgccatggtccctgcgtcgattttgcgctttcggtgctgctctgggacgccgaggagctgcccagcatgcgcgaccccgggcggccggatccagagaggcggtggcggcggctgctcagcgaagtcgcaaagcaggagccgcttccaaggcacgtggaacgtcaccggctcggccgcacgccgcttggccatgggcccagaggctcgggcggagcccgccaggcgcgggagaccgagtgccgatagctgcggggggcgaagagcgaggactgagcgcgtgagagagggacaggccgaagtcgggcgaggaggcgacaggacgctggagggggtagggcggggcagctcgcgcagggcctagggctggggctccggctcggaggcagctcccgcgctcagccctcgccgccgccgagatgcggcccggacgttgagaagcaaccgcgaagcggcggagattcgaacctgcgcacaacgtgcgcgcgcgcactctccc

SEQ ID NO: 438554 - DNA, 1829 bp, Homo Sapiens
  misc_feature (266)..(266): n is a, c, g, or t
  misc_feature (476)..(476): n is a, c, g, or t
  misc_feature (540)..(541): n is a, c, g, or t
  misc_feature (549)..(551): n is a, c, g, or t
  misc_feature (557)..(567): n is a, c, g, or t
  misc_feature (571)..(572): n is a, c, g, or t
cttattttcctagcatttttaaaaaagtgggcgggtgtccccatagctttagttctaaggatgaaagtttttttggccttactcttagctttggcatgaggcgccagtaagctgttaaggggggtcatcaattaatcaaagcgcccagtagcttccgggtcccaaggcaagatgatgtgtattcagccctggattaaactcagcccctggattgcagattcataaaaggctgaaaagttcagttttcttcaagagtccacgtccanaaaagcatggctgaaaagctcagtgggaaagctgggaaaagctggaagagagtcagaaaggttagggggtcacccgccggcagagggatgtttaccagtgccccccagcaaggagtgctgccaccagctgtcactcagaggggccaggaaccatccttcactgttcctggctctggactccccacttctgcctctctgctgccaccatgnaccctaaaaagccaagctaagccctctgagttcaataaattccatccaaggggaaaaccaaaannaccccccnnnacaggnnnnnnnnnnnaaannccccaccgctagtcagaagcagccgggcggtgcactcagccggctgcctcagcggcctcgtcagccccctcctcgtcttgctcgccattctggagcctgcgcacgatgcgggtaaggtccaggcttcgtgtcagtgtgtccaggagcatctggtccttctggacgccctctataaactcttccagggagagttccccatccccgttgacgtcaatcttggagaacactgtatcggtgaactcctctgcagtcatggtggtatcgctgcaggggttaatggcgcgaatggcctggatgatggtgagcagctcatcgcggtcaatgcagccgttgccatctacatcatagagcttgaagtaccagcggagcttctgttccaccttccccttgaggaccaagctgagcgctgccacgtactccatgaaatcaatgtagccgtccttgttgaagtcaaaagtctcaaacatctgttccacgtactggctggccgacgggctcaggttcttgaggccgaagaactggcggaactcatagagggtgagttggccagaggggcactcagtcatgaacttcttgtaccactggtggcactcggtgctgctcagctcctccactgactttccctccatcacgttgcccattgctcaggccttcagggggctgacgtctgagatggacaggccctgttcgctgctcctcgcccaaaggtgtcttggccgacaacggggccgtcctctctcacaggcctgagtccttcaggcctgagcaaagaagggcctgatggatcagatggtaccgggaaatgtggagagggagagagcagaaggaagaagatgatggcccacactcaaactcacagatgccagagaactggtgttaagagtctccactaaatccttgcagccccaggggagactgtaccctgagcttgtccggattctgccccttagagtccacaacgaccggcacataggctgctgccagagactgctcgaggtcctgcttccacgcccggggccgggacgagtgtggagccttcacccccttgcatgacggtgtctttggcccatgactgggtacagagggtttctgtgagtcctcccagccgcacaggtgaggctggctggggctttcatgctctttcctgcccatcaggcttcttgtgaccccgagctgaccttccccagccctgtgactttcatcacaccttgcacatcctggaccagggcctttcttgatggtgaggtggaacttctg

SEQ ID NO: 438555 - DNA, 947 bp, Homo Sapiens
tgttggcaacctcccttatctgccccgcaggtcatagaggcgacacgtagccgtcatctgatccctggaagcaaaggcatctcccactggggtagtaccggacactgttgatgtcagattcatgtgtttcaaaggcctgcacgcactggccggagcgcatgtcccacaccatggctttcttgtcacatccccccagacacgaaggtgtttccagtttctgagggggccaggtccaagcagaggacgtcagccccatgtccgtggaagctctgcagcagctgcccgctctccacgtcccacagggcacatgtgccatcgccgctcgctgtcaggatctgcatgtcagagttggtgaagctgcaggccgacaggtagttggtgtgcatagcaacagacttctttttggcagccatgttttcatttttgtcaaacgtcaaggggtacacagaacacttattatccaaaccaccacaagcaatggcacatcccgatggggcataagcacatgccatcacccacgtgcagggcatggtgaccgcgtgctccttgtttgtggtgaaggaatcccacacgatcaccttcccatcctgtgacgagctcacgatcctcctcttatctttgcaccagtccatgcacaggactttgttcccgtggcctttgagggtccttctggtcttcatgacaaactgccccagggcctccacccgctccgccacctggtgcagctccacatcgtgcagcttggctcgctcctcctccagcttgcccttgaggctctcggcctcgctcttcagcgacgccagcgtctcgttctcgtgcagcccctcggttgccatcttcgcgcggggacgcagcggagagggaagcggagagcgggaatgcgctgagccgcggcgggcgccgctccagcagccgtccccggcctcgtgccgaattcgccacccagc

SEQ ID NO: 438556 - DNA, 1738 bp, Homo Sapiens
  misc_feature (506)..(506): n is a, c, g, or t
  misc_feature (543)..(543): n is a, c, g, or t
  misc_feature (585)..(585): n is a, c, g, or t
  misc_feature (737)..(747): n is a, c, g, or t
  misc_feature (783)..(799): n is a, c, g, or t
  misc_feature (1406)..(1475): n is a, c, g, or t
agagccaagttttctttgcgtgccgcgggtttttaccaccaagggggacgaaatattttttattgccgccaggggcgagccacaggagggtgtattatatggccgcccgcggggggcgctggctcaggtgtgtgctcttccacgggcgccgttatctggaagagagggtgttataccgcgtgtgtgcgcgcacgagaagaacgcctctgtagcgtggacaatttcccgcgccccacgtttgtttgcgcggacagaagagactcgtctcccaacgagaccccggcggccgcgcgacaacaaattggagatatattctccgggaaggtgctcccgcgagcttcggcgacgcctcccccgcgtgttgtgagacaaagagaaatctccccgcgcatgataaaatagtgagcccctcgtcctccacgagagattcgtctccactctattgttggcggagatgttgtgtggtttctacggggagagaacgcggtattgtggtgtgttggacncccctcgcggggggcgcgtgtttttttgttatttatngggtgtgggagattgtcccaaagaccccttttagtttcattngaccccgcgggatttttccctatgggaaacacaaccgttttgggcccccgggttcccctttttccttgcggggggcccccgcgcccacataaagaaatggtttttgaaaaattttttgggggggccgagggggcccaacaaagtgtgtttannnnnnnnnnngtctggtgtgaaagctgtttccggggtggcgtgtgnnnnnnnnnnnnnnnnnattagcaaaattactttattctaacaaatagtttaacacaaaaatacgaactagccctccagggatctttggggtctacgcttcccatcgcctcagtgtccggtgcatgaggaaggtgtcctctgaagggcggggccggagttgaagtcggagagggggcagaccgtccagggtcaggtgtggagattcataaaatagcgtttctgggtcacacaagatggtcatgtctggcccaggcccaggtggctcctttgggtgcggggctcgagcctgtggcggcaggagagccaatttctccctgagcgcggcattcagaacctgttcctccggcacctgcaggctcaccaggtcccggaagagccgcttggagcgcggcacgttcagcccctcggacacgctctcctgcaggccgcagcggatctggaacgactttctcagctgttcctccacggccttcgcagcatcaaagtggctcccggctgcggcccgcagctccaggcccaagcgccaggctgctcttcagcacgggcatctccagctcctgcggcaccgcaggctgcggctcggaccgcaccggggagggcggcgtcaggcggaagcggacctnnnnnnnnnnnnnnnnnnnnnnnnnnnnnnnnnnnnnnnnnnnnnnnnnnnnnnnnnnnnnnnnnnnnnnctgagggctgtcggccgcgggctcaggctcaagtccaggccgggctcgggcactggggctcggagttgcgggatttcggggctccgggggtggccccgggaccgccgcggcttcttccccgtccgccgacttcagctctgactccccacaacccatcatcatcatttggaggtgccttgagcggtgcggggattacgggggtcgcagacgctccaacggtcaggggacacagcctggctccgcctcctttcccccgcccctcc

SEQ ID NO: 438557 - DNA, 635 bp, Homo Sapiens
ggaacagtctggtccctgatgggggcctctccccctgcccctccccagtctggttacagctcaattcgtcgctctattttgagcagctccacctcgaacaccagggttgcaccgcctggaatctttgggggagctccccgctctccataccctagctcggatgggatcaccagcttgcgcttttccccctcacacatccccagcagcccctggtcccagcccttgatgacctggcctgtgccaagggagaagacaaagggctggttctggggcaggctgctgtcaaactctgtcccatcttccagcttccccgtgtagtgcatgtgcaggacatcccctttgcgcgatttgatgggacagtggtccacccgcttcttgaccccgatctgcagcttccttttgccctcggcccccgtggccgtggccacggcgctcaggcagatggacagtactgtcaggacccggaaccagctcagcctcatgtctctcctcgccgcgcccccggagtcaaccccggtggtgctgccgcctctgcgcaggcgcgtcctcgtcgctaccaggccgggccacgccgccctcccttattggaccgtgcgaaacccgcggccacacgcccgctggcacgggtctttccc

SEQ ID NO: 438558 - DNA, 1785 bp, Homo Sapiens
  misc_feature (367)..(383): n is a, c, g, or t
  misc_feature (430)..(452): n is a, c, g, or t
gatttccccgcggttttttcgaacccgattttccatttaaatccagggtttaaacctctggtttttggaagaaattatatacggggtccccttattaggggggaaccgggcaaatatttcccaccctttgttccaagaaaaaggttggggtccagggaaaacaagtttatgggcccaggtgggccatttttaattacccctttgtattcccggccccccgaccaaagaagaccctcgaggtttttggtgctacagggggcgaggtaatacggggcgaagaaaagggcatcttatttgggcttttaattcccaaaaggaatattgaggaaatcccagaaagaaaaattttcattcaagcccagttccnnnnnnnnnnnnnnnnntcccaaccaacaaatttgtcacattgggcctgcattagaaaacaggnnnnnnnnnnnnnnnnnnnnnnngcagtccctgaaatctggcaggtggtttttagaggccacagggagcttgccttagtcatcctggtgaaatgggacagaagtggtttttggaatatggccaccgcctcctgtttcttgctagcaatggtcatctgaagggagggtgctagcctggacatccaacatttggcatcacttatgcagtctgaggtctcaaagacaagcggccttggagtcttccagtccatatcttcactgaatctctcccatatacagtctcttgtcactcgatgctgagataatgatgggctcatcagggtggaaagccacttcattgatggagccagcatggccgggcagcttatacaatattctcctgcttgtggtatcccacacataaacaaacctgtcggctgagccagctgctattttgcttccatcaggtgacccaagaacattctcagaaggttcttttcaaagttgtgcacatttccttgaaatatctttacacatctctcttgggggcaaatggccggacatcccagacacgaactgtattgtccattgcattggacaaaagataagagccttcagaacttaaactcaggccagtcactgaatctgcatggcctctcatggtgtaggttagcttgttctggcgcaggtcccagaccttgatatcattgtctattccaccagaaataatctgatcacttgtgtcattgaaggtcacagctaacacctggtacgtgttctgaaatgtctggatggctgctttcttccggatgtcccaaagcttaactgtgccatcgtcactgccagtgcagacaagctgagggcctctcctggctggataacaggaattcacaaaggaagtatgtccctttagccttttaaccctctcacctgtttcactatcccacacagccacggttttatctgtggatgctgagaaaagcatactgccatctgtgttgtaatgcaattccatcactgctccactgtgtcccttcagtgtggcatagttatcacagtcaccatagacattccacagtaatatcagtcggtcaaatcctgcagatgctaaggtggatccgttggggtggaacttgcagcagtagacttccccttcatgtccagagagcagcatgattggggcttgaagggaggaacatcttggaggtcccgcttgcagcaaggctcccggcgtcgcctgctgctgcccggctcctgggccagaccccgctcccaacagcaactcatgccgctgccgcttgactggaaccagcggcaactctgggcccttacgcttctgctgttctatcatggcggcaaccggtctcttcagcgccgc

SEQ ID NO: 438559 - DNA, 396 bp, Homo Sapiens
  misc_feature (23)..(23): n is a, c, g, or t
  misc_feature (29)..(29): n is a, c, g, or t
  misc_feature (44)..(44): n is a, c, g, or t
  misc_feature (117)..(117): n is a, c, g, or t
  misc_feature (261)..(261): n is a, c, g, or t
  misc_feature (321)..(321): n is a, c, g, or t
aatactgccccatctgtgttggnaaatgnaattcccatcactgntccaactgtgtccccttcaagtgtggccatagttatccacagtcacccatagacattcccacagtaatatcantcggtcaaaatcctgcagatgcctaaggtggatccgttggggtggaacttgcagcagtagacttccccttcatgtccagagagcagcatgattggggcttgaagggaggaacatcttggaggtcccgcttgcagcaaggctccncgcgtcgcctgctgctgcccggctcctgggccagaccccgctcccaacagcaactcaatngactgccgcttgactggaaccagcggcaactctgggcccttccgcttctgctgttctatcatggcggcaaccggt

SEQ ID NO: 438560 - DNA, 1054 bp, Homo Sapiens
ctttatccccccctttggccccttgtgcccaaaagccggtactccctaaacttgcgcccctcaggatacctttaggcccgcccccctgttttctgtgttctactttttccggcactaagtcaagttctttacttcccagaagtgatggctaaggggagggaggagggtgagaagaggaagacagaaagagccagagagaatgaggaggtgagaagggggggacagtaaaccactgttctatgaagtctcacgaggcaagtgctcaaggtaaaaaaagagtcctggagaatcgtccacggctgcgggaagcatctcggtttccttctgcttttaagtcctctcagggaaggctgtcgccgctgccgctgcattaaatagttatgtacatcgcagagagtcccaggccatgggcaggtgggggaggggcgtcatttcaccaggggccgagttttatcatcgtcaccgcactggtgagctttgtactttttcacttctgccatgtacttggcccacgcgtcacctttacttgttaatacctcatcctccgtcttctgcttcttggctactattcccgtcttgagggctagtttgttcccgcctctgcgtttgcccacgaagctaagtgtggagcccggaccgcccttcctcttcggatccccggggccagcggcggcggccgactggtcgggtcgctgcggacccgggggcggctcctcctgccgctgccgctgctcctcctccatcttccgcttgaacagctccaggaagctgccgtcgttggcgaacaagttcacgccgcccgacaccgggctcgaacccgcgcccgacacctcctcgtccccgctctcgggcgacgtccccgatcccgactcagcccaacggctcccgccaccgccaccgcccgcggggcccggagcctcccggccctgaggctccgcccgtctccctcgggcagccattttgtcgccaggtgccgcgcaaaggactccgggaaggccgctccggccccgcgcttggcgcccgactcgccctcgtgccgaattcgccactcagg

SEQ ID NO: 438561 - DNA, 415 bp, Homo Sapiens
  misc_feature (205)..(205): n is a, c, g, or t
  misc_feature (236)..(236): n is a, c, g, or t
  misc_feature (302)..(363): n is a, c, g, or t
aagtaacatggcagaagtgaaaaatgtacaaatgctcaccagtgctgagtgacgattgataaaactcgtgcccctggtgaaatgacgcccctcccccaacctgcccatggccctgggactctctgcgatgtacataactatttaatgcagctggcagcggcgacagccttccctgagaggacttaaaagcagaaggaaaccgagnatgctttcccgtcagtccgtggacgattctnccaggactctttttttaccttgagcactttgcctcgtgagacttcatagaacagtggtttactgtnnnnnnnnnnnnnnnnnnnnnnnnnnnnnnnnnnnnnnnnnnnnnnnnnnnnnnnnnnnnnncctccccttagccatcacttctgggaagtaaagaacttgacttagtgtccgg

SEQ ID NO: 438562 - DNA, 498 bp, Homo Sapiens
  misc_feature (458)..(458): n is a, c, g, or t
  misc_feature (467)..(467): n is a, c, g, or t
  misc_feature (488)..(488): n is a, c, g, or t
gggagctgttgccacctcttgtggtccctgctagggagggtgaggccttggcgtggaaagtgagaacagagctggtccctactgaggtggacactcttcttgctccctgggagggcaccgcgggcccagggcaggcgctgagtcgcgtgtgctcctctctgattgctgcgcaggtcggccggctggcggagctgggcgcggcgtcaggacgggccaccaggcggggctaggaaggtgtagtgggcctcagcgccgccaagggctgcgccggctcctgtaaccgttgcagtcttctgtcccttcacccaggtgggcaaacgcagaggcgggaacaaactagccctcaagacgggaatagtagccaagaagcagaagacggaggatgaggtgagccagcttggtgcagggggtccacccacatttgccttttcccttccagctttttgcgcccagccttnttccctgcngttttggtattcaggcttttnattgagtgtg

SEQ ID NO: 438563 - DNA, 1719 bp, Homo Sapiens
  misc_feature (1396)..(1396): n is a, c, g, or t
ggggcgggacacggagccgcgaggagacagctgaggcccgcggagaccaggggtgaagcctggagaccctcttgccctggcctagctgcaggcccccgggatgctttgggcatgtcctctggagccccacagaagagcagcccaatggccagtggagctgaggagaccccaggcttcctggacacgctcctgcaagacttcccagccctgctgaacccagaggaccctctgccatggaaggccccagggacggtgctcagccaggaggaggtggagggcgagctggctgagctggccatgggctttctgggcagcaggaaggccccgccaccacttgctgctgctctggcccacgaagcagtttcacagctgctacagacagacctttccgaattcaggaagttgcccagggaggaagaagaagaggaggaggacgatgacgaggaggaaaaggcccctgtgaccttgctggatgcccaaagcctggcacagagtttctttaaccgcctttgggaagtcgccggccagtggcagaagcaggtgccattggctgcccgggcctcacagcggcagtggctggtctccatccacgccatccggaacactcgccgcaagatggaggaccggcacgtgtccctcccttccttcaaccagctcttcggcttgtctgaccctgtgaaccgcgcctactttgctgtgtttgatggtcacggaggcgtggatgctgcgaggtacgccgctgtccacgtgcacaccaacgctgcccgccagcccagagctggccacagaccctgagggagccctcagagaagccttccggcgcaccgaccagatgtttctcagggaagccaagcgagagcggctgcagagcggaccacaggtgtgtgtgcgctccaattttggccaacgggggaaaggccggaaaaaccccctggcaccgtcgcctggctcggggattcccaggtcattttggtacagcagggacaggtggtgaagctgatggagccacacagaccagaacggcaggatgagaaggcgcgcattgaagcattgggtggctttgtgtctcacatggactgctggagagtcaacgggaccctggccgtctccagagccatcggggatgtcttccagaagccctacgtgtctggggaggccgatgcagcttcccgggcgctgacgggctccgaggactacctgctgcttgcctgtgatggcttctttgacgtcgtaccccaccaggaagttgttggcctggtccagagccacctgaccaggcagcagggcagcgggctccgtgtcgccgaggagctggtggctgcggcccgggagcggggctcccacgacaacatcacgggtcatggtgggtcttcctcagggaccccccaagagctgnctggagggcgggaaccagggagaaggggacccccaggcagaagggaggaggcaggacttgccctccagccttccagaacctgagacccaggctccaccaagaagctagggtgggttccaggcccctgccctccccttcctcccatccttgtccttctctccctcagaagcctcaggacccaacaggtggcaggcagtggacagggtgcccgcccacagtgctttcccagcaccccaaagccaggcggacaaccccccggagcccgtctgggggctggggaactgcattgggttgcggacagaagttgaagggaagctagaaac

SEQ ID NO: 438564 - DNA, 1176 bp, Homo Sapiens
  misc_feature (63)..(63): n is a, c, g, or t
  misc_feature (135)..(135): n is a, c, g, or t
aagtttttaaatataccttcctatgtcaaaagcaaaggtaaaaggggagtgggatgcaagaanccaccttaccagaatccctggaaagagggctctagaagccagtgggtgtgagcacattcaggtcacggggtntgaggttatgggcccgtggtggctgtttctttccttccatcactgggatgtccatcttggggggcttcaaggctgctggatcttcagccattcggttggcctgggcacgtatcagttccaatggagagggcttctgggctcctcggtaggcctgggtggcaaaacttccagaatcgtacttctgaagggatctcggtccaaagaggctccacttatctgacaaagtttctgtccttattccccactttccagagtccatggtgctaggatttgggccaggtaaggctgtggaagaaccagaagtgaaccagcccctgggcctctgcttaggtgaagagtgcggagtggtgcttggggtggactgggctgatgcaaggctgcctctcttcttttgttacctctccacttctgtaactttagtttgtggagtgcttcggccactcgaaggtacttggtctcctcggtggtgaggcccttgtggggtgtgtagccagcatctctcagccctgcctgtcgctcaaaatgctgaatgctttcctgggtctgttttgtgatcagagaattcatgatgacatgggtagctttagccttcaccactgggaccttgtccacactgtcaatggctgatgacagggtcatggcaggggagggtagactggcctctccttcctccaccttggcgaggtgctgatacttgcgctctggaatcactggcttccaagggacgctgcccatgtccgatggaggaggagtcatgggcgcagggtcctcgagggtatcatcatagctgactgcccggcggtatatcccgatgggcagggacatcttgcctagaggcgcactagcctcaagagctgtgatcctgctgccgcgggactgcctgcggcccggagtccggcactaaaaaggttccgagggcccacgtctcccgagaggctgtggcgcagtctggacccaagccattgtgagagcgcggcgatttcgaaggtccccaagacccactaggtagcagtaccacccagcgggcagcagcactccgct

SEQ ID NO: 438565 - DNA, 920 bp, Homo Sapiens
gtggtgccaggtaagggctgtggaagagccagaagtggaccagcgctctgggcctctgcttaggtgtagtagtgcggagtggtgcttggggtggactgggctgatgcaggctgcctctcttcttttgttacctctccactctgtaactttagtttgtggagtgcttcggccactcgaaggtacttggtctcctcggtggtgaggcccttgtggggtgtgtagccagcatctctcagccctgcctgtcgctcaaaatgctgaatgctttcctgggtctgttttgtgatcagagaattcatgatgacatgggtagctttagccttcaccactgggaccttgtccacactgtcaatggctgatgacagggtcatggcaggggagggtagactggcctctccttcctccaccttggcgaggtgctgatacttgcgctctggaatcactggcttccaagggacgctgcccatgtccgatggaggaggagtcatgggcgcagggtcctcgagggtatcatcatagctgactgcccggcggtatatcccgatgggcagggacatcttgcctagaggcgcactagcctcaagagcaggcacttctggttgtcttgaagccattgaaagactgggatccaggtgctttttctatacagaattccgagctgagtccctgccaccacagtgaaatgatgtgatgactaagcggacagacagatgttaatgaggaacatggtccagctgctgcaaagtagcaaagcttcccaggaagagtccatccagaggttctgtgatcctgctgccgcgggactgcctgcggcccggagtccggcactaaaaaggttccgagggcccacgtctcccgagaggctgtggcgcagtctggacccaagccattgtgagagcggcggcgatttcgaaggtccc

SEQ ID NO: 438566 - DNA, 928 bp, Homo Sapiens
gtgaaccagcccctggcctctgcttagtggaagagtccggatgtgttgcttccggttggactgggctgaatccaggctgccttctctgtctgttggtacccttgtcacactcctgtaacttaagttttgtggagtggcttcggcccactcgaaggtacttggtcttctcggtggtgaggcccttgtggggtgtgtagccagcatctctcagccctgcctgtcgctcaaaatgctgaatgctttcctgggtctgttttgtgatcagagaattcatgatgacatgggtagctttagccttcaccactgggaccttgtccacactgtcaatggctgatgacagggtcatggcaggggagggtagactggcctctccttcctccaccttggcgaggtgctgatacttgcgctctggaatcactggcttccaagggacgctgcccatgtccgatggaggaggagtcatgggcgcagggtcctcgagggtatcatcatagctgactgcccggcggtatatcccgatgggcagggacatcttgcctagaggcgcactagcctcaagagcaggcacttctggttgtcttgaagccattgaaagactgggatccaggtgctttttctatacagaattccgagctgagtccctgccaccacagtgaaatgatgtgatgactaagcggacagacagatgttaatgaggaacatggtccagctgctgcaaagtagcaaagcttcccaggaagagtccatccagaggttctgtgatcctgctgccgcgggactgcctgcggcccggagtccggcactaaaaaggttccgagggcccacgtctcccgagaggctgtggcgcagtctggacccaagccattgtgagagcggcggcgatttcgaaggtccccaagacccactaggtagcagtaccacacccgct

SEQ ID NO: 438567 - DNA, 1758 bp, Homo Sapiens
  misc_feature (26)..(26): n is a, c, g, or t
  misc_feature (59)..(59): n is a, c, g, or t
  misc_feature (75)..(75): n is a, c, g, or t
aaaaatctaggtgaacaaaatgtccntatggtccaataaatgtggatattaaaatgtanacagggtcaccagggnccaacaaactagtgtgtactttaataatttctagcagcaaaacacctgaaatagccaataacaaatgttttcattggattgtacattcatttctttgtgagaaataatttaaaaagtactctaaagtattgttcaactgcaggcaaacatgaaagatatcaaagatcttgcttttctccatctttcccaatggaatcaggtgcaactggaaccttattagtttcaacaaaaacagattcaaaggcagcttcctgttcatccaaagaatcagcaaccgtggctcctttagttagtgttgggttggtaaaagattgttgctgcttggaaactttacttgattccaccgttttcctaccttttcttttgccaagaattttgacataattcgcaggtataagtcctgttgtttggccatcaaggctagccagaagccaaccacgcactttgggttgttgttctttgagagctaagttcagcatatcaccagcccggaaagaaatttcttcttcagatacggcagcaaaatcatattctgctctggcaactacatggtcatcctcaccacttgcccagttgatgctgtctgttacttcatcactgtgagtagacaatagtttccaaatgaggtaaggaccaccaaggataacagcaaagaacaagaatattggccaagattttgctgaggtagctgctcggtcctcagcaccaaggcatgccacagttccttcactctctggccagaggtcttcattctcaggagcttcttcttaaacctaacatccgctgtagccgtctgtaaagataccgtatagtcctaaccaatgcaaaagctgaaaacacttttgtaaagtgtattttcaatcgggaaaagtgatttgctacatccaatacagccttgaacctggttatagaacagctgaaaaggtagcatcccatcatcatactggacagaggcaaatgcatgcacaatacttttcaatggactgaaatgcacccctgctgctttcttcagcttgctgaacaaatctactgggtggaagatcatctacacggaggcggttgtagcccagcccagttatatccataactataaggactatagcctccataaaatgaatttccataggcaccatatccagaagaaaatgaactgtaagcaggtctaaaagtgttcacactgctacttcctgtctgctgtgatggccttggaagaataggtgggggcactctggtaagtgctggttgtccaggtcttgtcattaaagtaggacccaaatcagcagattggaaagtggggcccggtcctggtcccggtccggctcccggaattcggcgggtctcccagggtttggggggaggtggcggctgggacgccatctcctccgcctcctctcggctcccgctcctacccctgactgtccaggcccgcgtagaccagcacctggagcgtaagacacaacgggcagaacaccgagccgtccaccccgcccacccttgcagtcaggacaaggcttgagttactttgccagctgaatccatacagcgggaggatgccactaatttgtaggaagaaacacgctctttgtatttgccccagaaagagctgcctttctaaacctcagggtaaaggctcatcgatatttctggtagcggctacaactccctagacgtcgaagtcccgct

SEQ ID NO: 438568 - DNA, 1250 bp, Homo Sapiens
  misc_feature (850)..(910): n is a, c, g, or t
  misc_feature (1078)..(1141): n is a, c, g, or t
atgagtgcacatcgcggcggggggcgcatagtggtgggtcccctgttggtagggtagtctcgcgaaaaggggcttccttcatacgtcccgtttttcctttcccccccgcgtggggcgccgctctctcgggaattattgtggggcataggaagacgagtgttttgtgggggcgcgccaagaaccgaagcggccggcgaatactgccccccccgcccgcggcaatcaaaagagggatggttcccgtgtgtgggccccgcgtacaaaggccgcgaagaaatgtggcgtccgccgcgcgtgggcgtattgctgcgtgtgcgcaacagggtaaaagagagattgaggggaggtttcttacgaatctgccgtttatatgccgtatatttgttttcggtggcgcggccggtttgttgtgacgtggagttgtcagattccatggggtaggcagcggagaaagggttcccccggtgtgggaatttgccgcggcccagaaagaggcgtttcctgttgttcgttggggggcgccaaaataagccttttgccggcggggggcgacctttcccttgggggccccccggcgtttttgccccccatagagtgccgcgttggtccacgtgcatccaccaggcggtccgcggtagtgggcgtccatggcgaagccgctgtaatgggggtgggacagcaccccacggtaggggtcatcgtcctgtgagcccccgctggtggcgaggctcacgggccgcgcgtggctgctccgggaccgggtgcctttggcgcctttggggtgggggcagcggtgagtgtcggccgcggagccggtcatggtggggcctggacggggagcgaggtactnnnnnnnnnnnnnnnnnnnnnnnnnnnnnnnnnnnnnnnnnnnnnnnnnnnnnnnnnnnnnaggggatcagcgccccgcgggggcggccttctccatgcctctcgctgcggcaggactcaccaagggggagcggcggcgggagctccgcggaggctccctgcttaccggcggtgcctcgggacggttggcttcatggctgcagagcctctccgggcggcgggagagcannnnnnnnnnnnnnnnnnnnnnnnnnnnnnnnnnnnnnnnnnnnnnnnnnnnnnnnnnnnnnnngtcgcctcattccatgtcccattctcgaatgttattctgtgacatataaccaagtcacccgggcagccgccgatttccgaatgcgtctattggccacatcccgggaatt

SEQ ID NO: 438569 - DNA, 1629 bp, Homo Sapiens
cggggccttcccacacactttcccgatatatcatcccccctctctccttctcttcacaaaggggaaaattcccctcaagcaacgctaaactccgggggggccttctcgcgcgtctgttcgccccctccggtctcgctccgggccgctgccccgggggaatttccctgctctctagggccccttgcccccaaaacaccgggcggtatttccttccgaatctatgaatgcgccccccccacgggctcccgtgggctcgcatcttggggtctttcccccttcccgtggtgggcgtcccgtttctgtcctttccccgcccctaagggaatggtaatttgggtataatgtatggctcggctcttccttgccaatccgggggcaacccctggtgccttctgggccggatagaacctcttggcactaccatcgcttggggtgtgataccgtcccttgtttctaaccgttttctctgggtgtttgggccgttaatgccaaccccccttggttcccaaaagggcggttccccaacccgtcataggcctatcccgctttggccccggcctatgtgattttcctgggcctctcctggggtcttacctgggcttgggcccccggggccccaaggggttggccgccctggggttgccccgggaacattccccccgggcccggctcctttgcgggaataccaagcttttgcgcccccggttcggtggggggacagagggaattgaaccccaaccgctaatgcaaacggatggcttggggccgggaatctcgggggccattcgggccgggccaaagggagccgcttgcttgctggctcccgtgaagcttcctggcaatggtccccgcttgcagcgaaggcttcaaaaggcgggcaactcaagcttgctgaccgcttcgattgttatttcccccagcccctcgtggggcaccgggcccaggtctggcagagaaggtcactgccttgggccgtgaggttggctcacctggccctcgcctgcgggcggctccccaccagggactggacccggaatcggccttctccggctctgcttcggcctccccagaggcttcccgcggctgcacctgcaggaaggcgcttttgcccaagccgctggcggtgcttggcgaatatggcctcaatccgtcgcttctgagcctcgatggctctgcgtttctcctccagccgggcgctgagctcactcatctccgagctcagggcctccggcggggccggagtggacgtgggggacccgctccgggcctcagcctctgccttcaccagctgtttcttgcgttctgcaaagctggtcattttcacctcggagttggtggctgctggggacgaagccaccgccttcggggacccctcggatggggctggcggtttcgatgcctcccccaccagacagggagatggtttcgagggggtctcggggtgtggcatgtacactggtgctttggtgggcctgtcggacagtggtttggaggtcccctcgggcaggtagggggaggccagggatggcttggagggcccctcaggggagtggaggtagaagctgccgtcggccgccccatctgggaggagccggggctcggcactgtggatgatctgcagagcttcct

SEQ ID NO: 438570 - DNA, 1832 bp, Homo Sapiens
  misc_feature (889)..(889): n is a, c, g, or t
  misc_feature (921)..(921): n is a, c, g, or t
  misc_feature (933)..(933): n is a, c, g, or t
  misc_feature (953)..(953): n is a, c, g, or t
  misc_feature (956)..(956): n is a, c, g, or t
  misc_feature (962)..(962): n is a, c, g, or t
  misc_feature (981)..(981): n is a, c, g, or t
  misc_feature (992)..(992): n is a, c, g, or t
  misc_feature (998)..(998): n is a, c, g, or t
tgttgctgttgtcatggttttgtcttgttgtgtctggggttctctgttcctttatttcccttagtctgctgctgcggcctcgcctgctctgtactggcgtcttgcgttagtgtgggctggtctgcacctgccgccatccgcttctgtcatctggtggcccccgggtgccccactccgtggatccacggctccctgcagtgcttccccgtccatgtcccatatcggggcccttctcgtgcctctcaccgccggctcggccctcccctgctcccaggctgtccgagctcacagagcggaggagcacagggtctcccatgacgacatccacgtcgctgtccaggccaaagggggtgctgaatgacacagcctgggagaggggacggctgagctgccggttccaggccttgcccagggcctccatatgggacatggacggggaagacttcagggagcctgtggatcctcggagtggggactagggggccaccacgatgacagaagcgggtggcggaaggtgaagacaggagaactactgccgctgttgttctgaggtggggaggcctcagtgccccggggggaggcagcgtgaccatcgggcaagtccttcacttgcacaaagtcgggcttgagcacctcaaaacacatgaacaactcggccagcatcaccaccaagttgaccttgagtggcggtgggacgtacagcaagtcctcaagggacagggggcagccacgaggaaggcgagaggcacagaaatcctgcacgagctggaggttgtacaggctgtccgccacagacatggggtccttcaagcacacctcctcaagtcgaagcagctggggacaatagcagtggatggtggcggccagcgcggccccactggccaggtcntggaggtggtcaccgtcgggaagcaggggcangtcgcgccaccncacggtcttgcggtatcggntcntggggntttgctccccgactccttnaaacagaaggnaattgngtgaggaaccagcttccagtaccagcgcgtagggcacgaggctgcgccggggccgccccgtctgcaggggctgctggagaggctcgctgggccgcttcctgttcggtcttctcctgcagccgccggacggtcgtgtccacccagaaaagcagctttgtgctctaagctggttagggtctaagggacctggcagggtctttgtccactcgaaggcaaaggcagccatgagggcatcaatgacagctagggtgggctcccatgagaatgggctggtgcctcaggtcggcctcgcgcaccgggcgctcgggcaaagcaggcactgtgcccctccgcgccagcagggccagcagtgcagaggggttggggggtgtttcaagctgtggcagtgcctggcgccaggctctgcagtagagctcggctgagagcagcagccgtgtcaccgggggcttcacatgctcctgcgcgtactggtcggtatagaagggctcccacagctccgggggcacgtgctctgcgcccccgaacgcggcccgcagcacccacgccaggctggccgccgccttggcccgcgagaaatcgtactggtccagcgacttgatctcgggcactagaaaggtcctccgcagcggcccgggcccggggggcgccgcctccaccatgggggcgccggggctgcgggcgccgggtccgcgctcggactgggctgggctgggctgcgccgcgctcgcgccccagccgggcccgctgctgctaccgccgcatcccgggaattccggactcgtggcctcagagttagggtatccttggggtggttgggagaggatggggagagga

SEQ ID NO: 438571 - DNA, 1105 bp, Homo Sapiens
gcaactcttctgggaggccgacgcgggcggaccggcgggtgctgggaaccgagcctcggcttgcggccggcagtttccgtgggtctgtgaagaggtcggcggcccctgcgggcgccagtcagctttaagaaaaagtagagatcacttctgactgtactgaacagcaaaaattaagtgacttgctgccctgcacatcatggcactgccattccgtaaggacttagaaaagtacaaagaccttgatgaagatgagctccttgggaatctgtcagaaacagaactgaaacaactggaaactgttttggatgatcttgaccccgagaatgcccttctgcctgcagggttccggcacaagaaccagacatcaaagtccaccacagggccatttgatagagagcatctcctttcatatctggagcaaagaagcatcggagcataaagacagggaagactatgtgccctaccctggagacaaaaaagggaaaatatttatccccaaacagaaacctgtatagacttttacagaagaaaaagtgtctcttgatccagacttagaagaagctttgaccagtgcttctgatacataattgtgtgacctcgcagtaattcttgggatgtacaatttgataacgaatacaaagttctgtaatataatgggaagtagtaatgggtgttgaccaagaacatttttcaaatgtggtcaaaggtgaaaagattcttccggtatttgatgagccaccaaatccaaccaatgtagaagagagtttgaagagaactaaagaaaacgatgctcatcttgtttgaagttaatttgaataatataaagaatatcccaattccaaccctaaaagattttgcaaaggctttggaaaccaacacacatgtgaaatgttttcaagtctttgcagcccaccccggagcaatgacccctgttgctactgctttttgcagaaatgcctgaaagtgaacaaacttttgaagagcttaaatggtggagtccaactttatcacgggagttggggattcctggcactgattgatggcgttaagagataatgaaacccctggcagagctcaagattgacaatcaaggccagcagttggg

SEQ ID NO: 438572 - DNA, 1200 bp, Homo Sapiens
  misc_feature (226)..(226): n is a, c, g, or t
ctatagtgaagtgaagggtccctgaagtggagtgggtttcaagcgggttggggcccctttttcttcccaagtttgcctgttagcccccttccaattattgctgcccaggggggggcccccccttcccagggaaaattggataaagaaaagcagccctgcccctggttgcaggccagagcccaggtgggctaagggccaggaaaggaaggcccgggccaggccttgnccacctgcccccccagagcctgtgggaaaaggacaggtcaggaggggtggggacaggggctcgaccggctcagatccaagatggtgccacgcttgcttgctgagtccccccatgagctggggtactgcactggggccagcgactagttagacaggaggcagcagcttctcaagaaattccttcacagctgccatctcctgaggacaggagctgtgcatgacacccgggtatgtcttgaactggaccctggcaggtgtgacaacagaccggagcttctcagccgtcagggccccaaaccgtacgggcaccatggggtccagctccccatggcactggagtatggccaggtccttggcactgccattagctgcctgggggaaggcccggtgcagaggcagccagcagctcaacgccacgatgccagccagagggtgggggcaggtgagggccgtgtagagggacagggccccgccctgtgaaaagcctcccaggacgattcgattggcagggatcccgttcttcatttcatgctcaatcaaggccttgatgttctctgctgccttcttgatgccagcctcgtcctctggggcatctggactcagccccatcaggtcaaaccaggagggcatcaccatcttcatgttgagggtcacagggatcctaggcgcatggggacagatgtacttgacgtgagggagccggatggtggagagggcgtcagcccagctgtgccctgtgtctccaagtccatgtaaaaaaataaccgcggccgtttcccgctcagctccagacacggtggcagcatcggtgagcaggggcacagacatggtgttaccacacatacaccacacggctccacggcgggggcctccactccctgggacttccgaggccgcttgggcgattctcctctttctcccgcagacacactcttccccctcgccgcccccgccggaacttccgttcgagtcccg

SEQ ID NO: 438573 - DNA, 1401 bp, Homo Sapiens
ttttttgaggaagcaatttctttaattttatcggaatccaggacacaacaagaaaaacacccaaaaaccacatggagacagaagacgagacacaactcctcccccactgcctccctgctctagagtggggacaaagtgggggtgagacagctggggggagacctgaacctcagtccagccctacaggctccaggcctgcagggaaggagggtaacggggaggcagggcccagccccccagtgtggggaaacagctgagggaaggcccccctcaaaaggctccacctcctcaccagcactcctgcccagggacagggagcccacagcagcaaggggaccccggggccatggccacattcatgactgagaagcagctgagtggaggcaggagacacgattatctgggcagaatcagttggggcaggggcctgggagggccccatgggccaaaccctgaggtcacaggagggggcccaaagcggggctagtgagtgaggtcctgagtgagtgggtcagcggctgggcccctttctccagctgcctgtagcccctccaatactgctgccaggggggcccgcctccagggaaatggataagaaagcagcctgcccctgctgcagacagagccaggtggctaaggccaggaaggaaggcccggccaggccttgccacctgcccccagaggcctgtgggaaaaggacaggtcaggaagggtggggacaggggctcgaccggctcagatccaagatggtgccacgcttgcttgctgagtcccccatgagctggggtactgcactggggccagcgactagttagacaggaggcagcagcttctcaagaaattccttcacagctgccatctcctgaggacaggagctgtgcatgacacccgggtatgtcttgaactggaccctggcaggtgtgacaacagaccggagcttctcagccgtcagggccccaaaccgtacgggcaccatggggtccagctccccatggcactggagtatggccaggtccttggcactgccattagctgcctgggggaaggcccggtgcagaggcagccagcagctcaacgccacgatgccagccagagggtgggggcaggtgagggccgtgtagagggacagggccccgccctgtgaaaagcctcccaggacgattcgattggcagggatcccgttcttcatttcatgctcaatcaaggccttgatgttctctgctgccttcttgatgccagcctcgtcctttggggcatctggactcagccccatcaggtcaaaccaggagggcatcaccatcttcatgttgagggtcacagggatcctaggcctggggaaagagagccagggggcccatcatgctcaggaggaaatcctggaaattccggaccgtaccggat

SEQ ID NO: 438574 - DNA, 579 bp, Homo Sapiens
  misc_feature (549)..(549): n is a, c, g, or t
tttgcagtcagtggcagcagcagcaggacagaacctgggtgctgtgtggggctgatggcctggtggctcattgggcagggagtgtgtcctgtgcctggttttgctcttgaccgccgccccgatgtatgcaggcccccgccgtggagccgtgtggtgtatgtgtggtaacacatgtctgtgcccctgctcaccgatgctgccaccgtgtctggagctgagcgggaaacggccgcggttatttttttacatggacttggagacacagggcacagctgggctgacggcctctccaccatccggctccctcacgtcaagtacatctgtccccatgcgcctaggatccctgtgaccctcaacatgaagatggtgatgccctcctggtttgacctgatggggctgagtccagatgccccagaggacgaggctggcatcaagaaggcagcagagaacatcaaggccttgattgagcatgaaatgaagaacgggatcccttgccaattcgaattcgtccttggggaggttttttcacaggggcggggccttttcccnttttacacgggccttcacttgcccccacca

SEQ ID NO: 438575 - DNA, 984 bp, Homo Sapiens
  misc_feature (22)..(22): n is a, c, g, or t
  misc_feature (26)..(26): n is a, c, g, or t
  misc_feature (46)..(46): n is a, c, g, or t
  misc_feature (52)..(52): n is a, c, g, or t
gcactgtatcatgacctacganttgngggcgaaccctcgcgaggcngtttanccgtctgtgtgcgcgatactcgattatcatatcgagtatgatcaggcaatcggcgagctcgaatcgtcgagagcgggagactgtagggtgggcggtgcgagcggcggttagctcccagttcggcctctgaggaaaacgggcgttcgcctgcggttggtccgactgttagcaacatgagcggcctggatggggtcaagaggaccactcccctccaaacccacagcatcattatttctgaccaagtcccgagcgaccaggacgcacaccagtacctgaggctccgcgaccaaagcgaggcgacacaggtgatggcggagccgggtgagggaggctcggagaccgtcgcgctcccgcctccaccgccttcagaggaggggggcgtaccccaggatgccgcgggccgtggcggtactccccagatccgagttgttgggggtcgcggtcatgtggcgatcaaagccgggcaggaagagggccagcctcccgccgaaggcctggcagccgcttctgtggtgatggcagccgaccgcagcctgaaaaagggcgttcagggtggagagaaggccctagaaatctgtggcgcccagagatccgcgtctgagctgacggcgggggcggaggctgaggcggaggaggtgaagacaggaaagtgcgccaccgtctcagcagccgtggctgagagggagagcgctgaggtggtggtgaaggaaggcctggcggagaaggaggtaatggaggagcagatggaggtaagagggagcagccgccagaagggtgaacgaaatcagaagttggcgggacgacgatagacttggaggaggaaggcgagcggaggaagaaggggcccggccttttcatgaggctctccggaatgaccctctggaggccaccagtggacatggacactgtgaatgccaagccgagggggctcc

SEQ ID NO: 438576 - DNA, 1648 bp, Homo Sapiens
  misc_feature (978)..(1056): n is a, c, g, or t
tgtttttaaagaaacaaattggcaggtgatgcctatgtacttaatgtatctttggtttaggaagacgagaatatcgattagaggccaaacaatccccaagaatgcaaattgccatttgggattctgcatgatttcttttcgttgtgttagtggcccttgggatgcttgtcttggcctggaagctttgaggctctagttggggtctgtttgtttgtttttgtttgaaagagcctgaggggggccggagcttagatgctttcagattctgattatttgcaagatttgtttgactagatgttggctgaagttttgctgaattacatgttgtgattattggtgactttttacaagtgggagtcctacttggagatgattcagaaactggaggcggtaccaaagaactccatatggatggctttaaaagctgcaaggactttgggcctgagacatataacccactggcggagactgatttcttccaactctcttagcctggtctactgtacttgactcgggaggtgtctgaagagaagtgggtataaactgcatgtcactaatttgattgtttgccaaatgataaggctcttgagcatttacagtaatgtttaagtttgcttcagaaggtgtactcttagccacatccattgttaattgtgggcctgatgaaaaaggctgctcttccaaaccatagttgctttcttggtgcaagacgtgtgtaaagctttcttccggatgtgcaccgccctgatgcatgtcttggattgagcattcactgcgggcctcgatacgttgtggctttattagttttccctgggtgtgatctgtgggtctgggaaggctgctggaaggctgtagtacttgaggaggaattcgtctccagggtgtttgggtatatttatcagcataagtgcatttttcctctttacatttttggtggcagatatgctgagttgcaagctgaagttctaatagttggannnnnnnnnnnnnnnnnnnnnnnnnnnnnnnnnnnnnnnnnnnnnnnnnnnnnnnnnnnnnnnnnnnnnnnnnnnnnnnaccatcttctggttctggactggatggcaatgacagttgaatatcatgcaatgaaccacttccatcatgctgatgcaggagacgtttcagtttgagtaactgagtttttacagcagtgcaatcctgaaccatgtgccgaagggtcatctcatccagtatcactgtattttctggtacatcaacaaacatcttctgagcctggaaaaagggcatccctccatagctttcaaaatgacccaaaggagattctctatagggagagcctctgctcaagtcactttttccatggtgatgatagtggtcagggtggctgaggtggtaatgctcctgtccactccacctctggggtggccttttccaaaaaccttcctgaggctgccgaacatttctgtctggtcggtcaaagcggttcatattgtcacactccacattttcaagaggtgcatcctcaggcagatccacatcaagcataagatcatcatcctcaaggtcacatgattcaagattattcaaaatatcctgaaagtatcaatatcagtttgagatttctatttacctacattaggaccatctcaactttctataagctgtc

SEQ ID NO: 438577 - DNA, 1221 bp, Homo Sapiens
  misc_feature (11)..(11): n is a, c, g, or t
  misc_feature (793)..(793): n is a, c, g, or t
tcaatccccanacagtagtaaatctattaattgtgaaaaaatggtaaggtcacaaagtttttcacattccattcagaattcattccttccaccttcatctataaccagatcacattcctttaatagagctgtggatcttacaaagccttatcagaaccaacagctatccattagagtgcctctacggtcaagtatgctaacaagaaattcccggcagccagaagtactcaatgggaatgaacatttggggtatggatttaataggccttatgctgctggtggaaagaagttggctttaccaaatggcccaggtgtaacttctactttaggttatagaatggttcatccctctctactgaaatctagccgatctccattttctgggactatgacagttgatggaaataaaaattcacctgctgacacatgtgtagaggaagatgctacagttttggctaaggacagagctgctaataaggaccaagaactgattgaaaatgaaagttatagaacaaaaaacaaccagaccatgaaacatgatgctaaaatgagatacctgagtgatgatgtggatgacatttccttgtcgtctttgtcatcttctgataagaatgatttaagtgaagactttagtgatgattttatagatatagaagactccaacagaactagaataactccagaggaaatgtctctcaaagaagagaaacatgaaaatgggccaccacaggatatgtttgattcccccaaggaaaatgaaaaagccttcagtaaaactgatgaatggatagantataagtgtctctgacaggagtgaatgtacaaaacatacttctgggaataattttggtttcaccagatacagactacagagctggttcttcgtttgaactctctccatctgatagctctgatggaacatacatgtgggatgaagaaggcttggaacccattggaaatgtccatccagttgggagctatgagtcctctgaaatgaacagcatagatattttgaataatcttgaatcatgtgaccttgaggatgatgatcttatgcttgatgtggatctgcctgaggatgcacctcttgaaatgggggagtgtgacaatatgaaccgctttgaccgaccagacagaaatgttcggcagcctcaggaaggtttttggaaaaggccaccccagaggtggagtggacaggagcattaccacctcagccaccct

SEQ ID NO: 438578 - DNA, 518 bp, Homo Sapiens
caccccaaaatggcttgagtctttatttccttggtgaggcagggccccagggtggggtgggctgcctggctgaggctcctgtagacccaccaacctaggggcacttttctgggcaccacaggtaaggcactgcctgggggctggaggaggctggaggaggatgcccaagctccccacactcctcaccccagaccggggaagctggatatcctccgtgttgtcctctccccatagctggtctgaggctgtggtttacacgcaggcacaggtaggcgattctgagcatcaacgcagatggaggggagggtgagccgtcgtgggagaactggcccaagaccagcacctggctggtgtcgccagccccggctgcattggtgggtgaggcaggtctggctggagtctgggtctgcaggcctggccggggcaggttgtgggggaccaaggagccctgggtgtgaaccccactgtggagcagcaggcacctagtggtgccactgggacacccggctccaggactc

SEQ ID NO: 438579 - DNA, 2403 bp, Homo Sapiens
  misc_feature (33)..(33): n is a, c, g, or t
aggagcatcactaattctttttatacatttttnttttttacattccagaaataagcgaaaatagcagttttaaatatgttacaaagttggcttttcaggcttaataagctttttgagagagggaccagccaactgaccttttcatcaaagcaccaatgtatcttcagtcttttaccaagctctaccacagctgtggttgccttggatgtgctgcacatccaaaccgtgtgaaagctataatggagagttgctgtgagtctctctgcaaggcaccaagaacaaacagttcaagcttcctttcttcagattgaaccaaagtttttgaaactttcaactgctctctcaagtagtgctctctcagcgtgaagactaggatttgttaaaacccatatatcacaagatacagtaaatcacttccaatagtctgggaaatcacatgggtaggaagttataaataaatggaacactaaaattactttaaggaaagttttacatcatttagttggtaagggcatttacgtgtacagcacaatttattgtcaaacattctataactggcttcacccaaagatgaaaatagattaatacaaaatgatctgacattttcagtaaatctggaattaagactggatttttattgtagtcaatatcaactttacatattgttgcagattgctgtgctatgccctttaaaatgataatttctcagggtaaaattccatttggatatgtgttcttgcttgtcaaactactaaaatctgagggacacagcaatatcaaagacacaaacagtaactgcacaatatcatctgctggattaagctaatacaagtggacagaattctttaggttccaatatctaataaaccactatgtgaaatgaacaaggtgagacatcttatgaatatactctgcaaccggaacatgtagcatttctttaattcaaaaatctgcctcattaggcatttacaaaataaattagtaagatctcaatttgcttgaggcataacaagctcgtaatggcccacttggccttcctgtttgagctgatctagtaggtcttccttccgtctttttctacctaccactaggtacctatcatggcccaccccatgagacttactcttaagaccatacttctgggcaatctgatgtatttgcttccgttcatcattagtcagctctctagagaaagtcaaatctgtgtggctctcggagcgggcgtagtttctgatgatctgttcaatatctctcttggcaattttattcaccctctctacatccagaccaagcccttcccgcttatgctgctctttcactgagataggctcccgtatgccctcaccagatttacctaaaccaccaccagtccaacccatctttctcagcagctgatttccaatattatcttctttgatttgctgtttgtaagcctcctctgctgagcggccctgaatttcatttcttgaaatcacatcttcaacagctcctttcttcaagttgttaatgacagttggctgggtctttttgagggttttcacagcttccccagcagcttcatatttgacagttttcttcaccccaactgcttctgcaattacttcactctctagaatcactttgcatttccagcggaggcctgtcatcctttcatagacatactcaactgtcattcggttaaactgagctgtgtcgttcagcgtgcacacgggatttgaagaattctcataaactacaagatcctttatatctttcttctttccagatcctctgggtgaagagcctgtatggcattgtgaacttttgacagatggataagtgggctgtgttttttgaagaattttcaaagcctcgtcggcagctgcatgtttacttgttttcttggttccataaccttcagctaagcagtgatcttgtaaaaacactcgacaacgccatgtgcgatttggcatcatctcatatttgtattcaattgacatcttgttgaatgaggcagaattgttaaggataccaattgcatcatttgcattttctgtaatgacaaaattggtccagtgtttggcagaagcattaaaaattggctgcccggaagcatctttacccagcaccaccaggtcttctggtggcttcagagctggaggaaattcataggaggacatgccaatctgacacaccacgaggtcctctccaaatgtatgcttgaatttccgccggacaactctaacttcaatacgtttctgcaagagttttacagctagctctgtagctcgatccctggacccattcttgctgccagcataacctgtagttaagtagatattttggcatctaacttcacaagcatagccatcagttagaagttttttatttttggggatgtcggcaggaggaatttcctttaaa

SEQ ID NO: 438580 - DNA, 288 bp, Homo Sapiens
  misc_feature (52)..(64): n is a, c, g, or t
  misc_feature (189)..(189): n is a, c, g, or t
caactttggctcctttttattcaggaagcatacactaattctttttatacannnnnnnnnnnnnacattccagaaataagcgaaaatagcagttttaaatatgttacaaagttggcttttcaggcttaataagctttttgagagagggaccagccaactgaccttttcatcaaagcaccaatgtatctncagtcttttaccaagctctaccacagctgtggttgccttggatgtgctgcacatccaaaccgtgtgaaagctataatggagagttgctgtgagtctctc

SEQ ID NO: 438581 - DNA, 2653 bp, Homo Sapiens
  misc_feature (654)..(667): n is a, c, g, or t
  misc_feature (1164)..(1181): n is a, c, g, or t
  misc_feature (2121)..(2121): n is a, c, g, or t
  misc_feature (2320)..(2363): n is a, c, g, or t
ttgaacaaaaggaaaaggtggatataaagtggaacctgtgggaaagaggcaagggctgcaggacagaagagactgggaactgcaggggccctgggactcaggaggagatgctgattcagctcataggtgacccagtcctggccccggctgttcccaagagaaggctgtaagtacccagggaggtggtaagcaggatggaggaaaaatcagaggactggggcacctggctgttccccatctctggccaaccacctccttgcctaacctagctcttgcctctcagacttaatgggaaatgagagggagggtcgggctaagtcccaagagataggttaagggggtgtgtttggggggaaaaggatggccacttttccatttggtatgtatgtagggataggtgatgtgaaagacccttggctccagggtggtggagactgtgcctatccctctgtggccataaccccctggggccgagtggctggtacctgcagctctagtgttttcccagctagcggcgcccaccccggtcccgcacaggtgtgctccgactccggcttctgctgtggcgcttggtgtccctgcgatccctttccctgcctcgttctcggtccctttccctatcccgatctcggtcccgcctgtcccgctcccttnnnnnnnnnnnnnncctgtccctctcccgactgtgctcccgacgtttctctcgctccagctgtcggttccgttcccgctcggcttccttctcccgctccttttgctcttcttcttcttgctcctttcgccgcttctcccgctccttggcccgttcggcccgctctgcctctttctgaacgatctggctgtcagtcagtgggagccaatagatgcagggagctgccttggtctttcggaaaaggtcatccagcagcttggcaggtggttcctcctgggctttctctttcttctcactcttcttttctttagacttcgcacgttccttgcggcggcggtcacgggaccttgatcgggaacggggcccttctcgaactttgtcccgatcccattcacgctccgatcgagtccgctcccgccgctccatttcccgttcccgttctgcccactgttcccgcactgcccgttcctgctcccgctgctctgcccgggggtgctgtggtggctggaccnnnnnnnnnnnnnnnnnntgcagggaccgtggtattccctgctcctctgtcttagtttcagagggacggtccaccaagaggcctcggtgataatccagctcatcttgctcggcatagtcagcacaaaggaatttgggattggactggggccatttgaccccgtgcagagctgtgcgggtggcaacagcttcctctactgttgagtacgttacaaagcaatgagatttgatcttgtcaatccagaaggcctcttccaccaaggttcctgtgcgccccaacaactcctttagctggcctaaagtgaaaggacggaccaaattggagatatggacaatgttgctaatcttgccccggggtggggagggcacctgggcagttcggactgggtcatcaatggtaatggaaactccggacttctgctggctaatggaacgtcgagttaaggtatctcctaaagtcactttctttacttcatgctctgcaggtgggggcaaggccacctctactgacacctggggaggtacaggaggttctgcttcaggttccttctcttcttcctcttcttccctctgcccattctcctggccctctgcaggtactacctgagtgactgtccggcatattttcagccccttgtcatgggtcccatcatcgccattacgctctgtctcatcctcagagatgcgagagtcatcagcatgaagatccacaacagcctcctgccccgccaggggtttgatgtcggggatgaggctctttagtgattcagtggtgatactgatggaaggtttcttctgtgtggtggctgtgctggctccccagcgtcgtttccgaccaggctggcccccctctgtgtcactgtttccagctggcacccccttggtagctgagacaacggagatcttcctcttgaatgatttgggcagcgagctctctttcttctcctcatcttcaacanctgccctccgggcggtcatcattgctgacttggtctgcaataggcatgggaggttctggaacatcattttcaggtctgttttcacttgtgtccatggtcacttcctccttctcctcaccttctttgctttctgataacatgattttttttctccccctggaagtgctgtttatccctttctggaatggaagaaataacnnnnnnnnnnnnnnnnnnnnnnnnnnnnnnnnnnnnnnnnnnnnccacaccttccttgttccaagatcccaccacctcctccccagccacccgatccagagagagaaaattgagatgtagcaaccggggatccaaaaaatggtaaatggaaggggaggtggtggtggtgcggggaggctaaaacagatctggcttttaagagataagcgttaagtcctcacggcaaaccccgagttcggctggattggtctctctggagaaggaggaagagggccaggctgctggtagtggctggctctattgtattggcggagcggcagcgatcagccggaga

SEQ ID NO: 438582 - DNA, 2178 bp, Homo Sapiens
  misc_feature (409)..(434): n is a, c, g, or t
  misc_feature (1519)..(1519): n is a, c, g, or t
  misc_feature (1524)..(1524): n is a, c, g, or t
tggtttttttcttctggcccctttcgcggtttttcccggtcctttggccggttgggcccgttctgcctctttttgaacgatctggctgtcagtcagtggagccaatagatgcagggagctccttggtctttcggaaaaggtcatccagcagctggcaggtgggttcctcctgggctttctctttcttcctcactcttcttttctttagacttcgcacgttccttgcggcggcggtcacgggaccttgatcgggaacggggcccttctcgaactttgtcccgatcccattcacgctctgatcgagtccgctcccgccgctccatttcccgttcccgttctgcccactgttcccgcactgcccgttcctgctcccgctgctctgcccgggggtgctgtggtggctggaccnnnnnnnnnnnnnnnnnnnnnnnnnnccgtggtattccctgctcctctgtcttagtttcagagggacggtccaccaagaggcctcggtgataatccagctcatcttgctcggcatagtcagcacaaaggaatttgggattggactggggccatttgaccccgtgcagagctgtgcgggtggcaacagcttcctctactgttgagtacgttacaaagcaatgagatttgatcttgtcaatccagaaggcctcttccaccaaggttcctgtgcgccccaacaactcctttagctggcctaaagtgaaaggacggaccaaattggagatatggacaatgttgctaatcttgccccggggtggggagggcacctgggcagttcggactgggtcatcaatggtaatggaaactccggacttctgctggctaatggaacgtcgagttaaggtatctcctaaagtcactttctttacttcatgctctgcaggtgggggcaaggccacctctactgacacctgggagggtacaggaggttctgcttcaggttccttctcttcttcctcttcttccctctgcccattctcctggccctctgcaggtactacctgagtgactgtccggcatattttcagccccttgtcatgggtcccatcatcgccattacgctctgtctcatcctcagagatgcgagagtcatcagcatgaagatccacaacagcctcctgccccgccaggggtttgatgtcggggatgaggctctttagtgattcagtggtgatactgatggaaggtttcttctgtgtggtggctgtgctggctccccagcgtcgtttccgaccaggctggcccccctctgtgtcactgtttccagctggcaccccccttggtagagacaacggagatcttcctcttgaatgatttgggcagcgagctctcactgtgtactgtatctagtcaaccgccggtccaatcagaatgagccctccctgctaggcgctgtgcaattggtggggggttgggttggcaaaaaaggtgggcgcacggcgtggtagtcagcacggcactgccagagtcctcccaggggcgcagggggggcgggaggaaaacgtgtggnaaaangctgcccagtttccatgatgtcaagacagttcactggcggtggccaggctcagcgagggatagaggggggaaaggggcagagacatcagtcctggccctgaagggacatcatcttgcagtccctgatgagatggcctgtgagtagcaggaatgatccttgccttttatcgtgagaggcaggcaggaccctatgtccaccagtggcaagctgcagcaataacaccacccaatacttggaatccaggtgatgactccagagtccctttctcctctgcctgtaactggggagggggtcctctcaccgagtgggatcatggagcctctgatgaaggtagcctgggggtaggtgaataccccaggacctggcagacattcagcagcaaggtcagaatacttctcttcggagagttgtggctggcatctcctcagggactccagctgagacagtggttccagtcaggtggatgaaatgagtccctgcctccagggatggaggagaagttggagcaaccaacatgctgcccttcaccatggacaacagggaccaaaggaaagtccatctgatgagcaagtggtgacacatgggctgggctgtcatcagcattaaatccccaggggctcagaccctagactcctctgcacggttcctagtcg

SEQ ID NO: 438583 - DNA, 512 bp, Homo Sapiens
aatgagggggaaaagctgttgccctgcagggttgttttgaggacttgcagaaggcctcacatacaacgtctcaattagtgctgggaagcaccaccactcttctcacattcttactgcaaggttcctaaactctctgccctcccccaaaccttgaaactatactcctgtgacagcagctcgggaaatctaaagattgggtggttgtcttgccttctgctagaccctgaaagtctattttcattggcaggtccgtcctttcactttaggccagctaaaggagttgttggggcgcacaggaaccttggtggaagaggccttctggattgacaagatcaaatctcattgctttgtaacgtactcaacagtagaggaggctgttgccacccgcacagctctgcacggggtcaaatggccccagtccaatcccaaattcctttgtgctgactatgccgagcaagatgagctggattatcaccgaggcctctgtggtggaccgtcccgaaactgagaca

SEQ ID NO: 438584 - DNA, 1234 bp, Homo Sapiens
  misc_feature (306)..(319): n is a, c, g, or t
  misc_feature (1107)..(1170): n is a, c, g, or t
tggtttttccccccccaggggggaattttttccactccccctgggggagaaaggagagggcccaggattacccttatcccctttctggaatcccccaccagggcgggggcccccttccccgccctcccaatggcccaattcaggagggtaacaccccaagcctctccaggttggtaccctgaatagggtaattaagactagggaatggagcagttcagtctaaaaaatattcccaggtaacagaatgcttatataaactagactgcttttgacatctgtaagaaaattgtatagatggcagttggnnnnnnnnnnnnnngatgtttcccatctgtcagcaaaactggtgaactatactcagctgaagtcctcatcgggattctgttgatccagcagacggacatgtgtgaatgggaagtgacctcgtttgccattacactccccttcccactgaccactcacattaatcttcgtaacctttaccagctcaccgacctccaatcagagccgatactgaggcggaggcaggtctatacttctcgacgtaagggactggaatcatccctctcttgccttcgctgtcctccgcattccaccactgctcttcaggcttgtcccggattctcaagatgtctcctttcttaaagggaagatcttcctcatcattcccattaaagtcaaagagggctcgcacatactccgcctcctcctgcctgagaatcactccactaccctgcctggatctggaaactggttctatcaacgttgtagtgtccaaatagtgtattttgtagaattccagtaaagcaggcaatgaatcaaactcttgatctcctattcggagtctggaggggctcaccccgggcggaggctgggcgggcgacggtggcaccggcgggcgcgggccgctgctgttgatgatgtagtgggagacgcgcgagttctctgagacgctgagcacatagtccccggggctggtgctcgagtcccgcaccaggaacaccccgtgccgctggccctgcagcagcgccaccgcctcctgccgactcaaccgcccccagtaccagctactccgctcctccgagtcgaagttgcccgccatggctnnnnnnnnnnnnnnnnnnnnnnnnnnnnnnnnnnnnnnnnnnnnnnnnnnnnnnnnnnnnnnnngcccagcggaccggctccggtttcagcttcacagcagcgcccgaaatggcggcggcagccgcgg

SEQ ID NO: 438585 - DNA, 1116 bp, Homo Sapiens
  misc_feature (53)..(53): n is a, c, g, or t
  misc_feature (60)..(60): n is a, c, g, or t
  misc_feature (95)..(95): n is a, c, g, or t
  misc_feature (1037)..(1073): n is a, c, g, or t
gattgttccccatctgtcaagcaaaaactgttgaactatactcagctgaaagncctcatngggattctgttgatcccagcagacggacatgtgtnaatgggaagtgacctcgtttgccattacactccccttcccactgaccactcacattaatcttcgtaacctttaccagctcaccgacctccaaagccaaggctgtcttgtcgtaggcattggggactcgcttctggataaccctggcatatatgggcccattctggaggttagggagcggagtgttgacgctgggttgggcatagggccccaggctccggcccacccagtggctgtgggtgggaaccctcctggttacctccaatcagagccgatactgaggcggaggcaggtctatacttctcgacgtaagggactggaatcatccctctcttgccttcgctgtcctccgcattccaccactgctcttcaggcttgtcccggattctcaagatgtctcctttcttaaagggaagatcttcctcatcattcccattaaagtcaaagagggctcgcacatactccgcctcctcctgcctgagaatcactccactaccctgcctggatctggaaactggttctatcaacgttgtagtgtccaaatagtgtattttgtagaattccagtaaagcaggcaatgaatcaaactcttgatctcctattcggagtctggaggggctcaccccgggcggaggctgggcgggcgacggtggcaccggcgggcgcgggccgctgctgttgatgatgtagtgggagacgcgcgagttctctgagacgctgagcacatagtccccggggctggtgctcgagtcccgcaccaggaacaccccgtgccgctggccctgcagcagcgccaccgcctcctgccgactcaacctcccccagtaccagctactccgctcctccgagtcgaagttgcccgccatggctgcctccgcgcctaaacgctggggtgccgccgccccgctctcgacgaattcgagctcggccgatttggcctgatnnnnnnnnnnnnnnnnnnnnnnnnnnnnnnnnnnnnncgccgccaccgcgtgacctccggtcccctatatatcgatcatc

SEQ ID NO: 438586 - DNA, 1201 bp, Homo Sapiens
  misc_feature (76)..(76): n is a, c, g, or t
  misc_feature (80)..(80): n is a, c, g, or t
  misc_feature (116)..(116): n is a, c, g, or t
  misc_feature (791)..(791): n is a, c, g, or t
  misc_feature (883)..(883): n is a, c, g, or t
  misc_feature (1144)..(1144): n is a, c, g, or t
  misc_feature (1160)..(1160): n is a, c, g, or t
ttggcttaaggcctgtggcttttaaattggtaaaatagcctcttgggggtggctccttttcttgaagaggttgtanttancagtgtgcctctttgcttgaactgcctattctaagnaattattctaatgacagtttacaaatcttcgacatccttgaatcttctgaaacaggactgcccaaggatgatccaatgatatttgattcttcctgatgatgttggagtatgggatctgttagtgttgtcaaaggcaagacagattcagtatctataacatcagatgcctggataaagccatgtggtgaaggaacgataagtattgtttcatcatcaattgtttgatcaacttgttcttctatagtgggagactctaaaccctcagtaacataagcactggctaaatcagagggtgattcctcttgtttaaggtcggtgtcagagatttcttcttctgttctgaccataacactattcatcagttctgtgcctattttggtcactgaatttggatacatgagcatcattaaatgatggctccacagtcatcttagggtgatgaatttcatctgggaaagtgtctgcttctagggcgtctggaggctcaggaaaatcagatgactgaatatcactatcgactgtcagttctgcttgggatatggaagaagtgatgtcctctgtggcaacagtctgaatgatgactcttggtgtgtgacactgcacctgtaacattatcacttgtgttcaacaaatgttctggggataaagcatgaacaataatctgttcaggagaangcaaggagcagcagctgtcagggttactgtgggactagcagtcagagttaggggaaggccttgcccaacatatccaaactgcttcagagatnttccctctcaaattttccccaggcaccccaaattcaacaaatctataggcaaactattaccttcccccaaacctgtcttcctatttgctatctcagtgagaactaacaccactcactcaactgcttaagccagaatcctgagattcatccttgatacctccccttcactatgacccaacttcctgcctcccacaaccatatccaatcaaccatcaagttccacagatctctcctaaacacatctataatacattcatttangtctcccatctggcantccccttgttcaggacattactgcctcttgcctagactatc

SEQ ID NO: 438587 - DNA, 444 bp, Homo Sapiens
tcgagctcggtaccgtgtgtcatgaaacaaatgttctggggataaagcatgaacaataatctgttcaggagaagcaggagcagcagctgtcagggttactgtgggactagcagtcagagttaggggaaggccttggcttgagcttgtttgaagtaggtaggtgcctggagtgccagtgggctgtagatggaaagactaaaggaaaaaggaaagatagtttaacaatgattaagtctacttttatatacaaaaacggactgagtttagtttactagacacaaatgtacttacccattgtgaaggtgcgaacaagtaatacaatgtagggcataatcgtctcaagtcattacctagcctgaaggtttaagaggctgctctttgctcctgtgtatttctatggtctggtctcagctatttgtttcatgacacccggtaccgagctga

SEQ ID NO: 438588 - DNA, 422 bp, Homo Sapiens
catggaacggatgtacggggataagcatgaacaataatggaggagaagcaggagcagcagctgtcagggttactgtgggactagcagtcagagttaggggaaggccttggcttgagcttgtttgaagtaggtaggtgcctggagtgccagtgggctgtagatggaaagactaaaggaaaaaggaaagatagtttaacaatgattaagtctacttttatatacaaaaacggactgagtttagtttactagacacaaatgtacttacccattgtgaaggtgcgaacaagtaatacaatgtagggcataatcgtctcaagtcattacctagcctgaaggtttaagaggctgctctttgctcctgtgtatttctatggtctggtctcagctatctgtttcatgacacaccggtaccgacacgactt

SEQ ID NO: 438589 - DNA, 1607 bp, Homo Sapiens
  misc_feature (1455)..(1456): n is a, c, g, or t
  misc_feature (1485)..(1485): n is a, c, g, or t
  misc_feature (1574)..(1574): n is a, c, g, or t
aagcgaggcctgggtggcgaattcggcacgaggttatctctaaagagctgatatccttgcttccctatccctgttgcatttagaagaagataagactactgtgagtcaggagtctcggcgtgcagaaacattggtctgttgctgttttgatttgctgaagaaattgagggcaaagctccagagcctcaaagcagaaagggaggaggcaaggcacagagaggaaatggctctcagaggcaaggatgcggtagggcttcatgccaagcaagaagagctggttcagcagacagtgagtcttacttctaccttgcaacaagactggaggtccatgcaactggattatacaacatggacagctttgctgagtcggtcccgacaactcacagagaaactcacagtcaagagccagcaagccctgcaggaacgtgatgtggcaattgaggaaaagcaggaggtttctagggtgctggaacaagtctctgcccagttagaggagtgcaaaggccaaacagaacaactggagttggaaaacagtcgtctagcaacagatctccgggctcagttgcagattctggccaacatggacagccagctaaaagagctacagagtcagcatacccattgtgcccaggacctggctatgaaggatgagttactctgccagcttacccagagcaatgaggagcaggctgctcaatggcaaaaggaagagatggcactaaaacacatgcaggcagaactgcagcagcaacaagctgtcctggccaaagaggtgcgggacctgaaagagaccttggagtttgcagaccaggagaatcaggttgctcacctggagctgggtcaggttgagtgtcaattgaaaaccacactggaagtgctccgggagcgcagcttgcagtgtgagaacctcaaggacactgtagagaacctaacggctaaactggccagcaccatagcagataaccaggagcaagatctggagaaaacacggcagtactctcaaaagctagggctgctgactgagcaactacagagcctgactctctttctacagacaaaactaaaggagaagactgaacaagagacccttctgctgagtacagcctgtcctcccacccaggaacaccctctgcctaatgacaggaccttcctgggaagcatcttgacagcagtggcagatgaagagccagaatcaactcctgtgcccttgcttggaagtgacaagagtgctttcacccgagtagcatcaatggtttcccttcagcccgcagagaccccaggcatggaggagagcctggcagaaatgagtattatgactactgagcttcagagtctttgttccctgctacaagagtctaaagaagaagccatcaggactctgcagcgaaaaatttgtgagctgcaagctaggctgcaggcccaggaagaacagcatcaggaaagtccagaaggcannagaagcagacatagagaagctgaaccagncccttgtgcttgcgctacaagaatgaaaaggagctccagggaagtgatacagcagcagaatgaggaagatccctagacagatagaccangagtgggcgagctcataagccttaagaggggag

SEQ ID NO: 438590 - DNA, 754 bp, Homo Sapiens
gggcccttttgcccttcccttttaaaattggggcagggggaatttgtttcccagcccccctaggaaaccctccctggctttttcctccaatttgcccacatccacgttccctgcaggggcttgctggctcttgactgtgagtttctctgtgagttgtcgggaccgactcagcaaagctgtccatgttgtataatccagttgcatggacctcccagtcttgttgcaaggtagaagtaagactcactgtctgctgaaccagctcttcttgcttggcatgaagccctaccagttgggtctgggcatccttcagaaggcctctgaattcccgcatggatgctaggtcctgttccagctggctgatgcgctggctggcgtgtgcacagaaagcctccaacactatctctgccgcatccttgcctctgagagccatttcctctctgtgccttgcctcctccctttctgctttgaggctctggagctttgccctcaatttcttcagcaaatcaaaacagcaacagaccaatgtttctgcacgccgagactcctgactcacagtagtcttatcttcttctaaatgcaacagggataggtgaagcaaggatatcagctctttagagataagcacccatgattgcatgacatttctggcctgctgtagggcctgtcccatctcatggctctccttaagatgctgaagtttattagttatcccactgtgagatgtgtcaagtctgtgtgctactgtcctgggttt

SEQ ID NO: 438591 - DNA, 1314 bp, Homo Sapiens
gtgtttactacaaactgtttaattgtttcttatcccaataactttacaaatatagaaccacatgctagtctgggggtgctgtgcagtgagtcactacaaactcgctcaggcacagcttaatgccgctgagatccatctaggagcagtcccagcggtggcctcagccacgtgaggaagagggctttggaggagggctgccaagtgtggccaggggacccggcctcaggtctgtggaggtgcttcaacagcacgatgctcattctctgtccgtagtgtctccatatactttctcatcttctccaccatccaggagggtaggacaaaggatttcaattcctctagcttcagatccaggcatcctctgtaatcatcactggccgcaaggtcccgggatgtcctcctcgatgaggaggtaggccatcttgccccctgttgcccgcatgtgatgctgctcagccagccagtgcttatcctgggggtcagctgcatacttaaagaggtgtgggtgcttgatgtagattcttcctctggtgccccccatccccagggctttgttggctcgagatcccaacacaaaggtggtagattcattcaggcgagctgggtcccacttggggccttcccggcgaattggttcacaggattttggtttccataccatgccggcggctgcccggtcgcttgacaggatgtgtccaggaggccgtcctttcctctttttaggaagggggcttcctcgatgggcacattcttcttctgcctgacggccacgctttattcctggaagctcatgggtcaatctgggtattactttttctccatctgaaaagagcagtttagcctgctccaggcagctccgacaggcttcctggatcagctgctctgcgtccacctcctccccaacattgtctcgcacgttcagtgctgccttctggaagaacttcatgtacttgttgaagacagtctggatctcctcgttgatgctgggctgcaggacagctcggaggagatccatggagatggcaggatctgtgaaacttgttgtcatctgtgagcggcggcccctccgctgcacctgccggtgctttatcattatgttccaagggttcgtaagaaccagctgccccgctgcgcccgcatcccccagctccaagccgcccctctcggccccgctgggtccccgcggctgctcggcgtcgccagtggctcccatggcgcctccggcccccacaactccgctggactctgtcaccggccggaaagtggcgccgtgacgtcactcctcgtgccgaattcgccacccaggcctcgctc

SEQ ID NO: 438592 - DNA, 1865 bp, Homo Sapiens
  misc_feature (60)..(71): n is a, c, g, or t
  misc_feature (114)..(124): n is a, c, g, or t
  misc_feature (208)..(219): n is a, c, g, or t
  misc_feature (819)..(819): n is a, c, g, or t
gagaaaaaaacaaagggggggggttctctggtgccccccggccacatttaaagggggcgnnnnnnnnnnnnacaaagagttgtggtgctcctccccacgaaagagggtttcccnnnnnnnnnnnaggacccccaaagccccccccccgcggggtttttttccaaccccccatgggggccccttttgggtccaaaaaccagtggggttnnnnnnnnnnnnttccaagaatggggccccggggggagggggttgttttcaagtttgggaaaaacccgaattcagaaatgggtgggaatccccaggttcttggcctgggggggaaaaggtccttatgggaaaaacccccctggtgcccttaagttctccaggccagaagtcaagagaagccagagtgggagttcccaagcacaacccccaggacttcggtgggcaggaggcgaccagagggggctggaatgctggggagggtggcctggtggcaggggagcccagggcctgcagttctcaaaggaagaggcaagtgggggcctagtgagtggcaggcgggagggggcgcatggctcccgcgtcaggcatagaattcctcctgtttggtgggcttctggtaggccccggcgttggcttgtttcgggctcctccaaggagtagctgccttcggtctttcttcttcatgcggttcagcatgaaacccaccaggcacacagcaaagatgagccccacgagggcctccggcaatgacccctcccagcacctctttcctgtccaggaggccctgtgaggcccccgtgggccccctgatccactggggactggttccgncggtcaggctccacggccactacagccgtattctcccccgaggtttcaaaggtgaagtcctgctccccagagccctctgctgctgggagctgactggaggctccatcctcagcagccctctcggtggcagaaggacctccatcctctgtgtggggagtgtgaaggtcagcttggctgggtcctgcaggggttgaggtctcatggtggccaggctgcatgtccctgtgggggtgggaggtggcgggctcctgggccgtggtggctgtggtcgttgaggcctgatgaagtggtcgggaggctgtgtggtctccctgggtcggggggtggcctcctgctcccgggcggtgaggccaggctccacttctggcaggactacagcctctccctccttgggcccctctccagccggcagggtggaggtggaggcagctgtagcctccaggccggtgggttctggagacgtgggaatagccgtcaggagctgcgtgtccttccaagtggagggggtctgctgtgacaaggtgatatcttgcaaagcacctgcacctgagccggagaagttgtcagagtcatccccagagccatcttgatcttcagggggcaaattagtagccacaatttgcggcagggccggctgcaggctcagcgccagcgcgcacagccagagccagagcgccgcgcgcctcatgctgcccggaccggcggcgggagagcggcaggctgcgcgggtcgcggctgcgggccggcttcgcgggttccgctgctcgatgctctcttgggcgcctgcccagcgcgccgctgtcccaggcgagggctgcagggtccgccggctggagtccgctctctactgccggattcctctccgctcggctcggattcggcccgcacctctcccgccgagctccgccttataataaacccacaggcccttccttagccgttgcaaaaactggccaccccacccccagctccgccaggtctcccggccctcgtccgaattcccacccagcctcgctaccttataacccttatgattactgcctctt

SEQ ID NO: 438593 - DNA, 1171 bp, Homo Sapiens
  misc_feature (32)..(32): n is a, c, g, or t
  misc_feature (371)..(371): n is a, c, g, or t
tgtctgaggggaattaccctaaaaattatttncggccaccttctcgtttaataataggggtgccaaggggggttcccccctgtaggagtttttttccccctttcccggggaagaggggcatgctggcaaaaggtggggggtaagacccctgcgccgcagggttctccaagggtgcccccgtaagaaccgggttggcggactcccctctcctggattcacatccccccttccaggttttcccactggtggtgcggcatgctttcccacgtgcttttgcaagagctgcattcctcttcctcaaaactccatggttggatttgcgaagcctggcggagctcttgctccccgagctttggctagggttcaagaanttcctccgtaaatataggggatgtcaaaaaacagacccgtccctttacctctgttcttttctcatgatcatgagtggcctgccgggctgcatcttgcctatgagatttgcctttctgacggtcctgggttttcctactgaagaccttgtaggcctctgttttctgatactgttccagttccttcatgtaacgctccttatctctgtctgcttcatcaaggtagcgctgtttttcctcaggaggcagtttactccattcattgcctaacatccttgtgatttctggaaatgggacttctggtctctttgctcgaagttgttctcgacgctcattcatgaaccgaacatatcctgtaaggggggatttgggtgcattgctgtctcgaagaggtttcttcctctttcttcctttggaccaacctcctcgtttacttcgttgctcatcttcatgcctctgttcattgccttctgctgcatttgaagactcactctgaagcaactgaccttgagagagatcctccacaaattctggattgttggtggatgatgtggcgccactactgtatggaacctctgggtgatttaacccagtggtagccagatcattactctccttggaaccgtcttcatctgcaaaaaggggcggtagggtggagctagtcatcaagttttccatctctctgctgacgacaggggcaggaaggggcctagggccaaaagaaagtcccttccacagaggacaattccctcagcccctctcaatcgccttcacttcacgcactcgtcgatcccaagaattcc

SEQ ID NO: 438594 - DNA, 1234 bp, Homo Sapiens
acccccttttgttcttttttggggagagtttccccaccagccacggggggcccaaaataaatgtgggaggagaaaggaatctggggcccctggttcccaaatggcccaagaaaaaattttctccttttcagggacccctttggtggggccacacccaggttagtttccagaaggtccagaaaaaatgggagaaggtttaaattgggtggggggcccagggaaaaccaaaaaataaccccccggagggcatttaaaaaagtgacagctaggtaagaaaaactggagcttcactgataaaagggtctaagcgaaattacaatgaaaagtcttcctttctgcagcagcagatgtcagcatccgggtcacctagtaagctgaagatatgcagatccactttaacagaaatggaaatggtaggaacctgaagacccgggagagtggctgtacaccttcaaagcttcacataaggacaattccataggaagctcatatacatgttgctgctccctcatttggcttccctggggtgatggcttttcactcactgataattctttcacaagcaaagggatctgcactctttctctgcccccactcagttcaaatttccatggatggcttctcattcctcacaagtaaaaacacttatggaacatcttggagttctaagaccattccctaacgatcgagtctgttcacaacttctcgaactgtagctatgaagttttcattgtcttggggattagctaaaataatactgtgcagtctgttcatatatgagtcaatggtgtccactgtaggtgtctctccacttccaggcaagggcatgctggcaaagctgctggtcagcacctgcggcagggtctccaggtgctgctgtaagactgtgttgcggctccgctcctggatcacattccacctccagcttctccactgctgtgcgcatgctctccacgtgcttttgcagggctgcattcctctcctcaaactccatgttggatttgcgaagctggcggagctctgcttcccgagctgaggacatacatcccacagaacacatgcagcactagaaggagtctctgaggagtcccaatgactcttacagggaagttctgcttagctgcctctaatttagctaccccacctcatctccctattctcattatggcattccagatagcaatttcagcaatgaaacgcctgacatcccgggaattccggaccggtaccagcc

SEQ ID NO: 438595 - DNA, 1760 bp, Homo Sapiens
gctgggtggcgaattcggcacgagggcgcggcctgccgtgtgaggcggaagcggaagagcaggtctccaggggtagcgatggcagccgggggtctgagccgctccgagcgcaaagcggcggagcggggtccggaggttgcgggaggagcagcagagggagcgcctccgccaggtgtcgcgcatcctgaggaaggcggcggcggagcgcagcgccgaggagggccggctgctggccgagagcgcggacctggtaacggagctgcagggccggagccggcggcgcgagggcctgaagcggcggcaggaggaggtgtgcgacgacccggaggagctgcgggggaaggtccgggagctggccagcgccgtccggaacgccaaatacttggtcgtctacacaggcgcgggaatcagcacggcagcgtctatcccagactaccggggccctaatggagtgtggacactgcttcagaaagggagaagcgttagtgctgccgacctgagcgaggccgagccaaccctcacccacatgagcatcacccgtctgcatgagcagaagctggtgcagcatgtggtgtctcagaactgtgacgggctccacctgaggagtgggctgccgcgcacggccatctccgagctccacgggaacatgtacattgaagtctgtacctcctgcgttcccaacagggagtacgtgcgggtgttcgatgtgacggagcgcactgccctccacagacaccagacaggccggacctgccacaagtgtgggacccagctgcgggacaccattgtgcactttggggagagggggacgttggggcagcctctgaactgggaagcggcgaccgaggctgccagcagagcagacaccatcctgtgtctagggtccagcctgaaggttctaaagaagtacccacgcctctggtgcatgaccaagccccctagccggcggccgaagctttacatcgtgaacctgcagtggaccccgaaggatgactgggctgccctgaagctacatgggaagtgtgatgacgtcatgcggctcctcatggccgagctgggcttggagatccccgcctatagcaggtggcaggatcccattttctcactggcgactcccctgcgtgctggtgaagaaggcagccacagtcggaagtcgctgtgcagaagcagagaggaggccccgcctggggaccggggtgcaccgcttagctcggcccccatcctagggggctggtttggcaggggctgcacaaaacgcacaaaaaggaagaaagtgacgtaatcacgtgctcgatgaagaacagttggcactttgcagatggccagtgtcacggtgaaggctgggttgcccccacgggtctagggagaacgaactctttggggatgacattttcaccgtgacatttttagccatttgtccttgaggaagccccttgcactgctgcggttgtaccctgatacggcctggccatcgaggacacctgcccatccggcctctgtgtcaagaggtggcagccgcacctttctgtgagaacggaactcgggttatttcagccccggcctgcagagtggaagcgcccagcggcctttcctcgctcaccaggccagtctcagggcctcaccgtatttctactactacttaatgaaaaagtgtgaactttatagaatcctctctgtactggatgtgcggcagaggggtggctccgagcctcggctctatgcagacctttttatttctattaaacgtttctgcactggca

SEQ ID NO: 438596 - DNA, 1239 bp, Homo Sapiens
  misc_feature (162)..(162): n is a, c, g, or t
  misc_feature (205)..(206): n is a, c, g, or t
  misc_feature (250)..(250): n is a, c, g, or t
cttgtgtttacagtttatttaatggaaaagagattggcctattctggttttgatgcctgctttgccccgggatgagaaggcttccaacatgtcacttagaagaaaagacaagggtttttcctgggtttctgacacccagaggggcttaggcttcttgatccnacagcagagttttctgggatttctttttttagagaaagagganncttgtttgagggggttactgagttgacagagggatggtttccantagatgggaacaaagcggtttgtcaaaagctagaggagtttgttccgggagctggatgacggggctggaggacagcatcatcctgttttcagcttccatctgaagacccaagttacccatcctggggtgagtgcccacctcagaagtcaaattctcccctcttaaaggcatagtctgcccttcaggggtgactgatatgtttctggaggggacagtcaccttttcacgggccacagccttccttctaggggccactgtattctgtctaagggtctcagtctgaaaatggacaggggtcatagtcgttcctccaggggtcacagactgatgacccacaggggtcagggtcttctgtccagtggtcacagattgatgacccacaggggtcagggccttctctccaggggtcatggactgatgacccacagaagtcatggtcgttgccccagtgatctcagtcttctctcctagagctacagtgtgctttccaagggatacagtttcctttgtaggggtcacagttgtacctctaggggttatagtcatattttcacactttccgtggatctcagtgaccccagcctctcctcctgggggcaaaatcttactatcagtggtccatgccgtggtcacagccagcctttcagggtcagtgcttgaagaattcacagcagatgacagccaaaattgtggtaaagaagttgaactgaactcagcccgcaccaggatatcattcaatacgtagacaagggggaaagggccagtgccacagaacgtgcccctgacgtcatccatgtccaatgtccacaccatggcccccccaaaatgctctcgccttataaaccatgccttgtaactgaagctgatggcattgtcatagccaacccactctttccccttgttggcatacgggacatactggtaatcaatccagtgcttcttcgctccccagacaaaggaacaaatctcaaaataagccaagaagcctt

SEQ ID NO: 438597 - DNA, 2603 bp, Homo Sapiens
  misc_feature (185)..(185): n is a, c, g, or t
  misc_feature (284)..(284): n is a, c, g, or t
  misc_feature (418)..(421): n is a, c, g, or t
  misc_feature (428)..(428): n is a, c, g, or t
  misc_feature (435)..(435): n is a, c, g, or t
  misc_feature (437)..(437): n is a, c, g, or t
  misc_feature (532)..(532): n is a, c, g, or t
  misc_feature (651)..(651): n is a, c, g, or t
  misc_feature (1878)..(1878): n is a, c, g, or t
  misc_feature (2147)..(2147): n is a, c, g, or t
  misc_feature (2191)..(2191): n is a, c, g, or t
  misc_feature (2195)..(2195): n is a, c, g, or t
  misc_feature (2215)..(2216): n is a, c, g, or t
  misc_feature (2219)..(2219): n is a, c, g, or t
  misc_feature (2239)..(2239): n is a, c, g, or t
  misc_feature (2247)..(2247): n is a, c, g, or t
  misc_feature (2257)..(2257): n is a, c, g, or t
  misc_feature (2264)..(2264): n is a, c, g, or t
  misc_feature (2301)..(2301): n is a, c, g, or t
  misc_feature (2303)..(2303): n is a, c, g, or t
  misc_feature (2331)..(2331): n is a, c, g, or t
  misc_feature (2515)..(2515): n is a, c, g, or t
  misc_feature (2559)..(2559): n is a, c, g, or t
cttcgcgctggcacggagcatttccagcctcacgcgcttcaattttctcagctttaattttctgtggggtcggccaagccatcttccttgtttagcggaggaggccaggctcagagagggagaggagttggcccaagggcacacagcagccaagtggccaaggccggaaggtgcacccgcagagnaagggggcagcggaccctctccctggctgttgttactgggacactagagccgcgccttccccaggcctccgccgaggctgctggagcgggtcccgcggntgccagggcctgttccccgcgctccgccagggatgctggggcctcggagggctccggaggcggtttagggggcgggggcgcggaggcgcggctccgagcagggggcgggggctggatgccggagacgccactannnnccgcccncccccantncccctcccttcgcaagcacgcggtcccccttctcccacacggctgcggacctgggctgggcgcgcggggaggcggggggcactcgcggaggggancccgccccctcccccggccgctcggtgcccccacacccacgtgagcgcagggccggcccggatccctcccgcagcatagcgcgtcccggctccgcgccggtgcctccacggtccggtcnccgcgccggtgctgcacagtccctggcgggtccccgcggccccggccgggcgcttcgccgggctccggctcctgcatccgggcgcagcgcgcaggccgaggcgcgggcaggccgcccccgccgctccggacgccgatagaccatgagcagccatggcaacagcctgttccttcgggagagcggccagcggctgggccgggtgggctggctgcagcggctgcaggaaagcctgcagcagagagcactgcgcacgcgcctgcgcctgcagaccatgaccctcgagcacgtgctgcgcttcctgcgccgaaacgccttcattctgctgacggtcagcgccgtggtcattggggtcagcctggcctttgccctgcgcccatatcagctcacctaccgccagatcaagtacttctcttttcctggagagcttctgatgaggatgctgcagatgctggtgttacctctcattgtctccagcctggtcacaggtatggcatccctggacaacaaggccacggggcggatggggatgcgggcagctgtgtactacatggtgaccaccatcatcgcggtcttcatcggcatcctcatggtcaccatcatccatcccgggaagggctccaaggaggggctgcaccgggagggccggatcgagaccatccccacagctgatgccttcatggacctgatcagaaatatgtttccaccaaaccttgtggaggcctgcttcaaacagttcaagacgcagtacagcacgagggtggtaaccaggaccatggtgaggacagagaacgggtctgagccgggtgcctccatgcctcctccattctcagtggagaacggaaccagcttcctggtaaatgttacttggtccttgggtaccctgccaggagatgctgagctttgaggagactgtacccgtgcctggctccgccaatggcatcaacgccctgggcctcgtggtcttctctgtggcctttgggctggtcattggtggcatgaaacacaagggcagagtcctcagggacttcttcgacagcctcaatgaggctattatgaggctggtgggcatcattatctggtatgcacctgtgggcatcctgttcctgattgctgggaagattctggagatggaagacatggccgtcctgggggggtcagctgggcatgtacaccctgaccgtcatcgtgggcctgttcctccatgccggcattgtccttcccctcatntacttcctcgtcactcaccggaaccccttccccttcattgggggcatgctacaagccctcatcaccgctatgggcacgtcttccagctcggcaacgctgcccatcaccttccgctgcctggaggagggcctgggtgtggaccgccgcatcaccaggttcgtcctgcacgtgggccccacggtcaacatggatggcactgcctctacgaggccctggctgccatcttcattgctcaagttaacaactacgagctcaacctgggtcagatnacaaccatcagcatgcacggcgcacagcagccagtcttgggccncctnccatcccccacccggctctnntcnccatggtcattgtgcttacntcggtccncttgcccacngaagacntcacgctcatcattgccgtggactggtcccttgaccncntcgcacaatgaccaacgtactgggggantcaattggagcggccgtcatcgagcacttgtctcagcgggagctggagcttcaggaagctgagcttaccctccccagcctggggaaaccctacaagtccctcatggcacaggagaagggggcatcccggggacggggaggcaacgagagtgctatgtgaggggcctccagctctgcccccccanagaggagggaagggggctggggaggggagtcctggtgacacatntgttgcccaactgaccgtgggctgaacacacgttctgcttgact

SEQ ID NO: 438598 - DNA, 593 bp, Homo Sapiens
  misc_feature (46)..(46): n is a, c, g, or t
  misc_feature (59)..(59): n is a, c, g, or t
  misc_feature (64)..(64): n is a, c, g, or t
  misc_feature (80)..(80): n is a, c, g, or t
  misc_feature (87)..(87): n is a, c, g, or t
  misc_feature (92)..(92): n is a, c, g, or t
  misc_feature (192)..(192): n is a, c, g, or t
  misc_feature (198)..(198): n is a, c, g, or t
  misc_feature (211)..(211): n is a, c, g, or t
  misc_feature (250)..(250): n is a, c, g, or t
  misc_feature (438)..(438): n is a, c, g, or t
  misc_feature (552)..(552): n is a, c, g, or t
aaccttcaaaaattttgttgaaaaaaatattctgatcagttccatnaaagcatcaactntgggnatggtctcgaatccgncctcccngttgnaacccttccttggaaacccttccggggatgggatgatgttgacccatgaagaatgcccgaatgaaagaccgcgaatgaatgttggttcacccatgtaatnacacanctgcccgcaatcncccatccgccccgtggcccttgttgtcccagggatgccnatacctgtgacccaggctggagacaatgagaggtaacaccagcatctgcagcatcctcatcagaagctctcccaggaaaagagaagtacttgatctggcggtaggtgagctgatatgggcgcagggcaaaggccaggctgaccccaatgaccacggcgctgaccgtcagcagaatgaaggcgtttcgncgcaggaagcgcagcacgtgctcgagggtcatggtctgcaagcgcagcccgtgcgcagtgctctctgctgcaggctttcctgcagccgctgcagccagcccaaccggcgccagncctggccgctctcccgaaggaacaggctgttgccatggctg

SEQ ID NO: 438599 - DNA, 1732 bp, Homo Sapiens
  misc_feature (172)..(175): n is a, c, g, or t
  misc_feature (179)..(179): n is a, c, g, or t
  misc_feature (182)..(186): n is a, c, g, or t
  misc_feature (188)..(193): n is a, c, g, or t
  misc_feature (196)..(197): n is a, c, g, or t
aaattccccaaggcccccttagggtccattggccccggggttttttcctaagggaaacccaggctattggcccccctgttccacctttaccttactggggcccccgcggcgcccaaaccgaatgggtcctagaaaggcctctccgaggggcccgaggccggccgaccaggtnnnntttnttnnnnntnnnnnnttnntttgagttaaagaaagctgaatttattaaacttatggtatatgtttaggtatactaggtagtgacttaaatttcttttatttacttgtgcttctgtttgggggcactttgattgaagagaaattcaattcacaggattacatcttgctaaagcattccttagcattggtccaaacttgaattccctttttgcacatactgatctgcatgactgcatagcttatgagggcctcctttaagtctcggttcttttgttctttgaagcgttcaatatcagcccatgcgttttccacaaattctctgccttccagatttttagactttagctgttgttctccttcatttatttgttcttctagcacctttattctggcttctctctgctctggagtttcttgaccaaagagcttggtagtcattcccttcaaagagaatgttctcacagtcccagttaccagttcctcacactgctgcttcttggatgctaagtcctgagcagccatctccaagtcatactgcataagttcatgtttcctgcacacagcccgcaatgcttctgcataaaaaagatactcttttaactgatctgcataatgttcttcatcttccaaaatatcatcaatagaagatgcatacacatccatatgatgaccagcactctgcagtccatcacccatttctttttctatggcactccattcactgaaaactcgaccataattcccatgtactttatatacaccatagagtcgatctgctactctagctctgactcgaagaagatgtgagatgacagactgcagttcatcactatagtgcttaaggtcagtaaatctcttgtctgggtttttcactctgaatgttgcattaagcgcttttaacctggagtctgccttcagctgaaacccagtttcattcacagtctccttccagttaccttcctgtgttaaaaacagatagaagattttgtctctacaaaggatgggatgtgaagcaatcctcaagagaaagttttctaaaccaatccgtcgcctctccacaaaatctggatccatgttgtcagcagagagtttatgccaaacaaattctgcccgtttttctggcagaggtggcacaacaatatgtggatagtaaactaaaaggtagcttctcaacaactcaaattcactatatcgccgccatagtgagtctgttaggacactctgaccatcggtatgttcaactgaccttgtttcaatgaggtaagcagtatatgtttcttgcatgttcatggcatttcttccagttcgtttttctgcttctgaaacactgatttctatcttcttcaaccaaaaattattgtgtgtcatcgtgtcgaccccagagctctcttctccggccccctccgcttccttgccgaccgcagcccccagcccagcgtctggggagcccagcggctccaagggcgccggctggagctgccgctcggggtccggaggtgcctgctccatggctgcagttcggcgcggcgaacccagtgcgcctgcgccgcccgct

SEQ ID NO: 438600 - DNA, 1102 bp, Homo Sapiens
  misc_feature (986)..(1048): n is a, c, g, or t
  misc_feature (1050)..(1050): n is a, c, g, or t
  misc_feature (1053)..(1053): n is a, c, g, or t
  misc_feature (1066)..(1066): n is a, c, g, or t
  misc_feature (1068)..(1068): n is a, c, g, or t
  misc_feature (1074)..(1074): n is a, c, g, or t
  misc_feature (1078)..(1078): n is a, c, g, or t
  misc_feature (1095)..(1095): n is a, c, g, or t
gccgacagggcttccgagcgagcagagtcccgcgccccgcactccatggagcagctgctgcgcgccgagctgcgcaccgcgaccctgcgggccttcggcggccccggcgccggctgcatcagcgagggccgagcctacgacacggacgcaggcccagtgttcgtcaaagtcaaccgcaggacgcaggcccggcagatgtttgagggggaggtggccagcctggaggccctccggagcacgggcctggtgcgggtgccgaggcccatgaaggtcatcgacctgccgggaggtggggccgcctttgtgatggagcatttgaagatgaagagcttgagcagtcaagcatcaaaacttggagagcagatggcagatttgcatctttacaaccagaagctcagggagaagttgaaggaggaggagaacacagtgggccgaagaggtgagggtgctgagcctcagtatgtggacaagttcggcttccacacggtgacgtgctgcggcttcatcccgcaggtgaatgagtggcaggatgactggccgacctttttcgcccggcaccggctccaggcgcagctggacctcattgagaaggactatgctgaccgagaggcacgagaactctggtcccggctacaggtgaagatcccggatctgttttgtggcctagagattgtccccgcgttgctccacggggatctctggtcgggaaacgtggctgaggacgacgtggggcccattatttacgacccggcttccttctatggccattccgagtttgaactggcaatcgccttgatgtttggggggttccccagatccttcttcaccgcctaccaccggaagatccccaaggctccgggcttcgaccagcggctgctgctctaccagctgtttaactacctgaaccactggaaccacttcgggcgggagtacaggagcccttcgttgggcaccatgcgaaggctgctcaagtagcggccctgccnnnnnnnnnnnnnnnnnnnnnnnnnnnnnnnnnnnnnnnnnnnnnnnnnnnnnnnnnnnnnnntnctntcctgttccgttncngtctcntttntccccgtcccatctctntcgtccc

SEQ ID NO: 438601 - DNA, 238 bp, Homo Sapiens
acaggatcgccttgatgtttggggggttcccagatccttcttcaccgcctaccaccggaagatccccaaggctccgggcttcgaccagcggctgctgctctaccagctgtttaactacctgaaccactggaaccacttcgggcgggagtacaggagcccttcgttgggcaccatgcgaaggctgctcaagtagcggcccctgccctcccttcccctgtccccgtccccgtctccgtct

SEQ ID NO: 438602 - DNA, 1639 bp, Homo Sapiens
  misc_feature (186)..(186): n is a, c, g, or t
  misc_feature (285)..(285): n is a, c, g, or t
  misc_feature (291)..(291): n is a, c, g, or t
  misc_feature (383)..(383): n is a, c, g, or t
  misc_feature (386)..(387): n is a, c, g, or t
  misc_feature (391)..(395): n is a, c, g, or t
  misc_feature (402)..(402): n is a, c, g, or t
  misc_feature (409)..(412): n is a, c, g, or t
  misc_feature (415)..(417): n is a, c, g, or t
  misc_feature (421)..(421): n is a, c, g, or t
  misc_feature (439)..(439): n is a, c, g, or t
aaaagggggtttgggaacccgggaatttggggacccaagttcccaggactccctttcggaaggggaagggtcccgggggcccggggaatttaagaaatctccggaattcgggggaggggggaaaattttagggaaaaacaatggttttttaaaaaaggagggaaaaattctaaaggggttggtttntttccgcgagtttgggcaaaaaatcttggggagggtaacccggggttttccccaaccaaggtataaaggggtggtaaaaatttttaaaaaaagggtttnaaaatnttacggccttcctttcaacttcaagccaaaagttttgcaggctttggggtgttctcccaacattgtcaagtcaaggatcatgccgggggctntcnntctnnnnntcccccnttctttnnnnttnnngganaacaaggcctggggtctngtggcccaggctggggagtgcagtgggagtaatcatggctccacctcaggtttgaacctccagggctcaagtaatcctcctaatacgggcatttctctcatcgcttcagaacccgccccacaaccaaacattcagatgcttattaaggcaacaaaacaagtgacagacgggacaatttttccaattctagatctaattgattaggctatgtctcatgaggagactgtacttgacctctaagctagcatctggaatacaatcttccagcggcttagggaaggtcggtgatagtagtatcgtcaggatcaattccgaagtgcagcttgccgtccttggcggctgcccagggcatggaggtggaggtccactttgccacccagtctcctgttttgctaaccacgatgaggccacctaaacctttaacccttgacttcatataacccaacgataggtccgcagcctcttctaccgtctttccttgttctatgtggaacagggtgagtctagccaggttcaccttcaggatgctttccccatgccctgtggttgagacggctccgatgtcattgtcggcataacctccagctcctagacacggtgagtccccaacgcggccgaccattttattaacgataccgcctgtggaggttgcgtaggctacattccctttgcagtccaaggcaacagcacccacggttcccaaatttttttgacaatctgttttctgagcacctttttcatgcttctctttttccaggcgctttttgtttctctctgtcaccagtttttctccaggaatctctggaacccccatagctgctgcaaactgcgctgcgccttggtcagtcagaaagcaatgaggtgtctgcgttgaactcgggatcgtcttccagggcgacgacagctccctctacggcatccacggcgctcccgccctcccggaggatgccgtagcccacggtggcggctctgaccatgccctggtgcactcgctccttccgatccttggagatgggaccggctccgccgccgtggaccactacgatgggattcatgtcggcgggtcccagggcaccgcaggacgcggacgccgagacctccagctgggtcgagccagccccgcagccgcccggtaccgccgctccccgacgccggctcgaaaccgctcagcccgccaccgatcccgggaattccggaccc

SEQ ID NO: 438603 - DNA, 1219 bp, Homo Sapiens
  misc_feature (1133)..(1169): n is a, c, g, or t
gcttccgtccttggcgggctgcccagggcaggaaggtggagttcccactttgccccccccagtctccggttttgctaaccacgatgaggcccacttaaacctttaaccccttgacttcatataaccacacgataagtcccgcagctcttctaccgtctttccttgttctatgggaacaggtgagtctagccaggttcaccttcaggatgctttccccatgccctgtggtgagacggctccgatgtcattgtcggcataacctccagctccttagacacggtgagtccccaacgcggccgaccattttattaacgataccgcctgtggaggttgcgtaggctacattccctttgcagtccaaggcaacagcacccacggtttcccaagtttttttgacaatctgttttctgagcacctttttcatgcttctctttttccaggcgctttttgtttctctctgtccaccagtttttctccaggaatctctggaacccccatagctgctgcaaactgcgctgcgccttggtcagtcagaaagcaatgaggtgtcttttccatgacaagccgagcaagtttaatgggatttgctatacactggactgcggacactgctcctgcagacaggtcttttccatccatgatactagcatccatttcaacctcaccatttgtgttcaagacagacccacaacctgcgttgaactcgggatcgtcttccagggcgacgacagctccctctacggcatccacggcgctcccgccctcccggaggatgccgtagcccacggtggcggctctgaccatgccctggtgcactcgctccttccgatccttggagatgggaccggctccgccgccgtggaccactacgatgggattcatgtcggcggatcctaggcagcaggaaggcgaaagcgtcgtccaaagccagcccaaggaaaccgcgcgggtacaaggtcctcgggagaccccagggcaccgcaggacgcggacgccgagacctcaagctgggtcgagccagccccgcagccgcccggtaccgccgctccccgacgccggctcgaaaccgctcagcccgccaccgctctggtcccgctctcgacgaattcgagctcggccgatttggcctgatnnnnnnnnnnnnnnnnnnnnnnnnnnnnnnnnnnnnncgccgccaccagcgataagccgggggtcccctatagtgatcgttacatct

SEQ ID NO: 438604 - DNA, 856 bp, Homo Sapiens
ctcttctgataatgcagccttgtcatgagctgacattgctgaaatttctggttttgctgactcccttgttttatttcgctcagcctcagtgctgttcctctccacatccacacctcctgtgagctgcttcacggtctccagcatctctctccgctgctcttcttgagactgattgtctagcaggtctttactgctgccacccctcatgaaagtatttggccgagctgttgcagatggaaggggcttgtcattcttctccctgcccatacttccacgactagttaaggtccttcgggaatcaaactctacaggcgtggatggcgtggaccctgagggtgctggaggttgcagggcagagaatctgtttaaactggaagcacttgaccgtaaggcatcagtctcacttgcctttgctccaccactgctgccttttccccagctgcctagctgtgctttaggtaccagctgaattttttcatcaattgtaggcttagtgatttttaggaattttgaggggtccagtacccgactgttcttggccccttgtacagtgttccacccaccttcgtccactctctggacacctggtcttctcttctttttggtcatgagttgctggaccttcctttgctcttcttgttcttctattttagcctctttgtgaatctgttcgatagttttaggcccttgatctgctcttcgagatacccaattgcactataaaagcagaaaataaggttatctgccagataaactaaacattttttgaaatttaaaaattagcaatttttactactggaaaagtacaaaatacctacaaaagctgtattgtggcagtttctcatgtatcttatag

SEQ ID NO: 438605 - DNA, 1815 bp, Homo Sapiens
  misc_feature (501)..(501): n is a, c, g, or t
  misc_feature (704)..(704): n is a, c, g, or t
  misc_feature (750)..(750): n is a, c, g, or t
ttttttttaggtacaaactggactttatttgagttaagaaataggtgtttccaaatttctccacgctcactacagtggccccctgcccctgctcctgcaccaaacttggttaactccctcattcccagacagagcaccccagccctgacagagaaggagggggccccaaatgggccctagaacctgccagggccagggctcagccagggctgttcatcagcacagagcctggggcctctggcttttggtcttttgtgaaatagaaagtgttgtgccattcgaaacccatttctagaatgggtcagtgtcctaacccttcctgggtaaggcctttgtcaacagcccctgctccttgggcccctccatgccatgccgtaatctctcccactctgtctcaccccacctcagctccgaggcatccttccctgagtgtgagagagagagggacagagaaacagataggcaggcctgtagcagcagtagcacatggactcgcccggngctccccttcggggagagactgggggggttgatacccctgggagcggccccttcccagcactcagtccatctgtgggcctcctggcctgcacagccatgtgtccacttggggagggagggtccacaggggcccatgggctatccccctggggggtgcatggggtggggaggggaggctgggacgggtccgggccggcaggctngggtctgtgggcaggaggcagtgaaaaacagcgaggtccgagaggngcgtgagacaggggcgcggctcggagggtagcggggggagcgcaggtggccccctgagctcactcgcctcggacctccaagcgggcctcgcactgccgagcaccatactcattgaccgctttgcaagtgtagaaaccagcattcgccacgctctgcagccaggatccgcagccggcacagcccaccctcagcctcctccgcaaagcgccgctggtctgggcgcacgggctggcggtttctcagccaggagaccacaggcttgggctccccctgcacgcggatgctcatgatgacatcttggccttctcttactgactggtccataagtgagaccttgaaggtggggggtgccttggagccagtgtcagaagaacggcggttctggctgggactgggcttcatggtgggggttcgcggccaggtctccccaggctctgggaactcctctggggggctcaggtattcctcgtcggaggtgatggggctgctgaaaggggatgtagacccaccgggtctcacggtcagtgaggcggcacaggtggcctggcccagctcgttggtggcggtggccatatagctcccggcatctgctgccctggcctccctgagcagcagggtgtgccgctcaccctcagcccggaggaggaggcggccctcgctgcgcagcgctgacccatccttgtgccaggacacttggggcggggggttggcagtgatgatacatttgagcagcacatctgcccctggtgccaccaccacattctgcagggggatctcaaacacaggggcctttaggggctcttctccagcggacacgtaggagatgtttcgaagacttcggcctcagggggaggtgggcctgggccccggggacctttgcccttggctgcgggccctttggggggccccagggcccccagggaccggccttcttcgggcctttggaaacccttttttttgcttaaggcccgcccctgtttttttccagggtgggggtaacaaaaagcccctccaggcccggggtgggccaagggcaagaaacccaccggtctgtccccgggggct

SEQ ID NO: 438606 - DNA, 957 bp, Homo Sapiens
ggggatgattacgattgctcgtgtgggtatgtgttgttttgtgtgcgtcacatgttctgcaatggtgatcaagttttcccaatcaccccgccttagcctgttgagcatggccctgagttctctcgcccttttcctatggatgggaaccttcctgttcaacgatgtttacgagctcgacctctggcctggacttgactgccgcccgcgtaagcacagagtcagcctccccaggatggtccacgtcataatcccgactctccgttctccaaacactctttctcaatcagcctggaagatccaaagtcccccaaaactgcagagggaccaaaactatactcctgtgaccaagaggactcttgagaaactggatggccaaagtcttgttcccaagaaccacggagcgcaaatttccagtcctgagaacggaaatgccccaatttccggtggccaatgacctggtcccgagaatcagagtgagaaaattccagatcccggccacattctttgcgaaagtagctgtcatcactgatggaagggttgcttgatctgaaggaaggccctggaaatacgtcacttctcaggccttctcttccggcatctctagagtgagctacagatccactgagggagtatctgccatcgctgtggacgtcatcatacatctctgctctggatcttgggactgcccttaagagatcttgagctttaaactgaagagtttcgcttacagcctcaccactggcatccatgtgatatcgtttggctttttcttgtaatacagcatcaaaagtctcctgtgtaattcgtctggctgccatgttattttgcccccgagaccaccgcgcgcggagccacccccgccgccgcctcaggctcctcacccgccgccgccgccgcgcgaggcggggacatgcaaatgaaccaacggtctccgcagcgccgcgccgcacagccgct

SEQ ID NO: 438607 - DNA, 857 bp, Homo Sapiens
  misc_feature (74)..(74): n is a, c, g, or t
gcttccaaaaccatccaaggacttggcaaggaaatccaagtgcttatccacctgaattctgccattggctcatnccactgaagtaaaccaattcccagactgtaaagctcccacagaggtatttatgtccccatgtaagggtttctgactatgccaacatttgtggccagcccttttgtatccaggaatctttgttgttaaagcggatttttcttggtagtattcggtctgggaaacctgtgagtttgaatatgggcagctaatcctggttttttggcatgttcaaccaaagctataaagattgtgagagtagagctgaaaggtttttccttctgataatgacattaaagtattattgataacatacagcaaagtacacttccgtggaaataactgttccatcgttgcctcatgtagctcattgagattcagtgtgtaaataccatcttcagttccaaaaataatgtactgatcttttgtatcaggatgtatccaggatgttgcacaattaattttcaaaggacagccatcaaaaacttttgaaaagcatgctcccatcagaacttttggggtgggtggaaggccattgatggctggtttagggaagtctcgtttgtccttttttcgtggtaactgtggtgcttgtgctgatccttctgtattttcactcatcagttttgaaataccatcaccatttccaatagaagaagtctctgccacaggcccacaacttgggctactctgtcttctgagaatttggggagctctgctttctgaatcaggacaatgttttatggttgatgctttttcttcatccggaaagttgtcttcagggtaactgcttatccttggcttag

SEQ ID NO: 438608 - DNA, 2466 bp, Homo Sapiens
ttttttttgtgggtcacagttgagggtttattgccagtgttaggaagaatggggggtctgggtggccaggggtcttgggaggaattccaaatgagcactgcagggcctgtgagtggggaggagagctgctgcccccctgccacccaggaggccccagggctgatgccaccatatcctgactgctagtggtgccttaaaaggtggcctccccacaggaggggagccttgggggcccccaggagtcagccctcaccaacaagccctctctcaagggggccaggggcctttattcctcatgggacaggctgggccgtgcccattttaggggagctgaccacacctcagcagctctgggctcccagattttatgtggtgggccctggggccgggggtgggatgcaggcatcccggctgatttctaccctgcggtcttggggcacctacaaggcaagggatcctcctagacagtcactgatcccctcatcctgggcatttgagcccccagttttactcacagactgagtctcataagggtcccacccctggccagccctccctcgaaccacggccccacttctccccggtcaggcgatgtgctctctagaagggagggtggtaggcagggggtgcacccagaggtggaggcagacagggccctccttcctggcctcctgggccaggccaccctcacccctgcctgggagtgaatggccacgaccccgggtgcacacacatcttggccccaaaaggactccaggtgacagcaacagccacacatcttcagggatggatgcaataagagccacacctcggccactggtctgttagggctttgggaagagagtttgacgtggaggccgcagggccagtctcccaggctgggggccctcctcgtgggtgccccggacgtgtgtccgtccctcgcggcatccacagcagccgtcagccgggcatggcccagagcatcagtggggcttgtgagtcagggtaaaggaggtctgcagccaagctggagagatggacccccaccctctgcaaacccctgggctcggctcagtacagcccaggggaaggagcccagcgccactgccaggctgaggaggagggactggccggcgaaatgggagccccaaaccccttccgccctcaggcccctcttcctgcctctccatggcactgagagagcagagcaggaaggaaggctggcctcggcagtgagaggcctgtgtgcctccgtgtcagtcctcctcccctgccagaggctgagaggctccccaaaagcacccatcggccaggcttctgagggaagggtccaggctgtggcgggggacctcagccaagggagggagatgtaagtagcacagagagcctggctccgggccagggactgacacgggacagctcaggggcggaggccagggagtgagcccagcgcaggctctcgcagctcagtcaccgtggggacgggtaagcaggagggcgagcgggtcctgcgtgtctgcggcagggaggggaggagagaggcagtggacagcgcgaagccaggtctggtggccttgccctccacctacctcctggccagcttgcacagtagtcacgggtcgtggggtgggtggaggcacacgctcatagccacaagcacagacggacagacagacgtgcacactgaggccaccgaaggactcatcagccagggcagtggggcatggagccggctgctgcccgttcaccctgtgtggctccccaacccccggccagctggcctgtgaaccactcagcctaggagcccacgacctggccagaccacgtctcgtggggagtgtggggggccagctgagtgagcaccacctccacggcctggaacttctggttcttgggagggatagggcacatcttgtaggtcacctcgtcgccctccactggcacgtactccccctcgatgtcagacacatgtacgaagatgtcctcggacccgttctcgggggtgatgaagccatggccctgtgagcgtgagaactgcttacagacgcccttgaacacggggccagctgaggcccgggctgtcgctgaataggtcctggtccgcttggtgggcagagggctgggtaggtcccgaggtgggacaccaccccgctcccagaccctgctgccctccctgtggaaggggaaggtgggccagactggggacttgggggagtggagcgggggcacaactgggggtgacgtcgactctgaagtcatggtggggccagcaggagagcctggtgggctctggggcccaggggccggtgaggggtttggtcgtccttgcgggcagggcccggcctggccctgctctgcggcctcaccagccacgggctccgtctctcctgggcagctggggtccaggcactgcctcctgcggcgtccgcgctctgtctctctctggctcgtggagctggcaggcaggggatgggtctggaagat

SEQ ID NO: 438609 - DNA, 1264 bp, Homo Sapiens
  misc_feature (88)..(136): n is a, c, g, or t
  misc_feature (982)..(1040): n is a, c, g, or t
atttttgctagaggaggcgcggggggcggcgcccgccagggaaaaaagacggcggtgcggggggggaaatggaaattccctacaggtnnnnnnnnnnnnnnnnnnnnnnnnnnnnnnnnnnnnnnnnnnnnnnnnnagaaaaaccgtaaaaggtaatcttttaaggaaaaggatgtaagcgttataaaagaagggggtcataatgagtgatgtggagatggctacatatactttcttaagaatggcacatcttttatcatacagatttcaaatgctttttgggtacataagtgctttaaaagaattgagctacatcaattaaatgacaaatataattagttcttcatcatcacaataagataacaatgattaaaatgttttacctcatatggtgaaaatactaatcttttcattcacaaatttgtaggcaaatgtgtaattaccaaacaaccgtatagtacagaaacaagaaacatattgtaagtctagttatgatagttttttctaatagacaaaattggtcaacaatttattataaaaaacctatacaattaatacttgatcaaaagtctttaaaaatatattcataatgaaatgtatagaaagagacatttcaaagtcatagcagttactactattccaatatttaatcatttttccaataggtctgctggtctatttcaatttaaattcattctcagacccatccacatatcttgctgaatttcatttaaagcaaaagcaagttgcttaatttttgcttccattgtttttttgttcttgcatgtttcttccaaaagttcacgcatttctttttcaatttgatggacctttaaatttgcagaatcaatacacttctgcttttcattggccagctgtgctatttcagcttgatgagcttcaacaattgcatcaacttgtcttttaaaggcatcatccatactatgaagtttttccattgcattcttttgtagttcaatannnnnnnnnnnnnnnnnnnnnnnnnnnnnnnnnnnnnnnnnnnnnnnnnnnnnnnnnnnttttacttgtgtttcaagatgacatagaagttctcctttatcatgccacttccgattcagtgtactgtaagcttttctgatttcttcaagttctacttcctttcctttcaactgttgttttagtttttcttttctttcattgtgcctttccaacttctcaagtacctcatccagttgtgaagatttttcatcaagttgttcttgagtgcatttttctatttctg

SEQ ID NO: 438610 - DNA, 686 bp, Homo Sapiens
gagggggcatggcggatactgtgttgtttgagtttcttcacacggagatggtggctgagctgtggggctcacgaccccgaccccggcccggggggctgccccgggagacgctggccttcagggaggagctggatgtcctcaagttcttgtgcaaagacctgtgggtggcggtgttccagaagcagatggacagcctgcgcaccaatcaccaggggacctacgtcctgcaagacaacagcttccccctcctcctcccgatggcctctggcctgcagtatctggaggaagcacccaagttcctggccttcacctgcggcctcctgcgcggcgccctctataccctgggcattgagagcgtggtcaccgcctccgtggcagccctgcccgtctgtaagttccaggtggtgattccgaaatcctaagcctgcctcgcacctgctgagccgcactgctgcccctggcctcaccggcctcaggagacggtggggccgctgcatttcggggtggtcttgggaatcccaggccctaggggtcacatttgctcaggaagtgggtatcaaattgaggtgggggtgtcagaggaggcaaaggggtcccagctgcggtcaggactgtggtgggattcccgcctcggcagcgtcactgcccagtagctgctcaataaaggctgtgtgtgtggaaaacaa

SEQ ID NO: 438611 - DNA, 1109 bp, Homo Sapiens
ggaccggtccggattcccgggatccgagtccgcgggaagatggcggcgccgctcatccccctctcccagcagattcccactggaaattcgttgtatgaatcttattacaagcaggtcgatccggcatacacagggagggtgggggcgagtgaagctgcgctttttctaaagaagtctggcctctcggacattatccttgggaagatatgggacttggccgatccagaaggtaaagggttcttggacaaacagggtttctatgttgcactgagactggtggcctgtgcacagagtggccatgaagttaccttgagcaatctgaatttgagcatgccaccgcctaaatttcacgacaccagcagccctctgatggtcacaccgccctctgcagaggcccactgggctgtgagggtggaagaaaaggccaaatttgatgggatttttgaaagcctcttgcccatcaatggtttgctctctggagacaaagtcaagccagtcctcatgaactcaaagctgcctcttgatgtcctgggcagggtctgggacctcagtgacattgacaaggatgggcacttggatcgagatgagttcgctgtggccatgcacttggtgtaccgagccctggagaaggagcccgtgccctccgccctgcccccgtccctcatcccaccctccaagagaaagaagactgtgttccctggcgccgtccccgtcctgcctgccagccccccaccaaaagacagcctccgctccacgccgtcccacggcagcgtcagcagcctcaacagcacagggagcctgtcccccaagcacagcctcaagcaaacacagccaacagtgaactggggttggggccccgtgggcagaccagatggcgattttgatggagaatattccctggaggaccgacctggaacctgggatgggctacgtgaagtggcccaggaagggtgaaaggagaaccttcattgccctccggggcctcaccccggaaaccttcttaaacacacattattggggcccctgggccgaatacgagggggaaacggggggaaatttaagccaagaaaccaatttcccggttaacctaagggaattttcccttccgg

SEQ ID NO: 438612 - DNA, 928 bp, Homo Sapiens
  misc_feature (157)..(157): n is a, c, g, or t
  misc_feature (633)..(633): n is a, c, g, or t
  misc_feature (750)..(750): n is a, c, g, or t
  misc_feature (847)..(847): n is a, c, g, or t
agatcatcgagctgctgttccacaagatgaccgacgaccccatgaacaacaaggacgtcaagaagtctcacgggaaaatgtggtctacggcttctacctaattcaccttcaaggaaagcagggcttccagtttttctgcaaaacagaagatatgaanaggaagtggatggagcagtttgagatggccatgtcaaacatcaagccagacaaagccaatgccaaccaccacagtttccagatgtacacgtttgacaagaccaccaactgcaaagcctgcaaaatgttcctcaggggcaccttctaccagggatacatgtgtaccaagtgtggcgtcggggcacacaaggagtgcctggaagtgatacctccctgcaagttcacttctcctgcagatctggacgcctccggagcgggaccaggtcccaagatggtggccgtgcagaattaccatggcaacccagcccctcccgggaagcctgtgctgaccttccagacgggcgacgtgcttgagctgctgaggggtgaccctgagtctccgtggtgggagggtcgtctggtacaaaccaggaagtcagggtatttccccagctcatctgtgaagccctgccctgtggatggaaggccgcccatcangccggccgccatcccgggagatcgactacactgcatacccctggtttgcaggttacatggagaggcagcagacggacaacctgctcaagtcccacgcccagcgggacctacctgatncagggagcggcctgccgaggctgagcgctttgcaataagcatcaagttcaatgatgagggtgaagcacatcaaggtggtgggagaaggacaactggnatccacatcacagaggccaagaaaatcgacagcctcctggagtgggggagtactaccagtgccactcactgaaggagagtc

SEQ ID NO: 438613 - DNA, 3334 bp, Homo Sapiens
  misc_feature (959)..(959): n is a, c, g, or t
ctggaccggtccggaattctcgggatttgtgttgcagaaatccggcaatcgacctgaggacttgcgagccgctcagctcccgggacgtttggagctgctgctaaataatttctgctcagccatgtcgccggctccagatgcagccccggctcctgcgtcgatctccctgtttgacctcagcgcggatgctccggtctttcagggcctgagcctggtgagccacgcgcctggggaggctctggcccgggctccgcgtacttcctgttcaggctcaggggagagagaaagcccagaaagaaagctactccagggtcctatggatatttcagagaagttattttgttcaacttgtgaccagaccttccagaaccaccaagaacagagggaacattataagcttgactggcatcggtttaacctaaagcaacgtctcaaggacaagcctctcctgtctgccctggactttgaaaagcagagctccacaggagatctttccagcatctcgggatcagaagactcagactcagccagtgaggaggacttgcagacactggatcgggagagggctacatttgagaagttgagccgacccccaggcttttaccctcatcgagttcttttccagaatgcccagggccagtttctttatgcctaccgctgtgtcctaggccctcatcaggatcccccagaagaggcagaactgctgctacagaacctgcaaagtagaggtcccagagactgcgtggtgctcatggctgcagctgggcactttgctggtgctatatttcaaggaagagaagtggtgacacacaaaacttttcaccgctatacggttcgggccaagcggggcacagcccaggggcttcgggatgcccgaggtgggccatcacactctgctggagccaacctgaggcgctacaatgaagccacactatataaggatgtttcgtgacctgctnggcagggccaagctgggctaaggcgctggaggaggctggtacaatactgttgcgtgctccccgctctggccggtctttgttctttggaggcaagggagcacccctgcaaaggggggatcccgactttgggatatccccctcgccacccgcagacccaccttccaagagctacagcgtgtgctccataagctgaccactttgcatgtctatgaagaagaccctcgggaagcagtcagactgcactcacctcagacacactggaaaacagtaagagaggagagaaagaagcgtactgaggaagaaataagaaagatctgcaggcatgaaaaggaagcgctggggcagaatgaggaatctcccaaacagggtttgattactatctggcaactgtcagatctgagtttctgtcctaaaaatgcactggcaaattccctactctcataactgacccatttccttatttaaacacacacccacagtgtctatcttagcaattactgagacatgtttagtgacctttccaaatctattatctcttttgttatggatgtttccccagagctaagaaaatctttgtgtggagcagatgcgtggatgtgttgcatggatctcacatagtttatctttgattggatgctgtggtttgaggctgagggctgcttccatgctttcctctattgtgcggcaccctaaggctactcatacggagagtccagggacttgttcttgtctgggctgagagcctcatttctgcatgtgatataatggactcagctcttgatgtgctacttttatctgggtgacaaaataaaaacaatttcatttcaggctttcattcttatgcatctgcttctaccctctgagtactccctagatggatttcacatgtcaggtttttccctaggttcagggtcggagggagaagatggctttcaggtagagttggagctagtggagttgactgtggggactctggatctttgtgagtctgaagtattgcccaagcggaggaggagaaaaaggaataagaaggagaaaagccgagaccaggaggctggggcacatcggactcttctccagcaaactcaagaagaggagccttccacacagtcatcccaggcagttgctgcccccttgggccctttgctggatgaggccaaagcccctggtcagccagagctctggaatgcactgcttgctgcttgccgagctggagatgttggagtgctaaagctgcagctagctcccagccctgcagaccctagagttctgtctctgctcagtgcccccttgggctccggtggctttactctcctgcatgcagcagctgcagctggaagaggctcagtggttcgtctgctgctggaacaggtgctgaccccactgtgcagtgagtaaaggtccccatcctgagtcattttgggtatagagaggataatttggaggttaaagttggcattggctacttggcaatattcccttggtctggttgggtgatgttgggaaaggcaggaggcaagttaaacccatttttggagtttttgcacctagggactctcgggcccggccaccttatactgttgcggctgacaaatcaacacgtaatgagttccgaaggttcatggagaagaatccagatgcctacgattacaacaaggctcaggtcatctggaataggaaggacaagcagagtgggaaggcatcacagatcctggctagatcctttctacttcttgcagttttaccaaagataacttatagggtcttatatttgaaatcctccaggtgccaggaccattgacaccagaaatggaggcacggcaggctacacggaaaagggagcagaaggcagcccggcggcaacgggaggaacagcagcagaggcagcaggagcaggaggagcgtgaacgagaagagcagcggcgatttgccgccctcagtgaccgagagaagagagctctggctgcagagcgccgactcgctgcccagttgggagcccctacctctccaatccctgactctgcaatcgtcaatactcgacgctgctggagttgtggggcatccctccaaggcctgactccctttcactacctcgacttctctttctgctccacacgttgcctccaggatcatcgccgtcaggcagggaggccctcttcctgatctcttacagctctacctggggccaactcagggacctgagagggcacattcacagcagccctaggttttttcttccccgtgaaaccagagatgatttggaagatgggggtgaaggacactcgggaactagggcaaagacagggctagaggtatgtggagctggtactgtctctggaattttaatcacaataaagttggccaaaagagatagg

SEQ ID NO: 438614 - DNA, 857 bp, Homo Sapiens
  misc_feature (727)..(727): n is a, c, g, or t
  misc_feature (761)..(761): n is a, c, g, or t
gtaccaccagatctaaaaggcttaactcaccttatatagtgtggcttcattgtagcgcctcaggttggctccagcagagtgtgatggcccacctcgggcatcccgaagccccctggctgtgccccgcttggcccgaaccgtatagcggtgaaaagttttgtgtgtcaccacttctcttctgtagacagcacagactcagtactggagaccagctggtgctccctggctaacaggatccactccatccttacccccatgcagcaccctctcacccttgaaatatagcaccagcaaagtgcccagctgcagccatgagcaccacgcagtctctgggacctctactttgcaggttctgtagcagcagttctgcctcttctgggggatcctgatgagggcctaggacacagcggtaggcataaagaaactggccctgggcattctggaaaagaactcgatgagggtaaaagcctgggggtcggctcaacttttcaaatgtagccctctcccgatccagtgtctgcaagtcctcctcactggctgagtctgagtcttctgatcccgagatgctggaaagatctcctgtggagctctgcttttcaaagtccagggcagacaggagaggcttgtccttgagacgttgctttaggttaaaccgatgccagtcaagcttataatgttccctcaggctcaggccctgaaagaccggagcatccgcgctgaggtcaanacagggagatcgacgcaggagccggggctgcatntggagccggcgacatggctgagcagaaattatttagcagcagctccaaacgtcccgggagctgagcggctcgcaagtccatcccgggaattccgga

SEQ ID NO: 438615 - DNA, 1159 bp, Homo Sapiens
  misc_feature (882)..(882): n is a, c, g, or t
aaaattaggctaggtacgaggctggtgttgaatcggcacgaggctcatggcctgcagctgtgggcactttgctggtgctatatttcaaggaagagaagtggtgacacacaaaacttttcaccgctatacggttcgggccaagcggggcacagcccaggggcttcgggatgcccgaggtgggccatcacactctgctggagccaacctgaggcgctacaatgaagccacactatataaggatgttcgtgacctgctggcagggccaagctgggctaaggcgctggaggaggctggtacaatactgttgcgtgctccccgctctggccggtctttgttctttggaggcaagggagcacccctgcaaaggggggatccccgactttgggatatccccctcgccacccgcagacccaccttccaagagctacagcgtgtgctccataagctgaccactttgcatgtctatgaagaagaccctcgggaagcagtcagactgcactcacctcagacacactggaaaacagtaagagaggagagaaagaagcctactgaggaagaaataagaaagatctgcagggatgacaaggaagcgctggggcagaatgaggaatctcccaaacagggttcagggtcggagggagaagatggctttcaggtagagttggagctagtggagttgacttgtggggactctggatctttgtgagtctgaagtattgcccaaagcggaggagcgagaaccacggactcagaaggagaaaagccgagaccaggaggctggggcacatcggactcttctccagcaaactcgagaagaggagcttccacacagtcatccccaggccggtgctggccccttggggcctttggcttggattgagngccaaagcccccgcgtgtcaggccaaagagcccctgggagatttggcctgggtttgctcggctagcacagcaggatggggaaaatgttagcaggcgcgaacaaggtcgaagaatagtccccagagcccatggagaaacccgcttagaagacctgggcatatggtccaagaggcacccttgggacccgggagagggttaaatcacactgagattgcagagatgagactgagacaacacactgagagccataggcggtgcaacaagggtggtagaccag

SEQ ID NO: 438616 - DNA, 749 bp, Homo Sapiens
  misc_feature (46)..(63): n is a, c, g, or t
  misc_feature (107)..(142): n is a, c, g, or t
  misc_feature (432)..(432): n is a, c, g, or t
  misc_feature (656)..(675): n is a, c, g, or t
cagttttttaaattacaaagtaataaaaagctttgctctttaattnnnnnnnnnnnnnnnnnnggggaaacagaggtaaataaattaggaaaacacacacacggagnnnnnnnnnnnnnnnnnnnnnnnnnnnnnnnnnnnnggtgttaactaggaaggatgggttaatccaaaacccagccctgactccagggggtcaatggaaaagcccagcacgggaagtcagccactgtcatctcagagtgggtggggctgtgcgtatctcctggattctgaggctcggaaaactcggtgggaactgccttcaactgactacaccactccctgatgatgcttgagggccggctttggctctgggacctgtcacttctccgacacggacccgaccccgttcctctcccaggcaggtggtgggtgggggcaggaacaggnaggccgggcaggccctggcgtctggctcctgtagcctggtgttgtcaggggagcatctggcagcctgaaggttgggggcagcgggcaccacaagggggcaagaatcctcagtgctgagggcatctcatcttcttgccattggcaaagaaatcaaagaaccaaactccatcgtcggttttgtgctgggtttttttgttgttcttttgagtggtttattttcgccnnnnnnnnnnnnnnnnnnnnaaagaaaatacagtgaagccactagaagggagaagggaaaagacaggtgaggtacacagctgtctctggctacc

SEQ ID NO: 438617 - DNA, 786 bp, Homo Sapiens
caacccaaagcggggcgggggacgggacatttcccccaaccaagtgaaggcttaaaggggtaaacctagaacaaccgggcgaagctgattcccgtgaagcctctagcctccggaaggtcgagccagcagctgtaagttcctggcaaatccgctccaaaacaggcagctctgagccccggattgtcctctcctgttcccaggaagaaatcatggtaaaagccatattctgtacttggacctctgcagagaacagcacctaggaattgttcagctgctgcccccaggacatgggtgctggagtgccagaacactgctttcccctctggggaatcgaatgtcagaaatctgaggtcagaatctgtctccaagggccgctccagatcataaggttctccattcacttgagcagccactgcagtatctgccagtgttgaactgatctgccgggctagttggtagggggttgtgttccatgccacagcatcaattttctggcctccaggaagtgatatcttaatagtccggggttccttctgtgccatgcttgctaatctctttacctgagcagcccacagctcctcaaaaaggccaagccgctctgccaaccagcgtggaggggtcgacacaactgccgtgtgtagcctgcaagcctgtaaaccttggagccggagacaccgccacctctgatacagggccatgttccttcacaccagtgcctacatcctcaaacagcctcgtgccgattcgccacccagcctcgctacctagccgtaaggttttccaccc

SEQ ID NO: 438618 - DNA, 828 bp, Homo Sapiens
  misc_feature (81)..(89): n is a, c, g, or t
  misc_feature (384)..(384): n is a, c, g, or t
ccctgaacccttggtggtttgttgtgttgcaccgccccgcggccctttccacctttccccagcccctggctccaatatccnnnnnnnnnccttttcccattttctccccccacacacttgcaccataacccccctcccaccgtcccttcggctcagcaccctccagtacctctgacccactcccccaggggatggacaatgaagcaggtagcaggggcaggacataggaaggagaaccccccagagatatcagtgcaggggggaaagaagggggttgctgggcttgagtccctgggtgggaatccccaagtcactgacactcagggatcccaggggtggtgaggtgggaacctggcctcccagcagggggtgaaatgaagccgngaggtccaggctcctgtcgagtccgggggagggtggggggcgcccaactagctgtccttgagaagcagcttctcctcagggcagcggaaggggccaggggggccgggcagctgccagccgggcacaagcttcgggtgagagctggcggcaggagcgcaggtctaggcggcgtagacgagggcagcggcggaacagcgggaggcagtggtccgttaggcggtggcaaccagcaagattgaggtgccccagggtctcgcggagtggggacgtgggggccgtgaggaggtgaacactggggtccccgacgtgggcgcagtggctcaggtccagggcgctcagctggtttggtgtctggtggaggcagcagccactcccggagctgggagtctttaacatcctcgatccagcggaggtccaggagccgcagggctggcagtggggctg

SEQ ID NO: 438619 - DNA, 524 bp, Homo Sapiens
ttttttcccggctggaagattttgagttttatagcaaaccgtattgtacagacccggggcccaggggcccagcccggctgggtcccccgcttgcccctcgccgggctgcctcttccctcccccaagcggccccattctcaagcctctcgctatccccaggccccacccctccggcctttggtccgcccagccctccccccacccgcgcacctccctgttacctgaggtatgtggatagatctcccctcccctacatggtaagccccggccccccggaggcctgcgcggaggggcgggacctggcccggctcatccccggggtcccgaagccccaccccgcgctcgaggaaggggcagggaaggagggccagcagagtctgttactaggttcccatggcaactaagagggggccatttccagccttagcactggcatcgggaggtgtccgttggctgctatttccatggcaaccaggagtggcagttccctgggcaatgggatacaagtttccatgacgatgaaa

SEQ ID NO: 438620 - DNA, 1147 bp, Homo Sapiens
cgggaacaagtgtttgagaaagaggatgtggccacatggcggccgtgggcctcacaatcgtataggaaggaatgggggcaagatcagcgcgaaggtcccacagctttcgtgcctccctgctatctactggcatgatcctttaagctgaggcccagccccaggtgcagagtagcttgcaaaaccgcaagggacagactgatggggaaaatccctgggaatgtgggagctgccccaaggcccagcccagaggaccctgcgggcaggaatctgaactctgcctgagagtggccactggaagtggctccagccaggggatggggggatgaggtctgtaggcccctgcggcctcttacagaccccggagggaggcagtgcttgcagtgagcggtggctaacaccagtctcacacagcctgcagctccccctgcaggcgattcagttcctctagttcctgcttgtagcggtctgtcttgtgtgccaccaaggagcggtagaaatgcagggcaaaggccacaaacacgagccccacgggtaccatgatggctgtggaggccatggctgcttgccagcctggcccatgggccccaccaccaccacaggcttgccggggtgggcaggctggctcagcctgggacggtgctgcagacgcagaggaccgtgggagattggaagctggactaagggaggtagccactggtgccagagtcccgggcacccgggatgtgggcaccatgggggtcggtgtgtccaagggagccccaatgggcacaaacttgacccaaccaaccaggacaacttcagcaaggaagagaaaggtgcccagggcagtggagaagccccaggccagctccacgtagcggtgcagtctctggtgtggcgactggtggacagagttgaggttgtggatgttgctcacagcttcaatgtggggcagcagacacgtggagaccatgagtgcaaagaggtgcacagccaccagcacggtggtgcaggcactgaaggccaccagcaggcctggtgggtactcgtggtcactctccagctgcacctccaccatggccacctgaggtatgtggatagatctcccctcccctacatggtaagccccggccccccggaggcctgcgcggaggggcgggacctgtcc

SEQ ID NO: 438621 - DNA, 704 bp, Homo Sapiens
  misc_feature (674)..(674): n is a, c, g, or t
  misc_feature (681)..(681): n is a, c, g, or t
cattgcaggacatagtatccagacatatttctgagagccatgaaaaaggagaaaatgtaaagtcagtaaactctggtacttggatagcatcaaactcagaacttactcctagtgagagccttgctactactgatgatgaaacttttgagaagaactttgaaagagaaacccataaaataagtgagcaaaatgatgctgataatgctagtgtcctgtctgtatcatcaaattttgagccttttgcaacagatgatctaggtaacaccgtgattcacttagatcaagcattagccagaatgagagaatatgagcgtatgaagactgaggctgaaagtaactcaaatatgagatgcacctgcaggattattgaggatggagatggtgctggtgcaggtactacagttaataatttagaagaaactcccgttattgaaaatcgtagttcacaacaacctgtaagtgaagtttctaccatcccatgtcctagaattgatactcagcagctggaccggggcattaaagcaattatgaaagaagtcattctttttttgaggatctttctcaggagcacatggatgaagtatgctcctcgcagcttctaacttcagtaaggcgcatggttttgacccttaccagcaaatgatgagagcaagagtttgtaagtccttcataancactggnaagatatacaggatcactggcaa

SEQ ID NO: 438622 - DNA, 730 bp, Homo Sapiens
  misc_feature (13)..(13): n is a, c, g, or t
  misc_feature (41)..(41): n is a, c, g, or t
  misc_feature (51)..(51): n is a, c, g, or t
taagggcaaccancccttaagtgaaacttgccatttgtttntgtttctttntaagtctccagatcttgctaggacacttcttccagaccaacagtcagatagttgtggcacgtgatcctatttgaaatagaggtggtttaaatcagccaagcttggtgatctggaggtctccatttatctttatggtgtcaattgcagataacgtttgaatgcgatggtaaaaatcaaaaagttggtgtccatccacaaacactcggaaacgtgggtgctcacaaagaatttccaccctgaatggctggtctggaatgaatggaaagtaagggattgctgactgttcttcacccctctccccagatatacaagaatttctgagtagctgccgatctgtgaacacagctttgagttcgattgccacatcggcaggagggtcttctgagtccccacaggtcaagctgattgcaaagctctctgggttgaggtctacgatgcccatcactaacaccttcttgcctggtctcatgccacctttaatgtgcccacaaaatggaactatcagtcgtgggaagtacacgtccgcttgaactggagagctcaaagagttgtttaaatggccatcatctagtttcaccacggcatcgctgtcggccactgatcccgccatcttcttgcccggcgcggcggggtacgtgggacgcggcgcgcgggcggggatcccggggctgtcctgccc

SEQ ID NO: 438623 - DNA, 2041 bp, Homo Sapiens
  misc_feature (1835)..(1835): n is a, c, g, or t
  misc_feature (1863)..(1863): n is a, c, g, or t
  misc_feature (2027)..(2027): n is a, c, g, or t
tagcgaggcctgggtggcgaattcggcacgaggggcagtacaggcggcggtgcgcactctgcggcggcctctgcgcctcgggcgggcgggagagagaggccgcggccgccagcgtggggatgtctaggagctcgaaggtggtgctgggcctctcggtgctgctgacggcggccacagtggccggcgtacatgtgaagcagcagtgggaccagcagaggcttcgtgacggagttatcagagacattgagaggcaaattcggaaaaaagaaaacattcgtcttttgggagaacagattattttgactgagcaacttgaagcagaaagagagaagatgttattggcaaaaggatctcaaaaatcatgacttgaatgtgaaatatctgttggacagacaacacgagtttgtgtgtgtgtgttgatggagagtagcttagtagtatcttcatctttttttttggtcactgtccttttaaacttgatcaaataaaggacagtgggtcatataagttactgctttcagggtcccttatatctgaataaaggagtgtgggcagacactttttggaagagtctgtctgggtgatcctggtagaagccccattagggtcactgtccagtgcttagggttgttactgagaagcactgccgagcttgtgagaaggaagggatggatagtagcatccacctgagtagtctgatcagtcggcatgatgacgaagccacgagaacatcgacctcagaaggactggaggaaggtgaagtggagggagagacgctcctgatcgtcgaatccgaggatcaggcatcagtggacttatcgcacgaccagagtggggattccctcaacagtgatgaaggagacgtgtcttggatggaggagcagctgtcctacttctgtgacaagtgccaaaaatggataccagccagtcagctgagggaacagctcagttaccttaagggtgataatttttttaggtttacttgttcggattgctcagcagatggcaaggagcagtatgaaaggctgaagctgacatggcagcaagtcgtcatgttggcaatgtacaacttgtctctggaaggaagtggacgtcaaggttatttcaggtggaaagaagatatctgtgcttttattgagaaacattggacttttttactagggaataggaaaaagacgtctacctggtggagcaccgtggcaggttgcctcagcgtgggaagtcccatgtacttccgttcaggtgctcaggaatttggagagccaggatggtggaaacttgttcataacaagcccccaacgatgaaacctgaaggagagaagttgtctgcctctactttgaaaataaaaagcctcaaaaccaactttagatcccatcattactgttgagggacttagaaaacgagcaagtcggaatcctgtggaatctgccatggaattaaaagagaaaaggtctcgaactcaggaagcaaaagacattagaagagcccagaaggaggccgctggctttcttgacaggagcacatcttctacccctgtaaaattcataagccgaggccgcaggccagatgtgattctggaaaaaggcgaagtgattgacttttcctccttgagctcctctgaccgcaccccgctgacaagcccatctccttctccttctctggatttctctgcccctggtacacctgcctctcattctgccacacctagcttgctttcagaagcagatctgattccagatgtgatgcccccacaagccttgtttcatgatgacgatgagatggaaggcgatggagtcatagacccagggatggagtacgtcccaccccctgctgngtcagtagcttctgggccagtggttggngggcagaagaaggtcagaggcccctgacagataaagcagggagtagagagtgagggaggaaaacccgacaggatggatattgacagtgaagacacagattcaaacacatctttgcaaacaggggctagagaaaagaaggaagcctcagctggagaaggacacanagccgaagagccca

SEQ ID NO: 438624 - DNA, 603 bp, Homo Sapiens
gtttgtgtgttttgtttccaattttctcaattttattgagttaccaccaaaagtgttaatttaacaatgtgatagaggttgacagtacgtttcattagtacaaacatgcctatgttttatataaatttatagctgatcaactagagaataaatataattatccttttatttaggtctcttttacattcacgtttctttcacaggttggaaaaacaaaccttcacacaggaattgacaaatcaaaggaattgagaagctccttactggctggtatccatttttggcacttgtcacagaagtaggacagctgctcctccatccaagacacgtctccttcatcactgttgagggaatccccactctggtcgtgcgataagtccactgatgcctgatcctcggattcgacgatcaggagcgtctctccctccacttcaccttcctccagtccttctgaggtcgatgttctcgtggcttcgtcatcatgccgactgatcagactactcaggtggatgctactatccatcccttccttctcacaagctccggcagtgctttctcagtaacaaccctaaagcactgggacagtgaccctaatggggcttc

SEQ ID NO: 438625 - DNA, 996 bp, Homo Sapiens
  misc_feature (799)..(830): n is a, c, g, or t
caagccaggtcaagtgttagaacccaggatgattacagccatgggaaaatataagtatccccatatacctcaccccataatccaactctggtccccacgttttctggaccaggtcaaattaggtgatggaccatgggaccaagggattcaccccccatcgtcatcttcccattggtaaatggtgacttggagaagacactctcagatgatggttttctccaaggtaataattatgaagatcatcaaaggcctggaatagctttcttccactggtgccatctgaagaagagccattttggtgatcttgaaaaaacttaaatgctttcacagtgcccccagtgttagcgaacagtgttcgtagatcctcttctgctactgattgagggatattagataggtgaagggtggcagaaggaggaaaaatgttttgaaaatttttggatccaggtttcttaaaacgatgcaatggggaattaccaaaatcttttgttagcccttgatcatcaagtccctctcgaggtagctgtacagtctgatgtttagacagagtaacacgaataatttttccatacattttctgtccattaagatgattcatggcaagttgtgattggtttccatcagccatctgtattagagcgctgtctttcttattgtacaaaatcttcacacgctgcacatctccataaacaccgaagagggtaaacagacttttgggcgtaaccatctcttcatttaaattgttaaccaacaggactgtattgccaccagctgagactccaggcatacccactcggcnnnnnnnnnnnnnnnnnnnnnnnnnnnnnnnntttggaatggccaaaggactcagagctcctggaacagctaagagggatgtctccttggcaaatgctgcagcaatagctgggtccaatgcaggttgtccatccccagatggaagatcaggtcgagtataatccctggtgccgaattcctgcagcccgggggatccac

SEQ ID NO: 438626 - DNA, 708 bp, Homo Sapiens
tcacacgctgcacatcttccatgtacctcgaagagggtaaacagactttggggctgtaaccatctcttcatttaaattgctaaccatcaggactgtattgccaccagctgagactcccaggcatacccactcggccagcagcagctgcagcaagctgctgcagcagcatttggaatggccaaaggactcagagctcctggaacagctaagagggatgtctccttggcaactgctgcagcaatagctgggtccaatgcagtttgtccatccccagatggaagatcaggtcgagtataatccctacttttatcattgttgtattttacattcaaattcacaagtttggaaaaatcaatccttagggtacagcaggcattataaatattctgaccatctagggctagttttgcttgttgagcatttactggatcaccatactggagcaaagcttgaaactggttattttttgtaaatgtgattatcttcaatacagcaccaaacttagaaaatatttggtgaagaacatcaagtgttacagggtagtacatgttgtcaataattattctaagtactggactctgggctggagtcactgcactctcgctaactgtggtgccactaagaggagtatttgctgtctggacagctgtcacagcttgaagactgcctgagcacgttggtttaatgtattatctgtctttagttctt

SEQ ID NO: 438627 - DNA, 810 bp, Homo Sapiens
  misc_feature (44)..(128): n is a, c, g, or t
tgaagcttgactgtaaccatgttttttgctgtttaattaatgtnnnnnnnnnnnnnnnnnnnnnnnnnnnnnnnnnnnnnnnnnnnnnnnnnnnnnnnnnnnnnnnnnnnnnnnnnnnnnnnnnnnnntcaaactctggtccccacttttctgaacagtcaaataggtgatgacattgaacaatgtgattcacccccaatcttcatcttcccattttttaaattgttgacttggagaaagacactctcagatgatggttttctccaaggttataattatgaagatcaatcaaggcctgaatagcttcttccactgttgccatctgaagaagagccattttgtgatctctttgaaaaaacttaaatgctttcacagtgcccccagtgttagcgaacagtgttcgtagatcctcttctgctactgatggagggatattagataggtgaagggtggcagaaggaggaataatgttttgaaaatttttggattcaggtttcttaaaatgatgcaatggggaattaccaaaatcttttgttatgcccttgatcatcaagtccctctcgaggtagctgtacagtctgatgtttagacagagtaacacgaataatttttccatacattttctgtccattaagatgattcatggcaagttgtgattggtttccatcagccatctgtattagagcgctgtctttcttattgtataaaatcttcacacgctgcacatctccataaacacctcttcatttaaattgctaaccaacaggactgtattgccaccagttgagactccaggcatacccactcggc

SEQ ID NO: 438628 - DNA, 1216 bp, Homo Sapiens
  misc_feature (15)..(15): n is a, c, g, or t
  misc_feature (34)..(34): n is a, c, g, or t
  misc_feature (36)..(36): n is a, c, g, or t
  misc_feature (46)..(46): n is a, c, g, or t
  misc_feature (53)..(53): n is a, c, g, or t
  misc_feature (60)..(60): n is a, c, g, or t
  misc_feature (67)..(67): n is a, c, g, or t
  misc_feature (97)..(97): n is a, c, g, or t
  misc_feature (101)..(101): n is a, c, g, or t
  misc_feature (1137)..(1173): n is a, c, g, or t
ccaccccaccttcanaccttgtgggtcaaaacantnatttcctcanatttgtngtcttanaaaactntgcgaggtagtggcagtggattacctcccnagantttgcctcctccagagcttctctgtatcgggaggccaggcctggggtcttcttaaagaccctggccagaactccatgatttgcatcttggtgatttcgcggctggcccggagccccaaaagaactcgtattcgggcggctccacgtatgggacgcgctggtacttcaggtaattcatttggacgaactcctcagtgatgagttccgcacgtccccgaaggtggagtgcttcttccagggccgcagccccaggatgcgcagcacgttccagacggcgctctctctggcgccgcggcccttcacgtagatgaggctcaggatcatgagcaggaggcctgtcatgggcatgcggttgctcagcgccaccctgtccagctcctcgggctccagcgctttgaccagcgcaaactccatggtgtgcaggctggttagcctcaggtgcagcccgaacacccgggcgaggatgaggctggtgcgccggaggatgctcctgcaccacttcttgtagctgccgatgacatctttcaccatgtctggaaaccagatgatcatcttcttctggtccttgaccagcacgtaccacatgagctcgtgcgccttctgcaccagctgcgccggggctggcggtgccgggcccggctgggccgcgctcggggcctggtgggcgcggccctcctccgcagcctgctgcagggccttcgggtcgccctcgtcgttcggggcctggggaggcggcgcggcctgcggagcggccgtcgggcctagaggagggctctgcggctctgccagggtcgcggacggaggaaccccctccgaaaccccagggctgctgtgcacctcggagttgggggcctcggctgcaaagttagggtcgctcagatccttactttgttctgacatgtctgcgccgtctggcaagggcagggcctctgcgtccaggagctcttcgagcctgcgctccctccgcggattcctggagaggaagtgcgcgttgctccgctctcgacgaattcgagctcggccgatttggcctgatnnnnnnnnnnnnnnnnnnnnnnnnnnnnnnnnnnnnncgccgccaccgcatacagcgcattccccatatagtcttacttc

SEQ ID NO: 438629 - DNA, 1202 bp, Homo Sapiens
aaatgattgtatcacaagaatctttaatgtttactttaaagttgactcacggtggggttgtatatgtgtttagtaaagtgtgccaagtgctcacactgagaccagtccagttcaaattagtgtactccacgagggtgttttctgtgcccagcaaggtcatgaagggccttgacttttcttggttaggccggctttgctggtgacttcttccaaactctgcaggagcagtctaccccaacacacatcatcagtcccatataaaagaataagatggaaactttctcaatgtatttcatcagtttagcacatctctggtacaaaaatccaagaaaggtagcacaaaagcgaaagcaccaaccaagcttacatataaacaaacatgcatacatcctaaatactacacaatagtacccaaatgaatacaacattgcattaaaggtataaaagcactgtactgaaaacttaaaagttacacgtgaatactgcactgtaaatcctgaatactataatgacccacccccacccttccacagccctggtgagggtcagaaaccattcatctgcctccagactttgctagtcctcagagacactgctgcgagggtagtgggcagtgggattagcctcccgcagagctctggcctcctccagagcttctctgtatcgggagggccaggcctgggggtctttcttaaagaccctggccaggaactccatgatttgcatcttggtgatttcgcggctggcccgggagccccaaaagaactcgtattcgggcggctccacgtatgggacgcgctggtacttcaggtaattcatttggacgaactcctcagtgatgagcttccgcacgtccccgaagttggagtgcttcttccagggccgcagccccaggatgcgcacacgttccagacggcgctctctctggcgccgcggcccttcacgtagatgaggctcaggatcatgagcaggaggcctgtcatgggcatgcggttgctcagcgccaccctgtccagctcctcgggctccagcgctttgaccagcgcaaactccatggtgtgcaggctggttagcctcaggtgcagcccgaacacccgggcgaggatgaggctggtgcgccggaggatgctcctgcaccacttcttgtagctgccgatgacatctttcaccatgtctggaaaccagatgatcatcttcttctg

SEQ ID NO: 438630 - DNA, 854 bp, Homo Sapiens
  misc_feature (551)..(551): n is a, c, g, or t
  misc_feature (607)..(607): n is a, c, g, or t
  misc_feature (635)..(635): n is a, c, g, or t
  misc_feature (661)..(661): n is a, c, g, or t
  misc_feature (665)..(665): n is a, c, g, or t
  misc_feature (741)..(741): n is a, c, g, or t
tccacaacggtctcaagatctgcgagaagtttgggcccaatctggacacgtgccctgaaggcaccatcctgggactgcggctggacagctctggggggctgcatcttcatgttaatggggtggaccagggggtagctgtgccagatgtgccccagccctgccatgcgcttgtggacctctatgggcagtgtgagcaggtgacaatcgtgaaccctgagccaggggctgccagtgggaaaagtgctggaacccaaggggacatggagaaagcagacatggtggacggtatcaaagagagtgtgtgctggggtccaccacctgccgctagtcctctaaagagctgcgagtaccatgccctttgctctcgcttccaagaactcctgctgcttcccgaagattatttcatgcctccgccaaagcgaagcctgtgctactgtgagtcttgccggaagctgcgaggagacgaggcccacaggcgcagaggggagcctccccggggatatgcactgccctttggctggtgcaggttcaacctcagagtgaatccccgnctggagggctggacactaaccaagaagtggcacatggcatatcacgggagcaatgntgccgctgtacggagagtgctggaccgnagggagctgggagcaggtactgcctncatnctgagctgccgtccttttgaggaagaacctggggtaggggttcaaggagcctggcgagaactggcacctcctcggnaggagcagccccctcctgggctggtttcccccttcttaaataagctggggcggaaaccctgcctccaaaggccaatccgggcacccaaatcccagcggcgcaccagcttaagg

SEQ ID NO: 438631 - DNA, 946 bp, Homo Sapiens
tgggatggctggacagctctggggggctgcatcttcatgttaatggggtggaccagggggtagctgtgccagatgtgccccagccctgccatgcgcttgtggacctctatgggcagtgtgagcaggtgacaatcgtgaaccctgagccaggggctgccagtgggaaaagtgctggaacccaaggggacatggagaaagcagacatggtggacggtgtgccagcccaaagggacccagctcctgcccctactcccccgccctcacccttctagcccagctcctgtgacctgtgcccctctgctccctcaggtatcaaagagagtgtgtgctggggtccaccacctgccgctagtcctctaaagagctgcgagtaccatgccctttgctctcgcttccaagaactcctgctgcttcctgaagattatttcatgcctccgccaaagcgaagcctgtgctactgtgagtcttgccggaagctgcgaggagacgaggcccacaggcgcagaggggagcctccccgggaatatgcactgccctttggctggtgcaggttcaacctcagagtgaatccccgcctggaggctgggacactaaccaagaagtggcacatggcatatcacgggagcaatgttgccgctgtacggagagtgctggaccgaggggagctgggagcaggtactgcctccatcctgagctgccgtcctttggaagggagaacctggggtagggttcgaggagcctggcgagaactgtgcacctcctcgggaggagcagccccctcctgtgctgctttccccctcccttcaatatgctggggcaggagaccatggcctccaaagtggaattccgggacccgaaatccaagcgaaagcgccaggctcaggtggcagtacaggtgagtgtgcgccaggatactaaaccagggaccccatcgatgccttgcaga

SEQ ID NO: 438632 - DNA, 407 bp, Homo Sapiens
  misc_feature (23)..(23): n is a, c, g, or t
acacggcaaacattgctcccgtnatatgccatgtgcccacttcttggttcattgtcccagcttcccaggcggggattcactctgaggttgaacctgcacccagccaaagggcagtgcatattcccggggaggctcccctctgcgcctgtgggcctcgtctcctcgcagcttccggcaagactcacagtagcacagcttcgctttggcggaggcatgaaataatcttcgggaagcagcaggagttcttggaagcgagagcaaagggcatggtactcgcagctctttagaggactagcggcaggtggtggaccccagcacacactctctttgatacctgctcacactgcccatagaggtccacaagcgcatggcagggctggggcacatctggcacagctaccccctgg

SEQ ID NO: 438633 - DNA, 854 bp, Homo Sapiens
  misc_feature (53)..(53): n is a, c, g, or t
  misc_feature (86)..(86): n is a, c, g, or t
  misc_feature (123)..(123): n is a, c, g, or t
  misc_feature (126)..(126): n is a, c, g, or t
  misc_feature (146)..(146): n is a, c, g, or t
  misc_feature (227)..(227): n is a, c, g, or t
  misc_feature (230)..(230): n is a, c, g, or t
gccttccgcaagcaggctgcgttttcagctcttgcactgttgctggctgtctntgcctgcagcaggggcagcttctcctccagttntggttctctttgactcggccatcaccagcggcttcanctncctgctctccccctcttctnccaggactggcgatcagggatggacacctccttcctccaagctgctgatgaggtatttttcctctcagcctctgcggggcnccngggcactggggccttccactcatcttcagccttgctgtggtcttgtaccttggtgcggaaggcagccaactcccgttgggccgaggctaaggcactctgactgtgccctagctcctgggccttctcctctaactggccctgcagagtctccagagcactgtcccgctcagcccgggatggcccgctcagcctcgaggctgcgttccaggctgtcagcctgctcctgctgcttctggcattgctgttccagcttgtctcacctctgcccgcagtgcctccagcttggggcctgttggctctgtcctgccagccgcctcggacttgggctcctgagccagcatgcgtgctccttttctttcttagccagctgttccttcagttgcttcacggtttgccgacgttcctccagctcttttatctgggctgcctccagaccacgaagcttggccaactcctggtccttgccttccttttccgtcagggcatgagccagtgcctcttgcagggtagcgaactccacacgctgctcgttgagggcgttctgcagccgcatctcaagctctgctctggccgccttctccagggcaaggtcagcctgggcacggccccgctcctgggtcagcc

SEQ ID NO: 438634 - DNA, 1045 bp, Homo Sapiens
attaagaacccaaaaggaaatttatttacaaatttcttactggcccagtagggtcagccaagaaaacagtttccccggaaaaatcaaactaaccccccccattaaccagtcttagaccagttcatccaagggaatgaccagagcagctcctgactgttagactagaaagatgtccttctgcgtatccttccaattgtacaagaatttacatttaaccaaaggggtctgtgcaagtagcaccgtgggtacttgtagtctcaattgagtcatagcttctagagtgctgttccctgtataccttacatagctgttttcaccacttttgttgatttctttgtcagcttctttcccttttgtctcctcctttgtcagttttgtctgtgtctgttgattccttcctctttgttcgttctccactatcagctcctttctctcctccattcttggtgttctcttcttctccactgtcagctcttttttctcctccattgttgactcctttctctccttctttgtcctgaacactgatataaacagctttgttatagccttcccggttccgagcaatttcaatggcaaagaattgtatcctgggggcaaagatggtgttttcctcagtgtagccctgagaacaatctagtcgcagcaaagtaccatagttgaagtcttcaacaatcccattaaacttcaagcagaatggcctccacttctctttggctgattctgacttgagttcttctgggtccaacacatctatcctaagggtctcaaaatttttccggaactcagagtaaatttggtcatctactttggtgagtttcaggaactgtgggtcaactgatgaaatcagcttgtaatagacttcagcatgctgcattgctctcatggcccaagccatctcaatgtcaggatcgttgccatacgactctgctgggagagaaagcgcatgtgccacagacaccaactccccggaaaccggctcatcagttccactggtggccgccatcttgcaacccccgaaagcgtggctccttccgcagctccc

SEQ ID NO: 438635 - DNA, 945 bp, Homo Sapiens
ccacggctggtacggtccggaattccgggatatcgtcgacccacgcgtcgggaatggataatgggaaagaatggagagctataaaaatgtgggggaggacacttggataggggagatgaaagtccctttgtcctccatcacctgcctcaaacttcctcttgcagtccccggtatcctctgtaggttgggggcttccattcctttaccgttttaaaaaaatcttccgtagctcccgattcttagacctctatctgttttcgtcttttccttctatgaatctcacctctctcaccttcttcaggtttaaatactccaattttccctttctctaaacttagaaatttccatgcatcaccctcttctagaattcatccctcaccattccttatataattgatttattgtaaagactcagaaataaatcacacattctactaagaaaacttgagaacggggagctctgggggtggaaacagtattacgggtaacaagacttacaaccttggacggcagcattactcagaacgatgacagaaccaactcagcggatggggctgggaagaagacaggtcctttctctgtacttcctagacaagctccattattccctaagggaatcagtgttgtgtctgtctacttatcacataaagatataaaatgggccagcgtaatttccacaaaccgtcttcacctttatctaggaaccacgaaactctcttgacaactcttactcaaccggggaatgcagatcaatccccatatgggaatggcgcacacaacgttacgcttgcttaccccgtggatagcaaatccatatacagccagaataccctgggggcattcacggtcgccactgcaacaattaacgcgtcgagataactacgggggcttcatagagttacacacacgtttaatcacgcgggacattggcagagttcgcaatca

SEQ ID NO: 438636 - DNA, 1345 bp, Homo Sapiens
  misc_feature (1088)..(1088): n is a, c, g, or t
  misc_feature (1190)..(1249): n is a, c, g, or t
gagaagaggtggggttctttttaagaggaaggggcgcaaaaagggggaccattggtgttttccgcccgcgcccaatccccataaaattgtttctcaacctttcagaaaaaaggcgcccctcccaaagttaaaggtattttggccccaaataatgggggccgcccccaggagggttcccccttttcaaattttttcttaaggaggaattttggaatttattttcggagtcttttccaataaatgcaattatattaaggaatgggtgagggaatgaattctagaaagaggggggatgccagggaaatttttaagtttagagaaagggaaaaattggagtatttaaacctgaagaaggtgagagaggtgagattcataaaggaaaagagaaaacgtgaggtctaagaatcgggagcaggaagatttttttaaaaggtaaaggaaggaagcccccaccctacagaggataccggggactgcaagaggaagtttgaggcaggtgatggaggacaaagggactttcatctcccctgttccagtgtcctcccccacatttttatagctctccattctttcccattatccattcccaccccactcccatcctcacacaagcgtcctcatcagctgcatgcaggcagctgttcccctcacctggcagtggggcttgggggtgctccactggccctgactacagatgctccgggagctgcccaccagatggaagtcggggtcacaccggaaatccacccgggctccgtccagagctgggaggtccccacccgtcaggaaaaccttcccattttccagggtcaaataagacttggagcagattcggacacagcggctgggtgtgtccatatctgtccaggagccgttggccaggcacttgcggaccttgggccccaccacctcgcgctccccccggcacacatactcaatctcatagtccactggcaggaagttgatagccttcacctggtcccgagtcaggccccggtacctgatgcccccttcccagggcgggtgtatgatctggcaaccttctgaggtggcgttgtggggtctgcgccccgcccgcgcccgggggncggaggaagagtggcgccagtagcagcagcagcaacatctcggcgcgcgggcccggctccccggctctccccagggcctcaaggccccaggcaccgccgcannnnnnnnnnnnnnnnnnnnnnnnnnnnnnnnnnnnnnnnnnnnnnnnnnnnnnnnnnnntcgaatccaggctccagcctggccagggtctctcccctcctctctcgcttcccccaaaccccaccactgtctcttcttccccggggcgcggcagcc

SEQ ID NO: 438637 - DNA, 867 bp, Homo Sapiens
aaacctatcccttcgggggcccgcggcggcccaaagccaaaggtttaggaaaaatccttttaaaggggccaagggggacccccaaaaaacccaatttgcaaatattcattcggggtgttgctgagggcctaggaagtgcctgtggtttggggcacatggggtggggacaggaacgagggcaggcccgtgggttaagattctgaccaaaacatttaattaacaaaaaaatattacaatagcagagaaaataataataataacaataaagagaaattagaagtgggagtcagggtagaaaaaaatgcaaaggccttggtccctaggagaccaacactccagctgagctggccttagccccagccccttctgagttttccttggctgctggcttctcatcttctcccatgagacgaatgttgtgcttttcccggaattcatttagttcttttccctttgcctgaagctgctgtgtcagtgtctcaatgatcttctgtatctgctccttgttgttctccaaagcgggcagcacctctttgacagttcgctccaccagcactcctccaaccatgcggtagcacttacgagtttcatctacctccttcagtgtatcgatcactaggctgtgctcattcaactccatctccaactcagctgctttggatgccaggcctcgctgttcctgccgaaggcggttgaagccagcaatcacctgctctgcggacaccgcccccttccccgcgccgctcccgctgctcttgccggcgcgaccgctgttctccgccatcttcgccgcctgctgggtttccggccggcgcagctcagcccccgccttgcgtcacgtccggcctgcgagttaccgcccccgct

SEQ ID NO: 438638 - DNA, 1944 bp, Homo Sapiens
  misc_feature (12)..(12): n is a, c, g, or t
  misc_feature (21)..(21): n is a, c, g, or t
cagtaattcatntaattgcanagcattttgaaataaaaaaaatcaaacttaaaactgtgttctgttcctggaggtggcctgaggcctccccgacagcccagcacctgcgttcctggtgcgaacacgctagcacagggcctgccgcagggcctggatgcgggcaacgcaggcgccaatgggctggcgctgagcctggagctcctctgccagcagctggatctgcatttccacctgttccagctctttctgcacctgctgctctacttcctggtcctcaggccccggctcctctctgttcagctccagccacctgcgcaggctgctcgcttgccgccgacaggaccagaggttctgcttgggtggtctggtagtgcagtagttgctgctggatctcctcaagttcagcctcaaggtccaggctgcctgcagttgaaagtccaggcccagccctggtggctgagaagtccccaggaaggagtagatgggggtcagggacactggccagggatgaggggaccgggggcttatccctaggagtagcccgctgtgctgacaccctggctggtgcagccgccccgcaggcatgaaggaggaaagaggcagcagcagcagctccgggcctgtgcttgccgtcgggggctgcttcgggccaggggcgcttgacagggccccaggcagggggctgtgtgggaccagtgctgtcggggcctctgccaggaagggccgcgtcagggagggggctgctggctgagccatgcctaggccatgttcctgtggcttctgaggcctctggctctgcgcaggctccaacaggaagtgtgggcgtcgcggctgcttcctcgctgagtgggcagtgttgagctccagggcgtggggctcctcagcagccaggcggcccagagctcccagaggccgagaagcctgtggcctcttggtctcaagggtgccatccccagccccagcagcaatgcggttgagaaggggaccctcaaacgtcactttcctgctgggtgcgatggctgccaggggctgaggcttcccgccccggcccatcactttctgtttccagagcgtggcacagcggcggacggcacgatggagactgtgagccgcctggacctgctgctgggcctgcagctgctgccgggaggccttcatgctggctgcaaagcgcaggatccgcgtggcaccctcctggaggagctgcccctggtaggcctggagcgcccactgcagccgcgccttctttctcctcctttccagtacaaaggccagccacgtggcccacacctttgcctgcagcgagaaggcccagaaccacagggcccgcactgtcgcccgctgctcctgcctcctggctgccagctgttgtctccactggcggaagcaggtccggctgagtctctgtgccagcagttgggtgctctgcctgtgcaggagcctcttcctgacacactgcagatggtgcgtcttccaccgggccagcccctccagcagcagctgccggtggtggtgttgcactgccctctccagctgcagtctctgctgggctgacctccggctgcagtcccaccagcgctgaaaccaggtccgcagacagcccctgtccagcaccttctgggcctcccagatggcacagtcctcctgctgtcggtaatacatctgcactgacacagtttcccgccactggaccaggaccttggaacatatggtccttctgtaatgagtacttgcttgaaaggtttttttggcttcatccactcgggccatggtgttctctttccagcgacgtaatgccccgcgcagcagctgcctgttgtgctggctctccctggctgccacctcccggaggatgcttcgcaccctgccctggtaagtcacccatgcctgcagcgccctgtgcagcacgctgtgctggtgcggacgcgtgggcggacgcgtggg

SEQ ID NO: 438639 - DNA, 757 bp, Homo Sapiens
acgtagttgacaaagggaacaagctcagctcctacccgtgcctgccggcctctcttctgctccatcacagccaagacactggctttttgtcagaagcccctctttcttgtgtgagctggcacctgtccctctgcccacccctactatggtctcctcaaaccctaacctgccctgccccatgctgatgaagctggtggctcccacagcaaccagcactacccgagagccttgggcctcgggggagatgtcaggtgggtgcatggggcctgggtcccggtccctgctgtgctcctcactgtttgactgaccttgatgggatcctgaacgtctcagaggctgctcccctgtgacatgggaccctgggcgacctgtacaccagcgtcaccaggggttgtttttgcaggtcaaaagagacaatgtggggtgaagcagtcccttggcgttcaggtaccttttgtcggaactgctgggagctctatggcccaggcccaccccagcttacttgctgaccttggcctcgcctttcctgactttcagtctccctataaaattggagatcccacagagatctcagacccccctgcagcccctggtcagcccaggggaacagaccccatgtttctttccagcaacactgcccactcagcgaggaagcagccgcgacgcccacacttcctgttggagcctgcgcagagccagaggcctcagaagccacaggaacatggcctaggcatggctcagccgagccccctccctg

SEQ ID NO: 438640 - DNA, 2633 bp, Homo Sapiens
  misc_feature (1)..(1): n is a, c, g, or t
  misc_feature (3)..(3): n is a, c, g, or t
  misc_feature (11)..(11): n is a, c, g, or t
  misc_feature (22)..(22): n is a, c, g, or t
  misc_feature (26)..(26): n is a, c, g, or t
  misc_feature (32)..(32): n is a, c, g, or t
  misc_feature (34)..(34): n is a, c, g, or t
  misc_feature (39)..(39): n is a, c, g, or t
  misc_feature (59)..(59): n is a, c, g, or t
  misc_feature (65)..(65): n is a, c, g, or t
  misc_feature (68)..(68): n is a, c, g, or t
  misc_feature (73)..(73): n is a, c, g, or t
  misc_feature (75)..(75): n is a, c, g, or t
  misc_feature (93)..(93): n is a, c, g, or t
  misc_feature (95)..(95): n is a, c, g, or t
  misc_feature (120)..(120): n is a, c, g, or t
  misc_feature (710)..(710): n is a, c, g, or t
  misc_feature (2544)..(2574): n is a, c, g, or t
ncncccgcaanaattgcaatgntgancggctntncaagnttttgacctcgctcatcaanttgaanatntcacntnccatggctccccagcctnangccctggctggccagtaggtggagnctcatctcaggaagctgggcctgggctatcgtgcccgttacgtgagtgccagtgcccgagccatcctggaagaacagggcgggctagcctggctgcagcagctacgagagtcctcatatgaggaggcccacaaggccctctgcatcctgcctggagtgggcaccaaggtggctgactgcatctgcctgatggccctagacaagcccccaggctgtgcccgtggatgtccatatgtggcacattgcccaacgtgactacagctggcaccctaccacgtcccaggcgaagggaccgagcccccagaccaacaaggaactgggaaactttttccggagcctgtggggaccttatgctggctgggcccaagcggtgagtgtacctaggtgtcctccctaggtttcctctcctccagcccagacccagtggactcttccaccaccgccccaggtggccctaaaggactctccagccacccctgtcccaaccccagtggattctcacttccttcggccctgttccccaaggactcttccacctcccaacactgtcactagtctcaccagccctgaccccagtgtaccctcctcccnacacagactccaccttcctacaggtgctgttcagtgccgacctgcgccaatcccgccatgctcaggagccaccagcaaagcgcagaaagggttccaaagggccggaaggctagatggggcaccctggacaaagaaattccccaagcaccttcccctccattccccacttctctctccccatccccacccagtctcatgttggggaggggcctccctgtgactacctcaaaggccaggcacccccaaatcaagcagtcagtttgcacaacaagatggggtgggggatattgagggagacagcgctaaggatggttttatcttccctttattacaagaaggaacaataaaatagaaacatttgtatggaaaatgcagtgaggagtggtagggaagcaggtgaggaggggacagggcagagaaactcccggttcagggagggaaggggagcaggctgcccccaagccctcccacgcagaggatcatgacccgaggtccagggccctagagctggtggggcagtgtgggggacagttctgtgcccggctccacgcagcagtctcgacagcaacagccagctgccggccccccagccactggtgtcagcagctccccatggctcgccgtctgcccctgcccctcctggctggtgcccagctgcagtttcctcatgtgccgcaccacagccgtggcattgaaggcttgcttccacttgctcttggcaaagttcttcttgatctgctcactcaccgactggtggatattcttatctagagctgtatctcctgcaatccatgggtgctgcaaggcctgctcacaggtgaatcttttctctgggtccttctccatcaagtgccggatgaaatctttggcagagtcagagatgtcgtcccagtaaggagagtcaaactcgtactcggccttcaaaatctgttcaaagagtttggcatcattctcgtcatagaagggagggtaaccgcagagcaagatgtaggcgatgacacctatggaccagcaatccacagccttgctgtagggcttctgggccaggacttcaggggccacgtatcccggagttccacaggcggtggagagcacactgcccgggtcctccatcttggagaggccaaagtcggagatcatgattttggagtcttcatccaggctgtagtacagcagattctctggcttgagatcccggtgtacaatgcccaggtcatgcaggtatttcacagcatccagcacctggaagatgaggcggctggcgtcccgctccgtgtagaagcctttttccacaatacggtcaaagagctccccacccgacaccagctgcatgatgaggtagaggtggcccccactctcatagatgtcatccagggctacaatgttggggtgcttgatcttgtgcaggacagcaatctcattctccatgctgccttccttgccctccagggcctccttggcaatgcatttgatggccaccagcttctgcgtcctcttatcttctgccaggatcacctccgagaaggcccccgtgcccagaacatctcggaagtcgtagatgtctctaatgtcctccgcctgcttccacctggggccttccactgcccccagcatggcccactgccccccgaccacagccagggctcctgcggctgccccgccgcggggctggctgggaggcccgcggtggttggcgccgagctgtggccgcggtcctcaccgctgcgtgcctgggccacccgcccgcgctcttgctggagctggggctcggctcggctcggtggctctctcccgctctcgacgaattcgagctcggccgatttggcctgatccnnnnnnnnnnnnnnnnnnnnnnnnnnnnnnnatgcggccgccccgcgtaagctccggtcccctatagttgagtcgtatacactccacctc

SEQ ID NO: 438641 - DNA, 677 bp, Homo Sapiens
caagtgctattatcttctgcatcggttataccgctggatccttacaattatcactgtacagacatattaaaggtaacaggttggctacccgtgcttgtttcctcttttgtaccccgggtttcttccatcatcccccaaattcctttgtaccccatgccaggcagtgttgaggcggcaggagccagtccgaggggacaggcttctcaggctcagtcactcaccggaaagattgtccagaaggcagaaccaggtccaggcgcagctcagagcgagggcacgggatggaggcccacagggcaggagtggaggctagagtacgatgccccatgcgcctgggcagaagcgcgcgggcaggcatttccacagcaggcaccgccccgtagtagccccgcctacccagaaccaggcctcgtcgacgcccaaagaccccgcccagacaaggaccacgacccttaaggcctcgcccacacggtgctgtttaacaaccttccctgtttcacttaattcctccacctcctgcatgcctcgccctttgcgggtcatcaaagccccgcttcgtgccccaattctccggctttcctgaggtgtaggtcccgccccctccttgcgacttatcttctcccgcccccagagcctgtgggcgcgcacagctgtgttcttctgggttctccagggca

SEQ ID NO: 438642 - DNA, 1382 bp, Homo Sapiens
  misc_feature (1305)..(1341): n is a, c, g, or t
caggttcccctctgtttggttctggggggttttggggtccctttccgccggggagaccgtgtgaggggtccccacccgttagtcccgtgtggggcaatgttccccacatagggaacttccccgggggccacaaccttgggtttgtttaggggccatcagggcagaaggcagtcaggccccctgtggtgccccattccaggcaaggatgcagagggccttgtggggcctcctccatatgaggactctcgtagctgctgcagccaggctagcccgccctgtttttccaggatggctcgggcactggcactcacgtaacgggcacgatagcccaggcccagcttcctgagatgagcctccacctctggcccagccagggcctgcaggctggggaagccatggtaggtgacatcatcaagctggatgagccgaggtccaaaagcctggcacagccgctccaccatgccagtgatgcgggcgatgttgttgttggaggaacagataaaagagaaaaggcattcgatggggtcttgtcgcagcagtcgcacaccttggaatttctgagccacctcttggaagtgggagtccacggaaccccagtggtgatacagttgagccagggtaacatctagctggaagtacttgcgcacggcctccagctcgtctggtgtgggcctgctagcctggctcttgtctcctcggtacacagtgcagtggagctgctcctcagtctgagtcagtgtccatacttgatccgctagtacaccactccagtgtgcaggactttgctccctccaccggaaagattgtccagaaggcagaaccaggtccaggcgcagctcagagcgagggcacgggatggaggcccacagggcaggagtggaggctagagtacgatgccccatgcgcctgggcagaagcgcgcgggcaggcatttccacagcaggcaccgccccgtagtagccccgcctacccagaaccaggcctcgtcgacgcccaaagaccccgcccagacaaggaccacgacccttaaggcctcgcccacacggtgctgtttaacaaccttccctgtttcacttaattcctccacctcctgcatgcctcgccctttgcgggtcatcaaagccccgcttcgtgccccaattctccggctttcctgaggtgtaggtcccgccccctccttgcgacttatcttctcccgcccccagagcctgtgggcgcgcacagctgtgttcttctgggttctccaggggcagaccacagcaccccgctctcgacgaattcgagctcggccgatttggcctgatnnnnnnnnnnnnnnnnnnnnnnnnnnnnnnnnnnnnncgccgccaccgcgtaagctccagtccctatatatcttacat

SEQ ID NO: 438643 - DNA, 1112 bp, Homo Sapiens
attgccaggagaggggccctctctggtggggccccctcccctcccaaaaggaagggggctttttggtaaaagtttggcctgcaagccccaggggttaaggccccgcccctggttttctttccaaggggtgggctttggggccccttgggccctctccagttaaacggggcccggatataagccccaagggccccagggtttccctgaagatggagcctttccccctttttggccccaggccaggggcctgcaaggcttgggggaaggccatggtagggtgacatcattcaagcttggatgagcccgaggtcccaaaagccttggcacagccgctccaccatgccagtgatgggggcgatgttgttgttggaggaacagataaaagagaaaaggcattcgatggggtcttgtcgcagcagtcgcacaccttggaatttctgagccacctcttggaagtgggagtccacggaaccccagtggtgatacagttgagccagggtaacatctagctggaagtacttgcgcacggcctccagctcgtctggtgtgggcctgctagcctggctcttgtctcctcggtacacagtgcagtggagctgctcctcagtctgagtcagtgtccatacttgatccgctagtacaccactccagtgtgcaggactttgctccctccaccggaaagattgtccagaaggcagaaccaggtccaggcgcagctcagagcgagggcacgggatggaggcccacagggcaggagtggaggctagagtacgatgccccatgcgcctgggcagaagcgcgcgggcaggcatttccacagcaggcaccgccccgtagtagccccgcctacccagaaccaggcctcgtcgacgcccaaagaccccgcccagacaaggaccacgacccttaaggcctcgcccacacggtgctgtttaacaaccttccctgtttcacttaattcctccacctcctgcatgcctcgccctttgcgggtcatcaaagccccgcttcgtgccccaattctccggctttcctgaggtgtaggtcccgccccctccttgcgacttatcttctccctcgtgccgaattcgccacccaggcctcgctaccta

SEQ ID NO: 438644 - DNA, 1184 bp, Homo Sapiens
  misc_feature (323)..(382): n is a, c, g, or t
  misc_feature (915)..(953): n is a, c, g, or t
  misc_feature (968)..(978): n is a, c, g, or t
ggcactggggtgtccgccgggcatcgctctgtccagttattccagtttctctgggagcagccgagttgaccccacggtctgagatgtccaagctgcccgcagacagcagtgtcccgcagacaggcgcggcgaatggtgacagagacgtcccgcaggcggaggtaggccgcgggaggcgggagccggccccggcacagcctgaggaggccggggaaggcgcgatggcggcggccaggggaggcccggtgccggcggccagggaaggtgggatggcggcggccagggcagccccggcggctgtatccatgggagccccggtggcnnnnnnnnnnnnnnnnnnnnnnnnnnnnnnnnnnnnnnnnnnnnnnnnnnnnnnnnnnnncagggaagcccggatggcggaggtcgcccgcttgctgggggagccagtggacgaagagggtcccgagggcaggcccaggtccagacacgggaacggaggcctggctgcgttgccctatctccgtctccgccacccacttagcgttttaggcatcaattaccagcagtttctccgccactatctggaaaattacccgattgctcccggcagaatacaagagcttgaagaacgccgcaggcgattcgtggaagcctgcagagccagggaagcagcgtttgatgcccgaatatcaggcgaaatcctcacagggtggaccctcgatatttttaacctttacgatagctctgactgcctctgaagttatcaacccctctgatagaaaaacttggttgccataagttttatccttacaaaataattattgtggcggccactactttccagaaaaaacctctggcctttcccgtcatacccaatccctgccacttggaatttttcgaaagtccacgaagtatcttcccgatttaacaacnnnnnnnnnnnnnnnnnnnnnnnnnnnnnnnnnnnnnnnccgcgtgcgcccccnnnnnnnnnnncccacaagccttccccctgcacgtggataatgacacggtccgtcagccccttttccactccgcaaccgcccttcttcgagagtatctgtacccgcgacacacccgtctcctacttcgctggggtagaggcaaaaagagggtcttgctcacgccacgccccccttcttaccttattttgtgtccggtgtggcccgcccatcctgtac

SEQ ID NO: 438645 - DNA, 847 bp, Homo Sapiens
atgttgacatccccacgtcggggcccttcctggtggtcgaggaatcttcagaggtctctaaaatatattaaaaatgtcccaacatttcatgcattctgagccatgttgacatccccacgtcggggcccttcctggtggtcgagggatcttcagaggtctctaaaatatattaaaaatgtcccaacatttcaggacattccaccggcttttcttgctgggcttcctggttttcttcttgggctttctggttttcacttcctcttccactttggtcttttctgttgcttcttctgcaggtgcagaggaaggacttgctgacatctgctggtggctgcctgtaatggtggagtcttccaatttctttgccggtgtggctgggtccacctgcatcatgtgaacccctgtggcttcctcagagactgtctgccctggcacatgctcctccaggtcttccaggtcactctttgccggcgtggctgggtccacctgcatcatgtgaacccctgtggcttcctcagagactgtctgccctggcacatgctcctccaggtcttccaggtcaccacgttgtggaactcccaaggatgtcttcacctcctctgggtcctcctcctcgccgttgtaactggacagctcctgaagtacatccctgatcagaagttcggccagaataatagggtccccctccatcatgtgaacttctgggcttctcagaaactgtctgccctggcccatgctcctccaggtcttccaggtcaccgttggtttggatgcctgtgtctgcatgggcaacagtgaggagactctgattggatgcttcagggagatgttctgccggacgcgtggg

SEQ ID NO: 438646 - DNA, 585 bp, Homo Sapiens
gcatttatttaaaaaatcccatcatgaccctggaagcctttagaacagttttatcctttgaaacacaggacacatttctcccagtgcgcagaatttcaagtttacgtggttcagcttaagaagtgtatgtttcacgttccttagaggacaacagacccaagttatcactatgagaaaggaacagcttgtcccagcttcaatgggataatccaacaccaccagctaccagaagaccctctcactccagtctcagaggggagcacgctcagtagggcttgctgtcattcttcgaacgtttgagctgcactttaagccgcttcatgccaatctgaaagccgttcatggactggatggcagcttgggccgaaacaggattgtcgtaacttacaaaaccaaaacacttgctcaggtttgtctgcttgtctatgaaaaccttggcagacacgacattcccaaagggcataaacatctgcagcaggtcctgatcaccaaactcctggggcaggtggtagatgaacaggttggctccctctggaccttccttctggcttccagcagcaccaatactctgctcggacgcgtggg

SEQ ID NO: 438647 - DNA, 1656 bp, Homo Sapiens
  misc_feature (1328)..(1328): n is a, c, g, or t
aaatgacccccaagacctttcctaattgtgggtgggaagataaaaacttaacccttgaacctttgggaacagaacggctttgggaagagtggagtactaagccccctaatgccctggcagctgaagactccaaactcctgacagctacttcttggaaatagtttttaaaaccttttttcagattcttgtccggaatttctgttgctcttttcaaaaaggggcattaacaattctctggaaataaaagcacctgttagcctgacatatgcaaaaagcagggcggcatcacccattacgagctcccccagccagcagtcagtattggattggccttgcctggctggtggcagtttgggagaaacagccaaagaggttagtttatttcaacaccaaattagatcatggcccatttccaacgggtctctttaaaggcctctatggaatacattgcctggtttccttctttgcagttcaccacagcaaggaatgtcacctccatcccaagccaccattttctcatgaaggcaaatccaagaagggcttgcagttcttgctgaagggggtaccatttgtgggcagagtgatcaataccatctagttgggggaggaggagcttatttcttggtgtacttgaatcagaaggtccctgcaagccagtatgcttcatttgccagtggccagaaattctcccttgcctccttgattgaggtgtcccagatgtagtattcccacaggggtctggcaggcccctcctgtaaccactccagtcacattttctgctcttgaggcagaggtgacatcaggacgtttacagcctccacatgaattgagtgttcatttacctcagtattaccgtgttcatttttgtcctcgtgctacagttagctccctgccgcctcttgcaggtcttacttcagctcttgcctgtgacccacacagcttctgggctctgcctctgctctaagaagtgctgtgggggtagagaaccaggaaggacatgctgttgggaatgtacacctgggcagaggtggccctgttaagatgtgactgtagccacagccagggatgggatccctgggtctctggaatctgaaacctcaacaaataccagtcttgacccctagcagcagagataagaataaaggggttggtttgctattaagtcagatgggggctctctccttgtcatgctgtccctgtgggtaacagacagggattgaccatcttactggttgtacaggttagcctggtggtgttggattatcccattgaagctgggacagctgttcctttctcatagtgataaacttgggtctgttgtcctctanaggaacgtgaaacattcacttcttaagctgaaccacgtaaacttgaaattctgcgcacggggagcaaactgtgtcctggtgttcaacaggataaaactgttctaaagggcttccagggggtcccttgcacggggcgaattcgttaaaactttaaaatgggccgcacaggacatcaaacgcaacgccagcaaacaacacaacgaataagcagccgatcaggagaccgggagacacaccagcaaagcaacgcgccgacacgacagagagcaaaagcagaaacaaaagaaagaagcacaacatgaccagccaccagagtgcgacacaacgg

SEQ ID NO: 438648 - DNA, 454 bp, Homo Sapiens
agcacctgtaacctgacatatgcaaaaaagcaggcggcatcacccattacgagctcccccagccagcagtcagtattggattggccttgcctggctggtggcagtttgggagaaacagccaaagaggttagtttatttcaacaccaaattagaccatggcccatttccaacgggtctctttaaaggcctctatggaatacattgcctggtttccttctttgcagttcaccacagcaaggaatgtcacctccatcccaagccaccattttctcatgaaggcaaatccaagaagggcttgcagttcttgctgaagggggtaccatttgtgggcagagtgatcaataccatctagttgggggaggaggagcttatttcttggtgtacttgaatcagaaggtccctgcaagccagtatcgcttttcttacctaatcacagagtttgtgtagtgaattt

SEQ ID NO: 438649 - DNA, 493 bp, Homo Sapiens
  misc_feature (451)..(451): n is a, c, g, or t
  misc_feature (463)..(463): n is a, c, g, or t
tgcatttatttaaaaaatcccatcatgaccctggaagcctttagaacagttttatcctttgaaacacaggacacatttctcccagtgcgcagaatttcaagtttacgtggttcagcttaagaagtgtatgtttcacgttccttagaggacaacagacccaagttatcactatgagaaaggaacagctgtcccagcttcaatgggataatccaacaccaccagctacctgtacaacagtaagatggtcaatccctgtctgttacccacaggggacagcatgacaaggagagagcccccatctgacttaataggcaaaccaacccctttattcttatctctgctgctagggggtcaagactgggtatttgttgaggtttcagattccaggggacccggggttcccttcctggggtgtgggttacagttcacattttaacaggggccacctttncccgggggtacnttccccacaggcttgtccttccggggtttt

SEQ ID NO: 438650 - DNA, 2165 bp, Homo Sapiens
  misc_feature (8)..(8): n is a, c, g, or t
  misc_feature (36)..(36): n is a, c, g, or t
  misc_feature (201)..(257): n is a, c, g, or t
  misc_feature (323)..(433): n is a, c, g, or t
ggtcatantttcataatctttcaatgtatgcaaaangaacagatattaatatcagaagaaagggggaacacatcgttcaagtcattgccattgtcaatgtggaaactacttcatagtgctatcttcacttctgcctgaactccaagaggtctttaaatatattttatatatatgtatgttttggagacatggtctcactcnnnnnnnnnnnnnnnnnnnnnnnnnnnnnnnnnnnnnnnnnnnnnnnnnnnnnnnnntgggctcaagcgatcctcccacctcagcctaccaagcagccgcacgtgtcaccatgcccagctaannnnnnnnnnnnnnnnnnnnnnnnnnnnnnnnnnnnnnnnnnnnnnnnnnnnnnnnnnnnnnnnnnnnnnnnnnnnnnnnnnnnnnnnnnnnnnnnnnnnnnnnnnnnnnngtgtgagccaccgcgcccagcctaaatatctcattttgaggcatacacagaaatcattcctcaggattcttaggctctctccttccatctaagtatgtcccacaatacaccatgcatatgaatttgactcaataactacacacttgagggaaacataagtataaatttactatccacctagtggtagctaggtaaaattgcaggcataaagataaaaaagaaatcatcaactttgtagttcctcagcttcaaacccaaacctgcaagggagaggagagacccagacgcctcagggaccaggcagataatacaaataaatgaaacaggccaggtgagagagtacaagtcttgccaaaagaagaaacccctacttagtttcaattgattgtcctcttctgaaaatgcagatcagaattgccacacattctgaccgatcgagagaggccagaaattctaattttaatgtgaaacctcttgatttcttagacggtggctcaattttcttgaaaacactaggtgagctaaataaagctgacagtccaccagttttcaatactcctcttgcagagagtgaatggcatctcccctaactgtagtattagactgccactcaccagccacagtttgcaactgcaaaagaggcataaactgacggggatctcctgctttactatgcacacacagctgaactctccagccatggagaacaactaactctataggaaaaagtagaaggctaagctgagccatccagggatggcggcaggggccttcatggctagctgctggcctgtaggcactaaattgcagactgctcctgcaggaagccttcagggcctgggaggcctttatctggctcagaagctagggctgcttctcgaaggacttccaaatgctcctcagcagccgacagagactggtcaatccagtccaggcctcccgtcagatggcaggcattccttgtcaccagcaccaggtgactgacagacaggagcagggcagtcgtccgtgcgtccaggagtttggggtccaacggagggtacatcgacttcacaacatcatccaccctggggctgatccgcttggccaccacaatgatgtcgctgacactggctgaagtcttcatcttggccccagagcccattgtcatggcaacaagcttctctgtcagagtgtgacaaatcttcaagatggcaatgcagtgggacatgagacccgaggcatcttcgatccagtcttcattctccagaatggcctcaatgtgggggttggtgataacgacatcgtccagttctaactcagagggctcagactgggtctccatggcaccaatgaggtccacaatgggcttagaatcatagcgctgcagcaggtctcgcggccggcagtagcgctgcctgcaaaccagcaccaaggctgcaaacgaagccagaaagatggtggccagcacacctatggcaacaatcaccacagtctccatgcttccagagggctcctgactcagtcccggtcacatcctcctcatgggctaaagctgctggaagtggcaaattggggaagaggatggcaggtgctaggttcctccacgacacctgcagagacctgagggcctcaggctgtggctcccgggcgcatcccgcgactgccccgccgatggcaaagtccgggcgcgggcgcgggcctgcagcggagcatgccgggaagcgccgcggccctaggaatccagcctcgc

SEQ ID NO: 438651 - DNA, 1265 bp, Homo Sapiens
  misc_feature (1059)..(1137): n is a, c, g, or t
cttgcagagagtgaatggcatctcccctaactgtagtattagactgccactcaccagccacagtttgcaactgcaaaagaggcataaactgacggggatctcctgctttactatgcacacacctggaaaaagtagaaggctaagctgagccatccagggatggcggcaggggccttcatggctagctgctggcctgtaggcactaaattgcagactgctcctgcaggaagccttcagggcctgggaggcctttatctggctcagaagctagggctgcttctcgaaggacttccaaatgctcctcagcagccgacagagactggtcaatccagtccaggcctcccgtcagatggcaggcattccttgtcaccagcaccaggtgactgacagacaggagcagggcagtcgtccgtgcgtccaggagtttgggtccaacggagggtacatcgacttcacaacatcatccaccctggggctgatccgcttggccaccacaatgatgtcgctgacactggctgaagtcttcatcttggccccagagcccattgtcatggcaacaagcttctctgtcagagtgtgacaaatcttcaagatggcaatgcagtgggacatgagacccgaggcatcttcgatccagtcttcattctccagaatggcctcaatgtgggggttggtgataacgacatcgtccagttctaactcagagggctcagactgggtctccatggcaccaatgaggtccacaatgggcttagaatcatagcgctgcagcaggtctcgcggccggcagtagcgctgcctgcaaaccagcaccaaggctgcaaacgaagccagaaagatggtggccagcacacctatggcaacaatcaccacagtctccatgcttccagagggctcctgactcagtcccggtcacatcctcctcatgggctaaagctcaggctgtggctcccgggcgcatcccgcgactgccccgccgatggcaaagtccgggcgcgggcgcgggcctgcagcggagcatgccgggaagcgccgcggccctaggaatccagcctcgcnnnnnnnnnnnnnnnnnnnnnnnnnnnnnnnnnnnnnnnnnnnnnnnnnnnnnnnnnnnnnnnnnnnnnnnnnnnnnnnggcggccggggcagctgggaggcgggccctggcgacccaacaccccttcctcgcgcccccgcggtggcccgtccgggcggcagacggagaggggagcggagggtccctgcctgcgccccgatcccggg

SEQ ID NO: 438652 - DNA, 1431 bp, Homo Sapiens
cgctggtttgaagaaagaaatctttattaataatcttaataatactgttagtttgaatggtcacaccttggaagcatacagaatggtaagaaaggaagcccggggctcggctgcagtcctggggatctgagtgagtcggggggttgagctgctgcaagaaaagggtccggaacagcagaggggacagggggctctgtacagaggacaaagccggaggcagggcgtggggctatgtacaacgggaatagaaaaggagaattccatttcaatagctgatgctgaatagaaagtgaggtgtatttttaaatttttgacacttcatgagacagtggagccacgttgggagcctgtattttttgctgcttccctacttcagtgctccctgcctcgccaggggttcctccctgccacctgctctgctcctgctcttcccaccgggtaagcctggctgtccttggtgctgctcccgccacctggacacctgccttgggagcagggaaggggccggcccaggcttccccatcccttgcccttcccatgggcccctgctctggctgtgcccgtccaggcccacagccactgtgactcccaacctcgcgatgcagccgggcgctggcccgtccctggccctgggcgcccacggtggactgggctcacaggggagcggcagggagggctgggtcccagcaggcagcacgaggtcagccttggtgtacacaggccccgggcctcctccagaaagggagagatggccaggaagagcaagtaagtccttggcctcagggcccacttggccacacttggaggtgtgaggagtggctcctggctggctgggcttccttcgtcctcccatggagcgcccctgagtcctggagccacgtcagccctttctgttgggagctggccctggggctactgttggacggcttcctcgccaggctgggggcacgggcgggactgccgggcaggagggaggtgggacgcaggggacgcgacaggagggtgacggggcccagtggagcccctgggatgaaagctgcccgcacccctcagccccgccggccccctggcacagctggccacaaagatcaagtcttgctagcagcgcctgcctgctcaggcccgggcctgctccgccgccgctgggctccacactgtctgtcttgggagttgggggctgggaaaggaagactggatggaaaacagagccccccacgggtcccacaagggaggccccttcccctccaactcccccactgcctgagacggaggggcgtgttcccactgtgctgccagccaggacgcggtggggccgtcctgtcctggggccgctcctcggcgcccctgccggcgtgctccctcggtgcgggcgtgtggccgggacgcgggacttggacttggttggatgcctcttggtttggttggtttttt

SEQ ID NO: 438653 - DNA, 1183 bp, Homo Sapiens
  misc_feature (436)..(476): n is a, c, g, or t
ggagcgaagtggcggaggcgtgtaggatgttgtcatggagggagaaatatttaggagcgggtaggacgggcccgcgaagccggaggggggacgttgagtgggaacgggggagggcggcgggaacaaggcaggagggacgggcgcgctatgagtgtggttgcattgtcggacgggcatagcgcgacggacgtgattagcgggagagagtcatgaaggacggggcgaggggtaaagatccgcgggagcggggcggggttatcccagcgggggggcggacggaggggtgcgctgagtgcggcagggggcaggagagtgcacgggtcggagacgtgtggggaggcggagtagcgcggagagggtgaacggtggggtgttgaggagagggccgtgagagggtgtggttcagaatgaggggaaggggtgagggatcacggtnnnnnnnnnnnnnnnnnnnnnnnnnnnnnnnnnnnnnnnnncagaagtataggagtggtgaaggtcgactatcgcggaggttgtggggtgacggacggtcccgaggtgaaaacggggaggggacagggttgaggggagagggcggaagatggtgggtggaatcccccattgggggggcagtcctgcggcgcaggtccttgggggcctcggccccggcggggggcgtctggggcgcccgctcccgacggcaagttcaagttcttgccgccgccgcctcctgccggcagctctctggctccggcggctgcaacacctccctccgcctagcgccgcccaagctaggaatctcgcgcccctcgtgggcgcgtctcatggggtcccggcccacgcccgggggagagcggaaggtccgagcgctccacgccgcggaccctttggccgtacgcccctcgccgtggatcgcgctcctgccccgtcggagccgcagcctccgccttggccgggatccgcggctgccgcgggaacttctcggcgtcctcggctcccttcttccttcctgcgagcgctggggagagctcggccccgcagcggaggagaatgcggccgggagagacagcgagcgacggaggaaggcagccggcgcccgccggagcccgcgcgcccgtgcccgtcccggcggcgcctgtcggtgaaactgccgccgctcccgcccctattttgaaaattccggaccggtaccagccgcgat

SEQ ID NO: 438654 - DNA, 1810 bp, Homo Sapiens
  misc_feature (5)..(5): n is a, c, g, or t
  misc_feature (927)..(992): n is a, c, g, or t
tgagngcacaactccaaatcatcttttattaatataaaaagggcatatttagcaaaagacacacagataaaagagtcactatggctcaggacacaaggcagggaggtgccaggcctgtgcccctgctgggggagaaggaggctcgggacaaagtgggagaagtgctgggaagggctgagcggtaggggccacaaaagttccggtgggcaacactgtcggcaggtcatgggtgggactcatggggacctcgctgctaactcttgttgtgggggggtgtccttagtgctgccacctggagggccactccttggttcctggaggggacccaccaagggacacaggacaggaagcccaggatggttagtgcaactcgggatgaaggccagggagaagcgggtgctctgcagtggccggataggtccagacgctgaggccgaggcgcttcctgttacgtgcgggcgttccgctctgtctctgccaggcactctctgactagggcccgggcatggatgatacctctcttcaggcgctccatggcgctcttgctgccagcataggtaggccggatctctttgcccatctcctctatgactgacagcaggtccgtgtaggtgctctgggagccctgggcgccgggtggcttcatcgcctgcacgtagcccatggaaggcggtccaaagtcgttaaacagcggtctgaaaggagcgccggctcctggcactgagcccgacggcgacgggacgcttcctgcagcaacaggcgcgagtaagaggtcagcgcggggcagggacgccgcctcccagcttttccaagcccaggaccgggttcgcccgattccctccaaaggatgcttcattccatgctgatcaacttcagggacaaatccctcccactgcgctccacctacaagcccttacgtgaccacgnnnnnnnnnnnnnnnnnnnnnnnnnnnnnnnnnnnnnnnnnnnnnnnnnnnnnnnnnnnnnnnnnncaggccgtcttttcttcgagacctcgaccgcccggcaggcgagcaggggtggagctggatcctcacctgtagggaccggggtgcccggcccaggggtgctggagccaggggtgctgctgggagcaggggcgatgggtttgtaggacatccccaactcctgggcgcggcggacgccagccggccgctcctcgggggttggctgcggggccgctcagccgcgctctgattggcaagcgggctgcacgcccctggtaaatagaggtctggccggaagggcgagcgggcacgaatgctccctcactcccgattggtgcgcgaagatgtcactcgagcctccttattggccgagacctgccccagcaggtcgcaaccgccgccgattggcctccgccttccggacctcgcacctgtctgctccggattgggcggtggccaccgccctccgcaattggcgagttcgcggcccgggccggcgcgctctcaatccgattagtccccaggccctagaggcggggccttgggaaccgggacccggggctgggctgccggttcgcgccgaggggtcttcccgggcgcgggcgctaccctcgcgcctcactcgcgctgcttcagacgtctgctccgctctgcccagtttcggcccagcaggggttgctgtcgcagctgccgtcgccgctgccaccggtgccttgcgcgcttctccgctctgggggccgaaggacgcagggctttgacgtcccgagccccgcgatcccgaaaattccggtccgcgtccgccggggttgtgggatgcgcgttcgccggggggggcggcgcgt

SEQ ID NO: 438655 - DNA, 1422 bp, Homo Sapiens
tttttttgagagcacaactccaaatcatcttttattaatataaaaagggcatatttagcaaaagacacacagataaaagagtcactatggctcaggacacaaggcagggaggtgccaggcctgtgcccctgctgggggagaaggaggctcgggacaaagtgggagaagtgctgggaagggctgagcggtaggggccacaaaagttccggtgggcaacactgtcggcaggtcatgggtgggactcatggggacctcgctgctaactcttgttgtgggggggtgtccttagtgctgccacctggagggccactccttggttcctggaggggacccaccaagggacacaggacaggaagcccaggatggttagtgcaactcgggatgaaggccagggagaagcgggtgctctgcagtggccggataggtccagacgctgaggccgaggcgcttcctgttacgtgcgggcgttccgctctgtctctgccaggcactctctgactagggcccgggcatggatgatacctctcttcaggcgctccatggcgctcttgctgccagcataggtaggccggatctctttgcccatctcctctatgactgacagcaggtccgtgtaggtgctctgggagccctgggcgccgggtggcttcatcgcctgcacgtagcccatggaaggcggtccaaagtcgttaaacagcggtctgaaaggagcgccggctcctggcactgagcccgacggcgacgggacgcttcctgtagggaccggggtgcccggcccaggggtgctggagccaggggtgctgctgggagcaggggcgatgggtttgtaggacatccccaactcctgggcgcggcggacgccagccggccgctcctcgggggttggctgcggggccgctcagccgcgctctgattggcaagcgggctgcacgcccctggtaaatagaggtctggccggaagggcgagcgggcacgaatgctccctcactcccgattggtgcgcgaagatgtcactcgagcctccttattggccgagacctgccccagcaggtcgcaaccgccgccgattggcctccgccttccggacctcgcacctgtctgctccggattgggcggtggccaccgccctccgcaattggcgagttcgcggcccgggccggcgcgctctcaatccgattagtccccaggccctagaggcggggccttgggaaccgggacccggggctgggctgccggttcgcgccgaggggtcttcccgggcgcgggcgctaccctcgcgcctcactcgcgctgcttcagacgtctgctccgctctgcccagtttcggcccagcaggggttgctgtcgcagctgccgtcgccgctgccaccggtgccttgcgcgcttctccgctctgggggccgaaggacgcagggctttgac

SEQ ID NO: 438656 - DNA, 1084 bp, Homo Sapiens
gaaggggggaacacgagtttggggtacaagggaaaaactgggtgggacggcgttaaagcggtggcgccccctgggagggaattcttttgagaggcgggcccgccctttgaagacaataatatagggggggacgtcttctcaaggctgaagttttatttaaaatgtaaaagaaatgttcccccaaaatgctggtgaataaagcaaaaggataccatacagtgctctcttcctacgagttagccagcctatccaagtacagggcgatatacagtacttaatgctggtagaatttcacagtagtttagtgttaaagattatctgtgcctagattatgaagagattctcagtgtgtgatgtttagttcagggtttacatcttactgggcatgaacaagagcccctgctccttggccatagccaaatcccttgggcccaaagttctttgcatagcatcctttacaatagatttcaccttctttttcagtcagagttgttgattcaagactcttcccacactttgcacatcggaaacagtttttgtgccagggctttccagctccaattatcttctcggcagcatatacagaatccccacatctggaacacttctcagcacctccatatttctgagcaaatttagaagtgtttggatttgttgtaggcctgtgaggctgaacactctctggtttgatgcccagcctctcgccacggtccatgttaagcgtgccagcgccctggccataaccgtagccttttggcccatacttctttccgtagcaggatttgcagtagatctcttcatcgtgaattgccactgttgtgctatctaaatttttcctgcaaaccatgcagagaaagcagcagcggtggaagctcctgccatcacactgcacctcttctgcgtggtacacggtcctcccacaggccccacacttgtttccacctccccagacaggcattttgagtcggaggcgggagcacgtaccgcaggcggagctagcgaggctgggctggagggagggtccagggagtccgagatcccaggcgaagcgcgcggtgcctagattatgaagagattctcagtg

SEQ ID NO: 438657 - DNA, 978 bp, Homo Sapiens
  misc_feature (68)..(68): n is a, c, g, or t
  misc_feature (370)..(370): n is a, c, g, or t
tgtaccaaggcgcgaattccctttgttgacgcatggatctatgttttatgtgtgggggttttgaaaanccgaaaactatttttctctatttgattttaggtttgaaaacgcacccagacgtttgggggggaataaaaagttggaacgggagaagggggaaatatttcccgagttaaagatgtgtttccccctatgggtgtgtatacttgggggtgatgggacaaaaaattttgtgagttgtgttttcttaaaccttggggtctggaggggcacagtgtctacgccctgggtgcagtgccaggtttaggccccagggtctttgggaagaaatgtagggagagggggtttttcccaaaggggccaagggatngccaaagcggggatttctttgtttgccgaagagtgccaccccaaggccaattttttggggaaagccagggatgggggagtggggcatggagatccgggtttgtttgggaaccactcttggggttcaggcccttgggtgaggccacagggaggctggcacacaagccactttggtgggttttgcccggttcagggtggggaaggcaggagtagtgtctgtgtcaggacgggaagaagcttcagtacatccctctcttgcacctctgacccactccacctgaggcgttggctccctccccctcatcctctcagcgcacatgcctgaggcgtaggctcccctcatcctcgtcaccgcgatggggcatttgctcccagacctctacttccctcaaggccttctcagtcagctggggctcagtggggaaggtggtctcagaaggcccctgaagcatacgtgcttttgctgggcagaaactggcaagctggcagtgctccctggcaccagtttcacgggcgcaggccccaaggggccgtgtagagggcggggtgggcatcctggcctggcctgcagtgccaggaccccacgctgtgctgctgccccgcttcctg

SEQ ID NO: 438658 - DNA, 2779 bp, Homo Sapiens
  misc_feature (282)..(314): n is a, c, g, or t
  misc_feature (609)..(654): n is a, c, g, or t
agggggaaggggaaaattaaggcccaaaagggggttctgaaagggggaagagttttgttttttcccttcacctggccttcctttgttgggggccacctttggttttgggggctgaccgtggggtccatgaagctcccattagtatcagaaggagaagggcgggcccatgacaaaggattctccaaccagggggtggaatttggcttttcaggggctgatgcagctattatatttcaattaaaaaatagagggaaaagaggctccttctaaagaaaaataacnnnnnnnnnnnnnnnnnnnnnnnnnnnnnnnnngtgtctgggctggaggagtgtttatccactgagtgctcagtgcagggcagatcaggatcctgggtggcaggttccatctgttcctggtgggggaaggagggccccgtagggcacccattcacctgctgtgatggcactaaggaggaacttaagggaaaggtacatttccaccagataaagccagtgatgtgtcccctccaatggagctgtatgccatataccaaaagagcactggcttggcaagaaagggctctcttgctcagtgcttctgcgtttgggctattaggaatgacannnnnnnnnnnnnnnnnnnnnnnnnnnnnnnnnnnnnnnnnnnnnncccatcttggcccaggggcatgttcaaggtgaacagggccccagtcttgtcatcctgtatgatgaggccccactggagcctgctttgctagaaggagcagcccaagtctaagctgaggtatatttactaatcaccttaaagcatcctgacaaactgacctgaaccccacaccagctgcagaatctgcggtcccaacggtccctcctcaggggaggtcctcagtaaatccagactttcacagaagcttatttcaatctatcagcctttcccatctttacagaaatccctacccagtggtgggtagcctacttggatatgtgtgttctgccgtctcagaggagtggcagggaaggttgggcctcggcacttggccttaccgggcttggcacagcactggcctgctgcctcatggaccagagtgtgggctgacttcagccaggaggtgctggtgtggccgtagcactgttacgtatatttaacggcttccacactggttggaaaacagactctgtttttaatctcttaggtggcccctgctactctacccacaccctcagggttcccccatgactggcatctaaagagccaatgcctggaatagcatgggctccggcactaggaccaaactccacttacattgatgccatagcggttgttaaatacttttatcttcacccttaccagagcctcaggcacctttgtggaccctgggggacttcctgacctgtcctaactctcagcacctactgtgtgggtgacaggcctcaaggatggggggctataccccccagcaccaccagttctgtttctctgtctccctcatggtaggggctgccgggctatggcttttcttgtccagaccagcccttgctgctgttgcctcagcaccctgaccccttttgcttcggctttctcctccctcccctggcaatccgatgttccctgaacttaagcctgtgctgccctgggggaagcaagccacagggttatgcatgagatgctgctgcagttgccctggtggcagtggtgctggctgaggcgtaagagctggtgagggaggagagtcctctcctatggtctccactactccccagttaagagccagaaagtcttccaggcttctcagggcactgagtgtagacataggccagctagatccctccacagcttttagaaaagtgggaaggggcaaggggaagcaaagccatcctcgtgtcccttctcccgcagtaataaccctccacgttcctggtttctttccccagcaaagaggcagaactatggcagtgcccatcttgcaaaggggaataaagcaatttggtgggtttgactggtgttctgattgtcctttacttcctcttctctgataatgcatggtgtccttccatctttcctttttccctctttcctccccccccgggccgcactggcttcccaattctgtcttggttttctccatgtgagagaagagcatgcatcggaggggggagcagcctctagcatttgtcatcttcttccgtgtcacttagcaggttgttgacagccccacacatcatgcctggcccaggccccccgcgcctccgccgccgatagtgcccgttgggcatctgccagctatgccgcaggggtggggctgagccgatggtgttggaacggcccaggctagtagccacggctgcttcgaaagtgagcgtctcctcctcaccacagtctgaggcgtgggagtcttcgtgcagggccaagtagggctcggagatgtagcgctgtggggaggcatgttggctctgctgggggtgcggagagttggaagactcggtcaggcaagcattgttgctctccagagcttgggaggtcagcggggagccctcctcgcttccatcagcaggtggagagatgctgcccgcgtgtcgaatcagggagctgtaggaaaggaggggccggggctttggcgggacgggtgggagctgccgacgacttcttcttggggtgctggtgtcagagacagaggggatggagctctcacttagggaacctgtgccctgtctgttgggcgtctgtgacctgccctcactgggtgacctggattgacggcgctctggggactcccagtcagcctgggtccctc

SEQ ID NO: 438659 - DNA, 1493 bp, Homo Sapiens
  misc_feature (1212)..(1263): n is a, c, g, or t
  misc_feature (1278)..(1278): n is a, c, g, or t
  misc_feature (1313)..(1313): n is a, c, g, or t
  misc_feature (1341)..(1341): n is a, c, g, or t
gagtttgtgactcaacggaaaattattttattttctggtcttaatagaagagtaagtgcaggctgagggaaaagaaacccaatttcttggtcaagggaaggtgaataaaagaaattcactggtaatagaaaacccaggtggtcagtcaggtgaccgcatctgcagtgctttccaacactttattcaggactcaaatacctgtgtgtatgagttcaaggagttcaggaagatttcctggcacagtaaatttagtgttgtttatactatttgcaggcaaattccatttctggaaattgctctgccagcctgcatttctcctcttgaaatggcataaggtttcactaaaattccctttctcaaaacaccatgcaatagactcactggctcagaatggtcgtcctgttgtaggcctccccctagggaaagctgcatttccgaggtggaaaaagcaattttgtgcacacaaagcagcccatagcagcactttggcatgaaatgatgctgagcagaggaaactttaaaagcaatacaaggcccagtatcagcgtcttacgtaacaatcacacctgttaggatcagggtgctgtatatcacattcccagccaccctcaagcacacatgtgctaagtgggagaggaaaatgaagacaaaagagggtctgagagtgggagagctctgtctctgcctcactggcctcctctgttgggacaactttggtttggggggctgaccgtgggtcatgaagctccattagtatcagaagagaaggcggggcccatgacaaatgattctccagccatgtggttgaatttggcttttcagggctgatgcagctattatatttcaatttaaaaaatagagggaaaagaggctccttctaagaaaaataacaactctggattgctcctgcccaagaggaggagtgtgtctgggctggaggagtgtttatccactgagtgctcagtgcagggcagatcaggatcctgggtggcaggttccatctgttcctggtgggggaaggagggcccgtagggcacccattcacctgctgtgatggcactaaggaggaacttaagggaaaggtacatttccaccagataaagccagtgatgtgtcccctccaatggagctgtatgccatataccaaaagagcactggcttggcaagaaagggctctcttgctcagtgcttctgcgtttgggctattaggannnnnnnnnnnnnnnnnnnnnnnnnnnnnnnnnnnnnnnnnnnnnnnnnnnncccatcttggcccangggcatgttcaaggtgaacagggccccagtcttgncatcctgtatgatgaggccccactggancctgctttgctagaaggagcagcccaagtctaagctgaggtatatttactaatcaccttaaagcatcctgacaaactgacctgaaccccacaccagctgcagaatctgcggtcccaacggtccctcctcaggggaggtcctcagtaaatcca

SEQ ID NO: 438660 - DNA, 773 bp, Homo Sapiens
  misc_feature (65)..(65): n is a, c, g, or t
gggtcttcctcagcaccatcatttttcagaggcaaaggagatgtttcggaggcgaccttctcttnccactagttttggagccctggggggtaaggcagggcatgacgtactctgctttgtcacaccagctgcaagagatttcacatctgtgctctccagagagtagctggctgacttgggacaaccagagacgctgctactgaattctgcagtgactgggctagtggggctggccaggagctcacagccatcaaaatcaaaaggtgctgggcagtttctctttggtgtgcctggcgtcttttgtctagggtaactataactcctgcttggatccagcaggaagtcactcctggtctggctttctgatgctcctgaataatggttaggccatgagagccgagaggacacagcttcagcagaaggacttccaaacggggatttcaggtccacagaatcagttttcactcggttacatggatagcaggaaacaggagtgctttcagaaggatttgtgtcagttttagtgacgatgttgtgtagccctgaagaatagtaggacaaggtggggctgggagagcgagtctgttgccgcgctggcttgactgtgcgaggagggatggagggactggtggacaaaggctttgcgcttcggggtggaacaggtggggcgttcaggagccggcattcttctctgacggcttcagatttgggaggcactggaggtggaggtagggcagtatctgaagacttcactgctgctcccagagtcccag

SEQ ID NO: 438661 - DNA, 1365 bp, Homo Sapiens
  misc_feature (234)..(242): n is a, c, g, or t
gccgccctctagcgcaaacccccaaagggggctcggcgccccccaaaagggcattcccgctggggtggatcacacagagggctcccagcttggaagccccaacccctttttggccggacaattcagtgcgcaggatatatgggtttttttcggtgggcccttggggtccccgggggtagcctgccgtgggcttccccgaagaagggctgcccgtcgggggcccccctctggttnnnnnnnnnttgttccccccccggtgttttccgctggtgcttgatgccgggcggaacttgtcgccaaaagcccttgcccacatatgcccccacttgtaggggcttctccaccagtgtgtgtccgctggtgtttcaccagtccagaactctgccggaagctcttgccacatcacccacagatagtggggcgctcaccagcagggatccgggaccgaggaatctttgggggaccctgggctggtggccgggctctatagggcttctccccactatgagtccgctggtgtttgatccgggcagagctatccccaaagcccttgccacagaccccacacttgtagggtttctcccctgtgtgggtccgctggtgtttcaccagatctgacatctgcctgaagcttttgccacactcaccacacacagcggcccgatcactactagcctggccccagcgtggttcacccaggagccgggggcctctgtcccgaggctgaggctttcctagaccctctctctggacccataagtcatcccagttctggatgccttcaggtttgagagagacatttcctacttcatgatctggagccaaatcttcttccttgaaccccaagtcatcttcctgtggggtatgttcaaactcattcggctgagaaatcacgttctcactccctagacctgtgcgggcgcctctctgtggctccctctcctccgggcggtggagatctgggccccaaggctctaccgcgcgctccatcgccggcacgccgccctgagcaaggggacagacagcatcccgcggtcacgcagccatgtgtggcccgcggcgccctgccgctgccctctgccggccagcgcgggcaccgggcggcgtcgggtcccaggtacgggcgcggctcccggtgccccctgcccgcgccgccggccgcccctgcacctgctgctcctcccagcgcgcagccgccgctctcaccttgccggccgcctccggctccgccaccccggcgccctccggagctcctcagcggggtgcaggcgcccgagccgccagcggctccgggatgcaggtccgcgccaagccgggagcgggctcggacccaggcgtcccgggggcggcgaccggatcccggga

SEQ ID NO: 438662 - DNA, 1004 bp, Homo Sapiens
  misc_feature (421)..(452): n is a, c, g, or t
  misc_feature (817)..(836): n is a, c, g, or t
ggcctgggtggcgaattcggcacgaggcgtaggaaaaagtcggaatgctctcgacggcctcgtcccagcctgggacaggccccctttcccctctctctgcaggccaggagggcctccttcctgccacgagggaggggagtcgggccccaggtcgcccccgcccccagccctgcatgcaggtgccctcgctccgccccatcagttcctgcccctgcccctcatgcagactgccctgctggggccgggccggagggtggagcagaaaggggaccccggagccgagcgaggaggaccaggcagccgccgctgccgcgctaagccaccacctgcgcttaggtaggcgtcctgctcgccgactttcagttccttgggagggtgttgggtgtcgtccttttcaaaagtgttttggagctttctgtgnnnnnnnnnnnnnnnnnnnnnnnnnnnnnnnnacgtggccacttttctctggattttagctgtaatgtctttactctttatttaggggtggggcattcattgtttgggtcttttgctgttggaatgggaactcctcctccatttgagcaacttgggaacaatttggtaacacaccacaggaagtagctctcccccccagccccctcctccctcaagggagggttggggggcctgtccagagggtcttcagaagcccccctgggagggaggggaggatgaccacgcccagctcccctccagggtgtggattggccccctctgcgcttgtcttttctgggccttactcctcctcctctgggtctcccggttctgggcccctttctggagtccttgtggnnnnnnnnnnnnnnnnnnnntttcccgagctggcaggcaacacccaagccttcaggttcaggcccctccccgaaaaatacctcccccttggtccccccctaagcggtcggcctactgcacccgcaaatttatttccgcgccttccggcccctgttggcgggctaggcgcctcccgtacaacgcagccc

SEQ ID NO: 438663 - DNA, 624 bp, Homo Sapiens
cagctggtcacgctgaagccagggatgggcctggcgagaaagcaacagcagcttctgcaggtgcaagcaggcggagttcagttccaggagcagagacaccatggagaagcccacgtagtggccagacagaacagcggtgctgaggcagctcaccaccaccaaatgatgacagagaagatcccaggtcttgcccaaggtctggttccacagcaggtcagctccgtctgccaggaagtaacccacagacacagccaccagcaccagagcccagcgcgggtggccatggatggggtcggcggccatctgagggtacagtgacaggccgagcagcgccccggtccccgagagcaggctgtgcgccagggagacgcagaggttccaccactgccagcggtcccgagcggccgattccggcgtgggcagccgccgcaacccccagtgcagcccccggaacgcgaggaaggaggcgccggccaccaggagccccgtgggcgccatggcctggcggttggggggttgcggggagtccgggtcggtcccctcggcgcccgcgctctcggccgggactgggaacccgtttcccggcagggctggggccccggctcccctccccgccgcgccttt

SEQ ID NO: 438664 - DNA, 1291 bp, Homo Sapiens
  misc_feature (82)..(82): n is a, c, g, or t
  misc_feature (742)..(811): n is a, c, g, or t
  misc_feature (1059)..(1059): n is a, c, g, or t
  misc_feature (1066)..(1066): n is a, c, g, or t
  misc_feature (1132)..(1132): n is a, c, g, or t
tccaacataagccatgttgcagatgaagaaactgacccacacggtgagacaagcacaggtgggtctgactcttcctccctgncctgagatccatctgtcgagtgccctgttttttccccactttgaactgactggttactctaaggaagtgaactgaggatgttagctttaagccaacccagcctctttgtccacagcagagctgaggtgaacagctggaaccctgctacatccgtgctgctccagtctgttctgctcatggctccatccttctggctgtcactcttcctcttccccttcccaaccaaacctgagcagctttgaagcagaacttgggaaggacagggctgctgctgccagcgacacctcagaaagcatagcctcggcttcctgccccatgtgtccctggaagctgtaccctgactctgcttccagaggccagcagatggtgggttacagacgggtcagcctgccaagtgcacctgagggacctgacctgacacaagccattttgtccctagagcccagctgggactcctgcttctctaggcagggcagagggaggagacacagcacaggcacagagcatgggacagggacccccgagtctggattcaagtcctggccctgctagtaactcatgtgagccagcttgagcaagtcccttcatcttgctagagctcagcttccttgcctataaaacgtaggtggcaatgccctcttcctgaggttgctgggaggnnnnnnnnnnnnnnnnnnnnnnnnnnnnnnnnnnnnnnnnnnnnnnnnnnnnnnnnnnnnnnnnnnnnnnctgacaggcaactggagctggtgagaatggggtcccctgactgtcatgcccaggcctcctccaggcccactcttcccccctcttccctgaggaaaccaagtctcccttatcaagaagaagctgggggagctgggaaggaacattacagggaacaccagagggagtctagcgggtggggcaggctttctctctgcagcccccctcagcagtttcatttcattcctggggctgaaccccttgcccctggnccttgcnctccctttcggggtcagcaccctcctggaaaaaggggtgtggctcagggaacccccaggccccaantcccgggaccggggctggggggaaacctattccctggggaaacgggaaaccccatgggccttgcaaggaaaaaaagggccctctaagcggcattctcctgttttggtaaagggagtggggctccccgggacccaccttttttcttgggtgtagacaggg

SEQ ID NO: 438665 - DNA, 1032 bp, Homo Sapiens
tcctctgcagttttcggcaattcagcatcatccattctgatccctgtggccattcggaatggagtaattccagccttcccttcgtcacttcttggcgttcattcctccaatcttcataatagtaactatccgcaataagcacggttcttcagggaacttctggaaagtgtttctttctctttttctctgcctgtaactccttttctggcaaagcgagctatgtcctcatcctttcttctcctgatgccttcgtctctctgcctcaatagccagcttctcctgaatttcctgagcaatttcacagtcttgttgttcaaggtctttgtagcgcttctggagctggcctgcgcctttcagatcttcctcttggagctgcttagccacctggagatcatgctggacccaacggttccgctgaacgttcgatgccaaatgatgctcaatctcttgttcctgcaggctgtgatccagggtgtggtcctccaggacagctaatatctcggcatacttccttgactccagtcagcttggactgttcgatgtctgacttcagccataccggtccagggtcccggttgccccttttacgcgggcttcccggtcaccgcacggctctcgagtcggggtccccgatgcgtctagcagtcagcgccggacgcggcgcataagtccggccaggcagggctcgcaggccggagaacggagcgggtcgggcgggcaggggctggtgaccaaagcagcgggagacggtccccgaggcaccaagctggcggcccagctgccccgccgcggccacctgctccgcgtccccggccccaatcgataccaaatatccggagcccggaaatggaccggggccgtccagtacggagggagagaggagacagaaaggcgggcgggccggctgggggagggggagctgcaggtctgtaaccgcaattgcgagtggctggcgagcgaatgatcagcgcccgctgccacctcgctgttgtctccctcgtgccgattcagcaccagcctctacctagccta

SEQ ID NO: 438666 - DNA, 1085 bp, Homo Sapiens
gccccctctcttcttttttgacctgtggagaattttgctggctctttaagccgtgtttgtgtgggtttccccactcggggggttcttggcttttcttttgttccaagaagagggattttcttccggcttccttgggctttttggtaagcttttcttttcttcaggccattagaagttcgagggattttgttcatctgaagctactggagctgctctcatgtccccctgggtagccaaaagttcttcttctggcagttttctggcaatttcaggcatcattccattcctggtccctgtgggttgttggtgctggagtagatacagcttcttttattcctcttggtttcattcctccatcttcataatagtaactatctgcataagcacgggttgcagggaactctggaaagtgtttctttctctttttctcttcctgtaactccttttcttgcaaaaggcgagctatgtcctcatccttcttctcctgaatgcgtcgtctctctgcctcaatagccagcttctcctgaatttcctgagcaatttcacagtcttgttgttcaaggtctttgtagcgcttctggagctgggcctgcgctttcagatcttcctcttggagctgcttagccacctggagatcatgctggaccaaacggttccgctgaacgttcgatgccaaatgatgctcaatctcttgttcctgcaggctgtgagccagggtgtggtcctccaggacagcaaaatctcggcatacttccttgactccaggcagcttggactggtcgatgctgacttcagccataccgggccagggtcccggttgcccctttaacgcgggcttcccggtcaccgccggcgccgagcggggccccgagcgcagcagcagcgccggacgcggcgcaaagtccggccggcagggctcgcaggccggagaacggagcgggtcgggcgggcaggggctggtgaccaaagcagcgggagacggtccccgaggcaccaagctggcggcccagctgccccgccgcggccacctgctccgcgtccccctcgtgccgaattcaccacccaggcctcgctacctagccgtt

SEQ ID NO: 438667 - DNA, 826 bp, Homo Sapiens
  misc_feature (252)..(252): n is a, c, g, or t
cggtaaccccgtgttttgccttggcatgggcagctgtatgggccacgtttttgaacccgccagaaccccgttgccagccgccttctggccctggtggcccggaggccctcaccaggccaagcccattttgcccagctccagtgagcccagcgtccaccagctgcagtccagcccctgcggccagccgcgcgcagtgaaaggtactctgtgcaccaggcccagctcctcttccgaggcctcgcgggctgacanccgcagacacctctgttccaggccgcgctgccgcaggcgatccagggctgcggtcaggcgctcaggacgctcgatctcgcactcggggctggggcagatgaggagctcagttcagaggtaccctcgccggcgccccgcctcggccaggtcccacttactcgtcccagagcagccggggtggccgtcatgtcctcatggtacacaagcgcggtccccatggctgcgccgtggtcaccctgggttcccaaacgccctcgctagtggtgcctggcactgcctgtccccaccttcggccgggagcagccggaggcctggtacctgcctggggcgcaggcgggcggcgggcaccggcctgggcgggagcgcacagaacctaggcaggctccgggatcccaggcgcgcagaaggcacggagcgaggctgcagtcgaagggggaggctccccgcgcctggcttccggcttcctcgcctcggacctgggtcccgccccgcgccctgctcccggtcgctatcgcgagctccgccccggagcgaggaaccagcgggcgcggaagcctcggcgccccgagccgcc

SEQ ID NO: 438668 - DNA, 1291 bp, Homo Sapiens
gcgcagctccgagggctggcggctcggggcgccgaggcttccgcgcccgctggttcctcgctccggggcggagctcgcgatagcgaccgggagcagggcgcggggcgggacccaggtccgaggcgaggaagccggaagccaggcgcggggagcctcccccttcgactgcagcctcgttcggtgccttctgcgcgcctgggatcccggagcctgcctaggttctgtgcgctcccgcccaggccggtgcccgccgcccgcctgcgccccaggcaggtcccaggcctccggctgctcccggccgaagccccgagtgcgagatcgagcgtcctgagcgcctgaccgcagccctggatcgcctgcggcagcgcggcctggaacagaggtgtctgcggttgtcagcccgcgaggcctcggaagaggagctgggcctggtgcacagcccagagtatgtatccctggtcagggagacccaggtcctaggcaaggaggagctgcaggcgctgtccggacagttcgacgccatctacttccacccgagtacctttcactgcgcgcggctggccgcaggggctggactgcagctggtggacgctgtgctcactggagctgtgcaaaatgggcttgccctggtgaggcctcccgggcaccatggccagagggcggctgccaacgggttctgcgtgttcaacaacgtggccatagcagctgcacatgccaagcagaaacacgggctacacaggatcctcgtcgtggactgggatgtgcaccatggccaggggatccagtatctctttgaggatgaccccagcgtcctttacttctcctggcaccgctatgagcatgggcgcttctggcctttcctgcgagagtcagatgcagacgcagtggggcggggacagggcctcggcttcactgtcaacctgccctggaaccagggttgggatgggaaacgctgactacgtggctgccttcctgcacctgctgctcccactggccctttgagtttgaccctggagctggtgctggtcttcggcagggatttgactcagccattggggggaccctggaggggcaaaatgcaaggccaacgccaaaagtgcctttcccccaccttcaacaaagactgtcttgcaaggggcttggccccgccggccccgggttctttgtgccacggactcggaaagggccgcttttcaccaccgggaagaaccatctgggcgggcaatacagtcggggtcttttgccaattaccaaaaaccccttggtcttgggtgatcattccgcccccccc

SEQ ID NO: 438669 - DNA, 1010 bp, Homo Sapiens
  misc_feature (151)..(151): n is a, c, g, or t
ccttcggccgtgggcctgcatttgcccctcaaaaggcccagtgggagccagcaggtgccggaaaggcagcccggtagtcagcgtttcccatccccaaccctggttccagggcaggttgacagtgaagccgaggccctgtcccccgccccantgcgtctgcatctgactctcgcaggaaaggccagaagcgcccatgctcatagcggtgccaggagaagtaaaggacgcgggggtcatcctcaaagagatactggatcccctggcccatggtgcacatcccagtccacgacgaggatcctgtgtagcccgtgtttctgcttggcatgtgcagctgctatggccacgttgttgaacacgcagaacccgttggcagccgccctctggccatggtgcccgggaggcctcaccagggcaagcccattttgcacagctccagtgagcacagcgtccaccagctgcagtccagcccctgcggccagccgcgcgcagtgaaaggtactcgggtggaagtagatggcgtcgaactgtccggacagcgcctgcagctcctccttgcctaggacctgggtctccctgaccagggatacatactctgggctgtgcaccaggcccagctcctcttccgaggcctcgcgggctgacaaccgcagacacctctgttccaggccgcgctgccgcaggcgatccagggctgcggtcaggcgctcaggacgctcgatctcgcactcggggttcgtcccagagcagccgggtggccgtcatgtcctcatggtacacaagcgcggtccccatggctgcgccgtggtcagcctgggttcccacacgccctcgctagtggtgcctgccactgcctgtccccaccttcggccgggagcagccggaggcctgggacctgcctggggcgcaggcgggcggcgggcaccggcctgggcgggagcgcacagaacctaggcaggctccgggatcccaggcgcgcagaaggcacggagcgatcccgggaattccggacc

SEQ ID NO: 438670 - DNA, 1383 bp, Homo Sapiens
  misc_feature (41)..(85): n is a, c, g, or t
  misc_feature (139)..(189): n is a, c, g, or t
  misc_feature (255)..(289): n is a, c, g, or t
  misc_feature (361)..(372): n is a, c, g, or t
tcggggggggtgggcaccggacattgcacgcaagctttctnnnnnnnnnnnnnnnnnnnnnnnnnnnnnnnnnnnnnnnnnnnnntggggccgcaaccccagaacttgggtggggagggggcccttccccccctctttnnnnnnnnnnnnnnnnnnnnnnnnnnnnnnnnnnnnnnnnnnnnnnnnnnnccacaaggcgggtttccaccattcttttggcttgtctgggaaggggtctcttttcccacaggcgcnnnnnnnnnnnnnnnnnnnnnnnnnnnnnnnnnnnttccggggatgggccttttttaggggccccgttccggagccatggggcgccccatatggccccctggaccannnnnnnnnnnnccccgggttcccccccaggcagcggttctttttcccgtccaaggccacccctggactccccccccagggacttcccagggtggtaggccccccctgcaggcaggctgtgtgaggttgggcgaagccattctggggtggccctgcctttgccccctggttccagggcaggttgacagtgaagccgaggccctgtcccccgccccactgcgtctgcatctgactctcgcaggaaaggccagaagcgcccatgctcatagcggtgccaggagaagtaaaggacgctggggtcatcctcaaagagatactggatcccctggccatggtgcacatcccagtccacgacgaggatcctgtgtagcccgtgtttctgcttggcatgtgcagctgctatggccacgttgttgaacacgcagaacccgttggcagccgccctctggccatggtgcccgggaggcctcaccagggcaagcccattttgcacagctccagtgagcacagcgtccaccagctgcagtccagcccctgcggccagccgcgcgcagtgaaaggtactctgtgcaccaggcccagctcctcttccgaggcctcgcgggctgacaaccgcagacacctctgttccaggccgcgctgccgcaggcgatccagggctgcggtcaggcgctcaggacgctcgatctcgcactcggggcttcggccgggagcagccggaggcctgggacctgcctggggcgcaggcgggcggcgggcaccggcctgggcgggagcgcacagaacctaggcaggctccgggatcccaggcgcgcagaaggcacggagcgaggctgcagtcgaagggggaggctccccgcgcctggcttccggcttcctcgcctcggacctgggtcccgccccgcgccctgctcccggtcgctatcgcgagctccgccccggagcgaggaaccagcgggcgcggaagcctcggcgccccgagccgccagatcccgggaattccggacccggtaccagcctctg

SEQ ID NO: 438671 - DNA, 872 bp, Homo Sapiens
  misc_feature (810)..(810): n is a, c, g, or t
ggcccgcggcgcgttagcggactgcagccgcgagctcctggaggcggcgggatggaggcggcggccgagcctggaaacctggccggcgtcaggcacatcatcctggtcctctcagtgaaaggggggctgttggggaaaagcaccatctccacggagctggccctggcactgcgccatgcaggcaagaaggtgggaatcctggatgtggacctgtgtggccccagtatcccccgacatgctcggggcgcagggcagggctgtgcaccatgtgcgaccgcggctgggcacccgtcttcctggaccgggagcagagcatctcgctcatgtctgtgggcttcctgctggatgaagccggacgaggccgtggtgtggagaggccccaagaaaaacgcgctgataaagcagtttgtgtccgacgtggcctggggggatgctggactacctggtggtggacacgcccccggggacctccgatgagcacatggccaccatagaagccctgcgtccctaccagcccctgtggggccctcgtggtcaccacgccccaggcggtgtccgtgggggacgtgaggctgcgagctgaccttctgtaggaagacgggcttgcgggtgatgggaatcgtggagaatatgagcggcttcacctgcccacactgcacggagtgcaccagcgtcttctccaggggcggcggagaggagctggcccagctcgccggggtgccttcttaggctccgtgcccctggaccctgcgctcatgaggaccttggaggaggggcacgatttcatccaggagttccctgggagcccgncttcgctgactcacctcatagcccagaagatctggacgcgacgcccgcgtgcctcccctgac

SEQ ID NO: 438672 - DNA, 1151 bp, Homo Sapiens
gctctggcatcagtttcacaggctcagtgcgtgggggctagttttcccgcggtaagggggtcgttctgtactgttaatccggggatcccaggggtccccgggcttctgggagttcccgggctccctttagggtccgcaaaagtcctggcttccgcgttacttgttggccccgggggctgccaggggccccaggatggcaacacggagggaaggagacggcaagccgcgctcgttttccaaggtgcagagcaggcagaccccggccctgcaggcccaaccaggcgaagctgctgggtcgacacatctgggggctgggctgttcggggagaagctttcccgctgacgctgcctgggcctgccctgcaggggcccgggaaccgagcccaggcctctgtttctctgagaggctggagcagagcccttggtggccctggaaagcggctgcaaggtggccttagtcaggggaggcacgcgggcgtcgcgtccagaatcttctgggctatggaggtgagtgcagcgaaggcggggctcccggggaactcctggatgaagtcgtggccctcctccagggtcctcatgagcgcagggtccaggggcacggagcctaagaagggcaccccggcgagctgggccagctcctctccgccgcccctggagaagacgctggtgcactccgtgcagtgtgggcaggtgaagccgctcatattctccacgattcccatcacccgcaagcccgtcttcctacagaaggtcagctcgacgcctcacgtccccccacggacgcccgcttggggcgtggtgaccacgagggcccccaggggctggtagggacgcagggcttctatggtggccatgtgctcatcggaggtccccgggggcgtgtccaccaccaggtagtccagctccccccaggccacgtcggacacaaactgctttatcagcgcttcttgcctgcatggcgcagtgccagggccagctccgtggagatggtgcttttcccaacgcccccctttcctgagaggaccaggatgatgtgcctgacgccggccaggtttccaggctcggccgccgcctccatcccgccgcctccaggagctcgcggctgcagtccgcttacgcccgcgggccgtcagcctcccagctagagcgaa

SEQ ID NO: 438673 - DNA, 957 bp, Homo Sapiens
tggcccttagtcagggggaggccaggcgggggtgcgcgtcccagatttttttggggctatggaggtgagtgcagcgaaggccggggctcccgggggaattcctggaatgaagtcggggccctccttccagggtcctcatgagcgcagggtccaggggcacggagcctaagaagggcaccccggcgagctgggccagctcctcttccgccgcccctggagaagacgctggtgcactccgtgcagtgtgggcaggtgaagccgctcatattctccacgattcccatcacccgcaagcccgtcttcctacagaaggtcagctcgcgcctcacgtcccccacggacaccgcctggggcgtggtgaccacgagggcccccaggggctggtagggacgcagggcttctatggtggccatgtgctcatcggaggtccccgggggcgtgtccaccaccaggtagtccagctccccccaggccacgtcggacacaaactgctttatcagcgcgtttttcttggggcctctccacaccacggcctcgtccggcttctccagcaggaagcccacagacatgagcgagatgctctgctcccggtccaggaagacgggtgcccagccgcggtcgcactggtgcacagccctgccctgcgccccgagcatgcggggtatactggggccacacaggtccacatccaggattcccaccttcttgcctgcatggcgcagtgccagggccagctccgtggagatggtgcttttcccaacgcccccctttcctgagaggaccaggatgatgtgcctgacgccggccaggtttccaggctcggccgccgcctccatcccgccgcctccaggagctcgcggctgcagtccgcttacgcccgcgggccgtcagcctcccagctagagcgaaggccattcctcgtgccagataaccacacaggcctcgtactagcctata

SEQ ID NO: 438674 - DNA, 1144 bp, Homo Sapiens
tttttttgtcgccacagcagcggacacgtttaatggcaggcgcctctacagttacaagacatgcctgaggtcagttcgcccccttagggggcactccccgagctaaacacagatgacagcgacccagggtgctggaggcccggggtcacctgaggactgcagaagtcctgcgctccgctaactgtgtggacacgcggctgccaggggcacaggtaggcaacatggatgggaagagagcccaggccgcccccgtctcacagctgcagagcacgcagaccacggcactgcaggccaaccaggcagagctgctggtgcgacacatcctggggctgggctggtcggggagaagctctcccgctgacgctgcctgggcctgcccctgcagggcccgggaaccgagcccaggcctctgtttctctgagaggctggagcagagcccttggtggccctggaaagcggctgcaaggtggccttagtcaggggaggcacgcgggcgtcgcgtccagaatcttctgggctatggaggtgagtgcagcgaaggcggggctcccggggaactcctggatgaagtcgtggccctcctccagggtcctcatgagcgcagggtccaggggcacggagcctaagaagggcaccccggcgagctgggccagctcctctccgccgcccctggagaagacgctggtgcactccgtgcagtgtgggcaggtgaagccgctcatattctccacgattcccatcacccgcaagcccgtcttcctacagaaggtcagctcgcgcctcacgtcccccacggacaccgcctggggcgtggtgaccacgagggcccccaggggctggtagggacgcagggcttctatggtggccatgtgctcatcggaggtccccgggggcgtgtccaccaccaggtagtccagctccccccaggccacgtcggacacaaactgctttatcagcgcttcttgcctgcatggcgcagtgccagggccagctccgtggagatggtgcttttcccaacgcccccctttcctgagaggaccaggatgatgtgcctgacgccggccaggtttccaggctcggccgccgcctccatcccgccgcctccaggagccctcgtgccgaattcgccacccaggcctcgctc

SEQ ID NO: 438675 - DNA, 941 bp, Homo Sapiens
  misc_feature (145)..(145): n is a, c, g, or t
  misc_feature (234)..(234): n is a, c, g, or t
  misc_feature (382)..(382): n is a, c, g, or t
  misc_feature (423)..(423): n is a, c, g, or t
aaaagggttgaagccagagcccttggtggccctggaaaagcggctgcaagggtggcccttagtcaaggggaggcacgcgggcttggcgtccaagaattttctggggtatggaggtgagtcaagcgaaggcggggtccccaggganctccggaagaaagtcgtggccctcctccaggggtcctcatgagcgcagggtccaggggcacggagcttaagaagggcaccccggcgagnctgggccagctcctctcccgccgcccctggagaagacgctggtgcactccgtgcagtgtgggcaggtgaagccgctcatattctccacgattcccatcacccgcaagcccgttcttcctacagaaggtcagctcgcgcctcacgtccncccacgggacaccgcctggggcgtggtgaccacgagggccncccaggggctggtagggacgcagggcttctatggtggccatgtgctcatcggaggtccccgggggcgtgtccaccaccaggtagtccagctccccccaggccacgtcggacacaaactgctttatcagcgcgtttttcttggggcctctccacaccacggcctcgtccggcttctccagcaggaagcccacagacatgagcgagatgctctgctcccggtccaggaagacgggtgcccagccgcggtcgcactggtgcacagccctgccctgcgccccgagcatgcgggggatactggggccacacaggtccacatccaggattcccaccttcttgcctgcatggcgcagtgccagggccagctccgtggagatggtgcttttcccaacgcccccctttcctgagaggaccaggatgatgtgcctgacgccggccaggtttccaggctcggccgccgcctccatcccgccgcctccaggagctcgcggctgccctcgtgccgaattcgccaccccagc

SEQ ID NO: 438676 - DNA, 922 bp, Homo Sapiens
  misc_feature (193)..(193): n is a, c, g, or t
  misc_feature (553)..(593): n is a, c, g, or t
gggcctttcgaatcaatttttttggaccggggggtctgggaggaggaccaattgtgggggtggaaccctcaaggagaaattttgggacaaataaccccgctggagcagttgtgttttccaagcaggggctgtccccagccacctcaggccaccatgttgcagggaatgtagcctgtccggcccccaccttcgnccctggtagaagccatcggcatccttgtccccaaacaccttcaggatctgaccctctcggaagggaagctcttcttctccagcatcaggattgggcgacattgacacggggtcatagtcaaacagagccacaaagatcctgacgggtaggtgctggtaagccagtgtttctgaggggctcctcgcagggactagctctgcagtgcttggcctgaggactcggacacctctcttctgggggcccctccgcccagagccgtcctgccctctggcctctccggtctctgttgccttggccccattctccctgatgctgttgccagcaacctgcttctggaaggagcaagtcctggaacccagnnnnnnnnnnnnnnnnnnnnnnnnnnnnnnnnnnnnnnnnnggatgtctgacaggtctgagttgcggccgtggtccacgagggagttcaccagatgaaccccaagctctgctgtgtcctccttctcagccctgggcctcagcccagaccctgggtctcctccttggcacatctcggtatttggcgcctgctgggcccgtgctccctgggtggagctggaggccggacaggcctctcctgcagtccactcggcctcctgcttggccagtgagggagctgcggggccagggtccttctcacccagggtagatgtgctggctgtcctctcctctgaggtgcccagcactgctgccccagcctcctcctggaac

SEQ ID NO: 438677 - DNA, 1019 bp, Homo Sapiens
  misc_feature (840)..(931): n is a, c, g, or t
ctgaattgttaaattgaggcgagcccttggaagtcacccggggggctcccggaaggtcccccccctacctgggaaaggctgagattccctgagggccccatttgttgggggggcactggtggcctggatgacccagtgctgggggccattcaggtgggtgagggaatgggaaagtcccccgcttcagggggcgtgaagagtgtaacccccccatagataacttctgggagtctgccgctggccccggctctgtcttggagggaccagctgggtgaatggctcgcagtggtgcctccctggggcggggcgagtggctacccctgggggtaggtggtggcgtccacaagagagcacggagctttgcggcatcccccttcgccatccgcggggccccgaagctggcgccttcagatcgggagccaaacagcgactcatcacagtaagacgggttgtggctgatgggtctgtatttgttcttcttccttggtgtgagggtgggggtgctgccccttgagggggtggtctcacagctcccctttgcccccaaggccttcgatgcctccttgcccacgcctctggttctgttagccttctccacccagggcggatcgaagtccggtggggtaggccgggtgcctgctgggctgccaaacagagtctcatccacatatgacgtcctggccttgacccggtagccacctcggcagcggtgctgaaggccgagggtctgcatcccactgacggccagctccacgggggtcttcatgctgcctgtggtccctggtgacagcaggtgtgctctgccggccaggccgctgcttccgaggctccctcctgcannnnnnnnnnnnnnnnnnnnnnnnnnnnnnnnnnnnnnnnnnnnnnnnnnnnnnnnnnnnnnnnnnnnnnnnnnnnnnnnnnnnnnnnnnnntgaagtcacatgtgtaggtcacacctataaagctgagcatcttggctcgtaggcatcgggatcctcagggacccgatcccgggaattc

SEQ ID NO: 438678 - DNA, 857 bp, Homo Sapiens
gttgggtagccgggtgctgctgggctgccaaccaggagttctcaacaacatatgacgtcctggccttgacccggtagccacctcggcagcggtgctgaaggccgagggtctgcatcccactgacggccagctccacgggggtcttcatgctgcctgtgttccctggtgacagcaggtgtgctctgccggccaggccctgcttccgaggctccctcctagcaaagagcttttacaagcattgtttcatggtaatcctgctcaacagcactgtgaagtagcttcgaatttgtccattttacggatcacaaaactgaggtgaagtcacatgtgtaggtcacacctataaagctgagcatcttggctcgtaggcatcgggatcctcagggacccgtccccgcaccttcttcccaccaggtctggacccgtcggtgagggcgcgggggcgcgcggtgcatccgggatccccgtcaatctgcagcccggaatgcctggggccccggacccccggcagcctaggccgtcccggggcaccgcgcgcggacggactcacccgaggagccggcacaggctacgtgtgaacggcccgcgaatccagaaacccagaacccagcactttgcacccagcaaccagggagcagccagcagcactgcggacgcggcccggaccattcgcgcccgcggatggggggagtccgcccaggggcgggcgccacgctcctgaggcccaggaggtccctaaacatggagagggtcctctggtgccactcactcaggtgcgtgtgtactaggccgcctccccctcgtgccgaattcgccacccagcctcgctacctaaagaccgtatgagtactgcccgt

SEQ ID NO: 438679 - DNA, 783 bp, Homo Sapiens
catagaaaagccaaaagatctccagttataagcacaaaactaaggaaagttatggatcagtgacttttgtcactaatccattttcttttttaagtcacctccctttatggccttgcttggctggtttttacattgtgcatgacttgtctgttggaccctggggaggtggggcaggtcctatggtaggatttgtttttggaagaacagcaggttttggcctaggggctggaggcttcagctgcacgcccattctgggtgccaccataggcttgaaagtactcattgtgtcactggaggagctcgtgctacgtcgaatctgaggctcggagctcctgagggcaacgttgtgcaaagggctgagagattccgtggaagtggcaggggtgggagagtttttcacttgctccagggtatccagcaccacatcaggggcatgctttgctgtgctctgtctctccagttctcggagttcattcaaagctgtgttcatcgtttcttcaatatcctgagcaattgtctctgggtccagtggcttgtggtcattgaagcccgtgtattgccctgatgacgtggaccttctaatgggagggctgtcgatcttcttgagggagtcgtgccggctgatgttggtcaggctgccatggccaggcctgcgcctccgctcaggactgtcattgttgaggccacggttctgcagcaggccccgggggtgactggcaaggcttggggaccctaggtcaactgaggagttagaaagggcatgtggagggtggagcgggcaat

SEQ ID NO: 438680 - DNA, 1772 bp, Homo Sapiens
  misc_feature (608)..(608): n is a, c, g, or t
  misc_feature (619)..(619): n is a, c, g, or t
  misc_feature (622)..(622): n is a, c, g, or t
  misc_feature (641)..(641): n is a, c, g, or t
  misc_feature (643)..(643): n is a, c, g, or t
  misc_feature (648)..(649): n is a, c, g, or t
  misc_feature (702)..(702): n is a, c, g, or t
  misc_feature (711)..(711): n is a, c, g, or t
  misc_feature (727)..(727): n is a, c, g, or t
  misc_feature (738)..(738): n is a, c, g, or t
  misc_feature (762)..(762): n is a, c, g, or t
  misc_feature (766)..(766): n is a, c, g, or t
  misc_feature (801)..(801): n is a, c, g, or t
  misc_feature (805)..(805): n is a, c, g, or t
  misc_feature (809)..(809): n is a, c, g, or t
  misc_feature (811)..(811): n is a, c, g, or t
  misc_feature (815)..(815): n is a, c, g, or t
  misc_feature (817)..(817): n is a, c, g, or t
  misc_feature (819)..(819): n is a, c, g, or t
  misc_feature (822)..(822): n is a, c, g, or t
  misc_feature (824)..(824): n is a, c, g, or t
  misc_feature (832)..(832): n is a, c, g, or t
  misc_feature (839)..(839): n is a, c, g, or t
  misc_feature (844)..(844): n is a, c, g, or t
  misc_feature (849)..(849): n is a, c, g, or t
  misc_feature (852)..(852): n is a, c, g, or t
  misc_feature (854)..(855): n is a, c, g, or t
  misc_feature (859)..(860): n is a, c, g, or t
  misc_feature (862)..(862): n is a, c, g, or t
  misc_feature (869)..(869): n is a, c, g, or t
  misc_feature (871)..(872): n is a, c, g, or t
  misc_feature (874)..(874): n is a, c, g, or t
  misc_feature (878)..(878): n is a, c, g, or t
  misc_feature (880)..(880): n is a, c, g, or t
  misc_feature (886)..(886): n is a, c, g, or t
  misc_feature (890)..(890): n is a, c, g, or t
  misc_feature (928)..(928): n is a, c, g, or t
  misc_feature (933)..(933): n is a, c, g, or t
  misc_feature (954)..(954): n is a, c, g, or t
  misc_feature (957)..(957): n is a, c, g, or t
  misc_feature (961)..(963): n is a, c, g, or t
  misc_feature (975)..(975): n is a, c, g, or t
  misc_feature (980)..(980): n is a, c, g, or t
  misc_feature (982)..(982): n is a, c, g, or t
  misc_feature (984)..(986): n is a, c, g, or t
  misc_feature (991)..(991): n is a, c, g, or t
  misc_feature (995)..(995): n is a, c, g, or t
  misc_feature (1001)..(1001): n is a, c, g, or t
  misc_feature (1005)..(1005): n is a, c, g, or t
  misc_feature (1010)..(1010): n is a, c, g, or t
  misc_feature (1023)..(1023): n is a, c, g, or t
  misc_feature (1032)..(1032): n is a, c, g, or t
  misc_feature (1041)..(1041): n is a, c, g, or t
  misc_feature (1046)..(1046): n is a, c, g, or t
  misc_feature (1048)..(1048): n is a, c, g, or t
cgtgagtactcgccaggctggcctgtgtggccgccaccacggttacagggcggtgcggccgggccacgggaagggtgcggggctcgccccgtctccgcaggggtggacgaacaacagaaaccaagcagcaacagcccttggaaagaggctaaatttttcttgacttctgcagcaacaaagaccgtgaaaagttggcacttctggcctaacgctgccgtcatcctacccctcaccccagggcaacccaggctggacatttagtgcctccctctttattcctctgtgatcatccagatcagcacttgactgtttattttcaaatctcacgaacctcaccccaagatcttcacattcttggatctcagctgctcttgaaggacagtgacttgttaccaccgcaacagcagagcctgccatccccaacagatcaccagttgtccctgacatcgtgccctaccttgtctccctttgtggtctcctaaatgcccatctcgttggccttggttcggctagtggtatggaggggtgctgcctagcactgacctgagagtgtgtgtgacccactgacccaatggacatcaaaggccagttctggaatgatgacgacncggagggaganaangaatcagaggaatttctcnanggcgnncaggggagctgtgcagctgacctgtatcgacacccacagcttgatgcagacantgaagccgngaaggagatctacagngagaactctgnatccatcagagaatatggaactancgangacgtggacattgacctccacaatcaacatcagcntccncgangnggangncnctncngcctggtnaggtccnccggncaganccnanngtgnngnggctgcnanntnctcncncccagnaccnagatggaccagaaccatccattgaggttttccagccancaaanaaggaaggatttgggctgggnctncagnnngaaaaagatccnggggnangnnntacancccnaacaangtgnaaacnatctgagcaatgnttttcttgnaagacccancaggngnaagaggcacagttggttcaaggcaagtggtaccatcaataagttccgagctgtcctcagcatcttttcacccatccccaagtctcccagtttccctatcatacaggactccatgctgaaagggaaactatgtgtaccagagcttcgggttgggcgcctcatgaaccgttccatctcctgttccatgaagaaccccaaagtgggagtgtttggctaccctcccagcccccaggtcagtggtcactgcaagaacattcccactctggagtatggattcctcgttcagatcatgaagtatgcagaacagaggattccaacattgaatgagtactgtgtggtgtgtgatgagcagcatgtcttccaaaatggatctatgctgaagccagctgtctgtactcgtgaactatgcgttttctccttctacacactgggcgtcatgtctggagctgcagaggaggtggccactggagcagaggtggtggatctgctggtggccatgtgtaaggcagctttagagtcccctaaaaagagcatcatctttgaagcttatccctctgtggtggaccccactgatcccaaaactctggcctttaaccctaaaaataatattttgaccggtttcaaaaagctctggataatgggaagtcctattcccaaaatgcccccacatttcatatttgcaaatcccaaaacctaattatcaagttgaatccccctgctccccc

SEQ ID NO: 438681 - DNA, 3196 bp, Homo Sapiens
gattcctccttctcccaggtggttctccccacggttcccggcggttgttccccccgctccccgccttttttgtgtctcttccgcgcccctgttctctcgcgcctctttgatgtcgcgctcctctcctttggggggccccgtctctggtgccacggataatccgggtgtacccgcttatctggggcccctctgggggatatcttttgggcccgcgcccccctttgttttgttgtctttgttgttcgcctttggtggcggtttttttccagtccacagcaccttccattttattgttttatttacaaacagggtgaagtcaaagggaaagtcaggggatggagtcagtctgggccatccgaatgtggagtagttcttgggtcaagctctaccatgaaggccacctcttacatatccttttcctgccccttggtaatggccccttgattcctcagggcagcctcagctgctgtacctgaacacttttatgagggcagatggatcctggggtaacaggggtggtacgagggctggggccccctcagtttgtgtaaacctgagttccgatcacacgcatgatttccttctgtatcttggggtcctgagtattaatgttggcatcgcccacctgaccatcctcatatacaaagaagaatcttgtgcagacatggtcggacacagggcacacccagatgttcccatgcttctggaggtccttagatgtaatcacttcacaaagtgctatacagtttagattccgactctgcaggaaccgtgactgaatggatcgggtctgggggatggtattcatcctgttgtatctctggaccagctcatccttggagggcatcctgtgctgtccttttcccattcctgagtatccaaaggaaatactggagatggggctcaggtagatgcctttgccataagctgctccatgcagctgcagtttggtgtaggatgcattgaccagcccattgcgcaggatcgaatgccagttctcaatgtgggacccatggaaggcaaaggtgctgccatagagcttcttgggcggtccgggaaccgagcctcccttggcaggagggctgctcagcaggaggaactggtgtgaggtgtgcatgaacttcagctgcctgctgagaggtagtttgacaatgtgtgacctgttgctagagatgatccactgcaggagaggatgggccaggggatccaacttgttcatctgtttcttgatttccaaatatgagccctgggtcatctcccgaatagacatcacactatccagagctttctgaagccgctcataattcttcttcttagggttaaaggccagagtcttgggatcagtggggtccaccacagagggataaggctcaaagatgatgctctttctaggggactttaaagttgccctaacacatgggcccccagcagatcccaccacctttggttcccagtggccacctccttctgcagcttccagacatgacgccccagtgtgtagaaggagaaaacgcatagttcacgagtacagacagctggcttcagcatagatccattttggaagacatgctgctcatcacacaccacaacagtactcattcaatgttggaatcctctgttctgcatacttcatgatctgaacgaggaatccatactccagagtgggaatgttcttgcagtgaccactgaccaaaggagaggtccgtgctgggggagggaggcccacgtgctgagggcacaggagacctgcctgggggctgggagggtagccaaacacttccactttggggttcttcatggtacaggagatggaacggttcatgaggcgcccaacccgaagctctggtacacctagtttgcctttcagcatggagtcctgtatgatagggaaactgggagacttggggatgggtgaaaagatgctgaggccagctcggaacttcttgatggtaccacttgccttgaaccaactgtgcctcttctcctgctgggtcttcaagaaatcattgctcagatgtttccattgttgggatgtaaacatacccaggatctttttcaactgaagacccagcccaaatccttccttatttgatggctggaaaacctcaatggatggttctggtccatctaggtactgggagagagaaaatcgcagcctcaacacaataggttctgtccggaggaccttccaggctgtagagacttcctcatcgaggaagctgatgttgatgtggaggtcaatgtccacgtcatcgatagttccatattctctgatggatacagagttctcactgtagatctccttcacggcttcaatgtctgcatcaagctgtgggtgtcgatacaggtcagctgcacagctcccctgaacgccatagagaaattcctctgattcattatctccctccgagtcgtcatcattccagaactggcctttgatgtccattgggtcagtgggtcacacacactctcaggtcagtgctaggcagcacccctccataccactagccgaaccaaggccaacgagatgggcatttaggagaccacaaagggagacaaggtagggcacgatgtcagggacaactggtgatctgttggggatggcaggctctgctgttgcggtggtaacaagtcactgtccttcaagagcagctgagatccagaatgtgaagatcttggggtgaggttcgtgagatttgaaaataaacagtcaagtgctgatctggatgatcacagaggaataaagagggaggcactaaatgtccagcctgggttgccctggggtgaggggtaggatgacggcagcgttaggccagaagtgccaacttttcacggtctttgttgctgcagaagtcaagaaaaatttagcctctttccaagggctgttgctgcttggtttctgttgctccccaggaaagacgctctgggcccgatctatgccgcccggccgccgggcctgagtgaagcctgtccagcctaggaggggccctcagaacctcccggtccaagcctctcacttcgtccacccctgcggagacggggcgagccccgcacccttcccgtggcccggccgcaccgccctgtgcccgtggtggcggccacacaggccagcctggcgagtactcacggcgaccccgggccgcgcgcggccgcagccgacgggacgagcggcccgggacgccccgcgggggcggag

SEQ ID NO: 438682 - DNA, 782 bp, Homo Sapiens
gtttctttgggtcaaagcttcttcccatgaaagggcccccttcttaacataatcctttttcctggcccccttggtaaatggccccttgatttctcagggggcagcctcaggttggtgtaccttgaacacttttatgaggggcagaaggatccctgggtaaacaggggtggtacgaggggtggggcccccctcagtttgtgtaaacttgagttccgatcacacgcatgatttctttctgtatcttggggtcctgagtattaatgttggcatcgcccacctgaccatcctcatatacaaagaagaatcttgtgcagacatggtcggacacagggcacacccagatgttcccatgcttctggaggtccttagatgtaatcacttcacaaagtgctatacagtttagattccgactctgcaggaaccgtgactgaatggatcgggtctgggggatggtattcatcctgttgtatctctggaccagctcatccttggagggcatcctgtgctgtccttttcccattcctgcagtttggtgtaggatgcattgaccagcccattgcgcaggatcgaatgccagttctcaatgtgggacccatggaaggcaaaggtgctgccatagagcttcttggcggtccgggaccgagcctccttggcaggagggctgctcagcaggaggaactggtgtgaggtgtgcatgaacttcaactgcctgctgagaggtagtttgacaatgtgtgacctgttgctagagatgatccacatgcaggagaggactggcacag

SEQ ID NO: 438683 - DNA, 774 bp, Homo Sapiens
taagaactggacccatatttgggttcagtgataaatgtgttgattttcagatgaatttattgaatttgaaatgtcaggataatgggcaaatcaaaatactgaaccagcagttgaggatttaggatgggagtagctgaagcaccgaagagaggatgggactggaaatagagacgtagagtttaaccacacacacacatcttgcatgcctgtgactgtatccatgtgcatgtccatcactaggtgtacctgtccatcttcatgtcctgtgtgggtgagaatgggtgggaatggcagtcttgggagtgttcctgggaacctcatatcataaggagacatgtattctaccctgccttacagtgggtcccacattgagaactggcattcgatcctgcgcaatgggctggtcaatgcatcctacaccaaactgcagctgcatggagcagcctatggcaaaggcatctacctgagccccatctccagtatttcctttggatactcaggtaagaaatattctgtggccaccttgactctatttacattgcctccatttgtgaatacatgatttgtgctgtctgttcctccctcattatggatacttggtctgtgtcagctctctccccgatcatggatacatattctctctctctctacattttcttattagaaatttagattctttacaaggtgaggccagttattgttaaaaatgatggttttattcatagcaggggccttgccctgggaatggatggaaagggggatctgggtaccgag

SEQ ID NO: 438684 - DNA, 519 bp, Homo Sapiens
  misc_feature (52)..(52): n is a, c, g, or t
gggtaacccaaacacttcccactttggggttccttccatggtaacaaggaanagggaaacggttccatgaaggcgccccaaaccccgaaacctcctggtaacacctagtttgccctttccagccatggaatccctgttatgaatagggaaactgggagacttggggatgggtgaaaagatgctgaggccagctcggaacttcttgatggtaccacttgccttgaaccaactgtgcctcttctcctgctgggtcttcaagaaatcattgctcagatgtttccattgttgggatgtaaacatacccaggatctttttcaactgaagacccagcccaaatccttccttatttgatggctggaaaacctcaatggatggttctggtccatctaggtactgggagagagaaaatcgcagcctcaacacaataggttcctgtccggaggaccttccaggctgtagagacttcctcatcgaggaagctgatgttgatgtggaggtcaatgtccacgtcatcgatag

SEQ ID NO: 438685 - DNA, 799 bp, Homo Sapiens
ggacagagcttcttcgcagcccagtctcccggatcttcctcggtgtcctgcggaggctctggctccagcgtggtctccagcgcagcctgggcttccggctgggcttctgcgctccggccaggcccaaggcgagcggctttgaccgggtggacggtggctcttgcagggcctttccggcccgaaagggcccttcggaggctctgtaccttctgcaatccggtgcgccgcagccgctgggccctggactccaccggctcctcgtccgagctctctccaacttcggcctccggctgctctgggcccagctcggactggtccgccgggcccaagggctctggtgccttctggaaagcgctggctgggacttcaccctcctccttgaagagcagaacgtggagcttcccgcgcgccaccagcagcccgtggttggcctccagccgctgcacctgggctgcgcggcgcaccgcgcgctcttgggcggcgttggcgtgcgagctcacgcgctccgccttggccagcagctgcgccaaggtgttgctggtggtgtcgtggctgcgactcagagcgcccaggccgctctggatgcggcgcacggaccctgccaggcctccctgccttcgagccaggcctccctgccgctcccgcagagtctccagcatggaggccagcttctccagcagggtcaccaccgtcacggcgtgcacgggaccccccgccggcgcctcgggcacaggccccggctccaacgcactctccctcatgatccctgaccgctctgctccgtctgcctgcaactgct

SEQ ID NO: 438686 - DNA, 1010 bp, Homo Sapiens
ccaatccgaggcctttgccggcctgtgggccaccagctgggggctccccgcttccatccacctaccacacccacattcctgacccctcccgccgtctgttgctgtggaacagactcacagagccgcacccacttcccaagacccagccccatccctccctctcacgcctgagccccgcctggccaatccaagcccgcccagctctagctcaggccacgtccgcagaatttggtctgagtcccagccaatccctaaaataacggtggttgaaagggcattccgtgactgcgggcactatcctcttctcgcccctcaccaggcctcacctactttacagcgttttgcagttcgcacgcagctttccctccccttaccttcccacgcctgcctttccccccagactctggctgcggaggtaaaaggtttcccttgtgtaattaaggagtgagtttcgggctgctgggggtaaggagctgccaggatcagtgctgtgtccgtcacatgcaggaggagggtgaagtcccagccagcgctttccagaaggcaccagagcccttgggcccggcggaccagtccgagctgggcccagagcagccggaggccgaagttggagagagctcggacgaggagccggtggagtccagggcccagcggctgcggcgcaccggattgcagaaggtacagagcctccgaagggccctttcgggccggaaaggcctgcagcgccaccggccaccccggtcaagccgcctcgccttgggcctggccggagcgcagaagcccagccggaagcccagcctgcgctggagcccacgctggagccagaggctccgcaggacaccgaggaagatcccgggagacctggggctgccgaagaagctctgctccaaatggagagtgtagcctgagggctggtgttgcctgcctcccctgtgcttgtgccttgtcccaaaataaatcctttcagaatgtagcactcacgccctaataaggagcgaatcctacatcca

SEQ ID NO: 438687 - DNA, 1063 bp, Homo Sapiens
  misc_feature (1030)..(1030): n is a, c, g, or t
  misc_feature (1051)..(1051): n is a, c, g, or t
ggctggtacaggtccggaattcccgggatatcgtcgacccacgcgtcggcggcgggtccgaggccggcgtgcgcggaggctgggcgggcagcccgagcggtggccgcagcgcagtttccccactcccaactcccgccccaagccgcccaccagcccccttcccctccggccggagcctgaaccgagcccggctggctgtgctgcgcggtgccgccgggaaagatggtcgtggcgctgcggtacgtgtggcctctcctcctctgcagcccctgcctgcttatccagatccccgaggaatatgaaggacaccatgtgatggagccacctgtcatcacggaacagtctccacggcgcctggttgtcttccccacagatgacatcagcctcaagtgtgaggccagtggcaagcccgaagtgcagttccgctggacgagggatggtgtccacttcaaacccaaggaagagctgggtgtgaccgtgtaccagtcgccccactctggctccttcaccatcacgggcaacaacagcaactttgctcagaggttccagggcatctaccgctgctttgccagcaataagctgggcaccgccatgtcccatgagatccggctcatggccgagggtgcccccaagtggccaaaggagacagtgaagcccgtggaggtggaggaaggggagtcagtggttctgccttgcaaccctcccccaagtgcagagcctctccggatctactggatgaacagcaagatcttgcacatcaagcaggacgagcgggtgacgatgggccagaacggcaacctctactttgccaatgtgctcacctccgacaaccactcagactacatctgccacgcccacttcccaggcaccaggaccatcattcagaaggaacccattgacctccgggtcaaggccaccaacagcatgattgacaggaagccgcgcctgctcttccccaccaactccagcagccacctggtggccttgcaggggcagccattggtcctggagtgcatcgccgagggctttnccacgcccaccatcaaatggntgcgcccagtgg

SEQ ID NO: 438688 - DNA, 1677 bp, Homo Sapiens
  misc_feature (1595)..(1608): n is a, c, g, or t
gagaaacaagcatttgtgtttattaaccaaggagagggaagtcaaagcaatgcagactcctaaccagtccctcctatagtctgcccacctaggccagctgccaaggactaggaagagcagtggataggcccctccccactgtccccgaccccgggtggagttctgctgggtaaggaagaggggaagtcagcaaaggacagaggccaaggaaggaaggaggaaacagagccgctggtggagacaggattgaggagataccttggcccctcactcacagtggggagggcaatagcaccgcaaatgcagccccacaagaggaactaagcatggagtacactcatgtcaaaaaccttgtattgggggaggggaggagggggttctcaggtgtccaaagccaagaacaaaacgcttggagagtcagtccttgcccaagaatgctggtccagcctctaagcctttgcctccataccaagttcacaacagggtggagcctctgacacggccgtctagagaatggatgcaagagaggtccagggaccacttgcctctgtaagatccgtcctgtggcgaattccaggcccagtggcgcctagtccttcagctgctgggctctcccgagcctgccttagcccatacaaccacttgatcacgcgggcattgcgctccaccaccgacacgccatagggaacgcgctcccgggcccgctcctcaacagtcaccgagctgcggcgggagcagcccccttcagagctgcccggcccagcactgggccctgccagggacacgatatccgagctggcccgtgccaggtgggccacacccaaccctctcgcctcctccgggtccaggccgcagaagttaaaaagcgctcgagatcagcggctgccctagaaaagcgctcgctcaagtccgacttggagcgttgcaaacccggcggccgggctgggctggaggcggcggcaggtccgggtgatgggcagggccgggacaggcgaggcgggcagggggcggacgtccacccggcggaccgcagaggtactgggcggcggtcgcggaggggtggctgggggaggacggccggctccctcggcccgtccaggagtgcggctggcctcggcaggggacacggggctgtcacacaagtcgatgaggctgctgaggatgtccaggtccagctggggccgtcggcaggggccaggcagggctcggcggctgggcgtgagcactgtgcggcgagtctcagggctgaagagcggctgtttggacagcaggggctgcacaggctcctggcgggtgttggccacgtgcaggctcttgacgtacttggccttgtcggcctccaggcgctccacagcgctcggtttccgggctccaccatctgccggcccccgtagcaggtagccagggaccctggtccgcaggcggcaaggtagggcgggggcggacggggctccggggctcagcgtgtgcacaggcatggctgctgcatatcccgagggctttagtctgcggagaccggagagatgaggagccagagatccgggcagaaagtaggcagctggacaccggccactgctgcagggaaggagagaggnnnnnnnnnnnnnngccgagcgcgctcagacaaagaggctcaagccgcggctgagaggataagacgccctccctattataagg

SEQ ID NO: 438689 - DNA, 1040 bp, Homo Sapiens
  misc_feature (649)..(694): n is a, c, g, or t
ggggttacggatgaaaagctctggaaagggccaacggagccggatattcccggagcccctctgcgagccacgcgcccctctgggaagcccgcttccccctgcagacaggcgctgtgacacgcttgcgccccggtcgaacaggcgaagaggccgaggcccagagcggcgcagggcgagcctggaggctgcgccccagacctggaccagccacggacgccgctcccgccgctccctccgctccgctgcgctccgcacgctggcgccggctccccgaggccccgggcgccccggccgcacgcctgggtaaaaggtcccgaggagtccgcagaagcgcgcccacgcccgagacggccgtttccgccggcctgggacaggggcggagaagggggttttcctggtcccgcagcgtgccggtccccgtcggccgagccgtgtttgtggccagtccccgcaccccgcttcttccccacctggagagtgaagcgccgtgctagaagtcactgcagtgcatgaatgcaccccgccctcagagctcctttcctgcacaacgcagtatggagttttcccgcaactagccttcgctcagcccaccatgcaaaccatggcgcaatatccctgcatttttattcctactcgccccgtatttttnnnnnnnnnnnnnnnnnnnnnnnnnnnnnnnnnnnnnnnnnnnnnnacgcctaatacacaactccccaccccgttgtcaataccctcactcaccagcttcccctataccaggtcctctctcctttgtcccccctaacacataacatctcccttcctattcccccctccactaccccacacctactccaccctatcccccccactccacttgctaatctctaccccccatcactggcccacccctaccttctttccaaccatctctcctatctgcacttcattctctaatctcctccacacctcttttataccaccatctcctcctccacgctctcaatcttccctcaacccattcccctctcactcttcaccgcactcactcctcatttcta

SEQ ID NO: 438690 - DNA, 1229 bp, Homo Sapiens
  misc_feature (1150)..(1181): n is a, c, g, or t
ccaaaacccccccttttggctttctgagcttgccaagcaccaggaaaaacgcggaggttgggagcaccccccaggaagttcctggagtggctgtcacaggcctgggtcccctttcaccccaaggccgccgtgggccactccatttcctcagcacgttccttgcagtgactccgtgacgctgtcttcctgactcggggcccaggaacgagctggacgtaaggccactgggctgtgcttgtgctggggctcccagaggcatccgggggccccgtgtgtcccccaggaaagccggctggtctccaagtgaggcgaagacccgtgcccagcagacaaggccggtctcggggctggcagagagctgcccccagggtgtgtgtcaggaggtgacggctggagcctcgtgggcgggtgaagtgtgtctgctgggtcagcactgcccagatctgccatcgtgttcggaccccatccctgcaggagctggggcaggtggagatggtctagtcctcctggggcctctccacagtgagaaacgtgtccaggactgtggcctgccgctcggggtcgcctaggggctgcttctcgtggctctgctcagcccttgtcctcgtccaggaaggggagcgcaggtagccggcccggggcagcgggtgcagacctgctggggactcggtgttgaggttctcgtcgtccgagtcagcaaagacctcggccagctcctggtccgacatgtcggtgagctcagtgaggtccaggaggtcgaagtggacctccagagaggagacgctgctcagaggctgcctcctctccgtgacctgcaggagccccggtgctggtactgggatgcccccgacctcctcctccacaggcgtgtggccattgtcccctgtcccctgggctgggacgcccagcgcagcctgcggcacctcagcctccttaacgatctctccggtgccggcgccctccgggggctccatgcggccggtgcggtctgggaggggcacgggcgacggcggcgtcgcctggcccgggcgccccaacagctgcggcagcgactcggccccggctccgggcgcagcgcatcggggcagcaaccggggggccgcggcggcagggaggagcccgcggggcggggcggggcgcgcagctgctnnnnnnnnnnnnnnnnnnnnnnnnnnnnnnnnagccgcaggacaggtgcggccccgatcccgggaattccggaccggtcc

SEQ ID NO: 438691 - DNA, 977 bp, Homo Sapiens
agcgggggtctgtcattacccagcgcgagtcaggccactcctgtgcccctcgccagccccgaggggcgcccgcacacagtcggcgccccacacgcaagtacctggaagagaacaagaggacgccagcgggcgcggccgccaaagatcgttaaggaggctgaggtgccgcaggctgcgctgggcgtcccagcccaggggacaggggacaatggccacacgcctgtggaggaggaggtcgggggcatcccagtaccagcaccggggctcctgcaggtcacggagaggaggcagcctctgagcagcgtctcctctctggaggtccacttcgacctcctggacctcactgagctcaccgacatgtcggaccaggagctggccgaggtctttgctgactcggacgacgagaacctcaacaccgagtccccagcaggtctgcacccgctgccccgggccggctacctgcgctccccttcctggacgaggacaagggctgagcagagccacgagaagcaggccctaggcgaccccgagcggcaggccacagtcctggacacgtttctcactgtggagaggccccaggaggactagaccatctccacctgccccagctcctgcagggatggggtccgaacacgatggcagatctgggcagtgcttgacccagcagacacacttcagcccgacccacgaggctccagacggtccacctcctgacacagaccctggggggcaagctctctgccagccccgagaccggacattgtctgggtgggcaccggggtcttcggcctcacattggagaaccagacgagaattgcctggggggaccacaactgggggcccccgagatgccatctgggaagcccacagcaaaaggcaacagaccaggtggccttacgtccaggctcgtacctgggaccccgagtcaggaagaacagggtcacggaaagcactgcaaggcaccgggctgaggactg

SEQ ID NO: 438692 - DNA, 1092 bp, Homo Sapiens
  misc_feature (56)..(56): n is a, c, g, or t
  misc_feature (64)..(64): n is a, c, g, or t
  misc_feature (74)..(74): n is a, c, g, or t
  misc_feature (113)..(113): n is a, c, g, or t
  misc_feature (127)..(127): n is a, c, g, or t
  misc_feature (352)..(352): n is a, c, g, or t
  misc_feature (1058)..(1059): n is a, c, g, or t
  misc_feature (1080)..(1080): n is a, c, g, or t
aaaaacgaaatttgaaaaacccccaaaaatcctgaaatggctgttcaaaacctggntccccttnaacccaaaancccctgggccaaatccaaatccttcaacaagttcctggncaatgaatcccttnaagctgtctttcctgaactcggggccccaggaaacgaagctggaacgtaaaggccactgggctgtgcttgtgctgggggtcccaagaggcattccgggggcccccgtgtgtccccccaggaaaagccggctggtctccaagtgagggcgaagacccgtgcccagcagacaaggccggtctcggggctggcagagagctgcccccagggtgtgtgtcaggaggtgnacggctggagcctcgtgggcgggtgaagtgtgtctgctgggtcagcactgcccagatctgccatcgtgttcggaccccatccctgcaggagctggggcaggtggagatggtctagtcctcctggggcctctccacagtgagaaacgtgtccaggactgtggcctgccgctcggggtcgcctaggggctgcttctcgtggctctgctcagcccttgtcctcgtccaggaaggggagcgcaggtagccggcccggggcagcgggtgcagacctgctggggactcggtgttgaggttctcgtcgtccgagtcagcaaagacctcggccagctcctggtccgacatgtcggtgagctcagtgaggtccaggaggtcgaagtggacctccagagaggagacgctgctcagaggctgcctcctctccgtgacctgcaggagccccggtgctggtactgggatgcccccgacctcctcctccacaggcgtgtggccattgtcccctgtcccctgggctgggacgcccagcgcagcctgcggcacctcagcctccttaacgatctctccggtgccggcgccctccgggggctccatgcggccggtgcggtctgggaggggcacgggcgacggccgcgtcgcctggcccgggcgccccaacagctgcggcagcgaccctcgtgccgaattcgccacccaggcctcgctacctagnngggtgacgggcgttagggggnaaaaacgaaaaa

SEQ ID NO: 438693 - DNA, 1221 bp, Homo Sapiens
  misc_feature (1109)..(1134): n is a, c, g, or t
  misc_feature (1147)..(1147): n is a, c, g, or t
ggccacatcctgaccctcaagaacagaagcagcaaataactctacagccgactccaggcttgccttctccccacactcatttgtttagccaccttcctttgcattcccagcagcaatcgaggacaccttataatatggttccagttggggggatccatgtggtacctgctggcctcacatactccacgtttgtgccccttcaggctggaccagtgcagctcacgatccctgctgtcagtgtcgttcacagaactttgggtactcataggaatacggtcacagaagtgtctggcactacaaaccctgctggagtggctgaattaagcagtgttgtgccatgtattcctatcggccaaatccgcgtgccaggccttcagaacctaagtaccccaggcttgcagtcactcccctcgttaagcatggaaaccgtcaatattgtaggcctagccaatacaaatatggccccacaagtccatccaccaggactggctctgaatgctgtcggactgcaggttctgactgcaaacccttcatcataaagcagccccgcccctcaggcacacattccaggtctccagatcttgaacatagcattgcccaccttaatcccctcagtcagtcaagtagccgttgatgcacagggagctccagaaatgccagcttcccaaagcaaagcatgcgagacacaacccaagcagacttctgtagccagcgcaaaccagggtcagcagggccgagtctccttcaggggtttaccttacagtccagcggggaaatgcaaaaaaagttctgaatccacctgcccctgcaggtgaccatgcaaggcttgatggcctgagtaaaatggacacagagaaggctgcctcggcaaatcacgtgaagcccaagcctgaactcacttccatacagggccaaccagcgtccacgtcacaacctctgctgaaggcacattctgaagtttttacaaagccctcaggccagcagactctctctccagacagacaggttcccaggcccacagcactaccgcggaggcagcccactgtgcacttcagcgacgtgagcagcgatgatgacgaggacaggcttgtgatagcaacctgatggannnnnnnnnnnnnnnnnnnnnnnnnnatataacacttanaggtttctttgaaaaccctcctttccttaaagcacatttttctgacataaactcatgactaatctttgtgcaat

SEQ ID NO: 438694 - DNA, 1993 bp, Homo Sapiens
  misc_feature (1290)..(1290): n is a, c, g, or t
  misc_feature (1835)..(1897): n is a, c, g, or t
ttttttttggaagggaccactgcctttattgcctctgtgctggggtcccagcctggggttcagaggcctctgggggcaataggtgaccctggacccaaattattgctacttggccaggtcaccttggggcttcccatactgccctgagaatgggtgggatgagggcatgcaaacgatatgcaaatgacatgcaaaccaacccagaggcctctggcacatccatgggtgctggaagagtcagagcctagtggcctgggagggcgacggggcacccagctcaggcccagcctcggaggcaaggtttgagggttggggggtccctgagcatcagccctgcttctgccgctggctgaggaggagcagaagcctggtcccaagacagcaggaagaaagcaggaccctcgctaggcggccagatggcctgaggcccacccagacagggacgggacctgccctgggtcgctcagccaggcagggacagcagggaccagaatccaggtctcctgagccaggcagaagccaaagtagcttggaggctgaagtgacaaacaataaaatacagggataaataaatcaataataaatagaaagcaagcagcccagtccctgatccctgggctgagagcccttccaccaggcccaagtccaggaggagacaagccctggtctttgcgctgggctggccagtccagaaggctccagagggaggcaggcagggtcccggggccctcggcgtgtgcaggtctggctcagttgttattcattatccaccaggaggctgggaagaacacagtggtgagggtgtccggggcccgcagttggtcgatgaggatgcgctggaaggccttgctgccaggcgactgctggtgccttctccaggaggcctcatcctgccagaactcatacagggtgaaggaggcaccgtccagcatcttctgggcggacacatgcagacaatggctctgggcccctgtgaagtccacatagcagcgcagggctcggtggaagtcctgcaggccttcctctgccacctggacctgcctctggggcatgaggatgtgcaagtcaggccccttggccaggtcctcttcacgcaggggttccagccggggggcctgtgagggcacagagtgtgggccgggcctccagcatgggcctggctctggtggataccaggagggtcctcccttttttgcccctggccccacggccctcaccttgcactcgagctggtcgatgagctcctggaggcggttcacctggagccgccactgcatctcggcctctgantgcgccctgtgtcagaagagccgggggaccaggtggatgaccggctgacactcctcagggctcggcgtcctgcccgccggctgccgcagagcctgctctgcgcctccacgctctctgcatctgaccgccagccatgggcctgggcctccagggtatctgacgccccctccagcgagctctgaagggcttgcagctggctcaccgtctcccgcagcaggaagcgtgtcacaaactggtccactttggaggccctctcgtactccagcttggtggcatccatggcagcgagcactgcacggttcagcgattccaatgcagccagcaccggccggtagacacccaggtgctctgagaagtagtcacacagtttttctgtttctaaattgtcggtgagatgcccatcaatgccgctgaacagttcctgcagctcccccaggctgagaaccccatcggcaaagtaattctggaattcctcaaatgagagcttcccatcatcattcttgtctgctctgcggaaaacgtcctggaagagcgtgtgtccggcnnnnnnnnnnnnnnnnnnnnnnnnnnnnnnnnnnnnnnnnnnnnnnnnnnnnnnnnnnnnnnncggccggagcaggcacacggtgagcagccccgcgcacgccatggcgccgccacccgctcgggctcggctgcggttgctgccgaccctggacgccgc

SEQ ID NO: 438695 - DNA, 923 bp, Homo Sapiens
  misc_feature (30)..(30): n is a, c, g, or t
  misc_feature (51)..(51): n is a, c, g, or t
  misc_feature (54)..(54): n is a, c, g, or t
agtcagccctggccagtctctcacgcaggntccagccgggggctgtgaggnaanagtgtggccggcctccagcatgggcctggctctggtggataccaggagggtcctcccttttgggccctgccccacggccctcaccttgcactcgagctggtcgatgagctcctggaggcggttcacctggagccgccactgcatctcggcctctgactgcgccctgtgtcagaagagccgggggaccaggtggatgaccggctgacactcctcagggctcggcgtcctgcccgccggctgccgcagagcctgctctgcgcctccacgctctctgcatctgaccgccagccatggcagcgagcactgcacggtatcagcgattccaatgcagccagcaccggccggtagacacccaggtgctctcgcgcagtagtaagcgtgtcacaaactggtccactttggaggccctctcgtactccagcttggtggcatccatggcagcgagcactgcacggttcagcgattccaatgcagccagcaccggccggtagacacccaggtgctctgagaagtagtcacacagtttttctgtttctaaattgtcggtgagatgcccatcaatgccgctgaacagttcctgcagctcccccaggctgagaaccccatcggcaaagtaattctggaattcctcaaatgagagcttcccatcatcattcttgtctgctctgcggaaaacgtcctggaagagcgtgtgtccggcgggccccgggtcgggcgcgagctgggggtgccgcggggtctggggctgggcctggggcgcgggcggccggagcaggcacacggtgagcagccccgcgcacgccatggcgccgccacccgctcgggctcggctgcggttgctgccgaccctggacgccgcggcggactcg

SEQ ID NO: 438696 - DNA, 1398 bp, Homo Sapiens
ggaccggtccggaattcccgggatgggcaaaggccttgggcaggagggagcgggatagaggaccggagagaaagcagtgtggctgcggtcctgaggttttccgcagagcagacaagaatgatgatgggaagctctcatttgaggaattccagaattactttgccgatggggttctcagcctgggggagctgcaggaactgttcagcggcattgatgggcatctcaccgacaatttagaaacagaaaaactgtgtgactacttctcagagcacctgggtgtctaccggccggtgctggctgcattggaatcgctgaaccgtgcagtgctcgctgccatggatgccaccaagctggagtacgagagggcctccaaagtggaccagtttgtgacgcgcttcctgctgcgggagacggtgagccagctgcaagcccttcagagctcgctggagggggcgtcagataccctggaggcccaggcccatggctggcggtcagatgcagagagcgtggaggcgcagagcaggctctgcggcagccggcgggcaggacgccgagccctgaggagtgtcagccggtcatccacctggtcccccggctcttctgacacagggcgcagctcagaggccgagatgcagtggcggctccaggtgaaccgcctccaggagctcatcgaccagctcgagtgcaaggccccccggctggaacccctgcgtgaagaggacctggccaaggggcctgacttgcacatcctcatggcccagaggcaggtccaggtggcagaggaaggcctgcaggacttccaccgagccctgcgctgctatgtggacttcacagggggcccagagccattgtctgcatgtgtccgcccagaagatgctggacggtgcctccttcaccctgtatgagttctggcaggatgaggcctcctggagaaggcaccagcagtcgcctggcagcaaggccttccagcgcatcctcatcgaccacctgcgggccccggacaccctcaccactgtggttcttcccagcctcctggtggatattgaataccaattgagccagacctgcaacacgcccgagggccccgggaccctgcctggctccctctggaagccttcttggactggccggcccagcgcaaagaccagggtttgtctcctcctggacttggggcctggtggaagggctctcagcccagggatcagggactgggcttggcttgctttctatttattattggatctatttatcgctggtattaatgcgtgggcacttcaggcctccaagctacttttggcttctgctggctcaggagactggattctggtccctgctgtccctgccttggctggagcgacccagggccggtccgtccttggcggggtgggctcgggccat

SEQ ID NO: 438697 - DNA, 1062 bp, Homo Sapiens
ggcccaggttccccgaattcccgtggggcgggagagccctttcccaccagggcccccaagttccaggaaggaggccaagccccttggtttttgccgctgggcttggccagtccaggaaggctcccagaggggaggcaggcagggtccccggggccctcgggcgtgtgcaggtctggctcagttgttattcattatccaccaaggaggctgggaagaacacagtggtgaggttgtccggggcccgcaggtggtcgatgaggatgcgctggaaggccttgctgccaggcgactgctgttgccttctccaggaggcctcatcctgccagaactcatacagggtgaaggaggcaccgtccagcatcttctgggcggacacatgcagacaatggctctgggcccctgtgaagtccacatagcagcgcagggctcggtggaagtcctgcaggccttcctctgccacctggacctgcctctgggccatgaggatgtgcttgcactcgagctggtcgatgagctcctggaggcggttcacctggagccgccactgcatctcggcctctgagctgcgccctgtgtcagaagagccgggggaccaggtggatgaccggctgacactcctcagggctcggcgtcctgcccgccggctgccgcagagcctgctctgcgcctccacgctctctgcatctgaccgccagccatgggcctgggcctccagggtatctgacgccccctccagcgagctctgaagggcttgcagctggctcaccgtctcccgcagcaggaagcgcgtcacaaactggtccactttggaggccctctcgtactcctgtgggccctggaaggcggtgctcagagccaggatcgtgctgattctccccctggacaagcggcagccgctggccaacgctgggcgacggattgactacgcgtccggcgctgggctgggctccccggcggcacccagattgcgcggagcgggcgaaggtagcgagcgcgagccgaggatgccggtactgctgctgctgcggcggcaagaggcgcgatcccgggaattccggaccc

SEQ ID NO: 438698 - DNA, 575 bp, Homo Sapiens
ggaagcgcgtcacaaactggtccactttggaggccctctcgtactgccagctgtggtggcatccagtggcagcgagcacgtgcaacgggcgtcagcgatctccaacgcagccagcaccggccgggtagacacccaggcggtactgagaagtagtcacaacagcttttctggtgttccggaaaattgtcgttcgagatgcgccatcaaccgcgcggctgaacagtttcggggcaggcgtccgcccaggtctgaggaccccgatgcggcacaaggtgattgctgggagttcctcagaatgagagctctcccatgcatcattcgggtcgctctgcggtcacgtcctggaagaagcgtgtgtccgggcgggccccgtgtcgggcgcgagctgggggtaccgcggcgtactaggggctgcaggctggggccgcgggcggccggagcaggcacacggtgagcagccccgcgcacgccatggcgccgccacccgctcgggctcggctgcggttgctgccgacctggacgccgcggcggactcggtgtggctagaggccgccccttggcgccggcgccccgct

SEQ ID NO: 438699 - DNA, 2136 bp, Homo Sapiens
  misc_feature (93)..(101): n is a, c, g, or t
  misc_feature (148)..(165): n is a, c, g, or t
  misc_feature (189)..(344): n is a, c, g, or t
  misc_feature (384)..(397): n is a, c, g, or t
  misc_feature (406)..(584): n is a, c, g, or t
cccccccgttttttccacggggggaaaaatttttctccccgcgggccaagggggggtgtccccccggggaataaaggattcacacccccgttnnnnnnnnntcccctcggcgggaaaggttaaaaaaattcccccctcccctctaatnnnnnnnnnnnnnnnnnnaattaaataaaaaacgcctggggnnnnnnnnnnnnnnnnnnnnnnnnnnnnnnnnnnnnnnnnnnnnnnnnnnnnnnnnnnnnnnnnnnnnnnnnnnnnnnnnnnnnnnnnnnnnnnnnnnnnnnnnnnnnnnnnnnnnnnnnnnnnnnnnnnnnnnnnnnnnnnnnnnnnnnnnnnnnggggcccccccccccaaaaaaggttttaaaaatttttttnnnnnnnnnnnnnnccccaaaannnnnnnnnnnnnnnnnnnnnnnnnnnnnnnnnnnnnnnnnnnnnnnnnnnnnnnnnnnnnnnnnnnnnnnnnnnnnnnnnnnnnnnnnnnnnnnnnnnnnnnnnnnnnnnnnnnnnnnnnnnnnnnnnnnnnnnnnnnnnnnnnnnnnnnnnnnnnnnnnnnnnnnnnnnnnnnnnnncagcttagaaccttctttattaaggaaggtctttcaggcactttcattaacaggcacatataagcttagcaagagcacctttcaaagtcacagttccaatggtttttgtaaggtcaaccagaggcagagaacacaatcatggtggcttaccgtcaaaatcatgacaagttgtcaacctaatgccttctgtcaaacataaccaccacccactctgcttctgtcctgtgaggaatgacgggaagtagggagtcaagacttgatattaatgtagatcgcatgtgacacttgcgtggccagcagacaaggccccccacccatgcccaggcttggacaaaatggtggctatgttttctgtgccaaacctcctcatctctgccatgtctagcctagaccttgaagtgtctgatcctccccggacatggaggaaccactggcccagcagcagcaccaacactaggctgcaccactgtgcgtgttttccgggggtgcgacacttctcctgagggtgaccccaatgagaccacacccatgaaggtgtggcgcaggtcgtagtgcgcccggtgcaactggtgtcctggaggagctgccagtaacacatgggagtctgggggtgagccagctggagggagtccaggtgcgccaagtggaggggacggaggtgcatctgggtccaccacgggggtggggactgcttcattggcaccttctggttggggctgtgaggtcacgggctgtgtttggaacaccgtgcaggtcactgcaacctctgccccaccaagcttctcactgagtgttgccttacaaaagccatattgcttttctgccagcaggttacacttggctgcctctgtggcctctttagcaacacagtcagtgccagacactgtaaactccacataggtagaaggtgggaggggcacaagctgagcccgggaaatttcctccagctgaaaattggagccgttgttctgagcgttgaaggcggccagggcagctttcgcggcgtgcaccaccctggtgtcgttcagcggggccagcagggggcagtcttggcacaccttgcgcacgtcctcggctgagtctggactggaatcacattttgcgtataccacggaaaacttgccatctagtttcaacagctggaaatcacagtctccttcgacagcatgctccttcagctgcctcacgctgcatcttgccacaggggtggggtccagcacatggcaggtggtttccagggtgtctatttcaatctcaaacagctctccggagggctgctgaggccacacctttacttcatcaatctggttcaaggtgtgtttgtatccccaaggaaggttttgattgatgtagtctatagccaccagagctgcttcctcagtttctggatcatcgcagttcggttgtctataaatcagccctgggccatgtggggctgagtggcagccccagagctgagcaagacaaaggagcaggacgagggacttcatggctgccccagagaggccctggcaggcgtgcaggtggttggaggcttcgggaccaacccagg

SEQ ID NO: 438700 - DNA, 1054 bp, Homo Sapiens
cctccgtggaccaggttaccatgtccccgcccgcacgcccggccgggcagcccgagctcacgcgcgcccgcccacgtccgccggggtccctgctgatgctcggggggagtcctgtaaaagccacactgaggtcgcggcggcgagtccctgcaaggtcgcccttctgtgcgaacaggctttggtggttcttgttctaggaaacatccagcgcttcaactggccacggagttactaagtatcaaccgaacaaggtagttttaaaaggaagggaaatattgcgacacgaatgaagggacagattaacttgctcctcggatccgggcacacagctcctcctacttcttcttcctcttttcctggacacaccgtggacagaaccattttcctttgggtttcgtggtaaggtccacgcaggcaaagtgaaaccactcaattggacagtctggattgtcacagccaatcatctccccataggagacctggtggcacaggcagtacgtgggttcgtttgggtccacgggcatgtccagcacatcagaggggtgcacggacaggatggtgtcagtgaactcagaccctcctttgtgcttctttttctttggtgtgtcttcctctgatgtcctcctgcctcggccccgggaccctcttttttctttctgaccccagcctttttttaaccctcgccctccggagctttcaaaatcactgccctccatcttgtccttcagatctgcttcaaagcgcgccaggtctgcatcaagccttcgaatgtgtttatccaccatctcgtaggtctgcatggccagctgcactttgtcgtcactgtattccttgcacttgctgtaggcgttctggatcttctgcaggcgctccacgcgctggtctggagacagcgtcttcaccgtggagatgtactctgcagccaggatgtcaatctctgctttcttatcttccgtcctctggtccagctctcgcatcagctggaagttcctctgaagttcgcagggaaggttctcgatactgtccagatagtgctccaagtacatggcggtcg

SEQ ID NO: 438701 - DNA, 1871 bp, Homo Sapiens
atgagccaccgcacccggccaacacagatgtttattgatcgtggaggataaattgtggaaaatgtttttctctcttttaccatttttgggaagagggataggtaagtgcagggagtttgtgctgaaacagcgcctggcaatttttcagaaatgaatttgatattgcgctccacctttgagctgttcacacctgtggctacccctggaaagcgctggggttgttgatgcttttggctgcccggcttcctgaggtctcgctgctttttggggaaagatgactggcttccctgtgggacgcttttgtctgacacgtgatgatgtggtcctgcctgccactgtgcaccatcccaggtattgaattttgaccttttcttttcaagtttctgtgcttagtgtttttaatgtttacttttgccacttacaataatatcaccaaattaatatgcatagagttttggaagaaccatagaaaacatgagcagaatgagccaattccttgggctgtagtttggaccccaactgaatcctgagtgctctgtggctgacgctgtctacccgtgggagagacacactcaggagtggccgtttggccagaaaaagaaaggtcatggcccctggcctggccccgcccctgcagggacacagaagccaccccatttgcaccatccacgccttgctccagaaggcctggccgccttctccctgggggtgattcaaggatttggtctcggaccagacccccctccacagctgcccggccccagacccatctcttggattgagggtgtgtgggctggaaccagtgggtcactgtggcagcttcatctgagccgaaggtgtgggtcctctgtggctgtgcgattgacctcgatgggaaggagcgttctgcccattttccttgttttcagtgctgcggtatcagtcagtgatctgaggaaatcctgtaggggaaggcaggctgcagtgaaaacaggagctggtgaaaccgagccctctgcatctgcgaatgtgccctaggtgctgctgctggggacatggatgccgagcggaggcctgcgtggcctcctgagcagcagctgactacccgtctcctgctggacgggacccctgggcgggtggacatgagaccactgttggccagggacgccgtgcggaggcctacgtggctgcctgagcagcagctgaccgcccgtctcactgttggccagggctttgtggcgtgggtgttttccagtctgcctggagcagcgagaagcagctgtgcagactggtggcggtgggagggtttgctgggactgatggggacaccggccagcttgtctggtgtccagcagccctgccggacttggcctcctgtcctgtcgttgggagccctggctggggctgctttgagcaatgacgctggcccagagcagcttcccacatgaccccagagccgagggtctgccctgtcctaggttaggtcttcatggtttagagtaaaaccgtgagggatgttaattatgggcattgaagacttaaggtttttctcaatttttagtgagcagtgattggccttcaatacttgtgctgagaggaattttaagccaggggaagtgtaagaaaatgttcccattcaggagagattgtgttggagtttctttcttcctctgtatgtcttttgtggtgtccacctttaaccacgtttcatgcacaacgatgatgccgctttaacatgaatgttacatttttattttcaaggaattattatctatgttccctttgtaaaggaaagataatgttgtaaatctttttattagataatgtaaagatggtatatcagtatttttggatcatgttatgattagtgatatattgttatataaaataag

SEQ ID NO: 438702 - DNA, 1467 bp, Homo Sapiens
tagctttcctgtggttttccaggactgtccggtacagcccgggctccgcgtgccccgcccgctggagcacctgccaccgaggcgcgcgtggggccactgccgtggcggcggctgccctcctcacactcggctccgcgccgcctccggccaccgtgcgctcccgcgtggggcgcctcggatgggcccgggagggctgggggctcttccctggaggaagcggcctccgcttcgctggcgccgcctttttagcttggactttcagtcctccctcggggacctcacctccggagtaaacggctcttcattagcttggagtggccgcaggtcccgtgaccagcacccgcgagaccctgtgcgacagctgggctgatgctccgtttctctgggaattggtgattttttactgtgaagatgaaattaccctaatagcatgaagatcgtgggtctgtgtgtccgtgaagtgagtcccgtctgccaggagctgacgaaccacgaatgcttctgcctgtgctgtgcattcccgggcccgcagctcccggtcgaggggactccgatgtgaatttgttgtgaatttgttgtgccacaatagcagttctggaatgaagctaggaaactcgagtgtgctttttgtttaatgagcgttcaccaagctgagccagagccatcctttcggtggtagttggggaaggctatgcagatttgctctgttgtgacgcgttggtgacggtgcccagcctgcggttccccacagcatcgcaggcgctcggaaatcctctcccgtgcctttagaggaaggagaggattcctgaggaatgcagggacgcctgtttctgtcctcacaccacagaaagaaacctgagggaaaactgagacgtgaggttcctgatttaagaagcctgggtttcttcatggtggggggccatttggaatgacagcctcacttccttctgatggctacatctgtatcttttcctcctgtgtttaatgtttcactagggagcaggaaataaagcagaaggaacgtgtgaagctctgtgtctcagacggggccctccccgtcgagaagctggtagtcagtgagtgagaacaagagaacaagaacaccctgaacagtcctggttgggatggtgtccacattcatgttctgcggttcttgaacacacggatgcctctgggccacctgtccttttccgagggtgtgggtgggagtggatcctccgggcgcaggtgccaggcaggtgcaggcgggcggtcggccactgctgctgctcgtccctgccagtgtctgggcctgaaggggctccctccaagcggtgccttcctgcggcttagaagggaaagcgccagagagggcaggctacagtgcttcacaccctccgccacggctgtgaaactggaaatggaaatgaatttgatattgcgctccacctttgagctgttcacacctgtggctacccctggaaagcg

SEQ ID NO: 438703 - DNA, 659 bp, Homo Sapiens
  misc_feature (516)..(516): n is a, c, g, or t
gttccaaaaaatactttatttattaaacaatatatccataatctataacatgatccaaaaatactgatatacatctttacattatctaataaaaagatttacaacattatctttcctttacaaagggaacatagataataattccttgaaaataaaaatgtaacattcatgttaaagctgcatcatcgttttggatgaaacgtggttaaaggtggacaccacaaaatacatacagaggaagaaagaaactccaacacaatctctcctgaatgggaacattttcttacacttcccctggcttaaaattcctctcagcacaagtattgaaggccaatcactggctcactaaaaatttaggaaaaccttaagtcttcaatgcccataattaacatccctcacggttttactctaaaccatgaagacctaacctaggacagggcagaccctcggctctggatcttctgcaggcgctccacgcgctggtctggagacagcgtcttcaccgtggagatgtanctctgcagccagatgtcaatctctgctttcttatcttccgtcctctggtccagctctcgcatcagcctgaagttcctctgaagttcgcaaaggaggttctcgatactgtccagatagtgctccaaagtacatggcgtcgccat

SEQ ID NO: 438704 - DNA, 1592 bp, Homo Sapiens
  misc_feature (32)..(32): n is a, c, g, or t
  misc_feature (98)..(98): n is a, c, g, or t
  misc_feature (115)..(115): n is a, c, g, or t
  misc_feature (123)..(123): n is a, c, g, or t
  misc_feature (129)..(129): n is a, c, g, or t
  misc_feature (256)..(256): n is a, c, g, or t
aataagggttcctccttctcccaaacactggnagggtaggaaaggttgttttgggccaagaacttggcctcaacacaatgaatgtggccgggaagggnccaactggaagcccccncattccanccctanccgatcctcaggatgcgactgggctgtcccctcgcatctgtccatgccagaagatggagagagcggggcccattctactgagatgctccgtgggagccgtgtgctatgggctggtaccaggccgggnccgtgttggcaagacgcatcatccgcctcgtgttcctgtcctggtcgcggatcttcttctccatctcagcgtctgtcagagtctccagcagtgggcaccactggtccgcatcgcccgtgttccggatggcaatctccactgtgggcagagggttctcgctgaaggcgtaggtcttctgatgccagctcagctgtccccggatgctgtatgcgatggtggtgacaaactctccgcccaaccccagctccgagcacagcttcagggcaaacttctctggtgagttctccttctctgacatgtcccactcaaactggtccaccagggaaatgtttcccacatggatgttcagcttgatgatgacgcgctggtctgactggtcctccaggatgctgtccgtggggtaggactcgatctgctgtctgatggcagaggcgatggctggcacaaacgtcagcgggttcaaatccagatcgtcacagaggatttctgaaaacatctcaggcgtcatcaacttctcattcatgttccaggtgaaggcgtctcgcagcttctgcccatcgatctccatgtccagccggatggggaccagcacctcgggctgagatgcgttctcatggatcacagctgggtcatggtcatcaaagcaaagggggaaggttctcttcttgtctcggcccatgcggttcctgttgatggttgtggagcatggcacggcatctaagtggtgggagctgttgggcagggtgggtacccactggctgttcctcttggccttctgttccctgaggtaggtggggggctctgtgctgatggacacagccttgtacttctcatcgttgccatccagaatctcttccacttccgaggcttttaacagggtcacactggtggctagagtcgtgtatccgtgatccttagtgttaggttttgtttttttaccatgtgacgatgcaactattttcttcctctcttccacagtggctagtcgcctccagagtgaggggtatctcttgtacagagaacctcggaacatacggaggtagtttcccacctcggagccgatcatgtagaactcgccgtcgtcctccagctggaacttcacgggcttctgcccgaaggtcttgctcagcgccatcatcatcattgcggcggcagaggcgggcggccggagccgggctgcgagggatcaggagggctggggcggggccggggcgtgctgggccgagggaaaccgaagccggaaggcgaaatgcggaccgggccgggtactggcgcctcagccgggctcctcagccgccgccgccgctgcagacgacgaccaggccgccctcagtgc

SEQ ID NO: 438705 - DNA, 1673 bp, Homo Sapiens
  misc_feature (20)..(20): n is a, c, g, or t
  misc_feature (50)..(50): n is a, c, g, or t
  misc_feature (58)..(58): n is a, c, g, or t
  misc_feature (63)..(63): n is a, c, g, or t
  misc_feature (79)..(120): n is a, c, g, or t
  misc_feature (142)..(142): n is a, c, g, or t
gttactagccctgcctgggngctcctatacaaaaacaaaacacaacctanaatagggnttctncctgggcccagagacnnnnnnnnnnnnnnnnnnnnnnnnnnnnnnnnnnnnnnnnnnctcaacaaatggaatgtgtgcngggaagggccacctggaagcgcccactccacccccacccgatcctcaggatggcgctgggctgtcccctcgcctctgtccttgccagaagatggaggagaggcggcccaatcttctgagatgctccgtgggagccgtgtgctgatgggctggttaccaggccggggccgtgttggcaagacgcctcatccgcctcgtgttcctgtcctggtcgcggatcttcttctccatctcagcgtctgtcagagtctccagcagtgggcaccactggtccgcatcgcccgtgttccggatggcaatctccactgtgggcagagggttctcgctgaaggcgtaggtcttctgatgccagctcagctgtccccggatgctgtatgcgatggtggtgacaaactccccgcccaaccccagctccgagcacagcttcagggcaaacttctctggtgagttctccttctctgacatgtcccactcaaactggtccaccagggaaatgtttcccacatggatgttcagcttgatgatgacgcgctggtctgactggtcctccaggatgctgtccgtggggtaggactcgatctgctgtctgatggcagaggcgatggctggcacaaacgtcagcgggttcaaatccagatcgtcacagaggatttctgaaaacatctcaggcgtcatcaacttctcattcatgttccaggtgaaggcgtctcgcagcttctgcccatcgatctccatgtccagccggatggggaccagcacctcgggctgagatgcgttctcatggatcacagctgggtcatggtcatcaaagcaaagggggaaggttctcttcttgtctcggcccatgcggttcctgttgatgcttgtggagcatggcacggcatctaagtggtgggagctgttgggcagggtgggtacccactggctgttcctcttggccttctgttccctgaggtaggtggggggctctgtgctgatggacacagccgttgtacttctcatcgttgccatccagaatctcttccacttccgaggcttttaacagggtcacactggtggctagagtcgtgtatccgtgatcatgtgacgatgcaactattttcttcctctcttccacagtggctagtcgcctccagagtgaggggtatctcttgtacagagaacctcggaacatacggaggtagtttcccacctcggagccgatcatgtagaactcgccgtcgtcctccagctggaacttcacgggcttctgcccgaaggtcttgctcagcgccatcatcatcattgcggcggcagaggcgggcggccggagccgggctgcgagggatcaggagggctggggcggggccggggcgtgctgggccgagggaaaccgaagccggaaggcgaaatgcggaccgggccgggtactggcgcctcagccgggctcctcagccgccgccgccgccgcagacgacgaccaggccgccctcagtgcgcaggcgctggcgttccgctctcgacgaattcgagctcggccgatttggcctgat

SEQ ID NO: 438706 - DNA, 959 bp, Homo Sapiens
  misc_feature (419)..(471): n is a, c, g, or t
ctatatggtgtatgctctgcccccttcacgggtttggaaaggcgcgtgataaataagggtgcccccaataggttgtttctcgcccacaccccagccctttctaaggaaatctcgtgtctctgtgtggcacatgacccaggcccacattcgggaagtgaataagccccccaggttcaggaaaagtggaccggatccagcgggggttaaggacaggggcataggtgatgggcccacaggaaatatgaggcccgtcacctccgctcccaccccgggcagcagggtgagcccaaagaatgactcagaagcgggtgctctggtagcgcagccgccgcaggtctgcaaggccctcactccggccatacacctccctacagggactctcggccagtcaccgggcccccgccccaccacccccaccnnnnnnnnnnnnnnnnnnnnnnnnnnnnnnnnnnnnnnnnnnnnnnnnnnnnnaccggtcctcgtagatggagatctcaataaccctcatcccacgctccacagggtctgtaagtaggaggcctcgaggtgcaaagatcttctcattctgctcctggatgtagcgggaaatcttcttgagaaccttctcatagtgggtctccatgcagaggaagatgaagtaggccgtggcgcaggccaggcagccctcgaggtaggagctgcccccaatcttctcagcctctgcgtaaaatccgttgagggtcttcacagtctcttcaaagagctgccgctcgatccggctgtccagctctggggggaatttggtctggaactgacagatggtcccatcgctgtagtctctctggataaagaccttggtggccagtgaggcacttcgccggagctcctgcagattgtggaccatcggtggccatgatccgggggcgctcggaggctgtcgcggggccgggcgaggggggtctccgcggtgctgaccccgg

SEQ ID NO: 438707 - DNA, 663 bp, Homo Sapiens
ccccgtacaaggccccgcggttcctgttgatggttgtggagcatggcacggcatctaagtggtgggagctgttgggcagggtgggtacccactggctgttcctcttggccttctgttccctgaggtaggtggggggctctgtgctgatggacacagccttgtacttctcatcgttgccatccagaatctcttccacttccgaggcttttaacagggtcacactggtggctagagtcgtgtatccgtgatcatgtgacgatgcaactattttcttcctctcttccacagtggctagtcgcctccagagtgaggggtatctcttgtacagagaacctcggaacatacggaggtagtttcccacctcggagccgatcatgtagaactcgccgtcgtcctccagctggaacttcacgggcttctgcccgaaggtcttgctcagcgccatcatcatcattgcggcggcagaggcgggcggccaggagccgggctgcgagggatcaggagggctggggcggggccttgtacgcgtacaaggccccgcgacagcctccgagcgcccccggatcatggccaccgaggtccacaatctgcaggagctccggcgaagtgcctcactggccaccaagggtcttatccagagagactacagcgatgggacatctg

SEQ ID NO: 438708 - DNA, 1308 bp, Homo Sapiens
  misc_feature (122)..(163): n is a, c, g, or t
  misc_feature (194)..(224): n is a, c, g, or t
  misc_feature (288)..(288): n is a, c, g, or t
  misc_feature (352)..(352): n is a, c, g, or t
  misc_feature (600)..(600): n is a, c, g, or t
  misc_feature (603)..(603): n is a, c, g, or t
  misc_feature (654)..(654): n is a, c, g, or t
  misc_feature (661)..(661): n is a, c, g, or t
  misc_feature (669)..(669): n is a, c, g, or t
  misc_feature (754)..(754): n is a, c, g, or t
gttgaagaaattgaacatgacctgttgccttttatttaaaaactgttactagccctgcctggggctcctatacaaaaacaaaacacaacctaaaataaggtttcttcctgaccccagagacnnnnnnnnnnnnnnnnnnnnnnnnnnnnnnnnnnnnnnnnnnctcaacaaatggaatgtgtgccggggagggnnnnnnnnnnnnnnnnnnnnnnnnnnnnnnngctcctcagggtggcgctgggctgtcccctcgcctctgtccttgccagaagatgggggggaggnggcccaatcttctgagatgctccgtgggggccgtgtgctgatgggctggttaccaggccggggncgtgttggcaagccgcctcttccgcctcgtgttcctgtcctggtcgcgggtcttcttctccctctcagcgtctgtcagagtctccagcagtgggcaccctggtccgcatcgcccgtgttccgggtggcaatctccactgtgggcggagggttctcgctgaaggcgtaggtcttctggtgcccgctccgctgtccccggatgctgtatgcgatggtggtggcaaactccccgcccaaccccagctccgngcncagcttcagggcaaacttctctggtgagttctccttctctgacatgtcccnctcaaantggtccancagggaaatgtttcccacatggatgttcagcttgatgatgacgcgctggtctgactggtcctccaggatgctgtccgtggggtangactcgatctgctgtctgatggcagaggcgatggctggcacaaacgtcagcgggttcaaatccagatcgtcacagaggatttctgaaaacatctcaggcgtcatcaacttctcattcatgttccaggtgaaggcgtctcgcagcttctgcccatcgatctccatgtccagccggatggggaccagcacctcgggctgagatgcgttctccacctcactcagtctgctccagcagcactgaccttgctatttctagaacatgctggagatgctgccagctcagagccctgtcatttgtattccccattgcctagagtgctctttcttcatcatccatgtctcgtccccccaccttctttcgagtgttagctcaagtgtcaccatagggagagaaccttttctgaccaccttaaagttgctgaaaacctcccccagcctgcctcttgccagcatgttccatcttcttccttttttagcacctaccaccttcacatatattatttacttatttttatggtctgttctccctggcagagagacgggattttaccctag

SEQ ID NO: 438709 - DNA, 589 bp, Homo Sapiens
agccctggcaggccccgctcttcgcgtccttcctggctcgcaaaagctctaacttgtgtcctttgtttgttgcctcagctgaacatccatgtgggaaacatttccctggtggaccagtttgagtgggacatgtcagagaaggagaactcaccagagaagtttgccctgaagctgtgctcggagctgggtttgggcggggagtttgtcaccaccatcgcatacagcatccggggacagctgagctggcatcagaagacctacgccttcaggtaggatcatgcatgagtctctccctccctcattctcccctgcaaaactgttttgagaaagacttctctgtgtgagcggtgatacctttgaggctttctcacgcttcgcagcacaatctggctgggttctgtgtgtttgctccgtcctcctcctgccctatgtatctctccagggctccgctgtgccagttaaggtttagaagcacctaacacatatagctggcaaagacttggagttctgtcagggtgaacctcaagtcgttgcctccacggagccctggcctgcccccaccatccaccattcagttctctctcctgca

SEQ ID NO: 438710 - DNA, 1081 bp, Homo Sapiens
  misc_feature (121)..(129): n is a, c, g, or t
  misc_feature (196)..(196): n is a, c, g, or t
  misc_feature (310)..(310): n is a, c, g, or t
cccccaaccaatggttgtcttaagccctcaaccccaagggaccctctcccattatatgcacggagtcccaatattggcggagatcaactttccaagctggggctcctgtgtgaaacctttnnnnnnnnngcaaattaatgaccaccagttcactccttaggtttgtccgaggactttgtaacatggttcgtctctnggtaaataaatggtacttcattgcttccataatgagtttctgacattctaattcatcccgaaaaagtacattattttccagtctgccaggaactgtggtcaagaagaggtagcntaatataagccaaaagtttacttagatctttccgtctctgttccaaatcatgacggacccaagtaagaagtgcattcaatattgtctcctcattaggaatgttcatgtcatcaactagccaagagctttgcattttcgctggctggtaataataccaattcctggtttctgattacttccatgaaatgctccatagtataattgtgagccactttatgcaaatctgtacaaccttgggcatcagcaaaagaacgaattccaagacagttggatggatgaagctgtttcattaaaaacttacagcatgcttctacaacctgtgaaagctgaagaaggcaagctgtagataacaggcactcaatattatcttcttttaattcaaggcggcctgtataagcatactggatcaaggaccacaacgaatttggttctacaccttccatttttatttcttcttgtcttgcctctctgacatcattagtaaacatggcagcaaaatagtctgagacagaggagagcaccaatctgtgagctggaattctgcgatcaccagcgactaaaattacatcacacaactgtttatgtctcaaatagttttccatttttttaaatgtttgctcggcatgattaagggcttggaaaaattcatctgatgtacatggctccatagtatgacaggatgataatgtctgactactattggaagtcctgcatgaactggaatcagattcattttcttcttcactagtgccatcatccacttctcccgct

SEQ ID NO: 438711 - DNA, 2016 bp, Homo Sapiens
tttttttaagaaatagttctgtttattggttggaacatggtataaaattacagcaatttgcaggcattctggacttcttgggagggacatgcagtgctgggctcaagcaggggatgtggtggagatatggaccactgggcaatggctcccttcctggacatattaaaggacttgtactaccagcacaaatgccagtgtgagagaattattggtcctcgtttctggaaacaaatgacatgggcagtttgggtcatcagacaatgtcatgcttaataattcagtcctatcccacatatgttaggtgctggctctcccaatctggtcatgacagatcctaattgttctggataactctcattcttcccaccaaaggaagagaaacaggcacattggtttgggaggccatcagagatggtgtgcatctggctcaggtcctcttgcttccagattcaccaaggtctgcctgacttggaggcagtgggctgggggcacgtaagcagcatattttgtgcactactgtttaagcttaagcagagggaacttccatagggcagcagtgtgaggagatgagcatgcttccaaaacaaactcaaatttcatcttgtctctctcaagaagaagaaagaggaagagttggcaatcagagactgagccacatgatgctgggttccatagaaagtcttcagcagagaattcttccaaagtgtaaaaggtgtttctgtcccaagagttggtgtgtaaaatcagaacaagggcagatcagggtgttaaggtggttgtttagtacaatgtctctgagagctgaatggctgagtgtcaccagttacatgacattttgaaacagctggagagacctcatgatgttgtcgtcctcctgacatgattcaagaaattcatctaaagttacgatgccatctttatttttgtccattttctggaagaagacgtccacatgctgccttggagtgtcctctttgagcacaggatatgtgtatttccccatcatgtcatagatggctttgacaatgtccatcatctcctctttgtttatgtatccgtccttgttgatgtcatacaaattaaatgtccaccttagtttctcgtggacagttcctctcaataaaatcgacagagcggttacaaagtcctcgaacttcacggagcctgtctgagtggtgtcgaaggcattgaagaggtaatgggcatacgtgctggcatctccatgagggaaaaactgagcatagatctgcttgaatgtgtcttcgttgaccacaccactggggcactcatttttgaagcctcgataaaggacctgcagctccctcttggtgaagttggtctgggcctcgagctgctccagtccctcgggccgatggcaaaccatggtcatctccagctcatcttcaatcttatctttcgagggtcgcctttgtttggtttgcagagatgagaaggtgcccatgacggcccccatggcagcgaagacttgagtgcgagttgggaccccgggcccggcccctcccctaccctggaaagaaatccccgtggtttgtctactctgaattggaggagagaaaagcgcccggcagctcgcctgcagcttggtattcagcaagcgtggaggcgaggctaggaggcttctggcttccttcttcagccccgcacatgcagggactcagggctagccgctccccgcgagccttcggaaccgcttccccgcgcgaggacccggcccggcggttccctcgcccagggccgaggacggtgccctgaagcctgcctggcactggacacggggccagagcgcccgcccggccgaggctgccgagccagcgccgcgtgcggtgcgggagccgccgtccgcccgcccctcctgccgcacactcggctcccctccctgcgctcgggctgggtctcggagggccgagtaccaatcatgaatgaacagagcccggaccgcgcggcgcggagccacagcgcgcccgcctgctgcctgctgcctgctgccagcccgct

SEQ ID NO: 438712 - DNA, 941 bp, Homo Sapiens
  misc_feature (545)..(545): n is a, c, g, or t
cccattttccagtgtcagccttgcccacccccacccccaggccaccccagctgtgagcctgactcttcctcccactcagcaccccctcccccctcatgcatcccctaggggctggaggctccacttccctggagggccagatcccaggaggaactgtggggtggaaaaaacggaggggggggaacagccccagatccacctgccccccaggtctccagccaccggcaccaggtgcaccaggtactcctcttggctctcattaaccctctcctggtcatgctactagctggggaggggtggggggtactgatctgggggaactccctctgcacccctctttgccccggggccggctcggggctctcctcactgaggttggggggctccctccctccatcatggggggagagcagtgaaacccccaagtttaaataccttaatgaaagcaggggctggggaggaaggggctttagatctaataaattattagcgttttagtgtccgtgggagtgggggtggggtggggcaggatgtggcctccaggngcccctcccctccccttactggtgaatctcattctctatgaggctgtcctcgcaagactggaagtctgtgtccgtgagggcgtcgggtggcatcagcaactcctcatcttgggatgaggatgatgggggctcatcccctgagctcccaggagccccatccccatccccgtccacctctgagtcctgcagcacctgagcgatgtatttcgcagatttggggacagcagcagcagtggggggccgtccattgcttctggggtccacagtatctgtctccgtgtgctcaatcttgtagttgtgggcactgaggtatttgaagtgtccaaagcagacgtggcagagacagatgacgatggtgatgaccaggaccacaaatgtgaacatagacgtgggagc

SEQ ID NO: 438713 - DNA, 955 bp, Homo Sapiens
ctggctagaaaagaatggaatcggaatcacatccgatccttaaggagcaaatcaaatgttaactaagttcacgaattgggattgtatatgtaattagcatataatgtgaaagagttcattagcttcacaacaggcacaatcgacacttaggtaaagtactttattgttgcaaaactttagaacattggtattgcaagttcttggcctccatgactgcgttattaaaacctgaaaatcttccttgcttcttctaaagatttctcatccatgggaggcttccttgggctgccaggctgtagaaacttcttcactgtgggcaggttgctgattctggttttcagggccttcagcagagggaagctggagataagactggagtcaagctcctcgacgtagtagagaagttccaccagatgaatgtcagcccggctcagcttgttgccaacaaggtagtcttgtccatggctctttaagactttttcaaaggcagggaagtagcgattttttattttctccttgatcaaggcaagcttggcatctttttcctcaggtggacatacgggcagaaggaggatcatttcacccaaatctgctataccttctatatacatatcaatcagggctctctcctttatgtctttcccatagaggttgtatttgctggcaatgtagttgagaatggctctggtctgcaccagcttcatcccatcaatctcaaccattggcacttgctggaacatcaaatatccatcatttcttaacttgtccaaatcttctgcagattttataaatttctcttcaaactctactccagctgcagccaggagccaccgggtggactccattctgccccgtgcattgaagtagtggagcttgggcttctctgccatgatagcagtctcctggaggtttctctaagctttgttaaacgctgtcaccgtcctggctcgacccc

SEQ ID NO: 438714 - DNA, 1386 bp, Homo Sapiens
  misc_feature (110)..(224): n is a, c, g, or t
  misc_feature (267)..(296): n is a, c, g, or t
  misc_feature (516)..(576): n is a, c, g, or t
  misc_feature (609)..(669): n is a, c, g, or t
  misc_feature (834)..(864): n is a, c, g, or t
  misc_feature (867)..(940): n is a, c, g, or t
ttcgccgctttggccgtgttggccggtctttgttttggttttttctttctcctctgtctcttgtcgtcgtttctcctcccgctgcctcctcgtgtggtcgctgtggcgcnnnnnnnnnnnnnnnnnnnnnnnnnnnnnnnnnnnnnnnnnnnnnnnnnnnnnnnnnnnnnnnnnnnnnnnnnnnnnnnnnnnnnnnnnnnnnnnnnnnnnnnnnnnnnnnnnnncgttcctgttccttctctttcccctctccttctcgtcttcccnnnnnnnnnnnnnnnnnnnnnnnnnnnnnncgtggtccggtgtggtcgtgttgttgtggtctgttgtgtttttgcggcgtggggttgtggcgtggtgtgttgttcggtcgtgttgcttgtgtcttgttcggttattaggcccgcccccgctggtggtggatagtggttgttgtgtgctgtttgatcggttgatctcgcgcctggtgctggtgctcttgctcttttcttttcttcggcgtcttcgtttatnnnnnnnnnnnnnnnnnnnnnnnnnnnnnnnnnnnnnnnnnnnnnnnnnnnnnnnnnnnnntctctgtcgttgtggtcttattatttctctctnnnnnnnnnnnnnnnnnnnnnnnnnnnnnnnnnnnnnnnnnnnnnnnnnnnnnnnnnnnnntcttctctcggatgtcgcctctcttcttgtcttctttttctcctgtctttcgtctttgttttgttcctcgtctcctctccgtcgtttttatatattaggtcgtctctctttttggcgctctcctttttttcaataaattgtggtggtctggtctgcttgtggcgnnnnnnnnnnnnnnnnnnnnnnnnnnnnnnnccnnnnnnnnnnnnnnnnnnnnnnnnnnnnnnnnnnnnnnnnnnnnnnnnnnnnnnnnnnnnnnnnnnnnnnnnnngtctttgcaccatagcagtaaggccacatccccaaaccttaccatttcggcagcggctgaaaggtctaggctttgtagcttgcctgccagttcatcaaggaggcgagcctgctcctcttgtttttccttgaactgggattctcgctccatcatcacgtcttctactctgtctctcatgagggctgactgctccacagtgctgttgggttctgtggtggaggcattcaccctctcctctgcctcaagagacatctggaaatacttggtaatgctatccaaggcacctagggtaggaaatgaaattgcccacagttaacctcatcatactaggcttcctccccaagcagtgtctatatttggtgtcttcgggtcctaaatttactgtaaagttttaaaattcaagaaaaaatatttatgaagtacagttttcatgagcaatgaatatg

SEQ ID NO: 438715 - DNA, 1457 bp, Homo Sapiens
gctggtgtgggtttgtggccaataaaattttctacttgtttatacttttcatcaagttcaccatgtaaagtcttcttaacattttctgcactttgcttcacagtatatactacttttccaatatattctgcctccccggagttttggacagctttccgcttaagttcttccacattcctctctaactcgctgatgcgctgggacgcgttgaacaaggtttcctcagaagctgctgtttcagactcaatcgaagttaacaggttctgggttccttgaatgtcttcatctgcttgtttaattgccttctctgctgcgacctgggccttttctgctttttccagagcttcctttaccatatctgcagtgactttaacatctgttgcacttttgcttgctcttttagcttcttctaacaacatctcagctctggcaatgtcagcagcactatgctgaagaataacctctacttgagaaaggctttcaactcgttcacgtatatcttctgtcaagttctgtaactgctgtggggtgctaggcatctccattttcaatacttcattagcaactgcttcaatgctgtccaaatcagcactatcctgggtcaaaaagtttctgatttgcttgattagatttctcagctcctcattgctcttgtccattttttctttggtagcatttgtcttcaacagaatgtcttcagcactttgttttgcctcatctgccctcagttttgcttcagagaccatcttggagagctgttccacttcagccagggcactcaggacatcttggtccaagtccatggctttctgccaggcgttgtgtgcaacagtaaccagaccaccacagccaggccccccacacttcctctctccttcgtcagttctgcagtttggcccgccacattcagtctcggaacaggaggcccctgggggtgttccacaggtcatttcggcagcggctgaaaggtctaggctttgtagcttgcctgccagttcatcaaggaggcgagcctgctcctcttgtttttccttgaactgggattctcgctccatcatcacgtcttctactctgtctctcatgagggctgactgctccacagtgctgttgggttctgtggtggaggcattcaccctctcctctgcctcaagagacatctggaaatacttggtaatgctatccaaggcaccccgaatatctgagtttttgataaattccagttgttcagcaagttctttcacagtgttgtctaggctttcggcttctgtctgtagagaatccagttctttggctgtgctgttgctttgggaagttgtgtcagataatttcacttctacttgagccatcatttctgtaacatctttaatcagtttctctgcttcctcaaagagattcccaatgtttttcagtggctctgctgcggggctcgcgatcccgagaatccggaccggtccagc

SEQ ID NO: 438716 - DNA, 812 bp, Homo Sapiens
ggggcaactccaagtaccactactatggcctgcgcatcaaggccagctcacccctgctgcggctgatggaggaccagcagcacatggccatgcggggccagcccttctcgcagaagcagaggctcaagcccatccagaagatggaaggcatgaccaacggcgtggcggtggggcagcagccgagcacggggctgtcggacattagcgcccaggtgcagcagtaccagcaatttttggatgcctctcggagcctccctgacttcacagagctcgacctccagggcaaggtgctgcctgagggcgtcgggcccggggacatcaaagccttccaggtcctgtaccgggaacactgtgaggccattgtcgacgtcatggtgaacctgcagttcaccctggtggagacgctgtggaagaccttctggaggtacaacctcagccagcccagtgaggcgccaccgctggctgtacatgacgaggccgagaagcgactgcccaaagccatcctggtgctcctctccaagttcgagcccgtgctccaatggaccaagcactgtgacaacgtgctgtacccaggcctggtggaaatcctcatttccgacgtgctgggggcccatccccagtgccttgaccccaagcgatcccggaactttgcccagagccctggagagctggcttacccaagccatggtcaacattccccgagagatgcctccggttaaaggtggcccggggtttggcccctttcgccaaaaacttgggcggcttcaacttggttaacccacttggcgccaggcggcacgccgcctttgctt

SEQ ID NO: 438717 - DNA, 1035 bp, Homo Sapiens
cttcgccacattcgcttcctgctttcggtgtgtctgttgtgtcttgttgcgggcaccgcagtcgccgtgaagatggcgtctaccagccgtttggatgctcttccaagagtcacatgtccaaaccatccagatgcgattttagtggaggactacagagccggtgatatgatctgtcctgaatgtggcttggttgtaggtgaccgggttattgatgtgggatctgaatggcgaactttcagcaatgacaaagcaacaaaagatccatctcgagttggagattctcagaatcctcttctgagtgatggagatttgtctaccatgattggcaagggcacaggagctgcaagttttgacgaatttggcaattctaagtaccagaatcggagaacaatgagcagttctgatcgggcaatgatgaatgcattcaaagaaatcactaccatggcagacagaatcaatctacctcgaaatatagttgatcgaacaaataatttattcaagcaagtatatgaacagaagagcctgaagggaagagctaatgatgctatagcttctgcttgtctctatattgcctgtagacaagaaggggttcctaggacatttaaagaaatatgtgccgtatcacgaatttctaagaaagaaattggtcggtgttttaaacttattttgaaagcgctagaaaccagtgtggatttgattacaactggggacttcatgtcccaggttctgttccaacctttgtcttcctaaacaagtacagatggcagctacacatataggcccgtaaagctgtgggaattggaccttggttcctgggaggagccccatctctgtggccagccgcagctcatttcactgggcctccaaggcattagctgaaagaagacccccaaagcacatggcgatcatgctgggtgctcattgttccatagcacatcctataaaggattaatcaccgagacccaaattgttcctccacaactcaaattggccccctggaaaatacacagtaagaaggagacagcaaattgtgaa

SEQ ID NO: 438718 - DNA, 1057 bp, Homo Sapiens
  misc_feature (156)..(201): n is a, c, g, or t
  misc_feature (1014)..(1014): n is a, c, g, or t
ggctgtgcgcctgtgaacttcagcgtatcagtgtttataagcgaataactaaatctagtagcgaagttatggatcaggccaaatcggccgagctctgaattcgtctgatgagcggggtgagatggctgcggagcctgagcaccgggcagtgtgctnnnnnnnnnnnnnnnnnnnnnnnnnnnnnnnnnnnnnnnnnnnnnntccgccttgcgcgtggggcgctgagccgagaggcgcggaggcggcgagggcgcgggggctctgaggaccgttcggcgccgcctcctgccacaccatgggcagcgcagaggacgcagtcaagcggagaaactgctgtggaacgtgaagaaggaggtgaagcaaatcatggaggaggctgtcaccaggaagtttgtgcatgaagacagcagccacatcattgctttatgtggtgcagtggaggcttgcctcttgcatcagctgagacgcctgtgccgctggcttcctgcagcagtgacaagatggcagccctgttcaccaaggtggggaagacgtgcccagtggcgggggagatttgccacaaggtacaggacgctgcaagcaacaagcagagggcgaggaaaccctcaggggtcagccaggacggccctgcggcagacagggctcagccagcgggaaggccccggccctcagccctcaggccttgaaacacgtatgggtacgcacggcgctcatcgagaaagttctggacaaggtcgtgcaatacctggcggaaaactgcagcaagtactacgagaaggaggcactgctggcagaccctgtgttcggcccgatcctggcctctcttctaggtgagcctgagagcacaggcacagtgggtacggggcaggtgctgagggagcatcgtctgggctggctgtctctgtctccacagtgggaccctgtgccttggaatacactaagctcaagacagccgatcactactggactgacccctctgctgatgagctggtccagcggcaccgcatccggggnccacctactcgccaggactcccctgcaaagcgcccagccctgg

SEQ ID NO: 438719 - DNA, 993 bp, Homo Sapiens
gggatttgggaactggggagggtttccgcggagccagttcctttgaggggcttgcgcgtgccaattttatccctccttgtgcctcaatcatgggtccaccggaggcccgcgcgggctgggccgctagggggggtgggtaggttaatagtggatgtgttcgtgcctgtggccggggttagatgatccgggaccacatagtcgggtggcccgccccgtgccccatctcctccatttcccacggagggaatgctgcttcgtttcggtagcttggggaacactttcccctttcctttgctgggtccacagcgggggctctagctgtccccgaggcagcagcccattctccagaccaggacagaaaggacagcaggtgtcctccctgtgggaaatgcagcggcggcctctggatgccatcctggctcaccagcacaagcgtgccaccgctcttttgctggtggcagtggatgcacacgacctggctgaagggcaccacgagggcatagtcccagtaaacgctcttttccagctcggagtcccccagagtcccattcatgagctggttgggggtccacttcagagtcaggctctctgcagactggtgcagggagaggtagccagggaccgcctccatatcctccttcggctgcaccagcacgtggttcttgccatagagcagccgcgtccgtgagttctggtgcagggactccacacactcgcgggcacaggcagccagcctgtcctccgacgcgctgccgcttgagtgccgtttccggatccccagggctgggcgctttgcaggggagtcctggcgagtaggtggaccccggatgcggtgccgctggaccagctcatcagcagaggggtcagtccagtagtgatcggctgtcttgagcttagtgtattccaaggcacagggtcccactagaagagaggccaggatcgggccgaacacagggtctgccagcctcgtgccgaattcgccacccaggcccc

SEQ ID NO: 438720 - DNA, 1259 bp, Homo Sapiens
  misc_feature (130)..(130): n is a, c, g, or t
  misc_feature (141)..(151): n is a, c, g, or t
tcttgtcggtaaacaggtcgggttcttaaggaaagaaacattcccttaaagtttggcccaggtgtcttcttctttcaactggtagatctggtgccaaaggagaggcgcccttgggtcccccagttttggnaagtgtatttnnnnnnnnnnntgttttttccagttttgccacttttagacagggcaaattcagagagaattagtagaaaaaaagggcgtcgggctgattcttcttctggatgggtacatgacagtgaatgccctcagttttccagagaaattactctcatctgaatttgatctggagaggttgttcgtggctccatctggaaaaggttcacaactgctacattttagtcctttcagatgttctagttttatatttctaagtttcagcacttcatctgtaatcttctgtatcaggaagttctgtgttttttctcgccgaatagattcaacaagggtgtccagaccttttgggttttcctgtaagtagtctaacaattttccagccctttttctacttgatgttcgacaagaaatttcttcaagtgtcgttctctactgagtattttttttgcacgtagatgatcaaaatgtctctcagctatgattttctcacacaggtatacacgtaaattttctaaggcgtccttcttcacttcagtgaggtcctcctcggtcagggacggtgcggtgggctccatggtggaggcgggagatggcgcttcttccgggtccgggagctcgggctgcgccgccccgccctggctgggggcttcggcctccgggtaatggggaagaaggagaggaggcggagcgggtcgggagaaagacggccgccccttcgggaacagagggactcgggggtcaaaccgtagcgcttccggccccgcttctgaggtcgacggcggcgcgaatctacgcggcgcgacgcggagctcggagcagcgttccttccctctcgtagaggctcaggcgcaggcaccgccccacggcgaggcgcgtcccttagcagagcccgccctgtctctgcggcagcctatcgacgccagcccgcgggccgatcctgtttccgcccccgaccggagcctttcgggtggctccgcccacagcgggcgtttcctcaagccacgcctgcgcaggtcgtcggtaagtggcccgggttagcttcctcataaggcatcgtttccgtgggtggggtccgtcagtgcccaggcagctggcactctcagcctttgctgcctgctcacttcggg

SEQ ID NO: 438721 - DNA, 873 bp, Homo Sapiens
  misc_feature (91)..(91): n is a, c, g, or t
  misc_feature (109)..(109): n is a, c, g, or t
  misc_feature (114)..(114): n is a, c, g, or t
  misc_feature (685)..(685): n is a, c, g, or t
  misc_feature (689)..(689): n is a, c, g, or t
aaaggattcaggccgccttcatgtggactttgcccaggccagggatgacttctatgagtgggaatgcaagcagaggatgcgtgcccgggangagcggcaccggcgcaantgganggaggaccggctcaggcccccatccccgcctgccataatgcactactcggagcacgaagccgctctgctggctgaaaagctgaaagatgatagcaagttttcagaggctatcacagtgctgctttcctggattgaacgaggggaagtgaatcggcgctctgcaaaccagttctattccatggtgcagtcggccaacagccacgtccgccggctaatgaatgaaaaagccacccatgaggcaagagatggaggaagccaaggagaattttaaaaatgccttaactgggattctcactcaatttgagcagattgtggccgttttcaacgcttctaccagacaaaaagcttgggaccatttctcgaaagcccagcgcaagaacatagacatttggcgaaagatttctgaggagctccggaatgctcaaagtgagcagctcatgggcatccgccgcgaagaagaaatggaaatgtctgatgatgagaactgtgacagccctacaaagaaaatgagagtcgatgaatcagccctgggtgccccaggcctacgctctgaaggagggagaatgacagntctncgcttgcagcttgatgcctacaggaatgaggttgagcttctgaaacaaggaaaaggacagcttttccgaacagaggaaaccttaccaaggagccagcacttcagtttttcagcaaacatgcaggcatgcagcagcaattgctaaccatccagaggaggtaaccacaaaagtcagaattggacag

SEQ ID NO: 438722 - DNA, 818 bp, Homo Sapiens
  misc_feature (711)..(711): n is a, c, g, or t
  misc_feature (734)..(734): n is a, c, g, or t
  misc_feature (748)..(748): n is a, c, g, or t
ttccatcgctgggcggtcaacaagtgcgggcctggctcagcgcgggggggcgcggagaccgcgaggcgaccgggagcggctgggttcccggctgcgcgcccttcggccaggccgggagccgcgccagtcggagcccccggcccagcgtggtccgcctccctctcggcgtccacctgcccggagtactgccagcgggcatgaccgacccaccaggggcgccgccgccggcgctcgcaggccgcggatgaagaagaaaacccggcgccgctcgacccggagcgaggagttgacccggagcgaggagttgaccctgagtgaggaagcgacctggagtgaagaggcgacccagagtgaggaggcgacccagggcgaagagatgaatcggagccaggaggtgacccgggacgaggagtcgacccggagcgaggaggtgaccagggaggaaatggcggcagctgggctcaccgtgactgtcacccacagtgagtgtcgggcgccaggcaatgagaagcacgaccttcatgttacctccccagcagggcagcagtgaaccagttgtccaagacctggcccaggttgttgaagaggtcataggggttccacagtcttttcagaaactcatatttaagggaaaatctctgaaggaaatggaaaacaccgttgtcagcacttggaatacaagatggttgccgggtcatgttaattgggaanaagaacagtccacaggaagaggntgaactaaagaagntgaaacatttggagaagtctgtggagaagatagctgaccagctggaagaagtgaataaagagcttactgg

SEQ ID NO: 438723 - DNA, 1914 bp, Homo Sapiens
  misc_feature (448)..(499): n is a, c, g, or t
  misc_feature (505)..(581): n is a, c, g, or t
cttcccgttgttgataccgaagctgcccgccccgtgtgtagtatattcgttttctcctgttatacatgctcccctgctggtgctccgtgagtatgtcgtctgctctctccggccgctctatttctgacgcgagcggttggtttttctccccccttcctagccctgcgtgagtcgtgtgtttattttttctcgcctctgagcggggtctggtatctatccttctcctgggtgtgtgtggtcgcctccctccttattggtgttgccccccccgcgtgctatatggtgttgtgtcttgctacctatagtatgtcctcctgtcgcttgttgtttctcgtctctgctctcgtgttgttgtatgtgtgcgcgtcggcctcgtcttcgactgttattattagtaccgcgcctccctattatggggcgcccccctttctgttgctataatacttcnnnnnnnnnnnnnnnnnnnnnnnnnnnnnnnnnnnnnnnnnnnnnnnnnnnnccctcnnnnnnnnnnnnnnnnnnnnnnnnnnnnnnnnnnnnnnnnnnnnnnnnnnnnnnnnnnnnnnnnnnnnnnnnnnnnnggagaaaacagataggagctttactcaaaatcacaaagacactatttttcattgagaaccagtgtgagagtaggaaaattggcaaatggccagttgcccccagcagccctgaagaaatcaggtaaattccgctccagagacggcagagctggtggcgccattcttcagggcagcacagcctttttctgctacacctcactcggccagggcaaagtttgtagactgcagccgctcagtctcctggcagatgttctgctccactgtgtcacactcggctaggaatgcctgaaccttttttaccaagcctttccttttcaatctactgtctttgaaattttctggcaggatcagtgtgtcaatctcctccaagatcttcataaactgctctattgtggcttttactctcctatcaagtttgcagagagcttcagcttgcaaatccttgggcagaaaaccctgctggattccagtaagctctttattcaactcttccagctggtcagctatcttctccacagacttctccaaatgtttcaacttctttagttcaacctcttcctgtggactgttctttttcccaattaacatgacccggcaaccatcttgtattccaagtgctgacaacggtgtttccatttccttcagagattttcccttaaatatgagtttctgaaaagactgtggaacccctatgacctcttcaacaacctgggccaggtcttggacaactggttcactgctgccctgctgggaggtaacatgaaggtcgtgcttctcattgctgtgggtgacagtcacggtgagcccagctgccgccatttcctccctggtcacctcctcgctccgggtcgactcctcgtcccgggtcacctcctggctccgattcatctcttcgccctgggtcgcctcctcactctgggtcgcctcttcactccaggtcgcttcctcactcagggtcaactcctcgctccgggtcaactcctcgctccgggtcgagcggcgccgggttttcttcttcatccgcggcctgcgagcgccggcggcggcgcccctggtgggtcggtcatgcccgctggcagtactccgggcaggtggacgccgagagggaggcggaccacgctgggccgggggctccgactggcgcggctcccggcctggccgaagggcgcgcagccgggaacccagccgctcccggtcgcctcgcggtctccgcgcccccccgcgctgagccaggcccgcacttgttgaccgcccagcgatggaagctgagcgcggcgtctcacaaccccgcccgactacttcccagcctcgtgccgaattcgccacccaggcc

SEQ ID NO: 438724 - DNA, 836 bp, Homo Sapiens
  misc_feature (58)..(58): n is a, c, g, or t
  misc_feature (65)..(65): n is a, c, g, or t
aaagccagccttcaagttttgaaaggcaactggccaactcttggggcagctcaagttnccaactngggccgtgttctggtgaaggtgaagaaccctggttggggctggcgccaggtgttccctggagtgtcagattcttttcaatcaagttccttggttttgcactgaaaagctcctttcacggctgtgcgcagctgctgcagggctgaaatcccttcgctgggcctcctctctcagggcttggcttgttccttcttcttgagccacttcctgctctaggctctgtacttgtgagcgcaactgatccatcttctgctgctgcttctccacaatcttttggagcgaatcgtatcgcttctgccaggactccatttccacttctggaccttctccactggtctcctccacagactgtttatcttgcaggctatgtccagcggaggagaattctgcttctctctgcctcaggctttccagttgaatctccttctctctgcagattgcctgggtctcctccagcaaactctccagctcagtcactttctcctgcagctctgtgctcttcaactcagaatccttaagctgctggctctgcttctgatggtcttccagtgtgggcaggtcagccaggtagcgctccaaggtctcaatacgctgctgcttctcccggttctgctctgattccttctggcatttctttttcaaattattgatatgtttatcacgacctttgaccctttcttcctgtttcttcacttcctcagaatgcttctgcaacgccactttgagcgactctctgatgagctggacttcaacttcagaagcagagagtttct

SEQ ID NO: 438725 - DNA, 992 bp, Homo Sapiens
  misc_feature (718)..(768): n is a, c, g, or t
  misc_feature (841)..(909): n is a, c, g, or t
gttttcatgtttggtggtgccctttctctctggccctctctggtgcgtcgtttccgtggtcgtgctgttcgcgtggttccttcctagcagcagctcttcggggccttggagaggctgggggcaccagtgccccctcccttccccagggctgaggcctctgcggccaaggggcagggctgggggtgcacaggcgtccggtccgttctgggctcgctccctggccggcttcccccttagaaactcaccaacgtataaaccatactgtacaggtaatagaagaaggagagcaggtagaaggcaagtttgcaccaggactccttctggcagtagttgagaatgtcagcattcatgatggagaccgcatcatacatgacctcagagccatctgcaggacggtggaagtacctccagaggtggtagaagaggagggggatgttgaggcccagggtcacccactctgctgcacacagaaacatcagacagaagaggccgtggatggagtattctgggaccaccagcttcctcaggaggcagcagatgcgttcgatgttttttaaacgctcgcgtgcccgcgcagggttcccctggtcgatggggttcttgaagtcggtccgcagctcatcaaaggctatgatgtgccagatgacaaagaagatgagggaggcgcacagcaccagggtgagcatgtagcagaacgcggcgaaggtgaacgccatgnnnnnnnnnnnnnnnnnnnnnnnnnnnnnnnnnnnnnnnnnnnnnnnnnnnaaggggacgccccccggcccgcgcttagggccggccgggcatggcccgtggggctcgggggacgtgggtgatnnnnnnnnnnnnnnnnnnnnnnnnnnnnnnnnnnnnnnnnnnnnnnnnnnnnnnnnnnnnnnnnnnnnnccgctgccggctgcccgggccccgatcgctcatcctgcgatccctcgcccgcggctccctcgcatcccgggaattccggaccg

SEQ ID NO: 438726 - DNA, 1820 bp, Homo Sapiens
  misc_feature (73)..(261): n is a, c, g, or t
  misc_feature (263)..(266): n is a, c, g, or t
  misc_feature (712)..(724): n is a, c, g, or t
  misc_feature (1661)..(1724): n is a, c, g, or t
  misc_feature (1732)..(1732): n is a, c, g, or t
  misc_feature (1748)..(1748): n is a, c, g, or t
aggaggttttggtttcttttaacccggattccccaggtttggggtttttccccgtttaagggtgtgttaaaannnnnnnnnnnnnnnnnnnnnnnnnnnnnnnnnnnnnnnnnnnnnnnnnnnnnnnnnnnnnnnnnnnnnnnnnnnnnnnnnnnnnnnnnnnnnnnnnnnnnnnnnnnnnnnnnnnnnnnnnnnnnnnnnnnnnnnnnnnnnnnnnnnnnnnnnnnnnnnnnnnnnnnnnnnnnnnnnnnnnnnnnnnnntnnnntatttgcagtagtttattcatattttgtcacaaatggccggggagggggtgccggactcctccaggcgacatagaaaataggtccaagagacaaggtgggctgaggttggggcagatggagacagggctggagaaagagcctgggggagaggggagggcagactaggggtggggctgcccccctgctgagcctgctcattcccggtgcgggtacccccccacctgcagggggagcctcagggtgggggtggagggggatggcccagaatttccagggtcaagctctgccccttggcagggcccaagtttcccccgaaatggacaaggccggaggtcctgccccttccaggaatgactgccatgcccacaggctggcagaggagcccctgcccctgtttagagctctgcccagccgctctagtccaagggggagggctctgaaggcnnnnnnnnnnnnnttccccgcagcagcagtttgggggttggagaggctgggggcaccagtgccccctccctccccagggctgaggcctctgcggccaaggggcagggctgggggtgcacaggcgtccggtccgttctgggctcgctccctggccggcttcccccttagaaactcaccaacgtataaaccatactgtaggaagatgagccagtgagcctagccctgcacacacacagccacccagatgcccacctggtcacaccctgggctgccctcagtcctcaagggcaaaaggcaggaacttgggattggaagcgtgatgctgggacatcccttccctgagttctgactgctgtgggcaaggcctcacctgtacaggtaatagaagaaggagagcaggtagaaggcaagtttgcaccaggactccttctggcagtagttgagaatgtcagcattcatgatggagaccgcatcatacatgacctcagagccatctgcaggacggtggaagtacctccagaggtggtagaagaggagggggatgttgaggcccagggtcacccactctgctgcacacagaaacatcagacagaagaggccgtggatggagtattctgggaccaccagcttcctcaggaggcagcagatgcgttcgatgttttttaaacgctcgcgtgcccgcgcagggttccactggtcgatggggttcttgaagtcggtccgcagctcatcaaaggctatgatgtgccagatgacaaagaagatgagggaggcgcacagcaccagggtgagcatgtagcagaacgcggcgaaggtgaacgccatggcccccgcgccgggcggcggcccggggggcgccagcgcggggcccgggcgcaaggggacgccccccggcccgcgcttagggccggccgggcatggcccgtgggactcgggggacgtgggtgatnnnnnnnnnnnnnnnnnnnnnnnnnnnnnnnnnnnnnnnnnnnnnnnnnnnnnnnnnnnnnnnncgcgtccncttccgggtaaacggnccccgatcgctctgttttgaaaattccggccttctcgcggagttgtggggttggagggaaggggaggggggg

SEQ ID NO: 438727 - DNA, 941 bp, Homo Sapiens
  misc_feature (803)..(838): n is a, c, g, or t
  misc_feature (842)..(886): n is a, c, g, or t
gccaatagtgtaggccaatccttatcctgttaaatagaagttaccacagtctgccgcggtagcgctgacatgctaggataattccacggatccaatccagcccaccacatggtaccaccaacatgtactgcagagacccagaaattgtgaactccacgaagcctgcctcattctgaacagactgccggtagtgccaagaaaaagaagtgtcatgatccagtacacccacacaagacaagagcgaagaaagtccagaagggttggaagactagcagtggcaagtgaatgaagaccttgccagctacgtggaacaaggcgatggtaagagcgacacgtttgcgcataacctacattatcaggaataagatcactgtgaacactgtagctgaagatggcataaatgaggagggcccgaagattgtcttcagctatctgaagctgctcaggagtaacagtttctttgggagaccttctttgctttgcatacagccaccatagtacacctgtgcctccaagtgaaccgagtatgaccagaatcgttaagatccacacaagtactcttgatatatacctgattatcaccatcaaaatcatggatagaactagtgataacaagcaaagtcccaatataatttctttgctggtcattactccactaatcagcctgtgtaagacactattgtcactgacaaaggtgatcagggcctctgcaaacttggcatagcaggaaatgttcacaggagcacagcgatgcccggccgtaatggccgaattcccgggcatatgtccggccccgtcgactnnnnnnnnnnnnnnnnnnnnnnnnnnnnnnnnnnnncggnnnnnnnnnnnnnnnnnnnnnnnnnnnnnnnnnnnnnnnnnnnnntaaagctaggcccttatgatctatcatgcttggtggtgtgggggtggtggtgtgt

SEQ ID NO: 438728 - DNA, 1193 bp, Homo Sapiens
cattatcaggaataagatcactgtgaacactgtagctgaaatggcataaatgaggaggggccgaagattgtcttcagctatctgaagctgctcaggagtaacagtttctttgggagaccttctttgctttgcatacagccacccatagtacacctgtgcctcccaagtgaaccgagtatgacccagaatcgttaagatccacacaagtactcttgatatatacctgattatcaccatcaaaatcatggatagaactagtgataacaagcaaagtcccaatataatttctttgctggtcattactccactaatcagcctgtgtaagacactattgtcactgacaaaggtgatcagggcctctgcaaacttggcatagcaggaaatgttcacaggagcacagcgatggaagaatggaataggtgcactcgctggaactggtagtttggggcagagaacagaagattttggagatgtagtgtattcagaaggctttaggttgtagctacatagggctgaaccatttatctctgcaaacttctgaacatcactcagagttttcagttcttgccttggacacgctgctacacacagtgctacagacttaatcttccggtttatcaagtccaggttgcatggatccaaaaagaatacatacttccgctgggtgtggtccatgccactgtttggtattgcttccaactttgtatttttctgcccacagatatttccatagctgtcgtatcctgacactagtcttgctgctgcacctgttgctattgaaaagccacaaataaatcccatcccaatgcagaagaggatgaagagcagcagccatggtatgtctgtgcagctacggtcctccagcggcttccattctcgtttggagctctgcgcggcggaggaggcggagctgcagcagcccatggcggggccgaaggagcccggaggcggcgccgggcgcgcagctacgccccggagcccctcggcatgcgagccggcgggcgcccggggagggcgcggcctggcaccgcacggctaggcggcggcggcggctgcagcggcggctggtactcaagaggcggcgcggctagaggcaggcgccggccacatcccccggcggcggcgacggcggctacgcgtctcctgctctactccgctctcgacgaattcgagctcggccgatttggcctgat

SEQ ID NO: 438729 - DNA, 929 bp, Homo Sapiens
ttttcagtgaaaaatacttatttcatgtgtttaaaaatacattcttagggtgggccctgcaggaggagacaggccgtccacatctccttcccaatagtgtgtccaggtcgtttccaaaatctgtgggtccctcacagcttctgatgacagctgctaatgccatttgctgaggaacaaggatggggaggatggcgagggcctggcccccagggcggccacaccagaaggtcggagaaaggcccaaggcggatgccacgcccagcagtggtgactgccccccactccttttctgagtctatcagcattgtttggttttcttcttgttgcttttaaatcctcgagcggcaccctgaccaaagcagatggtagagggtattctatgtctgtagatccgcctctcacctgccggtgcaggggaggctgccacaggctcagagcagatttccatggcctccccttctgaccgctctccactgtcccctggggctttctgctgaggcttggcttctgcttttctttgggcttatcaaaccggaagtccgcggggtacaggtgcatcctcaccatgtgatccttccggtctctgctggtcttgaacttctctgtgcagccttctaccaagcactgatacatgtcctgcctctcagacaggatctggaagagcgaatcgtgccactccaggatgtgggcgtccagcaggtgtccggaagggaaggcccgcttgcaaaaggagcaaacatttccgtgcagcgtgtggtagtggtgctcgtagtcgtccagggcatcgaacacctggcagcagccggccacctggcaggcaaacgcgggcaccctgggcttctcaggcacgtcggccacctgcatgatcacgtcctggaggtagaggtggcgctgcacgtccccatcctgcaggaaaagtgcgccgtccc

SEQ ID NO: 438730 - DNA, 1394 bp, Homo Sapiens
  misc_feature (1260)..(1260): n is a, c, g, or t
  misc_feature (1309)..(1309): n is a, c, g, or t
  misc_feature (1328)..(1328): n is a, c, g, or t
  misc_feature (1335)..(1335): n is a, c, g, or t
  misc_feature (1364)..(1364): n is a, c, g, or t
acagaggctggtaccggtccggaatctcccggaccggggactgcagcgggagactacaggcggggcaaggcggacgggagagggcgtgcgagagggggacctgcgacccggcttcccagggctgggaggggacacccgggacgacccggaggcccgctccgccccgccccggctgagtgtcgggccgcggggcaagacgctggcctggccggtgcaggcccgaagggcttcggccccagagttcggggaccgctgcacagccagagggagcgcgcgggaagagccgcgtcccgccagccccgtcgcctcgtgggcccccccgggcctggcagtcccccaaccccctcatcacgcccgcgcccgcgttcggccaggactcaccgcagtcccggagccacagcccccgcgcagcccccgacggcggcggaagtgagcgtgacgtcacgtccggctcggctcgcggacggtggccgacaggctgcgcccgcccgcgcccggggtgatgcagttgccccccgcgctgtgcgcccgcctcgctgcggggcccggggcggcggagccgctgcctgtagagcgggatcccgcggctggggccgcgccctttcgcttcgttgcgcgccccgtgcgcttcccgcgggagcaccagttcttcgaggatggggacgtgcagcgccacctctacctccaggacgtgatcatgcaggtggccgacgtgcctgagaagcccagggtgcccgcgtttgcctgccaggtggccggctgctgccaggtgttcgatgccctggacgactacgagcaccactaccacacgctgcacggaaatgtttgctccttttgcaagcgggccttcccttccggacacctgctggacgcccacatcctggagtggcacgattcgctcttccagatcctgtctgagaggcaggacatgtatcagtgcttggtagaaggctgcacagagaagttcaagaccagcagagaccggaaggatcacatggtgaggatgcacctgtaccccgcggacttccggtttgataagccaaagaaaagcagaagcccagcctcaggcagaagccccaggggacagtggagagcggtcagaaggggaggccatggaaaatctgcgtctgagcctgttggcggcctcccctgcaccgggcaggtgggaggcggatctacagactataggtcagtgtctgagctctttctgaaacccgttctcaacatgtgttcggtgctgaggattctgggctgcacctnggccgcagctttttcttcattactggaatttcaggaaaggttaacgctnggtaagaaaatcgggtttncgccagngaaggaagttccagatattttcagggtcntgtggaataacttagttttttttcggcttt

SEQ ID NO: 438731 - DNA, 864 bp, Homo Sapiens
cttgcggcttttcctgaaacggattcttctttcggggaacagaaagcgccagccatgcagccttggcacggaaaggccatgcagagagcttccgaggccggagccactgcccccaaggcttccgcacggaatgccaggggcgccccgatggatcccaacgagtctccggctgcccccgaggccgccctgcctaaggcgggaaagttcggccccgccaggaagtcgggatcccggcagaaaaagagcgccccggacacccaggagaggccgcccgtccgcgcaactggggcccgcgccaaaaaggcccctcagcgcgcccaggacacgcagccgtctgacgccaccagcgcccctggggcagaggggctggagcctcctgcggctcgggagccggctctttccagggctggttcttgccgccagaggggcgcgcgctgctccacgaagccaagacccccgcccgggccctgggacgtgcccagccccggcctgccggtctcggcccccattctcgtacggagggatgcggcgcctggggcctcgaagctccgggcggttttggagaagttgaagctcagccgcgatgatatctccacggcggcggggatggtgaacacggggttgtggaccacctgctgctcagactgaagtgcgactccgcgttcagaggcgtcgggctgctgaacaccgggagctactatgagcacgtgacagatttctgcccctaatgaatttgatgtcatgtttaaactgggagtccccagaattcaactagaagattattccaacactcgtgcatatcaccttggtgcaattgaacaagacatccgaacgaacatcatctgagtaagattatagaaggtg

SEQ ID NO: 438732 - DNA, 1022 bp, Homo Sapiens
  misc_feature (631)..(663): n is a, c, g, or t
tttttaatgaagtatatataaagtgtacatgaaaaggggaaatatgaaatctggcaaaagtcttttggctttcttacaaatggtatccttataattccccaactatcagaggatgacatatttttctagaaaaaataaaacgactgcaattgtatttcctatgatgctttatgtatcagagtcacttgcagattctggtctgctgtcatctggcccatcactttccttgtcccagtctttcatagatgctcccatcatgaaatcatcacgtaggatcgtccaacctgggccttcttctgatttcacttcagtctgtttggcttttggtttcttcctgcttgaagcagtctcatttgtacttccatccatccctctcaaaacactgatgaaatctttcttggaaacagttgatatcaacttagcacgctttctcatagaacttccagcttccttaaccttttcatcaacattcttttgatgtttctgaacagcattaaataattgcaccacaccccttgttgcaattctctgaagatttctctctgtctctttgtcttggacaacatctggctttactctgcacatcatttcccactccagcctcttatcacgctgttttattttctctagnnnnnnnnnnnnnnnnnnnnnnnnnnnnnnnnncagcttcttatttttgaccagaatagtaggtttactttcaggagttttcttgttgaggactttagccatagcatctgcccagcccatattagtcccaacacttgattctccatcattttcattttctttgtcacagggctcagcatcaccctcactgtcagcttctattgcgtcatcatcagaataaaagtggtccttttccgatccacagcttccttcactatcagaagtgtctgtggcctcgtcttccagcaccgacgctacggctccagttaccattttcatcttcttctttggggtctttttcaggttttcttcctcactcacacgtgagtccggagcggcggctgccatttttc

SEQ ID NO: 438733 - DNA, 855 bp, Homo Sapiens; identical to SEQ ID NO: 150754
  misc_feature (95)..(96): n is a, c, g, or t
  misc_feature (129)..(129): n is a, c, g, or t
  misc_feature (137)..(137): n is a, c, g, or t
  misc_feature (309)..(309): n is a, c, g, or t
  misc_feature (316)..(317): n is a, c, g, or t
  misc_feature (319)..(322): n is a, c, g, or t

SEQ ID NO: 438734 - DNA, 1161 bp, Homo Sapiens
ttttagacatatccccaattttattccctttgtccaacattccgagagggaaggggcaaatgagtcaatgttgcccctcaaaaccatcaagtaggggcctttgggggtcttcagttgatcaaccagggtgatagacccctaccccttcctcatggtcctggcttgtcacaattaatgggggaaagttttccagaaggggattccgggcttctcaccgctcatcagggcaccttcccaaaacgttctcagcaaaaagtctgcacttctcagagttaaatacaggagaggggagactccttgaggagccagaagtgggtatgttctcaggggtcaagagaagggcgtctcaggctctccctgtccaccgggggtcgtcctggctccccgtaccttcgggcaagtagctcttggcttgacactgtccagcccgccagcgtcccaggccgccccaagccctcatgggggaggagcaccgacctgtctccaagcatcggaaaaggcgggcctcccttgccgtccatcacggggctctctaggccccctgcgtcgccaaggaggagtctctgacatccccaattcgtcaagctagtctcttaagacctctcaccttaggcgggttccccagtccccccatgcagtcaggcgagcctcctggctccaccacgccatcgagcgagttcggctcttcgcctgtcaccgtccgtcggggcgggtctccggtgcccccgtgctgtcgtgggggttccttggactgtcgccgtcgtcaggctgggaacccacgccgccaggctccccggtcggggcccgcgggcgtacgaaggcgcccatggcggtggcgtggcccgagcgtagcagctgcagctggcgccgcccgcggcggtacaggtactcgatgcgcagcacgtcggaccgcggcaggcccgcatgctgccggaactctgcccgcactcgcgcctcggcgcccggcttcccacgcccggcgcgcagcagatcgcggtacaggctcagaacctgcctctgcagccggctgtgccggctcatgaccgcggctaagcagagacgctcagcgaacgacctgcgaaccgcggagccgccacacagccagcaaaggccaaagcgccacccaggcctcgctaccttataaccgttatagttactgcc

SEQ ID NO: 438735 - DNA, 1096 bp, Homo Sapiens
  misc_feature (19)..(19): n is a, c, g, or t
  misc_feature (85)..(85): n is a, c, g, or t
  misc_feature (101)..(101): n is a, c, g, or t
  misc_feature (390)..(391): n is a, c, g, or t
  misc_feature (720)..(720): n is a, c, g, or t
atcctgattgaaagaccanccttggtccaatcctgtgcattgtgaaaggggtttaacagcctcccctgactcctatccaactggnagcattcccccggttnatgaacaaccagaaaatgtctcctaggtattgctaaatgttcccctcaggatgacctcttcacttcctgttgagaactactgatttactgtgtgcaggaactgtgttaatcactgaggagacaaaccataaatgagatcatttcagatggtagtaagtgctatgatgaaaataaaatagggtaagaaggcagacaggcctgggatgcaacatgtactacacatgcaaacgtactgacaggggaaagaatttggcttgttccaagaagaatcagaatgggggtatgccannatctgcagccggtgtgctgcttgccccagatgtaggcagttgaggctcatgatgaggtggggtgagctatgcaggagccagaccccaggaagagtccccacatccattcctggagtagagcagctgcacgggctggggtcaggcaagaaaggaacaggctgaagggtgagctgaggaaagagtgggcttgggctggggacccatcactcaagcatacaatctggagttagaagggcctttctgcctccaggggccagctgtctgttggtccacctgtctctgctctctctgcccattgcgggagacgatgcctgagccagcccctcccntccctcccacaggcgggaggacagggagggtgaccccaccagaactgagtccccgaatctccgaagggccagtgcaaagatggtaaccagccagtctccacctgctttgaactcaggaaagagcaggttggctggaactgcagtaggcaggactgaggttagatgacaggaaggaattcctgatggtgaagggtcctgagcactagatcaggggaacagggcagggagtaaaactttgttaaagccccctccaacttcccactgggaaatacttgcccaggaaggcagcccacacacttcctatggttcccacagaggctccacccaaatctggaggcaagaggtttctgcaccccagaggtgcaggggagcacat

SEQ ID NO: 438736 - DNA, 451 bp, Homo Sapiens
  misc_feature (364)..(364): n is a, c, g, or t
  misc_feature (437)..(437): n is a, c, g, or t
ctgcttgtcttcccgttctttccaactgtcattccctgcttgtcttccaattctttccaactgcagttaagatcaaaccaccaagacctcaccaggctcccatctacttttcagcctcaactcagtccacctgctctgccaatcacacctgtttctttttgttgttctttccctaggatatagatcctggcatacctgcattctgattcttcttggaacaagccaaattctttcccctgtcagtacgtttgcatgtgtagtacatgttgcatcccagggcctgtctgccttcttaccctattttattttcatcataggcactttacttaccatctgaaatgatcttcatttatgggtttgtctnctcagtgattaacacagttcctgcacacagtaaatcagtaggttcttcaacagggaagttgaagagggtcatnccggaggggggaac

SEQ ID NO: 438737 - DNA, 372 bp, Homo Sapiens
  misc_feature (43)..(43): n is a, c, g, or t
  misc_feature (105)..(105): n is a, c, g, or t
agttgaactggtaatggggtggtttaagtgaagggaaagctgnccctggcctgcagggtaactaaatgttcagggtgaaaggcagcaaggcagggcattgcctgntggcagtgcccacagtgcccagtaaggttctggaggccctgggggggtgactctagtgctgtggccgcaagtctgatgatgacacctgacttctgtctcccagggttcctgagtgagggcccttggttcccagtggtgtcggaaggcatcaccgaggtccagaggcgtcatcgtggtgagtcagaggctgtcacgagttgcccatgatccccaggccagcaaatggcctccccacggttccgagggccagcccccccgcagtgggcc

SEQ ID NO: 438738 - DNA, 845 bp, Homo Sapiens
ggttcctcgtagatctgcgttgtcacgccggggctggcctgcccgtccttcgccggggacccacggctggtactgctggcctcgcgggctcctgcccgggcagctcgccagcgtctggggtcggggtgatggcgtagggctgacggtgtagtcgtagccgtcctgcctcgtggcagtagctctcgggaccccccacgcccacggaaacggtgtggcgggctgactcggctgcccacggggtacttgccgcccgtggactccaggcggtcggcccagcgctccaggcggtagaacacctcgcgccacacgtgcatctcgcgcttgacccagcgctccaggttggcgatggtctcctggcagcggcacaggcaggccttgatggacttcttccagcgctgcgagtcgctcgtgggcacgtagccgtccaggttgctctccagcttcccgaccgaccggtgcagccccttcagctcgcgctccacctgcttggacacctcggccagcaggtgccggtgcgtccgccgcacgtgctccagcatctcggcccggcacttcccgatctgcaggatcacgttgggcttggccacctgcccgccccgcggcccggggtaggcgtggagcccgccgctggtccggtggtccagctccatctgtgcgcaggtgctccggcagtcaggcaaactcctcggggcggacggacggtggtccggcgctggggtccggcggcctgggtcccgtgcggagctgcggggagcgcctgtctctcgctgcgggccgccggcggggccggtggagcacgcccggggaggcaggtccggctcggctgctgcggatgggatgacgcg

SEQ ID NO: 438739 - DNA, 1454 bp, Homo Sapiens
gcaagactgcgccagattcaaggacgagggctgcccgattatctcgtctgcataaggcaagaggaagaggatcctcaggattgtaaagaggaggcgacggctgcaggttcccagtatctgtcagaggctggggagttacagcttccattctggggcgacggggaccccgggggggtagcccttttgtaatccccaggccccggacaaagagcccagaggccgggcaccatggcgtccatcctggatgagtacgagaactcgctgtcccgctcggccgtcttgcagcccggctgccctagcgtgggcatcccccactcggggtatgtgaatgcccagctggagaaggaagtgcccatcttcacaaagcagcgcattgacttcaccccttccgagcgcattaccagtcttgtcgtctccagcaatcagctgtgcatgagcctgggcaaggatacactgctccgcattgacttgggcaaggcaaatgagcccaaccacgtggagctgggacgtaaggatgacgcaaaagttcacaagatgttccttgaccatactggctctcacctgctgattgccctgagcagcacggaggtcctctacgtgaaccgaaatggacagaaggtacggccactagcacgctggaatggggcagctggtggagagtgtgggttggaacaaggcactgggcacggagagcagcacaggccccatcctggtcgggactgcccaaggccacatctttgaagcagagctctcagccagcagaaggtgggcttttcggccctgctccggatctctacttccgcccattgtacgtgctaaatgaagaagggggtccagcacctgtgtgctcccttgaggccgagcggggccctgatgggcgtagctttgttattgccaccactcggcagcgcctcttccagttcatagtgccgagcagcagagggggctgagtgcccagggtttctcagtggctctttgcagcttacacggaccacccacccccattccgtgagtttcccagcaacctgggctacagtgagttggccttctacacccccaagctgcgctccgcaccccgggcccttcgcctggatgatgggggattgtgtgttgtatggggcattggactgtgggcgccctgactctctgctgagcgaggagcgagtctgggagtacccagagggggtagggcctggggccagcccacccctagccatcgtcttgacccagttccacttcctgctgctactggcagaccgggtggaggcagtgtgcacactgaccgggcaggtggtgctgcgggatcacttcctggagaaatttgggccgctgaagcacatggtgaaggactcctcccacaggccagcttgtgggcctacactgagcgggctgtcttccgctaccacgtgccaacgggaggcccgagatgtctggcgcaactatctggacctgac

SEQ ID NO: 438740 - DNA, 502 bp, Homo Sapiens
ttgtgtactgcttgtacttcttcagacaagtattctctcagatccacatttgtaaatagggaaattgacaaatagttggattccttcctcaacaaagaagttgttccttagtgaatctcttgatacaaaagattagatatgggaggcaacttggtaagctggaagcgcttcagaaagttctccttgtaagtcttatattccttctcagtgatgccattgaacttagccaggatgttgaagagtggcacttggggaatgatgagctgctccttctcgtccttgtagaggggggcagtaggaaggtccagcgtcaggtacataaaagtggactccaccattgtctcctggtactcgtcattatggagcaactgctctttttcttctgctggcagatcaggatggggaagctttttagtgaagatcctcatggacccctggaaaacatcagtcacaatagtcttctttttcttctttgtgccccccagagctgagtgcagagcat

SEQ ID NO: 438741 - DNA, 1011 bp, Homo Sapiens
  misc_feature (472)..(502): n is a, c, g, or t
cctctaatttgggctcaatggaattctccccccattttgggcggttcccaacccgttccctcccctcaaccctttttcgggcaatttaggggctttcggaaaatagggtgttggccctgccctccatgggctttttgggaatttcttccccactctttgtcccctctgatcttttggaggcatcaaccctttcgtactcctggcatttacctcagggttcgtcaaaaaaaacccttccgggtaacgcttccgccggtgttttctctccttttccaccacttttttcatgtatttctgctttctccaattgaccctgaaatgagggaattatgggggccttgggaggattagtactaaagaaatcgtttggcagcacactacttgttacctcccgtgaagaggaaactgagtgctccttgccctgtgcgtcggagagcggcttgctggcgtcccccctttttctttctccatnnnnnnnnnnnnnnnnnnnnnnnnnnnnnnnatcttcataatcggggagtaaactgagtcctgaaggcttactgggagtcgctctaatgaactcctttcctattttgtcaaagttggtggtccacgcagatgtggagggctgtacctgaggcaccaaggtggccttcgctctcttgacatcttggtcgtctgcgtccggcgctttcctcttgacggactgaggcgctgaactggcggacgaaccctggctggcttccttcgcgcctttcagctcggccactttctctcggtgctgctttcccaggacgtgagtctgccacaggagctcgctcttaaccggagtgttacacagggcacaactcagctgccccaaacggttgtacttcgcgaatggagattctatccgtttccgactggtgctcagacgctgcttctccttcattaaccgccgcaattcttcctgatttatcactcgcttccctgccggagtccgggcggaggcggaggacgccatcttggcgaccagatcacgggaattcc

SEQ ID NO: 438742 - DNA, 1909 bp, Homo Sapiens
  misc_feature (45)..(46): n is a, c, g, or t
  misc_feature (92)..(92): n is a, c, g, or t
  misc_feature (138)..(138): n is a, c, g, or t
  misc_feature (206)..(206): n is a, c, g, or t
aaaagtttcccttttctgctttctgaaactttcctcccatgggcnntggtacacaacctccttcgaaccctgtcccatgatcttcccccagnttccaggtttttcccgtgggagctcctcacacctgctcctcagctncccggttctccttcctgtgtcgcctttaccattgcatccaggtccttctggctgtactggagcaggtnccactataggtccggtggacaggggtgggcccccaggcgcgggaacacctgggggtgggcctggcacaggaatgtccagtgctcccaagaaatcgaactccacaagcttggcttcccgcggacgtcctgagggagtctcatttgcaccgtgcatgctgctggtctcggtggccacgggcactggtctaccaggactgtccctcaggagggggtcgaacttgaggtataaggactgcttcctcaaggccgactccttaaacgaggaagttccaaactgctccaggtaatccacctccgcgcccgtgcctagaacctcagcggggtctctgaagctctcctctttcagctccaaggcaggctgcccctgctgatgggtgggcactggctcactgcctggacagcttgtgggaagcgaggtgctggcagagttcaaggctctctccttgctctctgctgttggggtctcggctgccaactgcaccacaggcgtgtcctccgctgaggctgaatgcagctgctggctcagacagggacctggctcctccgtggcaggcccagcatgcaactgttcagccgctggctggcccagcctggtctcagggctttctgggggctgggcctcactgcaaccagacttggtgtcacctccgaacgggatgaagtttgggtcatccattttgtcccagtcgaggtggtaagagccccgagaagctggcatgggggggtcctctcctgctccgctcctaccgtcgtcctcctccacctcctgcggggccttttgctgcctcactgctgctttcctcaagggaggcttgaggccggacctctctcccagtctccttggtgggggtgcccttttgctggtggcgccatcagatacatcaaattctagttttacaggtccgctcctcgaggagctggccatttggcctgcagccacttcttcctgaggactcagggtcatggccctgccagccaccaggtggttggttggggctgtgctctcaggagcagaggtgtgtgcacaggtaagggtctgagtgccatctgctggcacgggggtgcccacacccgcagggcagcccagggcttcgccaggcagaccctgcaggggtgctcctccgcaggcttccttagggattgcaccaggaggcgaagtggccactgctgcgggagcacagaccccaccgtgccggcattcctcctcggctccgtgcggagtctccgctttgcattcttcctcggctccgtgcggagtctccgctttgtgctgggactctgtcctgcaagggtcttctagggtctcagaggcgggtgtcactcttctgtctaaggaataggaactaaggttttcctccacggcttgctcagggctgccagacacttttcctggagacaccatttggttctcagaacttcctgggctctgggaagagcttgagcagtccaggtcagccagggcacctgggccagactcgctggagctgccactcccaaaggctgggcttgcatcccccaggaggtcggtgtcagcctccactggtttctgtagaattccatgagtagttttggcatccacttccttgatgagctgttggcttttaaaagagacttaatcaacgtgaagcagcgagtacctggctcgaggttaggggcctcagcattcattctcaacataggtttaacattctcacaccagaagc

SEQ ID NO: 438743 - DNA, 970 bp, Homo Sapiens
ggggtcccaacccaggcacccggttcccaggcagacctccggggtgctcccccagcttcctagggatgcaccggaggcgaagtgccactgctgcggagcacagaccccccgtgccggcatcctcctcggctccgtcgggagtctccgcctttgcattcttcctcggctccgtgcggagtctccgctttgtgctgggactctgtcctgcaagggtcttctagggtctcagaggcgggtgtcactcttctgtctaaggaataggaactaaggttttcctccacggcttgctcagggctgccagacacttttcctggagacaccatttggttctcagaacttcctgggctctgggaagagcttgagcagtccaggtcagccagggcacctgggccagactcgctggagctgccactcccaaaggctgggcttgcatcccccaggaggtcggtgtcagcctccactggtttctgtagaattccatgagtagttttggcatccacttccttgatgagctgttggttctctttctgtgtccagaccgggtgtgagttttccagtccaagggtgtcatcctgagtgaaaggagcctcaagtttgctggccatgctaggacttagaatcctgtgcgtctgtggatcccgcagaggtgtctgaaaagtcaccttcatagctttggccaggttcttgggtggcacattttctttctgtgacacacgaagaacagacgatcttccggtaacttctggtggcgaaaacaggaagtcgcaattttctgtatttttttcattgctgacatttttgtcgtttaagacctgcagactcattctgcccgcccgcccgttgccgggctctgagcccgcgccgccgccgccaggaaggaggggtccgcgtctgctccacgccgggggccaagcctggctgctaccgccgccgcgcttctagcccttgatggccgccggcgcgccggagt

SEQ ID NO: 438744 - DNA, 1205 bp, Homo Sapiens
  misc_feature (486)..(508): n is a, c, g, or t
  misc_feature (724)..(737): n is a, c, g, or t
ttttaattccattttttttattattcaacattttatacataataaatacaaactttttacagccactgtaaagaaagcacatctgcacagaggctccctccgagccctgacctgtgcactgtggtgctggattccatatcctggatggaggggttattttttaaaaaggaggcatgttttcacaactttgttttttaaaataaaattagcagctcttccaaaaaatattttaaaatacaacaaaagatttcaaataaccctttgaggttgtggaaaacccaaattcaaggacaatttggctagctaaagacagaatacaagactgggtggcaagaactgctctatttaataagcatttgaagatttttaatatgttagcaaactttaaaatcttaaaaaaaccacccttttaatttcttttttaaacttaagaataagtttgataaacacaaagacctcaaatagatcaacaggttaagaagtgtnnnnnnnnnnnnnnnnnnnnnnncccaaatcatggagaagattcattaatgggtattgtcactgaagtgatcaaagaactaaaaatttcttcagttatcaccttacttttggtcaaaaatcccatggggacatttggcgagcatttcaagttttttaagattcttaggagggatggagttttcaaagcataatacaacttgtagattaaattctgcaaatttgttttcttaaccaaggnnnnnnnnnnnnnncaaaccacaaccggcgaacatcccttagtccctaggtattgtgctccctaccttctacaggagcggacagcggacagtcagcacctgacgtgggggcacctgctgctgcaggcttgctggcctgcagagaaggccactcctggctttccctgtgacacacagaagacacttgtcttttcctggtcaatctgtacttgtgcagggtgcgcaatccttcagtcctttctcatagaaagctggtttcctccacgagccaccaggttcttccttccacggaaatgtcagggtagtgggacctggaagctgcattttccaccatagcagttggtctggaccagccacagcctggctgtctgggccggtctgctggcttgggaataaaataatgccggggcgtccccagtagagaagctcaacaatgcaggtatgtgtcctcaacttatctagacatttggattctaaggatcc

SEQ ID NO: 438745 - DNA, 419 bp, Homo Sapiens
  misc_feature (29)..(29): n is a, c, g, or t
atagcagttgggtcctgggacccaagccnacaaccctggctgtcctgggcccggtcctgcctggcttgggaataaaataaatgcccggggcgtcccccagtagagaagcctcaacaatgcaggtatgtgtccctcaacttatcctagacatttggattcctaaggatactggtaagaagagtatatgctgtaaaaattaagatgaaaaatacccaaatacaaaagaacattatattggctaatttcagatccggaagttccatttctgctttagccacagcctcctttctattagtctatgtgatgaacaagatgtggctactagttcagcccctccatattagctctgctaattctaaatgaatggcacagatattaatacgaaggacactgttattttaagtctgttagttgtggaa

SEQ ID NO: 438746 - DNA, 2311 bp, Homo Sapiens
  misc_feature (1993)..(1993): n is a, c, g, or t
  misc_feature (2120)..(2183): n is a, c, g, or t
  misc_feature (2282)..(2282): n is a, c, g, or t
  misc_feature (2304)..(2304): n is a, c, g, or t
ttttttacttgaattgatttaaaatttattcaccccagtgttcactcccaccttagccccattccatgcgcccttacccttactcatcgcagtatcaaaataactcccaaatgggattgctgtgcttgaacacctcccatcatgcctcttaccttctgcatgcatttagttagttcctgaagcatacagccccctcacctgcaagccccgcctcagcgcacacccttgccaggttggaggaagtcctggtacccggagcagtttgctttgtttttgcagtgtcagtgatctcacaagcacttggttggccacacagtcctatcgataacttccagcagataacccaagtgggtgactggggggtggaagccaggtctcggttcctgtgtgtgacccaaggccccccagcacagggcccaccctctcatctggctcagccaggtcttgcagaatgggctctgctgagatctaaccagacacatttgctgtctgttaggtgagctcattcctggaacctagcaggtattccgtttatggctgactctcaagggaatgaagggaaaaggaaaagcgggtctcaggtcctttggattatctttaggaagcaaaagcttctgtgaactgtgatcttcagaacgaatgctgggcctatccaggtctgtccgcagtacccaaagtcgtagctccgtgatgagctatgatgtagcccagccacactcagtgacggctcctggttcctcacttgccagggcagctttcagttcctgccgcggtgtcagtgcagattgattcccgctgcgttactgaacaaactcctgaccctgggctctgagctgatgagctggctccagaaggtgttaatcatcatcactcaggtgtgctgtcctcacagagtcctggtgcacctgggatcccagtagctccacattttctttgctgccttcgaggttcacatcttcagggtcccactccaggtcggagttgatggaggagacctcagaggagctgccggaagacacccgggcccggatgacctgaacgggagggtacgacggggggtcctgcagggacgcatctccggcgctcgtctgcccgtcacctggcagcctggtggcactgcagcctgcctgctgcacaggctcgatggtcagctccatgtagcgactgattgctgtcattgtcctcagtgacttgcagtgtgacagtgtggtgagaggcacccaatccaaattctcctggttttcttcctctttctctgcacaggtcaaaagggcttgggtgtcagggctctctctggcttccttggcaaatcctaaggcctgtctcatcttgctcttcatcacacacgaaaggaaaataatagcgaggtccagtgccgcacggccgagggaggtcaggaaccagggtgtggcccgcagcaggtactcagggtgccggtcgtgggccacaatggccgaggcatagaggaggccagccagggccgacaggagccgggtccacaggtggatggagggaaatgtcttcccccggcaaattctggagagaggggggatccgagaagcccaggagccaaaggcagcaacgctacccagcaggtagccgaggatctcagtattttcctgcagcaggctcgctagcagcctccgctgtggcccccggatggtggctgaagccttcgggacagcaacccacagagcccagcacgggcccaggctcagcggcagggccagggcaaacacactggccctgagctgccgcctcctcttcctctctcgggcttcccgatctgaattagacttgaatttggatccacagactgggaagagaatgaacataaagttcactaagtcaatagctgctaggtaggcaccagtgaaaacctggattgtgagctgtctggccagaagagccccgacggtgtcacacagactggtcaggaggcagcacgcagcacacagtgccgactggtcctgtctgggtttctgtgcacatntcagatagagaagcagcgcgtgggcggcgatccagcaggaggaggcgcagatccacaggccgaaggagatgcagacgcggtggcgggcgaagcagcggtccaggtagtcccagtcccagagcgcggnnnnnnnnnnnnnnnnnnnnnnnnnnnnnnnnnnnnnnnnnnnnnnnnnnnnnnnnnnnnnnnncgcagcctccctcgccgcgggcaagccccgagcgccgccgccccgcgtccccttctctgggttccgttccgccgcggcgtccggccgagcgcaccgacngcgggcagagaagggcgcgctnccgggcg

SEQ ID NO: 438747 - DNA, 846 bp, Homo Sapiens
  misc_feature (297)..(335): n is a, c, g, or t
ctcggccaacaaactataggctaggtagcgaggccgggtggtgaatcggcacgaggctggagcccccaatgaaagccgcaacctatacccttgacgcccatacctgcctcagtttccccatccacacctggacgcaggccctgccgccctgagaccacagtccaaccccagaccatccctctggcctctgctgaatctcccagagtgtgtccatctggggatctaatcttcacccttcttgaagtctccgatctgtccctgatcccatccatgctcaggccttaggtccggccattnnnnnnnnnnnnnnnnnnnnnnnnnnnnnnnnnnnnnnngttcctactgtcttcagtccatggggatctcatcacccactcccagccccagctccagctgccctcacctctctagcagctctcacccctctgagtctacctaacctggagggggcttgaggggcacttcagggccctgccccctaatgtaacccctctctcaccccggcacaacctgggcttccacagtctggagctgccctagccccagattctctgagcactttcccccatccccagggccacagatccccttccttacttgtaggggggaggtctggagcacctcgccaatgcccttcccccatccggctgggtccttccagttatgtatttgtgtattcatgtatgtatctatccattattctatataatctcttggcctcacccagggaccgtctggcttccccagctggactgggaggtcaggaagccaggcaaggagagggacagcacaggccacagagggctgcccccaccacacacacccccgcgtctcgggagaaaccca

SEQ ID NO: 438748 - DNA, 844 bp, Homo Sapiens
  misc_feature (658)..(696): n is a, c, g, or t
  misc_feature (764)..(764): n is a, c, g, or t
  misc_feature (829)..(829): n is a, c, g, or t
agacaccatcaggctaaggtagcgaggcccggtggttatctccacgcgccccgggccccctacctttgcccgcagcgcgctcgcccagccccggctgcgtttccctgcccatgacccgctcgtggggacccccgggcctggcccggaacttttctccccaagccccaaacccacgactcacttccacaccgatcttccccagcgtcccccgacccacttcatcctttccggccatcccatcggaccttgagccccctgtccggcgccttcgaaggctcccaactcaggcaccaggtccgcacctctcccgctgccccagagccggaaatttctccctcccagaccccgcgctgctcttctaacttctagatctatttctctcgcttctcagctgaatctctctgaccattcctctactggagcccccaatgaaagccgcaaacctatacccttgacgcccatacctgcctcagtttccccatccacacctggacgcaggccctgccgccctgagaccacagtccaaccccagaccatccctctggcctctgctgaatctcccagagtgtgtccatctggggatctaatcttcacccttcttgaagtctccgatctgtccctgatcccatccatgctcaggccttaggtctggccattnnnnnnnnnnnnnnnnnnnnnnnnnnnnnnnnnnnnnnngttcctactgtcttcagtccatggggatctcatcacccactcccagccccagctccagctgccctcanctctctaggcagctctcaaccctctggagtctaactaaactgggaggggggttgaggggcatttnaggggcctggcccct

SEQ ID NO: 438749 - DNA, 429 bp, Homo Sapiens
actatataaattagtcaaacattttattatagagtatatatttatatcaaaagcacaaaaacgtttattctgaaaaccaggaagattgtgatgttacagaagaagattcaataattccagtccatttctagggtactaagtgtctgatcacctcagcgaaaacaagatacaaatgaggccaaggtcacaggtctggccaccctgagtcccttcgcactatttggtttctcaagttgagacacgtattcccagtcccagttagccaccttccaagtgtttgctactagccttaatgggtacttagccaaagactacacccaaatataaccaaagcttatgttaagtcataagattaatccttcaataataaggatagcataattggctttgttacctaattctacataaacaaaatcatcaaatatcctg

SEQ ID NO: 438750 - DNA, 1438 bp, Homo Sapiens
tgtcaaagtgtacgaactgtaattttaaaatttatactgccacatgattgtaaattttagttgtcttaagttaggaattggtgaaaagctatttatgctggatttgggtcaaaatgacttatttgcaaaaaaataaataatgggaagaaagggctgtataatgaaatactgcaagactcacatattggttggaaatttccctcaaatcacctaccgattacccttgatttccctttgttttcagtttctcaaaacgaatgaaatgaaatatagcagaatgttaacccatataaaaataaagtgtacccaaatattgtaatgtatattgctgctcttcttcaaattaaataagggtttaaaaccacttaattggtaatcaacatctcaattgatacaaataaggtgtgcttggtatacattaatattttcttccaaagatatatctttggttagaaacacaaaaaaataaaactagtaatattgtatgtttatctatctctacatatttccagcatatgtagcgttaatagatctgtcctggtaactgtgtctttgggatttcattttggttccatcaaattaggaaaagaaatggcttagttgtatatgattagctagagatttttggagccagacacctgctgtttagtagataacttagtacagaccctaaacttgtcatttgtttttctcacagaatagccatttcctgctgtcttcccaatgatcactgccctttcaataacactcttgcctctagaatcatatgttcaaagtatgaatacacacctagcacatagtaggtgctcaaatattaatttcctccttgccttccttatctaccctgtgtcctccatttccccgtatgattccaacccaatatagcaaatgacatttacatgttatgaaaacatctattgggtaaaatcagatcttggataaagaaattctgacttttatataagcttttggtagacagaaaaaacagaaaggtattcgttggtagaacatttttaagttcaggaaagaaagctggaataatactacgtaactttgtccaggttactttgactgaaacacgtttttggtggatttcttttcctcaaagaactctctaaatgcaactccttgctggattcctcacccatcatcctgttggaaacccttactagacctatgtatttagggagttttgtcagaaaacatttttaacttgcagtatttaaaagaatatttactgttcctaaaatgtcattcaaatgcatgtactgtctattgtttggggatgggaactagttttgcaaaaaacacctaatgttgtataataatgccccaatgatcttgctggttaaaaatacagtatttttggcactaattttgtactatagtattcttcatgttcgacgtttcgctccattaaagtcgcccgagccgttct

SEQ ID NO: 438751 - DNA, 237 bp, Homo Sapiens
gcagcagtttctttgaaaatttggaccagaaggtgcataacaagttgttctgcagaagttcttatctgatattcttagggagctatcctgcatgtaatcttcattattttttttctctaccatcatgtgaggcatactcagtgtagactaccacaatcctggatacctctctgcttagatttacaatctctgctaagatttgccactgcagaaagtgtagtattttcactacattat

SEQ ID NO: 438752 - DNA, 797 bp, Homo Sapiens
  misc_feature (614)..(614): n is a, c, g, or t
  misc_feature (616)..(616): n is a, c, g, or t
  misc_feature (628)..(628): n is a, c, g, or t
  misc_feature (632)..(632): n is a, c, g, or t
  misc_feature (668)..(668): n is a, c, g, or t
  misc_feature (715)..(715): n is a, c, g, or t
  misc_feature (721)..(721): n is a, c, g, or t
  misc_feature (741)..(741): n is a, c, g, or t
  misc_feature (743)..(743): n is a, c, g, or t
agccaaaagcctgctaagggaagtaaaatattcttagaaaagtaacaaacaagaaaacctactcatattacattggcctgttttttaatacttcctaaggtattcatggcaagaagagcaaagttccagacagtttttcctagattttattggacataaacattacctatggctcattccgaaaagaccaactaagaatcactgggagtatggtctaaaatttgcattttaaaaataagactttatttattttgatgtagttaccccactaatacaaccgagaaccactgacttcaaatattatgagagaaaattactccaggaatttttgcagagaagataatactttatcttgaaaatattttaaatattttaaaagatggaaactacacaaaagaacaaatactcaaataaagctgcaagatctttatgtcataatttcaacaagtagagttttcactggattatgtaacaggtagtgaattaaatagatcagactgaaagactggaaattctcgattaaaattatttagtctttcaaaattaaaaggtatcaccttagagaacactgaataaaactgattcaattttatgaagattttccccaaactggngnaataaaagtacntacnattaaagaattaaaaattattaaactctaaatcttnctgggtaaggtatagggtgagagagattcccaggtttttcataatgnttcttntaaatccaaggaaaatgaancnggaactaataggggtttaaataggaagttaaccctaggttattggataattacc

SEQ ID NO: 438753 - DNA, 479 bp, Homo Sapiens
  misc_feature (30)..(30): n is a, c, g, or t
aaggagttaaccagaataagataacgtttntgtaaagtagttagaatattgcctgtcacataaagatagtacattcgtattttgtaaagggaataggtaacatgaacacaggaatgaagcactgtaagtgaaaataggcaccctgctaatccttaggcgtgattccccatttccctggacagggcagagtcaagccgagaaggaggagccacaggccagctgttaatgagacactaaataaaacgttcagtattcatacctgtggaacatgggtgaaccttctggtaactcgatttttcacaccaatgacagcaaatgagaaagtgagagaagctagataaatgtttttgaaagcattactgcagtggaaaataactgcactctcaggacacagcactgtagctcaaagaattcaattgttttcgcttttaagtcattatccgtcttccgacattctcttccagtcctgtataagttac

SEQ ID NO: 438754 - DNA, 488 bp, Homo Sapiens
  misc_feature (11)..(11): n is a, c, g, or t
  misc_feature (442)..(442): n is a, c, g, or t
  misc_feature (458)..(458): n is a, c, g, or t
  misc_feature (468)..(468): n is a, c, g, or t
gaataattttnatataaatatatatatagtgaagaagttttttttaatatttggatgggatattcgcaaatatctgtattatacactaagctattacaatggtacttaaaataatgtaaatttgaagtcattgttataaaataataaagtggagattacttaagtatttaaattatgaaagaataatgcagactttttattgtttcttaactgactagaaagagccaccagcattactctgtgccttttggacatcagtttgtgtgttctgtaggaattgtgtgcattccattcacacagtatttctttaggatgctgtgatgatttgaattacaaatcctacagtcaatagctaaagacggaaaccttcatttcaggaactctcatggaatattctttaaggtgctatttaaacctccccaggcacttaggatggcatatnaatggggcttacccgnggggaaggcnggcccttagggcctggggga

SEQ ID NO: 438755 - DNA, 757 bp, Homo Sapiens
tttttttaattcatttataatttattgagtttcctgtgctgttacaaatgtaacattctcatatacaacattcattgaagaggcacaattcttattttgaggtggcacagattagacaaatttttcagtgaataattcctctttcattaggaaatttaaccacaagctgtattttcgtagaaagttgcttgaaattcttttcctaaaaaaatttaatttttctatctcaaaatgaccgtatgcaaacgaacagtacataactactgtcttcataccttctaatataagcagagtaatttcacagtggggttttttcaaacagaaattaaaaatatgtattattttcaggggagaagctggcctgggtcaagaatgtcctgctagaccttcttgttaagtgggtggtcaagggtgtgctttgccacagggtttccctgccggctttccctaccagtcagggcctcatcagtcaactggaaaactccccttagggccatagacaaggcctaagagaggatggaaggtgaggtgggggtactggttcttggctttggggggtaaacttctggttatctggctggttagattgcctctaggaatgtatttttacgttctccggtttagcaaaaatcttgccttttaggtttcagagttctgtcctccccactctttatctccatattacagggctggcgttgggacagaagtcaagaaaatgacagagtggcaaagtgagtgacaggtcactgagctctaa

SEQ ID NO: 438756 - DNA, 753 bp, Homo Sapiens
  misc_feature (720)..(720): n is a, c, g, or t
  misc_feature (740)..(740): n is a, c, g, or t
ttttttttcagtatcacgtatttatctttaattcacatcacagcagtcaaggaagtggggaaagggggaaaaaaaatcaagtggcagatatttacatctaaaattcacattacttgttggattttgaacatgctaccacaatatatacagtaaaatacctcttgggacaatggtacaaattttgtttcctttaactttgcttttctggtacaggtaagatcatttttaaatcactttttttctttaaacatgaatacacaaaagaaatggttagaagtttccttgttttaaataagcacagaatgcgggaggttaaaaacacatttatagtgctgaataccaattggacatcacactctatacattttttgctcaaattcctgtacaaatacacagcattcaaataggtatttacaaataagcttgaaagaatgaaaatcagtattttacaatcttttcaaagggttctcatctctggcctcccatttcccctcagactgacttattctccaacaaaagggatttcagaatgtgtccttttcatttagttagggaaaatggagagggaaaacaaacggtttcaccttgccataatgcgaagcaaatggaacccatactcccctccctacctcttgtggccaccagtgggaggaaggtagctgttcttatgtggatgactgccttgtccgggggtttgactttcaggagtgccttaaattntagggcctcctacctttggnttcaattcccaat

SEQ ID NO: 438757 - DNA, 641 bp, Homo Sapiens
  misc_feature (101)..(114): n is a, c, g, or t
gaagcaaacagatgtatttgactgtatttcaaaggcagtgactgtaaacaaacttggttgaagaaataagaaccacatgacaaaatgcttgaattaaatcnnnnnnnnnnnnnngccacatttcacatttgagaacccagaattcagctcctgttatacaaaatttgtaaaaatttattgccttggcataaagtgacaatcatgccttggcgtaaagtgaaaatcttcacagaagggtatgctttgtgtcaccaaatgggggtgcagctgtgtgatatctgtgcagtttttgataaaattaaaaattttctgtgaaagattcttaactggaaattggaagggaaaacaagaagaaacaatgtaatgtagcagtggaaacaaaattctcacaatgaatagcagtctttccagcttctttgacacggatttcctcatcatcaatggcggctctcctgaactagggatgagtgtgaatctccatttgaggaaggggaagaagagcttggagggtgacagcctccccctgagagagccagttgtgttcatgattttggttccttcttcctcctgattaagtatctgcccaggagcccaggagccagggcttagcttcctggctattttcaactcttgttagtgaa

SEQ ID NO: 438758 - DNA, 904 bp, Homo Sapiens
ccacgtgttagcagtcattggattccaggttaccgccatatatcctgttcatgtgtgttcgacatgctgactacctgaatgatgatcagaaagtaaggtcgttgctaacatcaacaattaacagcatcaaaaaagtattgaagaaaagaggtgatgattttgaaaccgtctccttctggctctctaacacatgccgatttttgcactgcttgaaacagtacagtggagaagagggctttatgaagcacaacacatctcgccagaatgaacactgcctcaccaattttgacctggctgagtatcggcaggtgctgagtgacttggccattcagatctaccagcagctcgtgcgggtgttagagaacatccttcagccaatgattgtctcaggcatgctggaacatgaaacgattcagggcgtgtctggggtgaagcccacagggttgagaaagcgaacctccagtatcgccgatgagggcacctacacactggactccatcctccggcagctcaactccttccactacggctcatagtgtcagcatggcatggaccctgaacatgatcaagcaggtggtcaagcagatgttctacatcataggggccatcaccctgaacaaccttctcctgcggaaggacatgtgctcctggagtaaaggcatgcagatcaagtacaatgtcagtccactggaagaatggctgcgtgacaagaatctgatgaatagtggggctaaagaaaccctggaacctctcattcaggctgctcaactttttggggtgaaaaagaaaaccgatgatgatgccaaagccatttgttctatggggcaaggcttttaaataccgccccaaattggtgaaaagtgtttgaaatttggtaaaactcccacgttaaaaggagtttttg

SEQ ID NO: 438759 - DNA, 392 bp, Homo Sapiens
  misc_feature (137)..(137): n is a, c, g, or t
  misc_feature (164)..(164): n is a, c, g, or t
ctcttttagacaattttgttttttggggaaagcctaaaaacctaaaaaggttaggtttccccagatttagggtttgtttcaaaagcttggtaagaactggaaggggggttattgatggaaggcaaaacaaaacaccncttcagccatttgagaattgtcagtcnctggcattagtggggaagctccttggaacagagcagaaaagagcatgaagatgctgatcaaattggagatagttaaactgaagagacaggttacttcatgtgtatcattaactttgccttatgactctagggctttatgaagcacaacacatctcgccagaatgaacactgcctcaccaattttgacctggctgagtatcggcaggtgctgagtgacttggccattca

SEQ ID NO: 438760 - DNA, 989 bp, Homo Sapiens
  misc_feature (811)..(811): n is a, c, g, or t
  misc_feature (943)..(943): n is a, c, g, or t
  misc_feature (954)..(954): n is a, c, g, or t
gtaaggaggagaacaaccgacagcagcagctgctggcccagaacctgcagctgcccccagaggcccgcattgaggccagcctgcagcacgagatcacccggctgaccaacgaaaacttggatttgatggaacaacttgaaaaacaggataagacggtccgtaaactgaaaaaacaactgaaagtatttgccaaaaaaattggcgaactagaagtgggccagatggagaacatatccccaggacagatcattgatgaacccatccgaccagtcaacattcccaggaaagaaaaggatttccaagggatgctggaatacaagaaggaggatgagcaaaaacttgttaagaacctgattctggaactgaagccacgtggtgtagcagtcaatttgattccaggattaccggcatatatcctgttcatgtgtgttcgacatgctgactacctgaatgatgatcagaaagtaaggtcgttgctaacatcaacaattaacagcatcaaaaaagtattgaagaaaagaggtgatgattttgaaaccgtctccttctggctctctaacacatgccgatttttgcactgcttgaaacagtacagtggagaagagggctttatgaagcacaacacatctcgccagaatgaacactgcctcaccaattttgacctgggctgagtatcggcaggtgctgagtgacttggccattcagatctaccagcagctcgtgcgggtgttagaggaacatccttcagccaatgattgtctcagggcatgctgggaacatggaaacgatttcaggggcgtgtctgggggtngaaggccacagggtttgaggaaaggcgaacctccagtattcgccgatggaggggcacctacacattgggacttccttccttccggcaggttcaattccttccatttgggtcatgttttcagcttggcttggnccctgaattgntcaggcaggttggtcaaggagatgttttacatctt

SEQ ID NO: 438761 - DNA, 844 bp, Homo Sapiens
  misc_feature (215)..(215): n is a, c, g, or t
acccgggcaattcttaacgcgcgggggtaccaattccgggaataggtatggtagtggtaggaggccaagggtaaaagcccggagaaaggtaacccttatttctggaatccggtggtgaatgttcttttccaaaattttcaaccccccggatataaaggtgattcagtgttttatctgcatctggatgatcaaacatacatcttggtgaatcttcnaaacaaccatatcccgagtctttcaatacagaagagcgtgaactggccacagaagcagcagcacagctcactgaaaggttcttttgttggctgttgaaattctcccgagtagggcacagggccttttcccgatcagtccttttaattaccgggagcaccttcagccccagtgaacagaggaaaagctgagcagccctctccccacagctggttaaatagcagcccagcagggcttccacacagtccgctatgcttttgtcagcaatacactgctcagtgtgcaagtcgtaagaaatggactgctttcccgtgtcaacaccacagttttcttctgatggattccagaaccccaccacaaagtcatcttcttcaacagctttgctaggatccagatagcacattgcatcccaagagctgtagtcaaaatcctcaaaatctgatgaaaatggcatactacactaaggaggattttttgggcattttccattcatatgcagaatcagtggttgaaaaaggagaaagagagattttctttacaaaagctcctgaccccattaacatcttatctataaatctgatatgttcctgatcatactccaggaaatcatcttcatagtcagcctcttccc

SEQ ID NO: 438762 - DNA, 442 bp, Homo Sapiens
  misc_feature (21)..(21): n is a, c, g, or t
  misc_feature (90)..(90): n is a, c, g, or t
  misc_feature (101)..(101): n is a, c, g, or t
  misc_feature (381)..(381): n is a, c, g, or t
tccctcccctgattgtaaggncccccaaaagggttccccccgtgacctcctttttcccccctctttggtccttccctgcccgaattcacncccaaggaagncaaaggccacaggaaccgtgtggcagagaagagtcacctaaagcgacagcaacaccttccatggcctacaaggttgaaaaggggaagctgagggaagcagaaagtgctggggagatattgcagggagggaggaagtgcttgggaaagtaaacccatgaagctgtgtatgagcttctgggcttaccccacaagagtgtgatatgtacagatgtgatcctgtacgacatacaaaggactttgagaactgcactgagtaagggatatagacctcgccagctcnaagactgctgatcatgcttaacagaaccaaataccattgcaaaggctttgaaatggaacta

SEQ ID NO: 438763 - DNA, 932 bp, Homo Sapiens
tttgcaacatggtcaggtatttgttactgtaagcctgggatcccagcgaatcatggatatctagctgctcctttgcacactgaagctgccttttagattctttggaaacttcttgaaattctttaaacttctgagtcatgttctccagacagaatttcttactgtgaagttgttcagtgaccatgtccaccttctggatcagtgacttattctcatctgtaacaacttctttatctatctcacagacactgagcaagctattggctgtgttgttcagtaattctaccataccaaagtgttggtccatttccttctgcagagactttaacttggcaatagaattctctccttcagcaggatccaagcaaaattttatttcctccaggttgttttggcatttgtctatccatggccagagagtctctacttgctctttatacttaagggctttttccaatgactcttttaacttgttttctctttctttcacctgcttattaaatgtatcccaattggttttaattgtattaagctgtaactgtaaggctgccttctcagacccttgtgtttttaataacagattttcaccttctgcaatggttttttcatacatatgagactgagcggtcaaagttttactaaagtctttatgatctttaattaatgactccaagacatcgagtttggcagatattggatgagatttgttttgctcttctttctttgtatccagccaagcctgaaaatctctagacatttgctgaaattgatgagagcttgcacaggccgactgaaggtgctggacatgattctctgctttctgttcaacatccttaaatgattttaagatgccttctagttgcctactaagttctgctttcaagtactcttctttaaccagtgctgacaaatcctcacagagtgcctgggcc

SEQ ID NO: 438764 - DNA, 1718 bp, Homo Sapiens
gatttaaccaagagaaatttattgcctcacagttctggagcctggaagtgcaatatcaaggtggagacagggttggtttcctctggaggccataatgaaagcatctgttccaggtctctgtccttggcttgtagatggccatcttctggtggatccacacagtcttctccatgtgtatccttccttcagtttcccttatagggacaccagtgatgtcagattagggatcgaacccaacaacctcatttgaagttactcacctgtttgaaaaccctatgtccaaatacagttatagtgtaaggaactaggacttagggcttacaaatatggagtggggcatcatccagaccataccatttaaattgcagggtttctctccaatgtgagttcacatacacacattaaggtttgtgggattcagaaaggtattcccagattctctacattcatacggtttctctccagtgagatttctgatgtgtttggtaaggcttgagaattcagcaaagtcatttccacattccctgatgcagggtcttctccactgtgaattcatatgtgttcattaagacctgagatacaaagttgcttccacatttttacattcatagggtttctccccagtgagttttcatgtcttcagagagaacagggacacctttaggttttcccacattccttatgctgacagtctctcatccgcatgccttctttcatgatttcgaaaggaactggaagaactgaaggctttcccgcactccttacattcatagggtttctctccagtgtgagttcgttcatgtaactgaaacgaattggagtaactgaaggatttcccacactgtttacatttgtagggtttttctccagtgtggatccgcatgtgaaggttaacacacgtgggaaacttaaaaggctttgccacattccatacacgtgaatggttttttggcgctgtgggtccgcatgtgattattaagactggaggaatgcgtaaatgctttaccacattccaggcactcaaagggcttctctccatgtgtgaattctcaaatgtccactaagatttgaagaaatagcaaaggctttcccacatttgacacattcaaaaggcttctctccaggtgtgagttcttgtatgttcactaaggcgagaggatctggcaaaggcctttccacattccttacattcatagggcctctctccactgtgagttcgtgcatgcttagtaaggtctgagttctgagtgaaggctttcccacaatccttacatttatagggttttattccagtgtgaattcgaaagtgatcattgaggcatgaggaatttctaaaggattttccacatatcttacattcaaagggatcctttgcagtgtgagtttttaaatgttctgtaagttgtgaagatctagtgaaggctatcccacattccttgcattcataaggcttctcacccacatggattttcatatgttgacttaagcaagaggaaacagtgaaggctcttccacaatccttacatttataaggtttctctccagggggaagttttctgtgctgagatagttgacaagacctgttgaagggtttcccaccttccttacctaatagggattgtctccagtggggtttccatggtaatatttagggttgccgaataatttaaatcctttccaattccttaacattggagggtttttttggactgggagtt

SEQ ID NO: 438765 - DNA, 203 bp, Homo Sapiens
tcgtgtagtggataatgttttaatttgctttgtttctcgtggtcctagtgggattcttgccagacggtatgtgttccttgcgttgctcgcgtcaaacagatgcctcttggatgttttccttctcaagtttcgttcactctactgtaaaatcgctttcctctggattgatggctgttagttgtttgtttcccttaagtgatagt

SEQ ID NO: 438766 - DNA, 208 bp, Homo Sapiens
  misc_feature (37)..(37): n is a, c, g, or t
gcgctcgtggattttggtgccgccaggaggtcctggnccagtcctccggtgatactgagggacagtcatgtgtcacttaacgatggggatgcattctgagaaatgcatcactagttaattttatcgttgtgctaatatagagtgtacttacacgaacctagctagtgtagcctatacctcggctatatgttatagcctattgctaccg

SEQ ID NO: 438767 - DNA, 247 bp, Homo Sapiens
aatcctatagccagtcgcatcaagcagccaagctggcctggattctgacactaagtagctctagacaacaacagcttctcctggatgtggaaggtctgttcagggggcttggagaattgagcttggctgttgccctgttggggcagagttctattgggtctacctctagccactagcacacaataatggcaatccatcacgatggttgtggctaccctggagctgttagattgggccacttgacgcc

SEQ ID NO: 438768 - DNA, 234 bp, Homo Sapiens
  misc_feature (20)..(20): n is a, c, g, or t
attttctgcctctttcaacncgaaacaaatgctgccccctctatgagttatccttcactctcttctccgcctctcgcctgcattccagtcacagataagtatcctgtccactcccctcccagaagtccccgtgcatcctgctggtggcaggctttgtggtccatgtgcgacatgtgttgacctgcatgacactcctttactaacctgagcaccttcagtgccatggggtcatgc

SEQ ID NO: 438769 - DNA, 166 bp, Homo Sapiens
  misc_feature (136)..(136): n is a, c, g, or t
  misc_feature (156)..(156): n is a, c, g, or t
acatggcccctggactgaaggtgctcagttagtaagggagtgtcatgcaggtcaacacacgtcgcacatggaccacaaatgcctgccaccagcaggatgcacaggacttttggggggggtggacaggtattattgngactggtgaggtgagaggtnagagggggct

SEQ ID NO: 438770 - DNA, 160 bp, Homo Sapiens
gtagcgaccggcgctcatggaattccgggacctgcaaactttttctgtaaagaccagatagtaagtattttatgctttgtgagccatacagtttttgttgcaactagtcaactctcaactcaccgtggacagcatgtaaatggatgggagtggctgccgg

SEQ ID NO: 438771 - DNA, 254 bp, Homo Sapiens
aaatggggggagaatcaacagagccaaaggactaataaaattaatgaatcctggtgagactaatcaagaaaaaatagcaccaacaacaatcaggagaaaatggaaaaagggcagagtatttcaatgattacggagatgggcaaaccaatcaacgaatgattcttaagccttcacgtttgccctgtaagcaaactgaagacgtgcaagtcatcctttgccctgggagagttaacttaacccacagggacaacgag

SEQ ID NO: 438772 - DNA, 743 bp, Homo Sapiens
  misc_feature (686)..(686): n is a, c, g, or t
tttggagtaatttatgggaatcagtgggcgttcctctcgcttcttccagatgttagtcttgctatctcttttggctagtgttggtctgccccttcttttagtgggggatgtattagcttcaaaatcttcaacagtgcttttccttcctggcgactcttctccagggtgctccatgatcactccactccctccatctaggatgtgccttaaagctgggtcttcaggggaacagacggtggttccactctcactgctgcttaggtctaaatcttctaagtaaaggatcttgggctgatgcatgcttttgatgaatgttttctccctctcgagctttctacttgagtgaagctcattcatgtccaccccagagtccagactggtgtcattgctctgggttctcttgccctttttcaggtctataaaggagtgcctcacttgtgcaactggctttccatcaagagacacaaaccaggctctgggatgcggggagggctttcctttggacagctccaggagggtctgttctgaaattccttgaagttccgatgaaaatggagtcattacaacagcctcatttagtgttccagtaacagagacggattccagtaagctgcttgagtatcggctccaatctgaagcctgggatggcaggctctgttgaccttcaagtatgatatcctcttccntggcatctgggggctgtgcatgagaatgaattggcattttgggcaaggtcagccgct

SEQ ID NO: 438773 - DNA, 1143 bp, Homo Sapiens
cccttgtttgcatggtggtgggtgggcgtcgagtgttgatggtttgtgtctttctagtgtcttgtttgttttaaaacataacaagttttcttattctttattagtttaaaggaagctagaacctaataacaatacgccacatacggttcagaaccaaacaaaagctgcttagttatttattttgcatttgcattttgtaggaagtgagaaaaaaacagctctattgggactcaagtttattttcaattaaaatccccataaattaggaaatgtcttataaaacggagaaattggaaaaaactgttattcagaaaaaaactttcttgagtgtgcttgtttcctgtagcaccttggattttgtgatcagtcttttaaagatattttttaaaaaattcaacctctgtcttcacatttaggacagggcataacagtgtcttgtcctttcatgcaaataagaggaaaaatttatacttgcttagtttcgagcattgaaagcactcgcccctaattctgccatttgctcatgtcccacatgaataaaaggatacagcttagaaaccagggccttgctgctattgtatttttttctaattaaaattcagagtattaaacacagttgagtacatccatgcatacatgacataccgtcatcacataccggaagctccaatcaagagccccgagcaaagctcgttttcataacatcattaagattcattgtacactgcgtttcagaaaggctttgtcaaagcagataataatggcctgtcagaaatgcacaaacagaaatttatattaaattgtcctttcccctccttttaaaatatgggaatctattaatagctgcattcccggtataggggactcaagtcttcagttaaaaaaaagtccccagcttcttaatattgtaagcttattaccaaaataagagtataaaaagttaagtgaaaaatatttgagtaactaggtgggggtattcctgggaatactaatcaaatataatgactgtatcaaaacaaaggaaggcggagctcaggagtgtgaaggtagatagcattgctgagtcacaaggcggagtgtttaatttggaacaagtcaaataaaagcactgctttcttttccttaggaacctttgatactctt

SEQ ID NO: 438774 - DNA, 932 bp, Homo Sapiens
  misc_feature (16)..(16): n is a, c, g, or t
  misc_feature (278)..(308): n is a, c, g, or t
  misc_feature (476)..(489): n is a, c, g, or t
  misc_feature (590)..(621): n is a, c, g, or t
  misc_feature (625)..(625): n is a, c, g, or t
  misc_feature (678)..(678): n is a, c, g, or t
  misc_feature (762)..(763): n is a, c, g, or t
  misc_feature (811)..(857): n is a, c, g, or t
  misc_feature (872)..(872): n is a, c, g, or t
  misc_feature (931)..(931): n is a, c, g, or t
cctgaattttcctttntatttgtgatcttgattttgatgaggggttggggagtggggagggagtcgaaccaagacttggagttaagaggattttcatcttttgcatccaacaggcagaatatgatctgtgtccaaaagtgaacttgagtcaggaatgaatcaatttcagcataaacaagcacaaaaatttagtctgctggctgactggaagcaaaaaagtcaagatggaatatgatgaattccaacacaatggggcaccaaggcctttaggcctctcnnnnnnnnnnnnnnnnnnnnnnnnnnnnnnnctttagagacatgctctttctcatgggacttgaagtggactcatctttgtgcagtgctggttttgccatactcatttcaagtattatagacatatgtaatggtgaaaatatatgaactgtggcctttttcattcttgttacttgtgatgcaattaagtgaagataagnnnnnnnnnnnnnngcagagatttaccatgtatcagtgcctggctttttgttataaagctttgtttgtctagtgctcttttgctataaaatagactgtagtacaccctagtaggnnnnnnnnnnnnnnnnnnnnnnnnnnnnnnnntatntttggcttatttttcgcaggagcaatccttttataccatgaatattacaaaanaattgtcagattctgaataattcttctttgtagatttttggaatcattatgagtaaaagtttgttactttattttactatttannagatgttattttaccatgtgttaccaagatgaaactgtatgggtagcnnnnnnnnnnnnnnnnnnnnnnnnnnnnnnnnnnnnnnnnnnnnnnnagttgtaggtcgcancggggaaattttttgcgactgtacacaaagctgcagcattaaaaacttaaaaaaattgnt

SEQ ID NO: 438775 - DNA, 1342 bp, Homo Sapiens
  misc_feature (859)..(920): n is a, c, g, or t
  misc_feature (976)..(1021): n is a, c, g, or t
  misc_feature (1211)..(1242): n is a, c, g, or t
tttcgtgctggttgcacacgtcagtttgtacaggtaggaaaaaaacatctggttgttacatctggattaatagtcaacagaggcaaccagaagtggtggggcgggtgtagtttgagaaagtataaatacagtgttaatattaactgtagttaacaatattcagcttttaacaaagttgatccaaattaaatcatcttagatttttgactgaaaagatctgagaatgttctgccaaacagccgaccaactggtgcaaaaggttaaggctgacttgacttagcaacctgcagcacaaccgaaaacactggtgcagttcagagctcttcaaatgcatagcttcagtgttacacacacattaattatattccttcaattagttaatcctctagacagttttctttttgttttgcatgcatcccgttccattttcattaagggcatctcttccttgatcaatcatgtgctttgcttttcaatttgattttgtgatttttcttgtatgttttgtttgttaagctgtcaatacctccaacacttggaaaatgaaatatagatgcgttttacttacagaagagaatcatagctatatggacaatgcaaaatgaaatgaaacaagtgtcagaaacagtttataaaaatggcacatttattgctacagaacggtcatgtacatgacttcatcgaataactacagatgggaaacaggtaatggccttgaccaagctgggtttgtttttgtcttgaaggaactccagcacacaacctgtttggacacttctacaaatcagaaatacaccaaaaacatgaaaaaatcgaggcactcagccacacattgaaaacaaggtgtaactgtttatcnnnnnnnnnnnnnnnnnnnnnnnnnnnnnnnnnnnnnnnnnnnnnnnnnnnnnnnnnnnnnnaatgctgcagctatgtgtacagtcgcaaaaaatttccccgctgcgacctacaactnnnnnnnnnnnnnnnnnnnnnnnnnnnnnnnnnnnnnnnnnnnnnngctacccatacagtttcatcttggtaacacatggtaaaataacatcttttaaatagtaaaataaagtaacaaacttttactcataatgattccaaaaatctacaaagaagaaatattcagaatctgacaatttttttgtaatattcatggtataaaaggattgctcctgcgaaaaataagccaaatatannnnnnnnnnnnnnnnnnnnnnnnnnnnnnnncctactagggtgtactacagtctattttatagcaaaagagcactagacaaacaaagctttataacaaaaagccaggcactgatacatggtaaatctctgc

SEQ ID NO: 438776 - DNA, 528 bp, Homo Sapiens
  misc_feature (16)..(16): n is a, c, g, or t
  misc_feature (46)..(46): n is a, c, g, or t
  misc_feature (56)..(56): n is a, c, g, or t
  misc_feature (127)..(127): n is a, c, g, or t
  misc_feature (132)..(132): n is a, c, g, or t
  misc_feature (136)..(169): n is a, c, g, or t
  misc_feature (225)..(285): n is a, c, g, or t
  misc_feature (291)..(291): n is a, c, g, or t
  misc_feature (413)..(413): n is a, c, g, or t
attctgaatatttctnctttgtagatttttggaatcattatgagtnaaagtttgtnactttattttactatttaaaagatgttattttaccatgtgttaccaagatgaaactgtatgggtagctttnttgtntgtnnnnnnnnnnnnnnnnnnnnnnnnnnnnnnnnnnagttgtaggtcgcagcggggaaattttttgcgactgtacacatagctgcagcattnnnnnnnnnnnnnnnnnnnnnnnnnnnnnnnnnnnnnnnnnnnnnnnnnnnnnnnnnnnnngataancagttacaccttgttttcaatgtgtggctgagtgcctcgattttttcatgtttttggtgtatttctgatttgtagaagtgtccaaacaggttgtgtgctggagttccttcaagacaaaaccnaacccagcttggtcaaggccattacctgtttcccatctgtagttattcgatgaagtcatgtacatgaccgttctgtagcaataaatgtgccatttttattccaagggattcaaat

SEQ ID NO: 438777 - DNA, 1300 bp, Homo Sapiens
  misc_feature (588)..(596): n is a, c, g, or t
  misc_feature (932)..(1202): n is a, c, g, or t
  misc_feature (1246)..(1246): n is a, c, g, or t
tgcgcctggcccattctcatcttattcaaattactggcacatgggcaagagagacaatgacatggatagaagcttttctgcctttctctgcacacacatacagtgaaggaaccacaggcagattttttgatcagtttggtgaatacattgctcgttgtcactgttccaaccacattggtaaaaaaaatagttaccttttgtcctttggatgtcatgtctaaactttggaaaatataagtcattgcccttttagagaatgtttgtgtagtccaaagattgtgagctccatatagtatgaaaatcaagtacttttgcatgagcaatagcagtttcaaagtgaaatattataatttaatctttttcaagtagatcaaaaattcttaactgattaataaaatattttatcaatatatcatccccctttcagagagaagtccccagaagagacagcacacttagcaattgccctcattattaaaggcctaggtgagtggcataaagggccatatgcgattatgtttcaaggtaaacattacctaaccttgtgtgggttaaaaacagtgaagtgtccttgtatcctgataaaannnnnnnnnaaataacatggtgggttgacatttttgcatctgctataagttttctcacatgtcgttcttcctggtgagagcgggctgcatcattctggcacttaatttgggtgttcgattttgctatagagttctttgcagtacagcatagcctcttcttggccttgggaacagtgaactcttcttttgatggtgtggattgcatgcatatctggagagaggagggctcaggactgtgttcactttatttggtcagatgtattttatttgaaaaccatttgagcccaaaatacaagtgtacccttcccacttctggctcaagcacccgtgagccgactagacgtnnnnnnnnnnnnnnnnnnnnnnnnnnnnnnnnnnnnnnnnnnnnnnnnnnnnnnnnnnnnnnnnnnnnnnnnnnnnnnnnnnnnnnnnnnnnnnnnnnnnnnnnnnnnnnnnnnnnnnnnnnnnnnnnnnnnnnnnnnnnnnnnnnnnnnnnnnnnnnnnnnnnnnnnnnnnnnnnnnnnnnnnnnnnnnnnnnnnnnnnnnnnnnnnnnnnnnnnnnnnnnnnnnnnnnnnnnnnnnnnnnnnnnnnnnnnnnnnnnnnnnnnnnnnnnngcaacgaggattcggggcccaggacggaggtcttgcctggggcnacacagtggaggattctgttttcaaattaattaattaagttaattagaacctcc

SEQ ID NO: 438778 - DNA, 769 bp, Homo Sapiens
agggccggtggttccatgggagaatcgaagcacttgtgaaggatggccacaaatgcttcggagcctggaactggtactgggggtagtgaagccaaaagttgctgcaaggctgcaaagatgaggcgtgtgcaagagcaccagataggggaaaaactttgcaaaccaatggagctgtttctcgtaacagacggcatcaatataggagtactgctgtcggtggaggtcattctgaattcggagggggagcggaagcggtgtcccaggattagaggatgtgttcatgctggctttcaggatgtcccaaggcacaggcacagtgattgtcaaattccactttgcatggaagacagcacagaaccctgctctgcgtcagctggagagctccggccagcacggccaccagcagcatgatcagtgtgatgtaataccagaagccgtcccaccatggttttaagatgtgataagatgactgagcatctgctaagcattttagctcagttagtgtaatcatgactttcccttgtaggaggacagaaatacagtgaaaaaaagttaaataaatacaatatgcttcagtcaggaggtctacaccttttgaagtttcttagacacaccatctctgtgtttgtcttcattctgcgcgactccagccccggacgcccgcgctccccgcggcgtgctcctgggccgctccgggcgggcaggctgcggccccgcgcccgcactttcccggctgccggaggctgcgggctcagcgggaacccccgct

SEQ ID NO: 438779 - DNA, 805 bp, Homo Sapiens
gcaaagttcgcgcaggcgtgcaaagatgagcgtgtgcaagagcaccagataggggaaaaactttgcaaaccaatggacctgtttctcgtaacagacggcatcaatataggagtactgctgtcgttggaggtcattctgaattcggagggggagcggaagcggtgtcccaggattagaggatgtgttcatgctggctttcaggatgtcccaaggcacggcacagtgattgtcaaagttccactttgcatggaagacagcacagaaccctgctctgcgtcagctggagagctccggccagcacggccaccagcagcatgatcagtgtgatgtaataccagaagacgtcccaccatggttttaagatgtgataagatgactgagcatctgctaagcattttagctcagttagtgtaatcatgactttcccttgtaggaggacagaaatacagtgaaaaaaattaaataaatccaatatgcttcagtcaggaggtctacaccttttgaagtttcttagacacaccatctctgtgtttgtcttcattcctatgaatgctggtcaactggaacctctgcaattagtcgtcaattctgagaaattcattaaaaagaaagcattaaagagatcaccttctgacttctcagcagaagaggttaactattacctgcgcgacatccagccccggacgcccgcgctccccgcggcgtgctcctgggccagctccgggcgggcaggctgcggccccgcgcccgcactttcccggctgccggaggctgcgggctcagcgggaagccccggcgctccgct

SEQ ID NO: 438780 - DNA, 2148 bp, Homo Sapiens
gtacttggcagcagcttttttaatttgaacactttcttcttgaggacacaccttcagtacagttaacaaatggttacacctgaaatctgctgagagcagagcttaagatccacaattgcaaaggccactgctggctcacttcctcacaggctgtattacctttcagagctgagtgaggctgtgctctacgtcccaatacttgttactgagtggacatgaggtgcaagtttagcaccttaaagggagaaaaaaataggttagtatgcagaatgtgattttgtcctcacttcaccttaagtcatctttttacacttgccaatgtgagttctgaaaggtagtactatatctgcttagaaatggcgagtgactgccaattaaaagccacatgataaggtaggttacaggtaagaggtaaatcaggttagacatgcatgagaacatgtaggcacagactgaatataagcacaggaacactcgtgaaacccaactgagcttttcttttgcctagaagggctaaatcctgccttctacatcagttcccatttatgctgaaaacccagttgaaagaattgtttcctacctggacagtgacacagtagtttgtttcataccagaaacacattgctaaacaaaacttaagagtctcagtttgggtttttctacaataaagtgaattccaacagttggcatttgccacagtagagaccactaaccattccctaattgtgatgattttattacccagcaccatcttctggagaaaaatatctgtaaggtgctcagtctcagcagaacacttcactgcaagctctagttcagtcagttcagaaaggctgtgaattgcccaccctgatttacagcactaattttaataatctgaagacaaattcgcttggggcttatccaagggactagtcttaaacctacgtaatttaaattgattgcattttataattaataaaatcccctgtaactcaatagttatatgtttcctttatctaaaccatgtagcactctttataaagggactttaaaccaattaatgtttcatgccgcgcaagcctttagtactatttccataattggtatttatttttaaattcataaccatgaatgcaagactacaataataacccaagagatgaggtatgtagtacttatcatttgtcctatggaagacagaagtacagaagatctttagggtaagtccatagtgacctcatttataacaaagacaattcactttaagttgatggtggcgttatgtgaacaaaacaatctacctagttcactaactcccagaaggctctttcaggtaccctgctgttatgcaaccagtctcaaaaatgatttgaaaaccatcttacttttgaacctcctggatgatgaatccatccactggatattccctgggacagtactctcagcaggtattgatgaacatgaatcaattctttgtgctttctgtagcacttcataaagttatggcaaagacctgtttcactgaggctttcttcacacaggaaaggaatctaatgcttgtaaaatgacaagacagatttccaattctaactaactggctttccataagcattgtcacttacttacattccaggtctgaattcaaaagaaaaatacaaagtatctgtcaacctagttaccatttttgtatttgacacatttgaaacaagtagtacgtaagcctaatgatccaagttgaaaaattagcctatttaaaaacgtatactaatgtttttcactgatccaataactagactaaaacacttcaaaagagtagatggtaccagttcggctttatcctggtaccctgtgggcccatgaagatcatctaagtatgcagaaaaagtgcttccaaagtttcttgtgcttttcctttaaccttcaacttccagtatatatagccccagccaagttttcagatcctcatcattaattcacttcatgaattggttttgtttgccacagtcctatggttctcaggtaagtttcagtagcatttaaggtcctccaaagcaagataaaatggtaaaaggaaaacaaaatacagtcagtagccaacggcctgctctcaaaccttcatattttaatataaaatattcatcccgcgtacctcggccgcgaccacgc

SEQ ID NO: 438781 - DNA, 483 bp, Homo Sapiens
  misc_feature (419)..(419): n is a, c, g, or t
  misc_feature (422)..(422): n is a, c, g, or t
  misc_feature (435)..(435): n is a, c, g, or t
ttttttttactatttccataattggtatttatttttaaattcataaccatgaatgcaagactacaataataacccaagagatgaggtatgtagtacttatcatttgtcctatggaagacagaagtacagaagatctttagggtaagtccatagtgacctcatttataacaaagacaattcactttaagttgatggtggcgttatgtgaacaaaacaatctacctagttcactaactcccagaaggctctttcaggtaccctgctgttatgcaaccagtctcaaaaatgatttgaaaaccatcttacttttgaacctcctggatgatgaatccatccactggggatattcctgggggacagttacttcttcaggcagggtatttggatggaacatggaatccaatttcttttgtggcttntcntgttgggcacttncataaaagtttttggggcaaaggacccgttttcactgagggttttttt

SEQ ID NO: 438782 - DNA, 559 bp, Homo Sapiens
  misc_feature (19)..(19): n is a, c, g, or t
  misc_feature (44)..(44): n is a, c, g, or t
  misc_feature (59)..(59): n is a, c, g, or t
  misc_feature (136)..(136): n is a, c, g, or t
ctattgtttgccctgggantcaagtatatccctacctaagtacnacagtcctccgtatncccttcaaaacccagttaccttggacctaaaacttccccacccatattccccttaggttccttccctatggcccctnttccctctgtggccaccccacaaatccaggaggggaaaagacctgcaagtaccttcctagaaaagttgtgggaccttcctaaagaaagacgcccaggcttcccatcctcacctatccccttgatcattatctctgaagtcccctacctgcacttccctgattgccctgtagcaacaccagcatggtgggaattggagggaaagattgtggaaaatccctaaagggtcattgttcatgacgttattttgaattgtaaaattgtgagccactcacatttcaattacaaaaagaacagaactcttaatcacgttgtgaagattaatttcttgccattttctggattagcacagaagcttgtatcaatgaagagtatttaggaggggaatagggggaaaattgtatttttctgttcaaactctctcc

SEQ ID NO: 438783 - DNA, 864 bp, Homo Sapiens
  misc_feature (380)..(396): n is a, c, g, or t
aattcccaaacccctattttcagtgccccaggattttccttagggaaaccaggttaagggcccatgtttcctcttaccctactggggggcccggggcgccaaaaggaaatggttttgaaaaattttttgaggggccgagggcgggccggacatgggtttttgtttggtgctggttggggggttccatataaatcttttacttaaaagtcatataaaagaataaaaaatgcagatttctgaatcaaactgtagataaggaagcaaatgatgttgaaaggtgcccattaatttaaaatttcatcataggaatttgggtgaccttttgcactcagtattaaaaaaaaccatcaagttgctctttggaacagtagcatttaggnnnnnnnnnnnnnnnnngtcacacttgtttatttctttgggatgttgctgtgtgtcgtggaagaaacgctcccctgaaaactgtaaccaaacaaagtttggttaaaacaaagttggttcctttgttttcatggaaatgtcagacaactatgaaaagctaaggaagcatgttgaactgaaggtctggctttggtaaattaggcagagatgttctcagcagcaaacaggtaaaatctgacatcgagaagcattattttgatgtaggaccagttataatcttaaagaactgactaggttctcaaataatagaactgagaaataggactgagaaatgatcgacgtcgagtataatatggtacacttagcacttgtttctatagaaaacatttcaaatcaagttctttatgatgtgaaccagattttccaaatgcctaaaccacttctgagctttaagcaaggcctcagaaattcagcgggtgcctggga

SEQ ID NO: 438784 - DNA, 3051 bp, Homo Sapiens
  misc_feature (243)..(243): n is a, c, g, or t
  misc_feature (245)..(245): n is a, c, g, or t
  misc_feature (248)..(248): n is a, c, g, or t
  misc_feature (256)..(256): n is a, c, g, or t
  misc_feature (260)..(260): n is a, c, g, or t
  misc_feature (264)..(264): n is a, c, g, or t
  misc_feature (277)..(277): n is a, c, g, or t
  misc_feature (290)..(290): n is a, c, g, or t
  misc_feature (313)..(313): n is a, c, g, or t
  misc_feature (324)..(324): n is a, c, g, or t
  misc_feature (337)..(337): n is a, c, g, or t
  misc_feature (342)..(342): n is a, c, g, or t
  misc_feature (423)..(423): n is a, c, g, or t
  misc_feature (437)..(437): n is a, c, g, or t
  misc_feature (439)..(440): n is a, c, g, or t
  misc_feature (450)..(450): n is a, c, g, or t
  misc_feature (452)..(453): n is a, c, g, or t
  misc_feature (455)..(455): n is a, c, g, or t
  misc_feature (457)..(457): n is a, c, g, or t
  misc_feature (499)..(499): n is a, c, g, or t
  misc_feature (502)..(502): n is a, c, g, or t
  misc_feature (504)..(506): n is a, c, g, or t
  misc_feature (509)..(512): n is a, c, g, or t
  misc_feature (514)..(516): n is a, c, g, or t
  misc_feature (520)..(522): n is a, c, g, or t
  misc_feature (525)..(525): n is a, c, g, or t
  misc_feature (529)..(529): n is a, c, g, or t
  misc_feature (533)..(533): n is a, c, g, or t
  misc_feature (535)..(535): n is a, c, g, or t
  misc_feature (537)..(538): n is a, c, g, or t
  misc_feature (540)..(540): n is a, c, g, or t
  misc_feature (549)..(549): n is a, c, g, or t
  misc_feature (551)..(553): n is a, c, g, or t
  misc_feature (557)..(559): n is a, c, g, or t
tacatatattaaagtggggcagtattatatttaacaatagttttaaattcattggattcataaaagaacaataattgggcatgttaacatcaattttattactttacaaccatagtcacttatagcgccacacaaaaagcacatgttaattaatagtaggagagctattaattcaaaattctaatccccaatataatttgctgctacacatttctatataaattattgtatttcaaagaaatngnggngcttaaantggnatcntcctctccatgtnctgctccatcctnagatcattattaaaatacacagntggggacggcnatgggggggaatnctatnggggtaatacttgaggggacccaaggtatgagttaattgttagcagtatttgcttactctagacacattacacagttcagngattacttttaatntnnccatgtgtgncnntngngacaattgttcttctaggggtacagctaatatatatcaatgngcncnnngcnnnntnnngtgnnntcngtgngtgntntnncntcctttatntnnnttcnnncgttccgggcttagttttatcatctgacatcttccgttatatgtttcagtatattatcagttatattacctaatgcctaggaccaaaacaaagtagacatttttttaaaggagaaagaaattacagatttagagctcttttgattacaatttatttgtttgcaaaatgtcaaccaattagaagacatgacttccagtcatcatgtttctaaaagttgagtttccttgcctggccagtagttgggttgtagcagatgatcacttgtagtgtaattttccttttggaatcttgtagacaccattgttctttctctcttggttataaaacttctgtgttttgaaacataatttttctttaaaatgaaaagtactgcaatgcttaggagaattgacactgtgcccagtatcacagttagtcccagatatatatgtctgaagacatttgaatcatataatctgcatgatcctctacttccacatcttttaaatccccatttgaggcatgaagtatcaatcaaaactccaaaatacactggagctgggattcctgcaagaactcttattgctaatgtgtagatacccaaggcaaaagacttaagctgtggcttaatgcacctcagaagtaatatgtatccaggtatgccacctagggataaagtataggatgtgatgactgaaattacaaggaaatacagaaacatttggggacatccattgtctttctgacatcttcccactatgcctgaggaatttccggatttagaagctgcaattcccacacaagtgcagttgtaaaatataatattttttccactcctgttggaggtttgtcaaccagcaagacaagctgatacatatgtgattccattttcaccgcacatgggttcccattttgtctctgaacatttgcatcttgagttgcaatctggaaagagagctcgttcatgattagagacagttttggttccttggtaggagacagttagtcctgccacatcagaattttcacagcccagtgcaaacagggaaagaaataggaggtaaccaaagacagatgatcccaagtagagttttgcagctccacacacactgattctgaattttttcataactatccccccagagaatattccaagggccactgctggaatgttgatgagcccgatcacaaagttggccctggaggatgactgtccatactgctgctcaatgtactttggtttgtacgtcaccatgccgaacagagaattgaactgaacagtgcttgtacataaatataggaagtatactgggtttccaaaaagattcttcagtgatggaagaaaatctcttgccatttccattatttttgcattttctccctggggtgtttggtagtctgtgtgatcatctataataaacttggatttctcagaggaagaattagaatcctctctactttgggatcttggtaaactctttggtaaataccagaaaggcacagctgcaagaagacttatgattcctgctattagatagccaagccaccaggctcctacccactggggatcttttggggtaatggttatgtgatctaggtttacaaagccaatgtcaacatatagtttggcacataatgagcctaacaggaaaccaaagattggtcctataattgcaaccgtctgcacacacccaatatagaaagctgcattgtcttcactggcaaaatcatccaggtaggcaatgcccaaaggctgaatgggagtttctcctattcccacgaagaagattgccccaggaaaacataaatccacatggaagagctagtgtccacttcacattcgttacttattttggattttgatttttccataactgaaactggtaattgactgcttgactctaggagacacggagagatgctgagagtggaattggaggaaggagaatatctctcatatttgtactgctccatgaagaactgaggcattgcaatgagcagtgttccaactcccatgattacacaccctgctccaattatttttggcctgtgaagtttggctccaaagtagctaacaaatgttataactaagagattcccaatttcaaaactaccatcaataactcccaccagtgaagaagggatatcaaaccttctctctatctgagtgatggtgctcttcagatagccttctgccaatgctttggcaaagtaaacaaaagacaaggcacacaagaacacctttagttcaccacagcatggttgcttttcttctgaggagggatattctgttttaaaagaaggccttccaacaggttgcactgaagttttgcagaacaactggatattttctttggatgaagtgtccattataaacacattccttgactctgatctggaggaagagatcaaagatagccagttcctttcaatgtgctcagcaagaggatggaccacacaccacagaccctgagcgatctcttctctttcctctttcttcctgaccccacgct

SEQ ID NO: 438785 - DNA, 795 bp, Homo Sapiens
  misc_feature (57)..(57): n is a, c, g, or t
  misc_feature (68)..(68): n is a, c, g, or t
aaacatacaccaattgggacctcttcttttttgtcatattttaaggctcacattggngtgctacaggnaatcataaggtggtacagggacctataatgaatgtaaaacttctatttgttttgctaagaagatagatttaaaagctttaaagactttatcctaatgaatcaatattcaaatagttgaattcctcttcttcctttcctgcttgctcctagtttaaactggcaagaccacaaagttagcaaaattctgcctcattatttattccaaaggcaacacttaaatttattctttgccataatgaggcttaaactgggcagattgagaaagaatgctggctacagagttccaatagcaggattagttaatcagagatcctggttgattttaattgaaaacatttgccaacttactgtgacaacaaaaggtagattcactttaaattgcgtctatagaattgtggtatactgttgaataaaaaaatttaataaattgcgtagtatttatttatttttactttaaaaactaactttgacagatcagagtcaaggaatgtgtttataatggacacttcatccaaagaaaatatccagttgttctgcaaaacttcagtgcaacctgttggaaggccttcttttaaaacagaatatccctcctcagaagaaaagcaaccatgctgtggtgaactaaaggtagagcaaccaagaaagtaaatagtgttgatgctcttagttttctgtccagatatcatctatataatgaagttagaatgagaatttgttttctcctttt

SEQ ID NO: 438786 - DNA, 1014 bp, Homo Sapiens
  misc_feature (937)..(937): n is a, c, g, or t
  misc_feature (997)..(997): n is a, c, g, or t
tttttggttaattacaggaaatttattcacctaaattaccacatgaataattcaaaataaaaaatagaatttcattacatgaaaaacatcagttgataaaattcgacatctattactgatttaaaaaacaaagtttaagaaatgaagaatatagagattcttccttaacagtatctgataccaacagccaacttcctatatctactgagtcactaggactacttttctagaacagtattttgccaggacaaggaaaacagggtttgggaaatgcagagttatacaatgttaaataggtatctttactacaaaactatggagtaaaaatattgccaagcaagaggtattccagccagaaaggttttaaaatcaggacacgggtaattattaaatttctgggcttaaattgcaatattcttccaaggattaaattgtataattcaaattggccttctgtttttggggattcagatatcatattatttctcatcagtcataatattaaagtcagtgaccagaaaatacaaataaattgtttaataataaaatctgctatcatttatcctaaatttatctttaaaagatccaaagtgttacatctagaatgctaatgtcaaagagaaaaaataattatgttaaaaacactactgaaaaacttgagatactatagcacattttaagttatctaatatatggaggtgttgacacaaaaatcactgtaactaaaattcaaaagtataatgaaatataaatatagtcatctcagttcactttgtgttagggcaaaataggatccagcttaaactattggcactgcatagctttactgaagtgtcttgatggttaatgcgcaaattattgcaagtgtagtatgttccaaggaggctacagttcatcccctggaggaagagatcaaagatagccagttcctttcaantgtgctcagcaagaggatggaccacacaccacagaccctgagcgatctcttctctttccnctttcttcctggcctct

SEQ ID NO: 438787 - DNA, 201 bp, Homo Sapiens
ctgatgttgctactgtaatgtggcgaagaatgctaggcgttttgggagatgtaaattcaatcatggatccttaaatacatgctcgagtttttgattacctctgtgaactttggcagaatctagctaagattagagataaccttggcatttcaactgataacctgacctccccttctccaccagttttaattcctccactga

SEQ ID NO: 438788 - DNA, 1285 bp, Homo Sapiens
  misc_feature (680)..(791): n is a, c, g, or t
tttttgcagcatattgaagagaatattattaatgaaaacattttgaaagaaataaaattagagatattgttgcatctcacttctctgtctcaaacttttaaccatttctttccagaagaaaaatttgaaacattaagggaaaacagttgggtaaaagatccatttgcttttcgaaaccctgaatcaataattgagctaaacttggtgcctgaagaagagaatgaattattgcagcttagttcttcatatacattgaagaatgattatgaaaccttaagtttatcagcattttggatgaaggtaaaggaagactttccattgttaagtagaaagagtgtcctgctattgctaccattcacaacatctagtttgtgtgaactagggttttccatcttaacgcagttaaaaacaaaggaaagaaatgggctgaattgtgcagcagttatgcgggtagcattatcttcctgtgttccagactggaatgaatttatgaacaaggcaagcacacccattatagtaaataaaaatcttacctagtttttgtttttgtatttcttattttgtagtatttttctatgttatatttaaatggtactataatactgtgatacttttgttatgttttaatttttgttatatttaataaaattattttatgttcattgacaaacaacacaacnnnnnnnnnnnnnnnnnnnnnnnnnnnnnnnnnnnnnnnnnnnnnnnnnnnnnnnnnnnnnnnnnnnnnnnnnnnnnnnnnnnnnnnnnnnnnnnnnnnnnnnnnnnnnnnngagcgacccaaaagggagacagcagcaagcacaccaccctcagtcgcaacgaaaaagaagaaaagaaacaatcgacgacgacaaacaagtgaataaacaaatcaggatagctgtgactgcagactctaatagacaaaagagatagaagctgagtacaggaggctgcacgaacaatcgaagggaacacaagccgctaaagaacaggtattgagacgaaaaagaggacggtaacacaatgcggcgagacaagagatgcgcggggaaagaatcacgagcgggacagagacacagacggatagacagagaacaagacaagccgcgcactgaggggcacaccaccgaagagggctggcgagcagagacgggggcaggctataagtcatgaacaagaaaaacgaaggcggacaacaagcagaagagaaagagaagaaagtgagcagagaggaaagagaaggcagccgtctcggaggcaggcggagcatgaggggcagggg

SEQ ID NO: 438789 - DNA, 333 bp, Homo Sapiens
atttcgaaagacattattgttatggcaagtgagacttaaaagtaatcgtcctagctattacatgtttccaagatttttgcagtatattgaagagaatattattaatgaaaacattttgaaagaaataaaattagagatattgttgcatctcacttctctgtctcaaacttttaaccatttctttccagaagaaaaatttgaaacattaagggaaaacagttgggtaaaagatccatttgcttttcgaaaccctgaatcaataattgagctaaacttggtgcctgaagaagagaatgagctgaaatgagccgtgtatcctctagagtcagctag

SEQ ID NO: 438790 - DNA, 925 bp, Homo Sapiens
gggagtgagcgcgtcacttcctgccgctgccaggcgcgtcctcccgcgcgctatgacggccagcgcacagccgcgcgggcggcggccaggagtcggagtcggagtcgtggtgaccagctgcaagcatccgcgttgcgtcctcctggggaagaggaaaggctcggttggagctggcagtttccaactccctggaggtcatctggagttcggtgaaacctgggaagaatgtgctcaaagggaaacctgggaagaagcagctcttcacctgaaaaatgttcactttgcctcagtgtgtgaattctttcattgagaaggagaattaccattatgttactatattaatgaaaggagaagtggatgtgactcatgattcagaaccaaagaatgtagagcctgaaaaaaatgaaagttgggagtgggttccttgggaagaactgcctcccctggaccagcttttctggggactgcgttgtttaaaagaacaaggctatgatccatttaaagaagatctgaaccatctggtgggatacaaaggaaatcatctctaggtggccgagaagatttgattttctttaaaaagacaagaataaggtctggttagggaatgaaaaatgtatacatttcggaacaactccattttatctaaaaaagttcttgtgattgccagtttatttgcagtctcttaatgtatcccccactctttcagccagtacttgagaagatttttctgaaatatgtcattgaattgtattccagacacagaatacatgataaatacttatatcacgggtaatctgctttccatatttacctatgcatatttactgtgcagtttgtcattactagctggcatggagtaggatggcagtcaacactttgccttaggggttctggttccaatagagaccttgattcccatatcgca

SEQ ID NO: 438791 - DNA, 358 bp, Homo Sapiens
  misc_feature (302)..(302): n is a, c, g, or t
  misc_feature (336)..(336): n is a, c, g, or t
tgtcgttgaaattttggattcaattgcctgttgcacttttacattaagtgttgcttaaataaacaaaaatagagcataaattcaatattctactgtctaaacattttaaagcaatggttatgccatcataaacaagtaaaatgcacctaatttgggtcttttgacacctcttgttttaagtttcctgtatgataaagttcttcacagtttaaaatattgtgaagaaatatatttaactatattcacatacatattatgtacatgtactatgtctttgttgtacccataaactttgaatacgngtgtatcagtaggggtaccccacacatatgggcnggggaccccggaataatatggg

SEQ ID NO: 438792 - DNA, 1032 bp, Homo Sapiens
  misc_feature (309)..(359): n is a, c, g, or t
tcatccagctcgtggggttatcagtgtggtggccaagggcagcgtagaaaaccaggctcttgtcccaaatagaggagaggaaagagggttttgcagtcatggaaaaacagaatcaaatacccgatcatgatcgaagagaagccctgaatctgcatcagagggaggggccgtgggcagctgtcgcaacttggccactgcggtcggcaccagtacggtggagctgtgattacctaggaggggttggggccagctcacaagtttattttatttcatatatattctgagacggaggagtctaccctctgtaannnnnnnnnnnnnnnnnnnnnnnnnnnnnnnnnnnnnnnnnnnnnnnnnnnatcgcatgggtatcacagagattctcacgcctctagcctcccaaatgtagctcgggcattaccaggcgagccgccgaccaagccacggctacatatttaggtagctctttacgttagaagtagctggtgcgatgaattgcccagttgaactggaggccaaggggacgtgggcacttccaagagcatacacgcggaacacgtccaaagcgcagacttaccggtgcgcgagtcgtctgtgacacgtccaccaagagagcgtgccctgaggtggcacctactacacccagaggggagatgttggaaggaccagaaacacgagcattgggccaaattgaggaccctttgggcgggaaggcgcggctatcagaccatatagaggttctcgcacgcccacaagaggggaggcggactaggggggacttcgcacaaacaagtaatcgcaagcggacgaaagaaccgaggaacaaagcgcagacagaagatagaatacgaaggaggaggataaaagaaacccaaaggaggactaggaggacaggggcagactttcgacggagagcgcaaaaccaagggagggagagaaagtacagaggaaaagaggcgcggacaagcggcataaaagagaaaacagcgataggacgacgtcggagaagtgagccggggggggaagccaccg

SEQ ID NO: 438793 - DNA, 1200 bp, Homo Sapiens
  misc_feature (18)..(18): n is a, c, g, or t
  misc_feature (25)..(25): n is a, c, g, or t
  misc_feature (39)..(39): n is a, c, g, or t
  misc_feature (58)..(58): n is a, c, g, or t
  misc_feature (69)..(69): n is a, c, g, or t
  misc_feature (80)..(80): n is a, c, g, or t
  misc_feature (101)..(101): n is a, c, g, or t
  misc_feature (123)..(123): n is a, c, g, or t
  misc_feature (129)..(129): n is a, c, g, or t
  misc_feature (138)..(138): n is a, c, g, or t
aacaatgtgaccccgaanctgtccncccttgcacgagancacccactttgggaggcanaataaaatcangtcccctaagnctcaggttaagggccaaagtnttgcgcttggcgagctgtgggnaccagnacatcttgnccagaagggtcaggcccagctttgccaccgcagagtggagcctccctttgaagctgacaggttctgcagaatggcaggaaggctgctgaccagcccctctgcaccctgtagattccaggcttcctcttctccagtatgtgagctgctggcatttgagtctggggagcttagaggcctcccaggatgtacattccttcctccagtgggcgtggtctgccctagagaatgaagtcctcactctgctgggagccctctctgccagctgggagacccttgacctgatcattttcctgcccctactgtttctcacctgggaggctctccagaccttttgtgggccacaccagctcctggactccgctgccggcctgggggtcctgggagctgggagcttggtcctagcaagcgcttcctggatctcctgtggttctctggcgccccctggtggcctgactctcctggccttttcaggctggatggaaatgcttaatgggctctgacatgtgcggtctgttcctctccagagctctggcttgtataggaagtttcgagctttttctgtctgggcgctgaaccctctggaacctctctggggacttaaggcctggtggggagccttgggcctcacaatacctttcctgctgggcttggagctcctggcctgtgttcagtccagagagcctcgccccagcaagggtcaatgagcaagatcctaagaagttaaacaggaaataggactccaggatccgccggggaagaccccacttcaggtgtgcaatcctcctccgcatgagggactccaggagcagtcgtttgctcttcttgaggcctgtccccttgggcaggacagtgagggcggtgggaggacccgctagaatgatggcagcttccggggctgggccacacgggagacaggagcaggcagagggcatgcccaagggagctgtcagagacggagggttttgggactgccgagtcaggctgggggccttctctggatccacccctttgtccctttgtcgtcttctccgaggattcatggttgggcctgctgggaggctg

SEQ ID NO: 438794 - DNA, 533 bp, Homo Sapiens
  misc_feature (303)..(334): n is a, c, g, or t
acaagttttagggttttggggttcgtcggcgtgctcgagtgtacattttaaaaatcgtttaatggaacataaactcctttagaaaaacattcagctaggtgataacacccatagaaaaaaacaccaatcttgtgtttatcttttttaatttggcatttgttatttgcatttatattaaagcaaagtgcatcttttctttatttttcttgtttatacacattgcacaatacataaataatgatgcttataaaacgtctttatatttacaagtaataatatatttatatataacataaaatacannnnnnnnnnnnnnnnnnnnnnnnnnnnnnnncaggagtcctttctctctcaaagcactacaatgctaaatttccaatgagaatgcttctcttgttcacttaaacctttgtagttagaaaaatagcttatgttaaagtctaaacatgctcattgagctaagaacagtgtcgaagtatcatacgagtgtatgagttgtagaagaaatgaaagaagagttaggtgtcagccta

SEQ ID NO: 438795 - DNA, 1544 bp, Homo Sapiens
caatacacaagaaaaaaaatagacatcttcccggcacttggctcccgcctgacggcaacgtctcctccacactttgagagacctcagcttttaaaacccagcagcggctatttcagaagtcatgtcctttccagatccaaacttaaataatgagaaatttgccatttcaaaataactgagagtttattcatggatgtggtgaagtttactccaccaaaagatgtgtaaaaaaattgcatgaaagtaaaaataaataaagctgttgtaaagcagcctcgttgacacggtagcccagaacaaaacacttacgtgtaaaagtgtcattacaattttaaagtaattatttatattcaaattacaactttttgacaaatctaaagaaaacaaactgatttggtaaaaggttcaaagacttccacattcaagctcggtgttgtttcacacgcgtgcgccccggctgcggcggtgacatattgctgtattcggacataaggcactgtgatctgaacataccgtgcactcaccttatgccacatcacctgttccataccagtgaattctttgaaatgaaaaataatgaaaacttcaggacacagtgcactttaatgacatacagcatttaaaatccttcagacaaaggtctgaaaaacagtcttttaatgcaagcctgaatcttcaagcacataaaatctttccttttttaagcttaatttcaacatcactggaagaaatacctatcgttaaaccctgatatacattcttaaccacttgcagccagtgttcatgaggcaaaacgtgacccagagactttgttcaagttctcctcctagggcgtctacattcacggcggttactccgtttctgtctccttttgtttggcacctgctggtgtgaggatcagggcttgcagaatgtccgacagggaaataatacccacaatactatctgcttcatttaccaccaccagccgatggacctcagctcttactattctgtccacgatggtctccagtatttccagcttattgcacttcacaacaccttcaaaatactgtgaacggtgctgaagggcctgggtcaccgtgatatctaggttattgtatgttttctcagcagcaagattctgtaatgaagcaagagaataaattatatcctttcatttcagttcacttcaatgaccaaaattagtgagcttaagagagcctgatttctaaaaactttaatgcttatctgaatttagtacctgcgtacatcagacgttctttctggcttacgacacgccattgctactgttattttgtcaacatatcaatcacaattaaagataaccatgttacaaggtctaccttccttacgaagcaacattgttaaactttgacagtatatcctgccaaagactgccccccaatttttaccctctaatgctctctaccatgcatggatgaaatctctggcaaggtgggctgacatctgtaaagggtggtgagtgccacagggctagaaatgctgcagcaacggaccttctcaacagctcctgtgaaagg

SEQ ID NO: 438796 - DNA, 229 bp, Homo Sapiens
acggcactccccaatggcagccggggcacacgcgtgtgaaacaacaccgagcttgaatgtggaagtctttgaaccttttaccaaatcagtttgttttctttagatttgtcaaaaagttgtaatttgaatataaataattactttaaaattttaatgacacttttacacgtaagtgttttgttccgggctgccttgggcggctgccattgggcacggctgccattggtgt

SEQ ID NO: 438797 - DNA, 800 bp, Homo Sapiens
  misc_feature (123)..(178): n is a, c, g, or t
gggaggttggaggccaggaagaaagggtgagaaaccccgggagggcggaggcttgccagtgaagccgagatcggcaccattggcatttccagccttgggtgacagagcttagagtccattctnnnnnnnnnnnnnnnnnnnnnnnnnnnnnnnnnnnnnnnnnnnnnnnnnnnnnnnncattctgtcagtctgtgaaggggtgagccttaagaaatacatttccctgcctccttctctcttctgttcccacctcctctctagtcaagtgagattcttccctgaggaaccaaacattagtaagagaaaatgagctacttcagcaactgaaaactaaactctagtaaactacagtcataagtctagttctcatcaactattttatatatcactttggttgttttcattgtctgtttcaagtaagcaatgtggtcctttctcctttgtaaggctaattttaggtcaacctctgttagccttatttcctccccgccaactccccccccaaaaaacccttttagttttaaaagaaagcttcctttgcatttttgccctttcctaaagaggtagggtatttaccctatattattttaataggatcatatttgctctgaagtaaatcaatttgtttaactttattaaatttgatgcctttgggctagcctctgaaacagcaaacttataggcaattaaataattgttattaaaacgatctacttattttttcttgtctccagcctttacagttaaaatgttcctttggaatattgctttgtaggaggttacaggggaacctacttgg

SEQ ID NO: 438798 - DNA, 784 bp, Homo Sapiens
ccatttaaaagtattttatttttttccagtcaaatgactagttaacaagaagagtaaacttattaaacatgctctaattataaatcactgcattaaggacaatgaaaataatcaatttcggttatacaatatatacagttgtgctgcaaccaaagtaatcaggtgaatgaactgaatatcatacatctcaaaatagcatcctaagctgcatattatgttatccaccccttaacagatcacacagttactcttagtctgtgtacatgttctgagccatcatcccagatctgatggagaatggcatgcaaaatgccagaatcctgcagctgcagttcatgaaacataaactttaaatataaatagatatctacaatgtttttctttctcttagttgcttttttaatttgcaaggagcaaataactaagaaaggatattagcagggtcgttaatataatttctcctctggtaagagtactattagttactgcacaatagcaccaaattgtagactggaaaaatatttcctaggtatttatgtaccagtgaacctgacagattagtttgggactggagttctaatgttgatatgaatcaactttattccttatatagctggcaccaggtggtcaaaaggctgactataaaatacagatgcaggaggattgttaaaatagacataagtgcactgtgcaaaatacatctgtttacttaaatctatgagaaaattaaatgaagggttcaaacagaaattaacaattagtgaaaacagatgtagtgctttaa

SEQ ID NO: 438799 - DNA, 455 bp, Homo Sapiens
  misc_feature (305)..(305): n is a, c, g, or t
  misc_feature (351)..(410): n is a, c, g, or t
aagtgctgggattacaggtgtgagccatcgcacccagtctcagtgtagatttctaagttcaaattcacattctcagaacttttgcagttattattccattgtctctagtatccagtgttgctagtgagaagtctggtgccagtttgagtttgattccaattcttttatagatgacttgtattttcctttctgaaagcattgaggaatattctgtttatcttttgattacttgaaatttcaaaggatgtgtctgttgtgggacgtttgtcattcaatcctttcaaggactctaggacttttttaancctggggatttgagtacttctttagcttggggaaattttcctttgnnnnnnnnnnnnnnnnnnnnnnnnnnnnnnnnnnnnnnnnnnnnnnnnnnnnnnnnnnnncagatggtagacctcatagattggtcatctttttctccgtctcac

SEQ ID NO: 438800 - DNA, 435 bp, Homo Sapiens
ccggcccagggcctttgttaagcataaatataattttacctgttacatttcttgctgtatctagaattcatgagcaggcaggactgaaagaattgccagttcctttcagctacctgctgtcagatgctgtaatactcatcctactttctgcccaggtgcacgtaaaatctagtattacaacagattcacatgctggttctattgaaagccaggtgatggctgagctagatggtagagagatacacagtcttgggaatcatactgaagctaccccaaatcctattttggctgaaatttaggaagggcagatgattgaatttcaagtggattataataaatggtgtacaatgagaaatgccttacatgactaagaatttccatcatttataactttgtcattggaaaatataggcttttttcttcattaatcaaagg

SEQ ID NO: 438801 - DNA, 961 bp, Homo Sapiens
  misc_feature (71)..(108): n is a, c, g, or t
ggaaaataaatctgtttattttattaatgagctcagagtaaggtttggagtgacaatcctggcagcaattnnnnnnnnnnnnnnnnnnnnnnnnnnnnnnnnnnnnnnctccagtggggtcttattagggttcaaggaaggagtcccccagagctgggagagaccaaattcactgggccagaggaaaggaatgagagtctggatccttgagatcttctcccaaatggctggctgctccctttcctccacgttggccttcagaagagtggcccgagctgttccttatctggccctggttcagggccaaagggagtttgagattcctgggtgatagattcaggtcccaaggatgccatctggtgtgtgtagtgtggcctctctcaaggctgatccgaggctttgtgttcacgaggtggggccggagctcactgtttcctaacggtgaatttggtttccccttttggacttcagaagaaggtcagctcatcgtcatactcctttggggggcagacggcaaccacaaggtcgatccagtccccgccctgattccaggccttctgcagggcagcgtcagcctcagccagggtgtagtctgtcacaatcttgccgttgattgccatgatctcgtcccctttcacaatgccaccatgccgctcagcagctccccgctcatacacagcagaaacgaccaccttcccaatgggggagtccacaccgccttccagggctaggtctaaggatccctccttcttgatgcgtaggagccggacatccttccccatgatctgctctggggtgaacatagagtaggggtcaaagccttcctcatatttccggaaatcctggccttgccttggttgcagaacaggcactaagaccaccgagaaaagccccggttcccaggcctgggtcactctcaaatgcctctccccagaacactggtttcagaagtcaagccgct

SEQ ID NO: 438802 - DNA, 617 bp, Homo Sapiens
ttaatcattaagtttgtgttagtctttattaaaaacaaaaaataactaaaatttcagacagcgatgtacataatatatataagaatatacccaaaaaagtaaatttctaccaccctcgcacagcagaaatttcaatgggttattctataccaaatccaagtgtttacatccaagatgtcacagaggtaacttccttttgtaccttattgagctctggaaacagttcctgtatcacaatgtccaataaaacataagtcagctgcttgttgagtactggttgctgtaagccatcaaacagaagtctgatgctttcatacttggtttcttcaccaatacacttgactaacagatctggaatgtaattcatcatttcttcaaaagtctgttttgctcctttttgcttatcttggagagagcgaggttcagtgttttcacagaatatagcatctctgagaagtgttatgagtgagaccaaacggtgctcctgaaatagctgttctagtttacactgaagatagtaatcagtatacatttccagggtgtttttaaagaggattcgagttcccattaagagatgatgaagccagtctggaacctggaaaactacccgtcctacc

SEQ ID NO: 438803 - DNA, 609 bp, Homo Sapiens
actgcagcatttctcagagtttgcattatgccttgtgattgtgaatctccaaaaatgggatacatgatactgcatttgtcaacttgaccatagaaacctcttatccaggagcctcttatagaaacactggtttggggagtattgatttgcagtttttgcctagtatctgggaaacagggtggtgattttgctttatgatccagttaatggtgagtcactttataatataaaattatttcacatttggcctttttgtttagatctgttagtcaagtgtattggtgaagaaaccaagtatgaaagcatcagacttctgtttgatggcttacagcaaccagtactcaacaagcagctgacttatgttttattggacattgtgatacaggaactgtttccagagctcaataaggtacaaaaggaagttacctctgtgacatcttggatgtaaacacttggatttggtatagaataacccattgaaatttctgctgtgcgagggtggtagaaatttacttttttgggtatattcttatatatattatgtacatcgctgtctgaaattttagttattttttgtttttaataaagactaacacaaacttaatgatt

SEQ ID NO: 438804 - DNA, 457 bp, Homo Sapiens
gtatcaggaaaatgtctatttattccaaaaaataccaagtcgcagctcctctggctgtcctcaccagggaattaattaggggaaggggccagtgttggagagggggtggagagaggaagtgatgaggagggaggcagaagctgttggagggtcttcaggtgtggaactatttatcttctccctgtgaagtgccccctcccatgctcccccaaccagacggggagatgcctgtgtgtgtgtgcttgtgtatgcatgggtttgtgtgcatttgcatttgttggggcatggggaagtctcagatgacgaggtcccagctcaagacatgtgggaggggaattttcagtacacacctgctcccacccctcaagacctctctcctctatgggcttatttgagatccaaatcaaggccccagggtccagggcagcctgttgccaattgaataggggacagggtt

SEQ ID NO: 438805 - DNA, 649 bp, Homo Sapiens
  misc_feature (29)..(29): n is a, c, g, or t
  misc_feature (118)..(118): n is a, c, g, or t
ggcccgtccacccctgagggttgaaaaangcctcccctcctctggtgaataaatgaagaggttgcctgggtttgaccccctgtccaccccaatcaagatggcctgggtgaagggaaanacgcctgcctgtccagggggggccccgggtgccctcaccggggggtaaggtgaaggttggctgaaggcccacatctgtggtgggattgatgcaggcatcatcctcggtcaggagtgaggcagtgacataaggagggccagagtaggggtgaagtcttcagagggggacagctggccccacccctgtccttttagtggaaacgggaatatggcctgttgtgctggttccccttaagtgaacaactgtaagtaccatgcggccccagaggacaactgaaatacagcccgtcacggtacttggctcctaagatgatggctcttgggggatgatggcacatggttgcagtggactctgggatgacaccagggttatggtggatcctagtgggtggtgacagcactggacctcatggatcctgggagatgataacaccagggtcatggtggatcctaatagatggtgacaacactggacctcatggatcctgggagatgataacaccagggtcatggtggaccctagtagatggtg

SEQ ID NO: 438806 - DNA, 946 bp, Homo Sapiens
aaaataaagcttttcagttgtttggaaggaataatgcaatccaaccaaaaacggatgtttcacatttttcaagagcacattacgttcagccataatatgtttttgctcttttctgttgagaactatttttttctgtaacactttgacagcataaaattttccatccagtttccgttttgcaagaagaaccttgccaaagctgccttttccaataacttttaagaaatcaaagtcagttggtttggcatgaggatttccagacggtcccaggttgatgttctgtgaggtagagtgtagcttctgagaacttctttcatcctcatcttcagatggatctgactggtgttttggactgtccatttgaaggaatgctctgacatctggatggttataaagttctggatacctaactaggttctgaatgaattcgtttagtcctgctcgtctttgtttaataaaatctggatcaaaattatcaccaaatattctcttggcaggaatcttcagggccatagcaggaaactgtttttttaaagtgttataaagtttatcaaactctgcatatctcctgaagacaaaccattcacttcttcccactgaaaccagaactttataaacagtaaacctcttctttttctctctgtgttcatcggagctgggaatgcttacacttgggcagctttccttgtagtccatggtgtgatctctttgcatttaatccctcaagagcacaccaaaaaatgcatccgaagaaacagtcagcagaggacaaacccaattaactaatccaaaatacaaaacctcttgaagtaatgttcaaattccatcatgcaacctggccccgcggtgctgctcccggcgcggcgggcgcggagccgaacgcactgcgcttcctccttcccggcagggccgccgggcgctggcgtttcctccttgacggtccgct

SEQ ID NO: 438807 - DNA, 687 bp, Homo Sapiens
  misc_feature (16)..(16): n is a, c, g, or t
  misc_feature (26)..(26): n is a, c, g, or t
  misc_feature (52)..(52): n is a, c, g, or t
  misc_feature (57)..(57): n is a, c, g, or t
  misc_feature (68)..(68): n is a, c, g, or t
  misc_feature (104)..(104): n is a, c, g, or t
  misc_feature (108)..(108): n is a, c, g, or t
  misc_feature (662)..(662): n is a, c, g, or t
aggcttggccaggctntcgccaatgngtctattttagggtaaggtattaagnccggntcccattttcncagatattatttgaagttgtttatgtgaaagcagcntgcntcatgtgattgcactgtgaagcttctccagtagaaggcggctatgtgccttgaaatttaaatataaagcaattcagtcaggtgccaaggtgccagcctgctggccaccatattggagaaggagaagtgaagggcagggggttgaatggagattgggttgtgcgaaagagaagatttcaaactttggggctggaagagcacagggtgctgcaagaagcaatgtgttgggctgaataattcatgatgcagtactaattttgactctggagaaaattgctttctcactgtgccaaaagctaggcagtgagaccaaaaatcaaagaggaagctaaatggaggggagaaaacaccctaaatcaacaccatatcaaattgacaaactgtttaaggctgcaaaatgtattgtcaaaacatgtgagtagatattttaaaccttacctaaaattgagcatatttatgcctacttattttgagcaataataggtagatattaaataattattttcaaaagtagctccttgatattaatgcagagagttccagtaaggaagtaancatttgcatttcattggaacttggt

SEQ ID NO: 438808 - DNA, 231 bp, Homo Sapiens
atttcccctcccctgttttttcaatatataattatgtcataattacaggttagatcagtattaagtgtgcatatgttgacaatcatagaatactgctcacaagtaagtccatgtagcaaactgactacactagagtctggattttagagtcagacttccaggttcgcatctgggcttgtggtatgtgttctatcatttaacatctctgtaccttactttcctcatcatatt

SEQ ID NO: 438809 - DNA, 885 bp, Homo Sapiens
gatgttgagagtcagttttattgccatctctgggaggggctcaaatccgcccaatctccttcagcttggccaccaggtcctcagtggtctccaccttgacgccggccgtgcgctggggcgggtcctccacactgatcacagagagcttggaggtcaggtccacacccaggtccccaggcttgatcacctcgatcttcttcttcttggctttcatgatgttgggcagcgtggcgtagcggggctcgttgagcctcaggtcagctgtcaccacagctggcagcttcaggcgcagggtctccaggcccccatcgatctcccgctccactttcaacttgtccccctccagcatcacctgggaggcgaatgtgccctgtggccagtcaagaaatccagctgtcatctgccctgtctggttacagtcatcatcgatggcctgtttgcccagcagcaccaggtccaccttctccttctctgccagcttggccaggacccgagccacctgcaggggacccaagcgttctgcttctgctgggggcacctccacgtggatacctcggtctgcacccatggccagggcggtacgaatcgtctcctggcactgtgcaggcccacagctgacggcgatgacctccttcaccagcttcttctccttgagccgcacagcctcctccaccgcgatctcacagaaggggttcatggagtgcttcacaccatccgtgaccacaccggtcctgtcaggcttcactcggatcttcacggcgtagtcgatgaccctcttgacagctacgagcacgcgcagctccgccatcttcccgccgcagccacttacagggtcagcccgcaccctcagcggctcagtccagaagccccacaacccccgccccc

SEQ ID NO: 438810 - DNA, 1137 bp, Homo Sapiens
  misc_feature (163)..(175): n is a, c, g, or t
  misc_feature (194)..(252): n is a, c, g, or t
  misc_feature (289)..(348): n is a, c, g, or t
  misc_feature (449)..(601): n is a, c, g, or t
ccacaagggccccccaaaaaggtttggaattaccccccggggggaatttaaaaaggtctattccccacccccctttgtggagagggggttctccgatggtggggggggaagggtttatatgaggaatgtcgcccccccgttttcccccaaaaagatgtacaannnnnnnnnnnnnaaatttttatttagagggnnnnnnnnnnnnnnnnnnnnnnnnnnnnnnnnnnnnnnnnnnnnnnnnnnnnnnnnnnnttgggaatttttttagaaaccccttgggtttcccccnnnnnnnnnnnnnnnnnnnnnnnnnnnnnnnnnnnnnnnnnnnnnnnnnnnnnnnnnnnnaaaaccatatggcccccgtttccctttccctttggggccccccgccccaaaacaaagtttttagaaaaattttttggggggcgcggggggcccccaaaaannnnnnnnnnnnnnnnnnnnnnnnnnnnnnnnnnnnnnnnnnnnnnnnnnnnnnnnnnnnnnnnnnnnnnnnnnnnnnnnnnnnnnnnnnnnnnnnnnnnnnnnnnnnnnnnnnnnnnnnnnnnnnnnnnnnnnnnnnnnnnnnnnnnnnnnnagatgttgagagtcagttttattgccatctctgggaggggctcaaatccgcccaatctccttcagcttggccaccaggtcctcagtggtctccaccttgacgccggccgtgcgctggggcgggtcctccacactgatcacagagagcttggaggtcaggtccacacccaggtccccaggcttgatcacctcgatcttcttcttcttggctttcatgatgttgggcagcgtggcgtaggggggctcgttgagcctcaggtcagctgtcaccacagctggcagctttcaggcgcagggtctccagggccccatcgatctcccggtccactttcaacttgtccccctccagcgtcacctgggaggcgaatgtgccctgtggccagtcaagaaatccagctgtcatctgccctgtctggttccagtcatcatcgatggcctgtttgcccagcagcaccaggtccaccttctccttctctgccagcttggccaggacccgagccacctgcaggggacccaagcgttctgcttctgctcctt

SEQ ID NO: 438811 - DNA, 1005 bp, Homo Sapiens
  misc_feature (32)..(33): n is a, c, g, or t
aaacagtatctgtgggtaaagctaacaatganncattttcccccctattactaaaacaaatcatgtttacacagaaacaaggaagacaggtttatcaaatacaacaagcttatactgtttacatccctcattaaaaaaaataataatttcatacttttcacacactgcatttgaaatttacatttttcccatcaggttggagggggaggataatattgtccataattccaaggattctgataattgtattgataccacgcactataattatatacagcttggtttgcctgtaaatcaccatcaatcatctgtgtagatgatgaagttgtatcttctgtatgtgctttcttttcttctggttcttctgattcattttctgctttcctttttaaagaatcctgttctttcaggagtgtttgatgttcatcataagcattcagaagcttattaacatcggaaccaaaatcttcaagaaattccacttttctctgagaaaatgtaattctcattttaataggtaatgaaccatgtacagctttgtcaaaacaatttaggatattttcttcattttgtttgaggtcaccactatattccatttcaagtaaattgaggtataactttgtgttctctttgtctctttcgattgcttccaaaagcacctttcttgattttggaaggtttttctgtattttgaaaagatgccgggctagtttgacagcataaaatgaagattcattatttgatttggcattcttaatggcatcctgaagcaaatgttcagcttcttccagatttccatgccgtcgttctaaacttactcttcgtaaacgaaccattgccaatcctagaacacattcttcaaatgttttcaagatattcctggcttcattaatattaccctgctgttcctcaaaagctgcccaaagcatatgcaccatgggtttctttgggagatgtatagtacaagctctgctgaagacatgcctcactccttcaatgctatcc

SEQ ID NO: 438812 - DNA, 1056 bp, Homo Sapiens
ccaaagtttaaaaaaccttttttatataaacccccgcgcgggccctttgtcccaaggtttcccccggggacttccagccattctggccccgcccatttagggggccctttggggggacctttgggaaaggaggttcgcccaatttttctggggtacccagggtggggggttttcgcgaggttttcccggatgccgattattagactttcaagctccatggagcccagttttggtcccagggtccatcccaggggatgcaggggggcccttgtttagggggcctttgctctccagagaggaaagcccatttccggacagtgccctgctccattctgggaggctgctacccgatgtggccatggacggagctacctgaaaaaagggaaaggaaacccatgaaagtatgcttctggagagttgcctgttctcggggatcgctgaagtctggcaaagtaattgtattaagctgtcgtctgtcagcaatggttctatttaagaggctgctcccacgtccagaatcactggggttggtgaggttgtagcaggatttccatatctgcagcatgtgcttacaagtcagcagtgcctcgtccgggcctcggcagagtgactgcaacttcactttggaaaacagtagtatgaaattttctgggtattcactcagggccatgtcgatgatgttcagagcgtcatggtaatgcttctgtgctgacagcaggagggcaaggaggtgcagggagttggcatcgtcaccttgaagctgaagagcttggcggacataccccagagcctctgggatctgtctggagatggcaagctgcagagccaggtagaaagctgcttggtgatctgtgggtgacaggctgtgggccctctgaaatgcaagaagcgcctttctctgtaggacctcctgcatccctcgcaaagaagcgtcagtggcctgcagactgtacgtgagccccagagctaagtagcctttggccttgaactctgacgttttctctcccacatcaacgacagtttggcaaactttatcccgaaattccggaccggtcc

SEQ ID NO: 438813 - DNA, 527 bp, Homo Sapiens
  misc_feature (79)..(79): n is a, c, g, or t
  misc_feature (90)..(90): n is a, c, g, or t
  misc_feature (117)..(117): n is a, c, g, or t
  misc_feature (491)..(491): n is a, c, g, or t
tgaatgcctaagccctcttcaataccaccgccgcgccctccgtcccatgcttcccccggaacctcaacaaatctggccncgccatgtaanaggaacattgtgggaacattgggaaanaggttggcaagcttcttgggtaacaggctgtggcttctgcaggcttcccgatgccgatatagacttcagctgcatggagccagatctgtgccagcgtcaatcccaggggtgcagcggggccctgcttaggggcactgctctgcagagacgaagccacttccgacagtgcctgctccactcttgaggctgctaccgatgtggcatggacggagcctgtctcgggatcgctgaagtctggcaaagtaattgtattaagctgtcgtctgtcagcaatggttctatctaagaggctgctcccacgtccagaatcactggggttggtgaggttgtagcaggatttccatatctgcagcatgtgcttacaagtcagcagntcctcgtccgggcctcggcagagtgactgcaacttc

SEQ ID NO: 438814 - DNA, 597 bp, Homo Sapiens
aagctgtaatatatgatatcgtaatgtactttcctttttaacagcaatctaaacttttaaacatgtagcagttatttttgtctatttgctatacctgaaatttataaaatgtcataaggatttatttgtgtagctcttcctacgtttctgtctctagcaatatggttgattagataatctgaaaacctttcttcttcaaatcacctagaaattatagctaaaatataatgaacatccagttaaatgaacagctgagctttcaagaaagtaggggaaacaaccaagatacaaaagtgaagaaaaaactgaaaaacaggagtttgtgagctgacactatggctgctccatgggtggggataagagttactgttctgggcattgcagggatttgagtcttaatgcccatatgagaacaggttacaaggcctggagactgtacaaagtgaggagttggattcaacatctaagcataaaaccaggattcttaaaggactgtaccttcagcaaagaggtagatgaggagaaaaaccaatctacagcacatggagacttcaaagaagcctgcttgtgttacttgtgggcactgcataaggcgtt

SEQ ID NO: 438815 - DNA, 549 bp, Homo Sapiens
  misc_feature (533)..(533): n is a, c, g, or t
gaggccacaggctctatttctttataagagctctcttcttttcttttcataattgccagcttagaactggccttgggagaagagacttctcctattttgtcagctgatgacttggaatgttgctgagattcttttgaactttcatatttactttgcttcctaggactgtagctctttctttcatctgaaacttgtgctgtttttactttatgaggatatttatgtttttctgctttacttaaattggcttggacagatgaaaacgtttctcccgcttctgtgtcctttcgagcctttttggtcttgggttcttcatccaacatggctaatgttctggcaaactcttcatcttcatgcaactgcctctccagctccgcatcttcatcaagctgtaattgcttggcgatggcttcatcatttaatccagactcatctgtattttgtgaaagctcttttcttttgcttgccaccatcttcttaatagatcttggacacttccagttccaaataatcaagacctgtggtgggtgagnttttattgtgataaag

SEQ ID NO: 438816 - DNA, 991 bp, Homo Sapiens
tcgatgacccccttccgggttttcccggttacctttacatggttggatattgggaatcctccatgttgtcaccgggatcccgggtggtggcatcaattttaatcaccctgttatatgaactccccagaatgtcatcttttttgcttccttaaaatctgacaaggtagtaggtgaggccgaactcaggcagtgactgccacgcctggatgaaccgcagcttggcttcgaccaggggcatctgggccacgttctggtgcgcctccaggatccgggcggccagctgtttggatttgtgtttctttgcacaccgtggtgacacaaaacattctgggttcatatccatgttttcgagactggaagccacctgagatgcagagttcctgtttttcatcctcagaaatgaaaggatgttgaggacctctggctggtaggagctgtctgccatggttttgcccttcgatgccaacatgcaggcagccatccattgggcgtattgattctcatggtcacatctcaaatacatttcattcataccatcggcaacagggattagtaacttgattccaaattttcttcctgctacatttacatcgggcacaacttcgcagcctctaagatttagtttttctagtggttctccttgttcaagttccttatttttaaagtatgctatggatgtgtctttaaagataaaccaatattgtttgaaagcttttggtaataacttcttgggcctaaataatttgagattatctgcaagtttagggatatcagtaatgtcctccaaaaggctgtccgcttttccaccttctagggttacttccaaattagaaagcgccgcttctatttcatcaacctcggactcgcctgcaaaatcctgtgtttcagcagacaacgacagtttgctaatgtggtactgtagagctgcaaagatcaacatttcttcctctgtgcaatcaatttcttctaagagaatggcccacctggcttg

SEQ ID NO: 438817 - DNA, 449 bp, Homo Sapiens
  misc_feature (339)..(339): n is a, c, g, or t
  misc_feature (345)..(345): n is a, c, g, or t
  misc_feature (386)..(386): n is a, c, g, or t
  misc_feature (401)..(401): n is a, c, g, or t
  misc_feature (431)..(431): n is a, c, g, or t
aattgcaactggacttttattgtgcagttacaacaacaaatgttttcagaaaaatatttggaaaaaatataccacttcatagctaagtcttacagagaagaggatttgctaataaaacttaagttttgaaaattaagatgcaggtagtgcttctgaactaatgcccacagctccaaggaagacatgtcctatttagttattcaaatacaagttgagggcattgtgattaagcaaacaatatatttgttaagaactttgtttttaaattactgttccttgacattacttataaagagtcccctaactttccgatttcctaaaactatggaaataccaaangtatangtttcccccattttggataaaaagggccaatggatacccgnggtaagggatataangcggatccatggccaaccttccattccagnggtggcccggtttttaaa

SEQ ID NO: 438818 - DNA, 847 bp, Homo Sapiens
  misc_feature (781)..(781): n is a, c, g, or t
agaagcccatgataaagggcaattatactgagtagactatatgcgtatcatgctacttcattcagtgtgtctgtaatactaataaggcagtttgacagaaattatgtctttgggactaaggtgatagtcatttttttcaccttcaaaattgtgctttaagtgctgataaccacaggcagattgcaaagaactgataaggcatctaaagtagagaatgttaggatcaaaggcatgtaactgaaaggtaacaccagtacatgagcgacaactggggaaggcagcagtgaaacatgtctgtggggttaagtgagtcattgtaaataaggaatctgcacatttattttctatgataacctgcttccatgttgccacctggaggctctttgttgtgctggtagaagcccatttgcccttactctggatgttccaaatgtttccctttccagtagctagtcagtctttcagtcatctgttttatatgtctcctgccttctcagacagtccttctactctcttttattgttcatgaaagaccttcaaattgaagtaaagcccatatttcaatataaagatatgaaagaaggctaatatcctatcagtgatattctcatccatcttgtcatgaaggccataccatgataactatcacatgtaatgtaaatttgtttattcatctctcttattcatttattcatcttttttcatttgtttattcatctttctcccatttgctcctgtcttgatttatccactagctcactgattatgcaagccttgtagntcatatatgtcatgggttaacatacaatacagcatatatttcagacataagtgtttcagaaatatt

SEQ ID NO: 438819 - DNA, 779 bp, Homo Sapiens
  misc_feature (752)..(752): n is a, c, g, or t
  misc_feature (757)..(757): n is a, c, g, or t
ttgcaggttttcaattactttattttagaaaaacaaaggtttacaatttgtgccataggcagaatatcatgaattcaacaagttagtaatgcagactttcaaaaacctctatagattagtccaaagtagaaaattattttttgcccactcttggactcagacacattcagaaaaaatatatatttataaaaataaaatgtcaagcctaatcccaccaattgatagtcttaatatcctacactggtttatttgatcatttaatgcataaggagtgttgaatgatttttccctgtcctaactccatgtcgtatgaagcaatgatgaaaatatgttactttttgcaacaccaaaataaaaaggtcccaaagcaaaacacacacaaaaagtcactaacaatatccactaaacaaaaacagtactgctaattcacctgctcatatagacccttccttcaatcccccagatacttggcatttaaatgttatttctaaatcagataccaggaagcaactatgtgagaaagaaaatgaaaattctaggtctaatacatgttaaacaagtttcaggtaatagtagctgagaaaaatattgatgcacataatgaaacaaaaagaattgccagatataatgtggtgcacagggtactcgataaaaacatgcactttgtctcgctgaaatgtccttaaatattgtctgagcaccaaattctgcaaaagcaaggatctagaattccgaattttagaagttatagnagagncctcgtgccgaaaactggggtt

SEQ ID NO: 438820 - DNA, 1143 bp, Homo Sapiens
  misc_feature (413)..(428): n is a, c, g, or t
gaaagtaaaaatttttattttgattgatttctcaatgtatagttcagtataatgccagtttttaatggcaaaaatttggttccactgaaactccataatgctacagagagctactactttttccaggaagtaggttaacagctagaaagaaaaaggacaatttcctagcagcatggcaacttaaactgcagatctaataggtctgcaacttttacactaaaaatggcacaaacagctggtgacacaagtgagaaatggggaacaagatgtgaacactgaaaagaacaatatatatactgtaaatatgatgaataaaccaaatgtagctataagaatcttaaaggatgattatagaaaagggaaccaaatattttcctcaaatgctttttagagcctttctgtagcgatacaannnnnnnnnnnnnnnnttatccaaaaatatgttttatacagataaatgtttctcaattaaagatgggaccaaagctataggtataacataaagcacattgtcttttgtaagactatttatccacctgaattttcaatttctttaaagttagtgcattaaatgttttccaaatataattacctgtcagtctttttatagatataaatcaagtaggcattatgttttaaaagtgtttgcaggttaaacttttctaagatgctgtgcatattaaacttattatgagccccattaagaatcattattaataaacatatcaaaaagggctatatgtcagattttcctgttcatagtaaatattttctgatttccagtttacaagtattgaaaatgcacaagaaagattttacttcacaagtacttttaagaatatactttgatttaatatgtatgttagtaaaactccacgtgttgtaaccattattatgtttttgtttttaaaatggggatgtaatactaataaccactacctataaaataaagcacacaattgttccggtgattttacaaatctttttttccaggtgtaaagtctacaaaaattccaaaaaattagagaacactgaaaacatattaaagtttgacatccaactttatagtatttccatgttaccctgaaagataacttaaaaaatatggccttcttagaacaggccactctgctattataaaaa

SEQ ID NO: 438821 - DNA, 935 bp, Homo Sapiens
  misc_feature (914)..(914): n is a, c, g, or t
ggcctgggtggcgatttcggcacgaggcaaagactctgataagatgctgagttttcgagcccatggcccggaggtccaggctcataacaaacggaacttgatacagcacaataactccacgcagacagacatcttctacacggacaggctggaagacaggaaggagccaggccccccaggaggcagcagctcctttctgcataagccattccctgggggacccttgcaggtctgcccccaggcctgtcccagtgcctctgagcgtagcctgagctccttccgctcagatgcctctggggaccgtggctttgggctggtggacgtgcgtggccggcggccactgctgccctttgagaccgaggtgggcccctgtggggttggggaggcctccctggacaaggcagactctgaaggctccaacagcggcgggacctggcccaaggccatgctcagctccacggcagtgcctgagaagctctctgtttataaaaagccaaagcaaagaaagtccatctttgaccctaacactttcaaacgcccccagacacccccccaaatagactacctgcttccaggtcctgggcctgctcactctccccagccctccaaagagggtggggcctctgacacccccaaaacctcccagaaggagcgactccattaagttccagcacaggctggagactagctccgagtcagaagccactctggtgggcagctccccatccactagtcccccgagcgccctggcccctgacgtggaccccggggagcccatgcacgcatcaccccctcgcaaggccagggtccgcattgctttcagctactaccctgaaggagatggggactcctcccacctggcgggccagaaatcctgtgatgaggacctcacctcccagaaggtggatgagctngggcagaagcgtcgccggcca

SEQ ID NO: 438822 - DNA, 601 bp, Homo Sapiens
  misc_feature (250)..(250): n is a, c, g, or t
gacgcatcaacgccgctgtggagccttcagagtcgctgtccaggaggctccccaaccccacaggggcccagctcggtctcaaagggcagcagtggccgccggccacgcacgtccaccagcccaaagccacggtccccagaggcatctgagcggaaggagctcaggctacgctcagaggcactgggacaggcctgggggcagacctgcaagggtcccccagggaatgggttatgcagaaaggagctgctgnctcctggggggcctggctccttcctgtcttccagcctgtccgtgtagaagatgtctgtctgcgtggagttattgtgctgtatcaagttccgtttgttatgagcctggacctccgggccatgggctcgaaaactgagcatcttatcagagtctttgatattttcaaaaatgttctggccactccacgaggagctctgagggaataccttcaggagggacagggtcagggagtcctggcagctgcgcagcagagattcccattcattcagagacttgttgtccagtgcattgccattgatcgcaacgatcctgtctcccacagcaagggacccttttttagcggcagggcttc

SEQ ID NO: 438823 - DNA, 747 bp, Homo Sapiens
agagtcaagaccaaaagtttgctcagcatcacactacatctcaaaattaatgttgccatcttaattttgtgcatttgtgtcagaatgtttagtttacaaggttgggggctctctttgcttcgagaagtaaacctaataccatttttttattgtttaaagctgcattcaacgtcaaaattaccttgggtaacttttgataacttacatgtgtggacaaagctaatagtggttttttaaacagcaccttgcctgaacatgactttaaagaaattaatatattgaaaacatgtttgaacccttattttaattgcaccattaaaacatttgacttaaattgtttgaccattccagttggtgtactgttctgatttttcgttgtgtaggccgatctgcctgtcagagtccacgtgtcctggtcactggtctttataattgttgtgcaataactaaaggctaaggactagatgcactatcgtgtaaagagattacacatgactgtaccatgttgcacttaatcaaatagtatgtggggatttaaaatcgcttgcattgtttcacaaaataaatatctcaatgtcaaatactagataagcatctaagtcatttctacggaatcctgttcagataggggcacaataaaatgagtacagagcaccggggccctcacctggcaatcgcagctttcatttactgcgttgatcactgcccagtcctaaggctacaaagccatcctcactacatccttca

SEQ ID NO: 438824 - DNA, 549 bp, Homo Sapiens
  misc_feature (23)..(23): n is a, c, g, or t
cagttgaataggagctggtgttngtctaagccctcctgcttatgccatgaggtataatgcctttttatatgttatataatgctcttacgcgttagctatctgaatgatagatttaataaaatatacctcataatattatggggaaaggatgacgactgttatagagaggaacttgggagtatcacttctgtaatccttatctaacctgaatctgttagcaggaaactgaaaaggcctgtgtatgacaatgagataaacaattttaatctcttagcaatgtcaagtggaaaatctaactacctgccagtagtttaagaaatggctaagagattttgttgggcacaaataatcctgagacccagattgctgagccaagggtaggaaaattggttttgctatgtgttacagctgggaagtgagaaggtcactgtttgacaaactactaaaaaaaccttatggattaaacattcgccagtgtaggggacattttgaatgtgttataattgatattttagtctatatgcggccgctgaacgctttttcttttac

SEQ ID NO: 438825 - DNA, 424 bp, Homo Sapiens
  misc_feature (100)..(117): n is a, c, g, or t
  misc_feature (399)..(399): n is a, c, g, or t
tgattaaaatgaaagaacgttcaccccaaatccttatgatgtggtttaaaaataaagagttatagataagaccctattttcgaaaacaaagtgttaaatnnnnnnnnnnnnnnnnnngggccccgtgttaccttttgaaaggttgagcgaaagtgagaatgcaaggttttcctgaacgacgttgcttagaggtaacgcggggctgtgatgtctgttaatgggcatccttgcaaaagatgtcgtttgttgctagtgacgtttaaggtttgaacctgctgttcgtatctactgcattttatgtagtaacacatttaaaacaattaaattgtgcttaactgcaatgttcctaaaagccttattttttttgtatttcccgggtccctatggaggaagtttaanggaaatattactgggctaatgtggg

SEQ ID NO: 438826 - DNA, 691 bp, Homo Sapiens
  misc_feature (658)..(658): n is a, c, g, or t
  misc_feature (660)..(660): n is a, c, g, or t
ggaaggtacaaagcaaaaccaagttagttccctgtctgaaaaggggcttagtatgcaggggaggcaggagctgctaagaggatacttgtgtttacaaatcgagctctaaccttctgtagtttccctttgcagacactttcctattctttgcatttccctaaaagccataaaacagaaaaggccattgtaccaagggcatttttataagcagcaaatatgtgatgttatttaaaatgttcaaatccaagatggctgctaggcatgcaggattctgtttcctgtgggcagttttcaaaggcaccttctgccttccccgcacttcccaagaaggctgtggtaactgcagaaatgacatcacgtcatgattacaagaggaaaatgaacaggaggggagggggcgaactcttaagcatactattttcattcaaatgctttcaatattaaagaactagggcaaagaaatatggaaaatgggatctgtgaagcagcattatttctgaatagcacagacatcaatggctcccctttccctgtgatggcgtttcaggcagggccaaagtgactgagccgtactccacagctctctaatcagatttttctgcaagcatattaaaagggaaaggaaggccaggtcagtggccacaattgtgccactgcncnccagcctgggtggcagagcaagctctgtctc

SEQ ID NO: 438827 - DNA, 652 bp, Homo Sapiens
gggggagatcacccctctaattatttctgaacttggttaataaaagtttataagatttttatgaagcagccactgtatgatattttaagcaaatatgttatttaaaatattgatccttcccttggaccaccttcatgttagttgggtattataaataagagatacaaccatgaatatattatgtttatacaaaatcaatctgaacacaattcataaagatttctcttttataccttcctcactggccccctccacctgcccatagtcaccaaattctgttttaaatcaatgacctaagatcaacaatgaagtattttataaatgtatttatgctgctagactgtgggtcaaatgtttccattttcaaattatttagaattcttatgagtttaaaatttgtaaatttctaaatccaatcatgtaaaatgaaactgttgctccattggagtagtctcccacctaaatatcaagatggctatatgctaaaaagagaaaatatggtcaagtctaaaatggctaattgtcctatgatgctattatcatagactaatgacatttatcttcaaaacaccaaattgtctttagaaaaattaatgtgattacaggtagaggccttctaggtgagacacttttaaggtacactgcattttgc

SEQ ID NO: 438828 - DNA, 426 bp, Homo Sapiens
  misc_feature (366)..(366): n is a, c, g, or t
  misc_feature (397)..(397): n is a, c, g, or t
  misc_feature (411)..(411): n is a, c, g, or t
tgcaaaatgcagtgtaccttaaaagtgtctcacctagaaggcctctacctgtaatcacattaatttttctaaagacaatttggtgttttgaagataaatgtcattagtctatgataatagcatcataggacaattagccattttagacttgaccatattttctctttttagcatatagccatcttgatatttaggtgggagactactccaatggaggcaacagtttcattttacatgattgggatttaggaaatttacaaattttaaactcataaggatttctaaataatttggaaaatgggaaacatttgtacccacagtctaggcggcattaattacattttattaaaatactttcattgttgngtcttagggtccttggattttaaaaccgggntttgggtggactanggggccggttggagg

SEQ ID NO: 438829 - DNA, 1673 bp, Homo Sapiens
  misc_feature (33)..(33): n is a, c, g, or t
  misc_feature (39)..(39): n is a, c, g, or t
  misc_feature (62)..(62): n is a, c, g, or t
  misc_feature (71)..(71): n is a, c, g, or t
  misc_feature (98)..(114): n is a, c, g, or t
  misc_feature (636)..(644): n is a, c, g, or t
  misc_feature (708)..(768): n is a, c, g, or t
  misc_feature (929)..(929): n is a, c, g, or t
  misc_feature (989)..(989): n is a, c, g, or t
  misc_feature (1097)..(1097): n is a, c, g, or t
  misc_feature (1129)..(1129): n is a, c, g, or t
  misc_feature (1137)..(1137): n is a, c, g, or t
  misc_feature (1273)..(1273): n is a, c, g, or t
  misc_feature (1470)..(1470): n is a, c, g, or t
  misc_feature (1509)..(1510): n is a, c, g, or t
  misc_feature (1515)..(1515): n is a, c, g, or t
  misc_feature (1633)..(1633): n is a, c, g, or t
cctcaaaacccccaaatgccctttgggaaaaantaaggngattacgggtagaggccttccgnggtgagacncttttaggggtacacctgcattttgcnnnnnnnnnnnnnnnnngtaatccttttagcaacccccagtattcccttcacctatttcgcttcctgcattagcaaattttacttacagtcaaaagtgcagatttatactcctgacgtgtctcattcacagctaaataataggccataggacttttggtaggtttaaacttttaattctgtatttcatgattataagtcttgctagaattttttctaatctttagtagatttgattaaataatgattcacagaatttagtaacagaatcaaactaagccatgtatgagggtaatcgagatgaggatattaactcaaaagaaatagggtgatttttaaaggattaataaaattctgaaatgttaggtacaagaacgacaaaagaacacgcccacgcgagacactgacgtaggagcgcccccgacgcgcgcccgcgcacaaccaaccggcgaactaagtctggggggtgagggtggcagggggcgccgtagggaacacgttagaaaatcaaccactcactgttgagctttgtgccggccgnnnnnnnnngccaccctcgaacagaacatttgtttagtaaccccccctccgtcgcggagcgcccgcggcccgnnnnnnnnnnnnnnnnnnnnnnnnnnnnnnnnnnnnnnnnnnnnnnnnnnnnnnnnnnnnngcagaggaagcggctcgcgcgggcgtaggacggtcggaggtgcgcgcgggctgtccccccagcgccacccacaagaagaaaaagaacaccctctgtaccatgagagcgtactcagatctacgctgcggagagctgcgcgtagctgtggaacacaaaacaantgtaaccccgatccactcaagtgcaagtagacttctctgatcgccgtcaaggatgatttntccacctaccattctcacgtgagatgtggggaggatctcccatcacgtctcacaacagccgccaccagcgaggaaacacaatacaatccgaaatcgcgacttcgcgantgcgtttatttcatctattaactatatattgntggtgggntgaagttcgtggtttgtctcgcccgcgtgctacggcatgcggacgagcctcctatatctcccctcctcccattccggtacgagaaacctgacgatggcgaggtggcgggtcgccataatgaacccacccccacgcnacgcgctgcccctactcctctctccctgctcgcgtccccccgctccacaccaagtcgcggcttttacccacgtcgcccgcgctacgaacagcccgcaccgacgccgactatgacttgtgcgatgcaacaactcacccccacaccatgacgcccccgccgccaactacaccctgccggactatgcgcccgcgctcacncgcccttactgtccggccgcccgccgtcgtgcgtggagnncctgntcaacacaacatgtaccagctacccgcgccgccccgccgcagtgagacggtgccacatacgacgacgagcaaacccgcgcggacaactagagagacaatcaccgtagcaccctaactnagcttcctcgcccccaacgtcggccttttcatctatccga

SEQ ID NO: 438830 - DNA, 1137 bp, Homo Sapiens
  misc_feature (470)..(478): n is a, c, g, or t
  misc_feature (1087)..(1088): n is a, c, g, or t
  misc_feature (1100)..(1100): n is a, c, g, or t
  misc_feature (1106)..(1106): n is a, c, g, or t
  misc_feature (1116)..(1116): n is a, c, g, or t
aattatttctcttagcagatcagccatccctctagggacctaaatactaggtcagctttggcgacactgtgtcttctcacataaccacctgtagccagatggatcataaatgagaagtgtttgcctattgatttaaagcttattggaatcatgtctcttgtctcttcgtcttttctttgcttttcttctaacttttccctctagcctctcctcgccacaatttgctgcttactgctggtgttaatatttgtgtgggatgaattcttatcaggacaaccacttctcgaactgtaataatgaagataataatatctttattctttatcccccttcaaagaaattacctttgtgtcaaatgccgctttgttgagcccttaaaataccacctcctcatgtgtaaattgacacaatcactaatctggtaatttaaacaattgagatagcaaaagtgtttaacagactaggataannnnnnnnncatatttgccaaaatttttgtaaaccctgtcttgtcaaataagtgtataatattgtattattaatttatttttactttctataccatttcaaaacacattacactaagggggaaccaagactagtttcttcagggcagtggacgtagtagtttgtaaaaacgttttctatgacgcataagctagcatgcctatgatttatttccttcatgaatttgtcactggatcagcagctgtggaaataaagcttgtgagccctctgctggccacagtgaggaaagtagcacaaataggatacagttgtatgtagtcattggcaacaattgcatacaattttactaccaagagaaggtatagtatggaaagtccaaatgacttccttgattggatgttaacagctgactggtgtgagacttgaggtttcatctagtccttcaaaactatatggttgcctagattctctctggaaactgactttgtcaaataaatagcagattgtagtgtctggtttggtttggacagtagtgctttctatcatattgttgtgtgcaatggtaatttgttctactggccaaagcctctttcagcagtgccttgccatcatgcttaannagtttggctagnatatcngctggatggngccttgaactccggcaaggat

SEQ ID NO: 438831 - DNA, 2186 bp, Homo Sapiens
  misc_feature (375)..(375): n is a, c, g, or t
  misc_feature (596)..(596): n is a, c, g, or t
  misc_feature (668)..(668): n is a, c, g, or t
ttgccattctgccgtagctagatgttctgtggggtttgttaacatggaactactcagctttctttcagtcaacccataagcaaatcagataacccactgactatgagaattactttatatagataattcttgactgtaaaacattttgaccagtgttttacaacatgtacataagaatccccataattcaactagagatttgaagaattggcttgtatagttataaccaccacagtagaaacatttctactttgagagaatttcagtattctcttaatgttgtgtaattgattaggtaactaaaaagcgcaaattgttggcaggttttgctgcacattgttctatgtctttgttggctggtgtattttataaacnaaagctgcctatgtttctttttaaagctcgcattcccagaatcagcttaggcttctatgaattcagcctgtttctaaaagctgaaaatctcagtttaaaaatcaaaatgttaacacaaagctaagattcatcagagcccaccctattctaaggaaccacaataacttactctggccccagtgttaaaacgatctttcagatttagagtgactatgtaagantttaggatttcctcttttccaggcacattgtaaactgtgtctacagtttatccatataacttctcttctganaactgaggagggtcctctgttcttccagttcacgagggcagggggtttaaaacaagaatgataggccaggaaggcagtggggatccaccatcacatggaactgtaagggcctataactacaaaaaactgaccaatctgggttgccaaagcagccaggcttatgctgaaaccggggaagtctgacatatgcaggaaactcttttgaaataattttggtgcccaggccaagtagaatgagatgagactgagtttggcctctggctcggtttcctttctttggtctgatacttcatgtatttgaatatagttaaatcgtattatttttttcttaacagaaatatttttaaaaatgaaaaagtactcaaaagtgagaagagttaacttgtcaaagcagaatggttctctttgacccactctggtctattgtgtaaatatttatttagactattttaataatacatattatttaccccactgtaacatcatgtaaactaagtatgtttttaaacaatttttaagacttgtaattaccctgaaaataaggtttataatgcaaagaccagctcctttgcggtggcagtgctctagggctgccattacacggtcttgtgatgtgactaaaagccactttgtgactcccttcatgtaatcctcttttcctccccactcctccacagagggcagagctcaggacatttgccagttccagatctctttttcagcattttgatggaattaatttacacgtaatgagggaagtcctaggatggatagaaaaaaagcacttacattggggcacacaggaaatcccagtgtctagcaatggtttggtttgcagagaacacagcctgatacttaattttcttaaaactatttttaatgatccactaaacaaagcaggggatcctgaagctgatataaataagtctagctctataatccccaagttctaaaagttatggttagatgctattctgtgggttgctttgataattcttactaacacagattagggtataggcatctagagatgcactgtccactgtaaatactataatgagagcaacatctgtaatttaaatgtttctagtaaccacatttttttaaaagtaaaaagaaacccatggtattgatttaaatatattttatttaacccaatagctcaaaaacactatcatttcaacataggatcaatataaaaattattaatgagttattttactttttttcatattaggccttgaaattcagtgtgtattaaacacatctcaattcaaaccatcaccatatttcaagtctttgtagcccaattgtgacttagtgggtacccatttttcgaacagtggcagatcttatactcaattccttcaaatacattactccggttaatctccacaggtgttggccaactccacatttacttagaggccggattatctaggtctgtgaagatcctcaaggcctcctaaattaataatggaaacagctaaggaaccttgcgtattccccaaagcagaa

SEQ ID NO: 438832 - DNA, 1156 bp, Homo Sapiens
tttcaggcatcaatatttattaacacaagacaaaggaaacacattcaatgagttaatagaacactgtccagccagatgttaaatttaaaaacgtatatctagtctaacttcaaataaataaaaaaactttatacataattacacagtactgtagtttgaatttgacacgggtaaatatcttgacagaaagtaaacaaaacagcatttaggactaaaaaattattcttatatctttagtctcttcctctggacaagtaacatggcccaactacatacacctaaaccagaaatgtcgtatgaatgataaagaaaaggcctattgtgtatttggcgcattgcagcttcttgctccaaatactcttgcttttacatcaaagcagacaacaaaaacaacactaaggcatagatcttgttggagtttgaggatgaggtgataactcctcattgctttagactaaaagattcctggatattcaaggaaagtaatttatttggccaagatatagagcaccatgcctggggcagagaccttaatagaaaacctaaggcctcgggccctcgttgagtcaacaaaagcattaagcaaggattgcccagggactaaagtaaggagacagactcatgtgaccaagacaggcaatggtccctaaacagcctgaggcaacacaacttcatgaggaaaggacttggtactggggagacctggccctttatgaggcaggaagtaaagactgtggattcactgacactgattagcatgctggtccttcccagggtctcactgaattcctaggatctaggaattttcctgaggcagccccttcctgatctacttcagttacttctgctgagaaccagaaagaggttcagaaaccttcagaccaatagatttctcttaactgagacagagacttgtttagtttttttccacagacattaaaaacccagacagaatatgttccagaggattggaaaggctgtgtttctattagtcatagtgtttcaggcctgccttaagaatcagttctaccacaaaagtgctacttaatgtggatagagtaggagcactgtgtcatcaagagaacattttcttactcgagtctgtggcagagtaggctttaaatctgcaggtgatcccacaaacaccatctaagca

SEQ ID NO: 438833 - DNA, 367 bp, Homo Sapiens
  misc_feature (27)..(27): n is a, c, g, or t
gtaggagccactgtgtccatccaagangaacattttccttactcgagtctgtggcagaagtaggctttaaatctgcaggtgatccccacaaacaccatctaagcaaatgactgggctctcctctcccctccacaggatgctttaccagagttactgatgaagttcctcaaggacagttcttagccttccttcctccatgagcagattctggctttgggggacatgcaaaagatcaataaagcagaaagcaaaaaataaattagaggcctgaggaactacaaaactagataatcagcctctaagtaaatgggagttggccacactttgagattaacagagtaatgtatttgaaggaatgagtatagat

SEQ ID NO: 438834 - DNA, 472 bp, Homo Sapiens
  misc_feature (371)..(426): n is a, c, g, or t
actgtgtccatccaaagagaacattttccttaactccgagtcctgtggccagagtaggcctttaaaatcctgccaggtgatccccacaaacacccatcctaagccaaatgactgggctcccctctcccctcccacaggatgctttacccagagttactgatgaagttcctcaaggacagttcttagccttccttcctccatgagcagattctggctttgggggacatgcaaaagatcaataaagcagaaagcaaaaaataaattagaggcctgaggaactacaaaactagataatcagcctctaagtaaatgggagttggccacactttgagattaacagagtaatgtatttgaaggaatgagtatagatnnnnnnnnnnnnnnnnnnnnnnnnnnnnnnnnnnnnnnnnnnnnnnnnnnnnnnnntggtgatggtttgaattgagatgtgtttaatacacactgaatttca
